United States Patent Application Publication US 2015/0376612 A1 - sequence listing, part 24

SEQ ID NO: 59724 - DNA, 1059 bp, Homo sapiens
atttgtgtactttttgggagaaagtactacgtaaaaccagtgcttaatgattttgacaattaaattatatgtgattattatcttcctatagtgttttttttttttagaagagctactcagatatagcagattaatatcactcaggcacctgggtttcctagcccagcaattctgaatgtacagagtacaagcatataatgccaactggtaaagtcagagctccagatgacaaggtacagcatgtaatcttttgcagtctattgacagcaatctaaataaaagcaaaggaagatgcttccagtactacaaactttatgggaacttagggtctctcaaagccacactgtttgggtcactagcaggaggtacagtatattaaagcaagcagctcagcctctcactagtggtgagatgtatgaaaatcctggcaatgccagggggaaaagaatctatgagtcttcccttcggtcatctctcctatttcttgcattagttttttcagggttaaatacacatctcacagaagagctagctatatatgggctgggtggtcttcagtgaatctgcaaatgtatcaaacaaaaatagcaagctggaactggaataaagggtcagggaatacaggaaagaagaaaacaaagggttctaggtgttcagaagtcaaatacatctcagggctaaaaaaaaaaaagaaagaaagaaagaaagaaaaagaaatctgagtgtgtcctgtgttctacctccctgtagcttatgaattctatagaactaaaaacatcaaaccaccaaagacagatgattaagaaagaaaagacagatgaaaatgtgacagtcattgaactctaaaattcaaagcaattattactcagagttctagagatttcctatgaaaggtgagtggagataaaattgcataaaatggaattacgatcctcctctgcaatctgaccagacagaggaagaagacccaagaaaatgtcaaataaacttttgctcaccaatcagcccatgccttgagacttttaatccctctttttccttctttacttttattagaaa

SEQ ID NO: 59725 - DNA, 1050 bp, Homo sapiens
tgctgtgttattagtagtccatcttttccccatctttgttactgttccattgcctggattttttcctaccatctaaacttcaggacagtgtgtctaagccaaaggggctatctacatggtaaaaacgattgatcaccagttaaccgtaataaaaatattgtgcctacttaaaaaaaagtaagtggaatttatttaagaatttgagcgctgcagtgtttccagtttcaagatggtctcctaagctgtttagtgaaacttcttccacctttctccatccctctaggtggttatttatttatttatttatttatttatttatttatttattttttctgaacctggatgtaacacattaaaggacccgacgcaaatagaatcgaaggcattctaaaatggctaaccgtacactgaaggatgcgcacagcgtccgcggcaccaaccctcaatatctggtggggaagatcattcgaatgcgaatctgtgagtccaagcactggaaagaggagtgctttggacttatggctgaacttgtagtcgataacgccatggagttaatgtttgtgggtggcgaatatggtggcaacataaaaccaacaccctttctgtgtttaatcttgaagatgcttcagattcaatccgagaaaggtatcactgcagagtttatagaaaatgaagatttcaagtatgtccacatgttgggggcactttacatgaggctgatgggcactgcaattgattgctacaagtacttggagcctttgtacaatgactatcgaaaaatcaagagccagaacagaaatgggggtttgaactgatgcatgtagatgagtttattgatgaactggtgcacagtgtgagagtctgtgatatcactctgccccggctacagaaacgctaggtattagaggaaactgagcaactggagccttgagttagtgctctggaagaggacatagatgatgtggagtccagtgaagaggaagaagaggaggatgagaagttggaaagagtgccatcacctgatcgcctccggagaagctacggagactt

SEQ ID NO: 59726 - DNA, 1141 bp, Homo sapiens
ctgggcctcaagcacctctcccaccttggcctcctaaaatgctgggattacaggcgtgaggtaccatgcccaacctaaaatttatcttcactttgtctactttctctctctctttccaagccaccataaactcccacctgaactgttaaatggcctttgaattggtccttcccacttcctcttttgcaattcattctctaggtagaagtccaaatgatctctgaaaagtcatccatcaaaatattgtttttttcataaaatcatgtaagagtttcctattgcttagaataaaatcaatgcaatgcactttggttccaagggctgctttcatctacctctgcagcctcatcacctgctactttctttctcatttattttgcttctgacacaccggcctttctccgcacttacttccacagaaagttctcctttcaccaccctattaagtaaccccccaacacacttcctatcacatcgccatatttattgtcatctattttttatttgttgatttataaatgatctgttcccttcccccttagctccagaacaatgtctcccttgcctgtccggtttattcctccatttgtaggaccctgaacagaactggcagtcaataaatgtttgttgaatgactatatgagcccccatttcagagataagaaaactgagatctggtctcctactctttgtatgtgttcttccttctatttgaaagcccagtgtcatctctctgctctttttctcccctaccaaactctctaccacttgttcttctagatccggattttgcaaactacagcccacagacgaaatctagatagtggcctgtgcttataaatatatatatatatgaacacagccataacatctatttatgtgttgtctgtaccatttttgtgctacaacatcacagttgagtagctgtggcagagacggtatagcccccaaactgaaaatatttactgtttacttttatagaaaggtttgctgaccactgttctatacacatcctaggtttctttgataccttctctgccctgaagagatttatgttccttctgttggttcccaaagaccccagttttaacccctatcctagcatctgtgtcatccaataatataattgactagaggactt

SEQ ID NO: 59727 - DNA, 1153 bp, Homo sapiens
tttgaagtgtttttttcagttgagattgctccgttaacagcacatgttatcagctgctttccgagaggaagaattcatcccacattggctttttagaacactgatgttatctttgatctgggcagaggtattattttaattgtttaatcttgctgtttaattgcaatttgctgggttgagataactttggcatctgttgatgagatgcagtgagctggggaaacaagacccttgaaagacaagataaaaaggtgatgggatttttggatatgaacctagtaattaagatttcatgggatcatttggagtgttttccacttctcagtgtttggttgttttttttttctcccctgacagctacaataacactgtatttggcctctggtaaaagactgcaatatccttagcttttttacataaatccccaaacttcatttctctttaccccttccttacttttattaaaggttaaacactcgtttacttagcataaaaagacaggttacgtttggcatgcaaaatgatctgatacagctgagtgtaatacagccagcgcccaatatgacccagctcttgggcaaaaaatcagggtagcgatcattgttgagacttatatgtagattataatgggaatatgatgtcattgttgaattttttgtaaaaaccgacaaaaatgaaaacaaactctcataaatgttaagcagtactataagcattccgtatctaatttgcatttaaatggaaaatgttatattttcaacatgagtcaaggagcaaaattaataagtcatcaatgttgcttatgttcaatgctgcactttacccaaacttaataggtcattatttccactttagagtattaccgtttgggagattttgtttcttcacgggagggtcacattttcgctttttgttttcggattaggccatcacaaagagttagatgtttgtcagtgtaatgtttgttttacagaaccacagaagggagggtttggaaactactaatgatttccagttcattagcacctacaagttctcatgcatcctgtttgtttcctccaccaaggaggtgccgagtaatataatgaagccagtatcagtggtgtgctacttgtgtagcagtgcagaaaatgtatttttatttttccttaag

SEQ ID NO: 59728 - DNA, 1208 bp, Homo sapiens
ttgatggtatgaatatggagcagagaggtctgtagacctggcagccttgggtggcctcataaggtgctcaggccgcagaatgcctggaggatgtagatggagagagtccttggggaaatgacctagacaaggaattggtgatttttgccttatgtggtggtgtagggttaagacaaggggtttggggtatgggttatctgtagcatctatgtggtgtccagctgcagggtgtgtcctggttattttggtggttaataaaaaaggcacttctttattctgatgtagctgatagggtctttggagtgctaagagatcagagtctccacagaatgtgacagtttgctcccagtgctgcaagtgacttgatgccctagatcagacagcacagattctgtttggaagcctaaagcctcggtgtgtgaatccattgttgaggaatatcctccacgacgggccaggggaatatttggcacctactgtagctgagagtgtgatattgactgtggagaagctctctgggctgtgaatgtgacctccaaaatgcagactcttgcctctcatcacacagcactttgcattagggtgaaccagggaactttgctggaggcaggggggcctttggcaatatcaaagatgactgttgttgctgagattcttgggaagggaaaactaggtctgtggctgaaagctggcaaaatctttggagaagagggccagccacacagatactacaaatgtttctgtacaaattaattggtactttgtaattagcactttttctcttatcaatgtccaagaagtctgattaactttataggcagactttcagttgggccaacagttttaaatctgcctgttgtaaaaagtgaccaaaattggacttttgtcacctcagaagccacgtgattggccacacttttatcttgcctctctctcagtctcgtttttcaggtctcctaaggatgtgctacttttgttccagatttgtttccagatgcctgctcaagtaataatcgtgcagaccccagaagccagaaaacattttccagtgtcaaccaaactaattccttgccaatcatacgctgctttttggtgtgtgtttcttttaattctgattactaacactttaagggatgctgccttcctgtggttacattttctgaactattttatgagattagttattcttgatttaggatataccatgg

SEQ ID NO: 59729 - DNA, 1050 bp, Homo sapiens
gtggacacttattcttcatttatgataacggtatattttatgaagaggtttctttggaggatttcattagacacctggcattttcccccattaacttccaacttaaaaatttttgcatatgacttagacgaatgcttggccttctcaggtggcgctacgccttcttgtgaattagaaaatggttctcaggtggcattttgtccccacagcccacctcagttgatgaccttatgcagtatcctttctacagtaacatccgtttttactccctcctccttaagtaggcctcgtaagtaggcaatagaataaatgagcctctatgcaggatatcagtggagtttcaatgatggacagctgtggccagctgacatgtggtacctggtccatttcaaggatcattacactttcagccactccacagctttgtgctcaagtgcataaacatttgatgggattctgtgttttcagcaaatcataaatttctgtctacttctagatacccaatgtaaaggaagggataatagaaaagttagagtagaattcatgcatgggttggcctaacccacaaaccatttcatactgaacattagcttgtcgaaatgcctttactcttggcaggacacaagcgccataacctaagaggatgtgatttgagtggagttttcatgccctgtgtgcttattgtattcttgctactgatgcaaacattatctataattacattttcaagtgactgaaaattgcaggctttgtggaacaaaaatacagccaaagaatggaatgtatattcactccaccctcattataaggctttcagaaatcagactgtaaggcccaataccatggctctcaactacgtgatactaactccattctctgatgtttgaacactttgtcaaaatgctgggtttccaatgatgatcgtataatttgaggaaaatgctattacccttttagcgcttcatttgctccattgttgactcaatcacagtggcacctcctcacacaagtcctctatttccaccctgtgaaacaaacacaatttgattt

SEQ ID NO: 59730 - DNA, 1163 bp, Homo sapiens
cttcacagctgggaggaggagaacacagtgtcattcatgcatcctcagaacattaccactgcggaggactggcagtgtccttcggggaccccgttgcccgtgtgcatgctcaggggcaccataaacacttgctgctggttccccatgccacctgctggttccacatgccacctgtggcctgtcaggtgctcagagggccttctggggcaggcagtatttatgataaatagtttcatcaggatgtgtggctcagctgggcagctccagctttcttgctccctctgggtttcctgacaaactggcctcctgctaagggcagggaactgaatggcactgagaagagttaatgagccacagaaaatgtggcgttctaagaagagaacagtatttgtgtcccgaactctttgtccgtgaagtgttcagagagaagtccagtgtaatgggcttaaaaacatcctgcttgcactgatctcttttaaatggtgaaagaaaatgcaacatttaaaaatcattaaactacattgtctggacattatttgggcttgggtttcagatacttctgggacatgcgtgagatgagtgacactgctgcagaagtcatggcgagcagaagacatttgtattattggaacctggcctggcttgaacatggagtgtcggttctaatttggttctgctggactgtagcagctcctgctgctggtggggagccagtcatcttggattcatagctacgtgcagacactttctgtgcattcttactctttaatattgggttgagcacttagctctgtagggcctgtttccgtgatctcccatcagtccctgcctttccattccaacatcaccactctgtctccagatgatcgtgcagcctcctgtcttctctctgtcaccaatcccttccaccctgcattgccagacagatcttaaggcctgtctgatggggttgtgcctcttctcacaatacccaggggctgcccttccctgccttgcatgcagagctctgcagattatgcttgagcacaggccctctcctcccctaccattcactcactcgcccactgggcctcttgtttgcctgcctccctgctttcctcctgaatcctcctccataaagcttccactgtgaggaaaggagtgataataataaaactccgaac

SEQ ID NO: 59731 - DNA, 1055 bp, Homo sapiens
attctgtatctagtactacagtttcctcataatctgcatttcatgaacaggatcagattcctgtgtttctgagtcagaaaaactgagagaaagaataataaagggaactatttggctgaccgagtatcattttcctgggaatagttttaatgtggagacacaggtgccataggcactctcaggtgcatttctcctttcagaatctttcctcatccctgtgccctcatgcttcatacacttatgagtgactgggatagatgttcttggcttagatggtttttaagattcgttctaaacctgatattctgtgcagtggtttctgaagtggaaagacattctttgctaaatgtggcctaattttgatcccgattgctctcccaaactcttgatagcgtctggaaggcacggcagactattctgtaggcccagtgcaagtgctgtggccgccatcttgaaagctcttacatgtgagtcttttcttcttttccctctccccatctggagtatcccccatctagccatttctaaaggttccttttcagtcccaactgctgtattatttaaatcccatctacagcactcactacaagcaatgcttaaatctgcttttgtatttgaaaacaaagctttaaaagcagataggggagccacagagaagagtagtgattttgtgacaatggcctaaatccaagaagtgcatttagaaagtgcatttgtttgttttaaacaattggtttcagcatgtttgtccattgaaaatgggaatgctgagcccatgtatagataaaccctctgatggaaactggagatttttgttataggtagaagtgtgtgtgcaatatgggaccctatattccacaattctataaagctctttaaaatgtattcataatcattctaataattcattctgcatatagaatatgccctctcacactcagtcatatttgtggggttattccttaaatgaggctttgttgtttctgcaggaaatgagtggttcgatgtttttataaatcacgtctgccttttctaagatgcatagctaggaatag

SEQ ID NO: 59732 - DNA, 1224 bp, Homo sapiens
gggtcaccactccatttccagaaatacatcgaggatagcactgccctggatgaatccagaccttcacaataatccagaccttttctgtcaactctctgtgcctcaacggcccatctgtaaactgaggaaagcgacagtaccaataacaagttcattgtgatggatttaatgaattaatacacgtgaaagtgcttaggagaacttcataaatgttagctattgttattgccaaataacaatttgcaatcaaaatatatttgacaatctcctggactcttctttcatggtgttctaatacacgggatcaaatctataggtacccactgtttttcaatgaacaggattattcaggataatgcagtgccatctggaagacccttatagctatagggcagctccactgaggagagagcggaatctccccagttgagcaggtgatttaaactcccctggcattcgcagcaataacaaccgtatttttccctccgcctggcctgtgtcttgactttggacaggagtccaaagtgagctgcgtctttgtgtctgctccctgcactgcagagggtgtgagctgcacgctgcctacccgggtctgatagggagtggggattagacgccaacattccaacatcattatgtaaagtaaaatagcatcattgagagaggtgaggctgagcagtccaaaatatttgataacactgaaagagcgtttttcctcttccacagtgaatccatgtctccatttgcatttgttaaaaaaaaaaaaaaaaaaaaaaaaaaaaaaaactcccgacagcaccagcaacacaacaggagagatgcacagcctgagcaataaatctctcgaggcattcagcaagtgccacagggctcattaatcttgattatttcccgtaatagataacttcacaaatcagctattattcctaatcacgcacataaagataatggatgggtaatagcttcctgcatggttagaccaaaataaaatttcatgtaaaaatatatttctacacattccagggaaaggtgttttcttgctttcttaaagggacaggaggagatgggggagcaaccactgagggcaaaattgatccttgagaattgggtttgaaggaagtattaggtctctctgatttgcttggagacattcactggcttgtgtgccaccctgtcactgtgaggcgggtttgagagacttagggccacaggaggctacagaat

SEQ ID NO: 59733 - DNA, 1490 bp, Homo sapiens
gtaacacatcatcccatacttagttgcatagaacctcttccttatggactgcgtgggtcaggagtttggacagggcacagagatggtggatggcttgtctctgtctgacaatgtctgggagcctcagctggaagaattcaaatgacaggtgactcagctggctgaggactggagtcatctggaggtgtcctcgctagcacatctgacaggtgggaagtgttaccagaaaactgggctcatctggagctggtgactgaagcacatgcaagcctctcccgtgcgttgggctgccattggcacggctgctgggtttgagagaggcgagcttctgtaggggggagccttctagtagaaccaggagaaagctgtacagtcttttcagcctagcctcaaaagttgaacagtgccacttctgccacatccttttggtgacaagagtcctaagagccagcccagattcaagaggagaggattggactcccactgtcattggggatggcagggtcacgttgcaaaagagcatgtgggatgggaataatttccggagccatctttgaaacacacagtaggccacagtggaggttggcagccgatggcagcaaagatgactaattcagttaacacttgctgagtttgaggtgcgcataggattttgaaggtgaaaagggtgtagtaactgaagatagaggactttacacaccagcctagagacattgaagacttttaagaaaggagataaaagcagagatagtggccagagataagcgtaactgctgcaggcatctcgacatttagaagagcaggatgaggaacccaagaaggggagggacagactgaggagaatatgagccacagtggctagatgaatgaagagcgtgaagacaggagtgtcagtatatggtctttgaaagaggtttcagtggctggtggaagcagaagccagatggcaattgcttaaggattaacgaggtagagagaaggcagaaggcatgagaggtatatccaaaggagaagaaatcaccctaccaaaaatatacatgccctcatatgttcatcacagcactgttcacaatagcaaagacacggagtcaacccaggtgcccatcagtgccaggttggataaagaaaatgtgttgtaccatggaatacttcgttgccataaaaaaaagcatgaaatcatatcctttgtagcaacgtggatgagttggaggccattatcctaagtgaactcatggagaaacagaaaaccaaataccacatgttgtcacttgaaagtgggagctgaacactgggtactcatggacatgaagatggaaaccatagacaccaggaactccaaagagttgggaggaagggaaggggacagacatcaaaacctagttactgggtactatgctcagcaccagggtgatgggatcatttcacaccccaaacctcagcatcacgcaatatacccaggttacaaacctgcacatgtaatccctgaatct

SEQ ID NO: 59734 - DNA, 1032 bp, Homo sapiens
agcatcatgggcctttactgaactaattgtcatggtagagctcttgataagccactgtggttgattagtataatagtgtccctgtcaattttacttaccacattgaagttgcatagtttctgaatttgacattcttagaccagactgtaatccagtgaatccattacctaagcaaaaataaattcacagaagtagcaatagcttttacttaagccttccttccagtccatggcaaaaataggacttcagtggatttcaagatacttgcccgactgtgctaattctaaagtaatcaattaaaagagaaaggcattagctggttcttctttgtataagaaacaaatttaaacatctaagcaattctcagttcataaggtaactttacttttcctatataaacagtttctgctatagctgaagatagaacaaatgcatatgctattgaatcttttagcaagttacatggctctaaaattggacttcttttcaggcatcgcaagcagaccattgtctgtagctttcatggagatgtgtgtgatttgtccttgaaactcggggccctgttctcctcccactaccaagttcagccatgctggtggcttcagacagcgtccttggaactcttgacttttacatccttatctcaagccctgcttttttcttgaatgccagtaattttggattggaaatctcttcctaggcaaccaaattcaatgtaaaatggagctcatttccccctttctttctccatggaagtcttataaaactcaaccaagcatgccttggaatcatgcctcactcctttttctctctcattccccacagctcatgaaaccctcagccctgtcagttttttctttctcaatttaaaaattttcctttcttttcatcgtttatggacagaccacttctcccttgcacagttggaacaacctcttcagccaccttctacctctacacaaaagttactgatgtttctaaaacctgagtctcatcttgttactccctattcagaattctccagtgcctctc

SEQ ID NO: 59735 - DNA, 1058 bp, Homo sapiens
tatgtaattactgttttttacagtacagttatggcaattatatttattctattttttggaaagtacatataatgtaattataattaataactgcaaagataggctcaattacttaagtcatgaaagtgaattaccttaatcatactgagaatttttcagccgccctgtataaagaatatctatggaaacagtaatgctctggagaatgttacttgtaaggaaactgaaataaataaatgtggagtttatgctgaaatgagtagttttaaacaatgaagaaaactatcagaattttatagcttgctactatctttaaatccttttacatagtgcatgaatcatcatgctttcattgtaaatttaaaattttaaatgaaatttcaagaaacattgtctttgcaaaacacagttctaaatagttgaaaagagtgaggaaagaaattctgttaaaattcaggattatttttgaacccttgattgactttcgaggaatattttaaactgtctagaaaactttgcattattatttatggtattatgtgctaaataaaaggggccatatcagtgttttcttataaatagtttagttacttttggggatgaaacttccatatagattatgtgatttttatgtaaaaatgtaacctacaaggaaggtatcgctcaagcttgtgagttatttgagtgcaattaatgtatacatctttccattattagtctattttaggtaacacttttaaagagtttaactcttccttcttacctaccccctgctatctgatgacttgccttatgcttcttctaaattttagttgcacaaatacctattctttacctctccccgtttcctttcccagtaccctaaagtagaccacatcattcagtttttttttttttttattcagcaaacaccccctcaggtcatctcaacaaacctctcaattctgcctctctcatcggctcatttctcttcgtctccactgttaatatggtagagtaagccatcttcaatttctcacttgcgttattttccaggaggttcaaaccggaaatggttt

SEQ ID NO: 59736 - DNA, 1049 bp, Homo sapiens
tgaaataaggtaataaggtttcccttttccaaatgcctgtgttctgtgatcttttctgcaggaatagttctctacgaattttggatgcattttaccctggcaagcatttgagacccccaaccgaacacagttcagcaatacctttggtaatccagcataatgtccccaagaacacaaatgtgttatttcttagttgtttgtgaataacaatgatgtcctgtacattcttaagaaactatttttttaattttgtcaaagtgcaggattgatcataaggtaatacgtgtgtatgtacatataggaaacctgaaccttttcttcagaggagctcaagctatttaatgacaatttgaccatttagagaagggctttgactttgtaatgtttagggtatttgctctggtcaattttccatgtggattcactagctgatgtgtggccatctcagagatggtttggggcctcattccataatttatgtggcagtgactcaaaaggtttagtacacatgataaatggtaacaataccttccacctaaataggggagtgtcattattttcacatatttttggtggcgtaactgataaccaaaacattttgttaaatttacccaaagttttcagcagccctggatgccactacagttaagacatagctgtgtcagaaaggtggcaaactctgccctgccgaaaggcagtcatggaagacagacgcgtttttcatgatgactgtgaagcagtgcattttaaaagggagttgcaattcccagagctctgggttggatgaccactgactcctcttcctaaatcgaaaggatgcgctaagttgagcatggacagggcgcctcctgagggtagggcctgagtttctgatgtgttctccagcatgcagtgtgggaaggagctgatgctgagaccttagttgccccactgccagtctgttgggaagagatttctcttcttaaataatggcaacaccaaaatgaacaatgtagagattgttaatattaatgaatttcatgtctgtcctgttacccgccggaggcacc

SEQ ID NO: 59737 - DNA, 2144 bp, Homo sapiens
agagttaagaacatggcttctgaaattggagaaccctaaatttaatttctggctctactgcttctttgctacgggccttgggcatgttacttaatcacatcttaaagtggaggcagtccttgtagtgttgctgtgtgatgaggtgatgtgctctccacagagctaggatacagtaggagctggttatggcagtcatgatgatcatagttgttgttattatctccatcaatgtctccaagaacgtaaactctaaaagggacaagaaggcaggtccacaggtaactctcatacaaaagaacatgagctaagagtaaatgagtaagaaagagatgggcttactggaaccatggaagttgagcgaggaaatgaataagtcgcagcttatgggagatgaaaaagatggcatctttaccaaatcttgaaaacagtcttaggatttcagtaaataatgatggtgaacattacaaatggatggactggcctgcttcaggcatgcaggtgcggaagtgcagggcaatttctgggaactgtgaattctcccacagttcagaggaaatgggaaatacgtgacatgaagtagagaagggaaggccacaaagcctagagctataggctagagcagctcttagcaagccttccttcccaggctgaaggatttaaaattcctttgttagactctcgagactctaggaatattttagcaacaagaggctcagaggctgatgcagtgtgttgacgtgtgttgaggtcaggatgtcgtctgtcatgggaatggaaggggaggctgagggacagacggacagtggaaggaagaggacttgataactaaattgggctcagtgaagaccaggaggctttggcttaactgggaggattgtgagcacagtcagcagtggtgggaatggaggagaagagcattaagttcagttttgattgagttgagtctgcagtgtcacagaagagtcaagaaggatgcaggccaagaaaaaccatgggatttggtgactgggaggacccaagagtatttcagaagaaggatagaggttgtggggaaaggaaatgcatggatgtatacatggtgctgagtgtagatgtgcctttctagtagtctggcatgaagggagaggaagcttagacatgcagtttgtttgttcagcaaatgataagttgtacagcaaaggagattgtcaaagtgtaaggtagagatgactctgcctcaggtctgtgaaagagtggaaagatacttcatttgagacagaggggcattcaggaaggagtaacaacacaaagtttcagaaataggagacacttcgtacaagcgcctgccctcagacttctcagtaaataggaaatttctgaagtcccaatgaattgaagacttaaaaggaatggaaaaggtttgaaatgactgctttgggaaattgaatggaaagagtggtaaaactgttgaagagcagggagaggccggtcacacttagatcatgtccatctggagtgggccctgatggttgtggactgtttatccctgagtgaggaaagatacagagtcatagagaacccagagttggagatgttcaagaaggcatcgtagaaggccaggaagggtagcagatatgctaggaagttctctcggaggtctgaagtaaggaagccggcaatgctgaaagacagctcctggtccaggaggtggaggaggaggagttgaagggttggcagttgatgttcaatgggagaagttggcagatatggaaagtgtgttcaagcgagaccatacttggaacctagaatcagtagataaattatgtgctttggatcatcgctctcgtaatgtgttagttaatcaaagttacaatcccaaatcatagcactctgagaaagcgtgttctataatgaacactttacatttttctaaacttaaatggttaggtactgtcattctgattttatggaagtgaaaaccgagtgatagattaaaatcacttggcatttgagattagaaggtaggaacagcacctcagtcctaaccaaatgtcttgttgatcacattttactggtctcttttggcaacttctcagctcaaagagaaatagaaaagggaagtggcttttgttgactatcactacgtaccaaaggaaaaaacttcc

SEQ ID NO: 59738 - DNA, 1037 bp, Homo sapiens
ggagcccgtttatttaagcaatgttatcttgaaatcaggaattgagaaagaattcaaactgcaggaagatgaacctacactacattttaacgcatgcaagtagggaatgggatttctgtcctacatttcttgaaaagcagggttgctgccctagattttctgggacagccccagttttggtgctgcctcagtggcccacaggaagggcatctcatcctgaattaatgttatgttaacagaaggctctgtgttacttactgtgacatcctttcattgttggctgaccgacgacctatgggacaaacataaaatgcagtcagaatttttagattcatgcaagcggaggatccttgtcacatctttgtgaaaggtggcttcactgcctacatcatacagctatattaaaagatataacaattcattttatgaaatgcaattttaaaatatttttactgatactgactctagccattgtgctgattgagataaagccagggacaaaggttaaataagcctcctttaagttacaggaagaaggaatccctttaaatgccccatactctggtgatgccgagactgtgcccgtcggtcacagtgctgaatttctgtgacttctatcaaagggcagcgtctgccctggcagataatacctatcatgggtacgttttgatccttatatctctggagagaaaaggaggaagaaggggaaggagggagacaaaaaagaccgacagagcgagctaatatcaaagaagaaaagaaattactcctggccgcttttaaccattttgttttcttctcttctgtctggggcattaagacttcagctagtccccagtcgtcttttccccagtagctttgcttttctggaattaaagtagcagaagaataaagaaaacaggcgctggatgaaaggagaacagacttctttggtagaaatgtgacatgaaaagaaaacccagggtttctaggcttctgtttcaatccctccagcacgtattgcaggtagattgaaaaagtgaagtctaggtgatctc

SEQ ID NO: 59739 - DNA, 1040 bp, Homo sapiens
ctcttgccctctggccacttcctccacacccccaggaacattgcccccatttcacagaaaaggagcctgagacaaagattaagtgatattttaagcaaagctgataatcccagggaaaattgctgatcaagtcttgaaatccaacacatccttcggagtaatttttaatgctttcgcttcttttacctaagccatgtgtgttccatatgaccttaaatctaagccctaatattgtaaatggagttcagaagacaacttagtctcccattttctttcctggcattcattcaaataaaaataggcacgtaatactgtactgttaaaaaaaaaaaatcaaagctccacgcacactttgaaaatcttttagaatttatgacgcttattttcttaagtatctttatgcaaataaagatcagaagtcctttgagtttacatcgcttgctgaaggactgtatcttgtgtgtctctgaaatttgcgtgcctagctcggtgcctgacatggaatagccattgaaaagtagctgcagattgaacgaatgaagtaaatgctacctctctctgatccaccactaacttacccatttttacagttactattctgtggagcagagacatgcttgtattcattcttaggacatgtgttgagaaccctacgtgccaggcagtgtgccgcatcccaggaatacaaagatgactactggggcatgatggaatggagtgaggaacatgagggtatgtgtgtgcgtgtgcctgtgttggggagagagcctgtgacagtcttcttttctttcccccctgaaggctctgtgatcctataaaggttaagaacaactgcattgtacaaacagggggaaggagggtcagagttgtccagctcgtatagagtgttgccaggtgcatgctgaaaatcaggtcttaaattagcaaagcttacgtggtgtcaggtaacagtcacactcagccctagttctcaaaatagtcctaaaccaaaaaatgttcactcggactcctagccccctagtcttctctgtcagcagccc

SEQ ID NO: 59740 - DNA, 1051 bp, Homo sapiens
gaataagttagtttttataatgaaatatttccaaaggcctacagttttattttctaaaaaaagataattatgcctaaaaatatttcaaatgttccaaaatataaaatgaatgtagatacgttatcacatgtatgtgtgtttagtgatacaaattgtttcatagacacagatctatatatgtgtatgtctatatgcccataaacataccttccacacgtacacctgtggatgtcagtccaaataaatggaggaagatgaaagttaaagtcctccccgttctctgtgcagcctgctggcttagtctcaattactttgtagcgaactttcttatttgaggcttcaccaacgatctcagttccttggtgtaattataattctttgtttatgggtgctttgagtccggatcatggcagattcatggtgcgtgttagagagggtgcttgagaaatggccgtgcgatgatggtgagctctgcttcccagcatcctcacagtcaggcctgagcggggcactgcctgaggagcttcctgagccatgaggaaacatgcctcaaaaggcactgtgtctgcctcctcatttgtgtaggtgtgaactctccttgtggagcaccccagcatacaaacgtgtggaacatacacgtattccacacatgtattctgctgcggaatgtgtcagtcaggacatccatttggtgcagatgcttcagatgtacatttgcagaatttggcctgggctgagaaattcgccctcatgggactgcctaggaggagccatttccctgccatctgtgttttcagataatactcaaatctcatacaaataaaagccaaacaaacaaaataaggactttgtttctcttggagatgactttttaaggactgtgacagagagtagcagggggagctccggaggagtccttgagggtgcagaagctcccttccccctgcaggagtcacagcagtatgaaaggggtaggggcagagtgtagacccagccccaagtcgggctcagccaggtgcaacaggatggctcccagctgagcggtatagat

SEQ ID NO: 59741 - DNA, 1007 bp, Homo sapiens
cgaaattcgttaccaggaaagcaaagcatttattaccctgtgtctcttgctatccgcagcttgagagacttttgctgacaaagaaaatgtaactaccacatgaatgctagagtggaatatactattgcctgatgagggatgctgggtctatgtatgtttttgcaatttgggaggcttaaaaagaatgtcatctgccctgaacagtgtaagatttccccttgagtgagttctgagttcttgtttttcattcttccttcttgtgaatctggagaagtttttcacattgtgggttattcctaattattgtagctacaacaaacatcctggattgtagtctgtaaggacaaaatcatttgttgctgcataaaacctgaacttaaccatggtcagcgtttgcctaaatcagcagctgctgcttattagaccagcatcaaagagtgagctgcagttgggcgaccaaataagaaacaaagtgattagaagatccttgtggaacaggaagcagagtggggcaagacaagagagagcatatacccaggggaggagacaagctagggtatcatatctgcttgatggggtgtcagccctgagcagagaaggggatccggaaggagtatgtgggctggaagataaaaaggaccagggttcctgcagaacttacagaagcacacacattgtgtccattttgctcattgcaaccaaatgattaactcttcagaaaaaaaaaaatcctgtttacttagtttgtatatggttgctttcttttttttttttttttcccaaaaaggcaagaaacgtttagtctttgatagaggagacagctttccaaacaacgggactcaataaagacagcatgaggtcaactgaacctgatcctgtctcttctctttcccctctcttctctccattttacctgcagtgcactcaaaggcaaaaaaataaaaaataaaaaaataaattaaaatctttcatcatctcaatattacataaaaattgtgttcaaaaga

SEQ ID NO: 59742 - DNA, 1049 bp, Homo sapiens
caaaaaaaaaaaaaaaaaaaacagaataaaatctgtatccaaaaatatccccagagaatggtagtgttgaacagttatacaagtactttggaattttagtcagcgcattactgttagtttctgaataggagaaaagaacttaacagcattacatgtcatattaaaacattttattagtaagcacaagcacacggggagatgggttcaggaagcaccaggtgggagggagtggcagggtggggcgcatggagggaggaggacagctggacgtctgcagagttggccttgggacacgtgcttggtctcacatggctggggcctggtttgatggggtaatgaagcattgattacaagaaaaaaagatgaaatggcctttgctcattcgttatttttatctcctagctgtggaagacagaaaattgttcataggaatggtatcgaagaaatgtaatgagaacgacatcagggtgatgttctctccatttggccagatagaagaatgccggatcctccggggacctgatgggctgagtcgaggtgagtgtgctgtctggaaagcctctccccttcagtgctaattggagctctgtgtcacagtcgagacagatgtaggcaccgcacacggcaagaggtcaccctgtaatacatcccatgtgataaagttatccaacctgaacttttcaccatagctgaaatcatcaccttttatttctccagttcagaaggccttggtgccaccatattagctcaagttatcactgtcaggtgtgaagccaacaggctgccctactgctaggcatccttttcaatctcatattgaaatggatttggtggggggaggtgcaagaaggagaagtagaaaatgagaaaggatatttgttgttttcatcttagtcctcgggcttcctgcctgtgcctgaaagaaatgttaagagtatgttaagagtacagtgacacaaactgggaaaaaagcgtcaatgttcacatgtagtgcagagcagatagggatgtagggtaactgggcctgtattggggtattagagttttat

SEQ ID NO: 59743 - DNA, 1167 bp, Homo sapiens
gtaactatcttgctgttccttgataaagacccagagggaaaggaaagtcagagcaaaaatcttggatcccagatcacatttattgggaatgagacttaataaaaatgtaaacagccacttctttgcaatccagcctacctctgaaaagctgcccagcgttatgccgcatgcccatttttatcagccgagaactgggcagaaaagtcatgtcctcttcttcctcctctagtttgtaaaggaattttctctttagctttaatagcagatggatagaggtgcttagtatagaaccttccgaacagctgacgtttagacctaaatgtaaatcaggaccatagcttcctgtcaccactcggatcagcaccctttacagccttgctatacctctgctgctgcctcccccagtgctggaacagactctgggaccaagatcctcttgtcactgggtctttgcagttctttttcaaaagcttgccttccctgctgtttatggtggaggtcgttgctacagagtaagagatggggaattctcttcagatgattaagttctaagccgttgactatgtatcccccagactttgggagatgccagggagcaatttcctttctgctgaatttactggagctttggaaatggaaagtgagataaggagaaaggcccagcacttccctagtctccttggtattaactccaaatgggtaaaaatcaagtatgagtgagttattctagagtttattcgctaattgacccatcctccagctaaacaggtgtaggctctgtgtgacagacgatggagagctcgagtgacaggctggggcttggcagtatctgctgttctccagcccttcccttcccgagcctgcctgttggcctcacctggctgggacacgtgagcccctaggggcccccacagccctgaaatatttacaccactgcttgtatgagtagcatgtatggacctggggttcttttggagagatactaaaggacttgaaacacaatgatttgagcgagttcagtaagtggaactgaattcagccaaacaattgagtctgaggtttcagtgttgtggggaggggtgtgtgctccatgatgccacatttccagtccagccagctgctccacagctgctcagtgggcacgccccatcatccactcacggtgga

SEQ ID NO: 59744 - DNA, 1051 bp, Homo sapiens
tgaatataccaggtgtctggagttagaagcccatagccctttcccagcctttttggtttttttaattgaacacatttcatctaagtaaagctcagttctttatcacaatttactgaccaaatacctagcaccagttcctgctgccactttttaaagtgccatatgactttctacgaacaggtaccttgctgtcttgacaaatcctaatgtcacgcctacagccccaacacaagctccagtcttcctcttcggcatgccctggaagcttcttccagtcttcctcttcggcatgccctggaagcttcttggcctcagctccccttccccgctcagcaccctgttaggatcagtgtgtgtggatgggatagccctgggatggaaaggactagcctctactgatgcaaaaaaacaaaaagcaacacaaacgtttccttcttatagcacatgcacttccttacaatgacatgatttgtattatcctcacatgtgtttactactgctggggccttccttcatcctctgagggctattttgtactttctgcagcaatcagcttaataacaacacttattgcacctgtctctctctgagaacacggtgtgtctcgacacgtaccacgtacgtggaaacacaagagcccaccacttgaatttctaagaccatttcattctgaaacttcttatcaattacctaaatctcaacgaaaaacaatttactgaagccgactcccctccccatctccctctcaacctcaacccacctgcatgcatctcccccagaggaaacactgagggtaggggacaggaggctcaggacgcgccctctgaatcgagtgtttcttcttcacaagtcaccaagagaggacatgagggggaaagtcctttttgcccttctccaaaaaataaccttccacagagacaaactgtccttctatccacttttatcttttaataaatatcaaaaggaaaaagctgcaagggtgcaaagggcctgtgccagaagaaaacacacacagggaaaccgctttttttaatcaattgtagagaatagt

SEQ ID NO: 59745 - DNA, 1048 bp, Homo sapiens
taatgcaacctagtggaaactgtaagaccatttgagtattgtttgttttattgatgcatttggattttgttgtttgatggaatttgagccaaaaaaaaaatacgcaggctttcctatttctacaactgattgtacttatgcattttgtaccagtggaactttttatactggagattaaaaaaaaaatggaaatttttgtggcttgctctggtgggcccctgacaatgactgatttcaagtttgatttcgggttgattgattgattgattgatagaaagaaagttgcttttcttttgagaattaaaaactttggcttgatttcttttttccctttgcttatatctagcattagaattttgtcttaaaataacagcggtaagtttcactttttattctgtattgtgcagttacacaataaggtaattagatttagaagtactcagtcactttaagtggataaatgtattagttaaaactttagggtttgcttttttgctgtttagatcaaagttttttctgattcttctgtcctcattgtgaacataaccgtgtagttgaaacagtcaaacttatttttgtaatgtatgttattgtgtgatgcagttttttgcttctgtctccaatattaaaccattttcctaatacttgtttctctctctgcgtgttgtattgttggtagtcattatatgttggtgatacatctgcacacctcactgtttcacgtatctgtttttttctctatgttgtgtaaaaagatacagtcgattccacttaagtgaatatctgatttggggaagaggaaactgcacagcagccacctttgatttatgtacaaccgcccacttgaactcctgcttccaagatttatacacttttttcctacagttcacctcagtaactgcctttggggttggatttgccaaggtgttttacggtcttttgaccacacaggttaatttccccttctctcccctccctcatgagtctatccacgcagttcttaacatacattccaaactgctgcggggtttcctctccacacccacga

SEQ ID NO: 59746 - DNA, 1020 bp, Homo sapiens
ggagcctccgaaggactcgcaggggcagtcgcagctgatgtttgagtgccctgggatgggagtcagactggctgaggtttcaattttgcattcatggccagccaccgttccaggtcctgttgagatcatcatgtaacaggacaacaaagtccctgtcctcatggggcttatattctgatccatttcctcatctatgaaatgaagattgtagtttttatttcatagagtcatgaagattgagttaatctctgaaatatccacacagtgttgtcactcaggaatgatttggaatgttagggatagtcacccaccaccacagtgctaggtttcagtgaccaggagcgatgtggagctgagtctagtgggagtccagaggtaaagacacagtaaggtcacatgtgacccaggagggaggaggcacaggcagggcaatctgaggagactgtgccatggctggaggagcaggggctccaggaaggaggcagcatctgcactggaaatgcagcaggagggcccagtgagggaggcctggaaagtccacttggacttgacaatgaggagctctctgctgtcacctgctgtgattcctagagtcagaatcagactgcagtggccacaggcacaagtgggaagtgatgcagctcaaaggtttggatgagatgggatgtgcagcgattgagtcgtagctggagcgaaggatgtgctaagttagggattggaggggcgtgcatttacatgggaaagtaatgctaattagaaatcagttggacttcaacattctcaagtacttccacaaagcatcccttggttttattccagtttgttgctttacgtatttgtaagtattaaacaccaattactaaattatctgtaattcagatttgtcatttggaggaaaatcaacataatctgaatataaagcaggcagcattgagaaacttctacgtatgtgaacatcattgacttcgtcgagcagtgatttaaagtctgctccacatgtagtaaacaaagaggagatgt

SEQ ID NO: 59747 - DNA, 1088 bp, Homo sapiens
ccatggcctccctgcagtttctgtagatagtcccgtgagatataaagcttcaccggccgcagaagatgccagtccatctggatatccatattcagggcccccgcctccagcctaccactacaggaatcgggacgggctttccatccaagagtcagtgttgctgtgagatttgacgtgtacttgctaaagacgagagagaaaccacgtgaaacctacattgctatgttcataattgccaaagcagtatttatactattgtaaacaactcgcacatctctcctgtctgttagtagtaagaatacagggaaatgtcttcagccccacgtagatgctgcttaagatgagcgtttcaattgcatcatcactgacctgttagaatttaacccggaaacatcgcaatagcatttagggatgcacgcacagtggtaatttattactcagttccggttatgtttttctccaaaacctgaacatttttactctgttggctcattctattttgactaatgttacaaagtactgaaaaaactgtagaatagatatttttaaggctatatgtagtgtatgtgtcttttaatagatataggcatctgttcatccacatttgaacacagagctaaagaaacgttttttaaaaaactacttttaatccagatccatggaataatatgtaattcttgttttccttgtcttttagtccagtttttctttttccctctcatatatttgtaacctgggtcctaaactgactgaagagtttgtcctgactttattaattgcagtctcacagaatgctcatcattctccttcagctgttgccattttctttcaatctgaaaattaaagacattggagagaaaggctaaccacttaatggtgcttaaaaatcggggcacttaaaataagtttacggccaaaggtgcagcagtgcttatcacatccacatactaagagattggtcttagtgcgtttgtgccctttgttctggtctgactcttgcgaatctcagagcaggagaagttgcagcttactgatccctcagtgctcacagtactcatgtggggcagccacactaactgcattagcag

SEQ ID NO: 59748 - DNA, 2013 bp, Homo sapiens
ctgaaacagtaagaaatacagacttaaaatggggcttcttggagctccgtatcaataaaagagaaaggcctcatgccggctgaggtagtctttctgtgtctgtctctaagaagctcttgctctggggtaatactaatgcctaggtgtggttattccaatgaggaagtattaggcagtattctcctcccatcctttctcccagtaaactttcctgcttttctctgtggctgctttaatatcaggcaatatttttgtcttactgagttttaatgatgtcctcaatgccatatgtaagttgtatgctgcttgcgccctttttaatgcccttttacactacacctgaatataatagaatatcttcctacctaaagtagctattgacttggcattttcatttctcttatcctttcttagaacatctaatgaaattgtccatggaagaacttgtagaattttttcaggagaccctggcaaaggattttttctttgaagatgattttgtgatagagcaacttcagatttctatgacagaactaaagcgggcaaagttagaccttccagaacctggtaagaattaccccaatactttatatctacgttataattaagattggaagacatggcataattaacatgggctgtttcttgcccacagcgtaagcattatacttgtgatgacataatgtggatgaatgccttaccagctcagctgctttggctttttccttattttagggaaaggcaaataaacatattaattaaatctgcctctcctaatagatgactgtactattcctgcttacatttagaagtttggttggcaaatactgttgttcaacagaagtagccatggtgctttaaacgagcataacaataagcttttttttgctttcttcatctcattttgtgaaaccgtatacaatagtaagtacagcaatagtaagtacagtaaaagccccatcttatagatgaggaaattgatactttagtgcctaagtggcttaaatatgaagccacagaaccacaaatagcattactgagactgcaggccagtttttctgactactagcccagggctctttgtagtatgctacagtatagataatatattttattcacttattgtaagacatttttcagcacctactaataggttttctgctaggtactactttgctggggatttaagaactgaagagaaagatgagaagctctcagggtgtgcactggagagctagaatatacgagaatgataacagagggtgaatggggcattactagagctagccgcagggtaaatgggagaggagcagaagaaggggagtgcaggaagggagggaagaaaatgaaaatgtcgaaagatcacaggaggaataactttcaaagtttctaccagatagtacttgaccatgtatgtcttgagaaaaagttactttcgcttttcttctttcttacctttgttgcagtggatgggtgtagtaagaggctagggaagtggaaggtcatgggcaagagatgaaaagtaaagaaagtcagttatgtatgccctcatgcagaggtgaatttggcgtttccccatcagtgtgtcatgttggctgtgtctgtacagaaggacaagcagtacttccatggaaaatacatttttccttttggtaaaaaccaagatgtttgcttttatttacttaattgagaagggtctaatcagcactgctccaaggtttgctcaaggtcatccaggctcctaggaagcaaccctcacagcagtaatggggtgtgggccttggccttgtggagccgttgcctttgttaagtgaggtcagccctctcctgttcagtgtaatgacttctgttttctactatcatttatttttatttattttattctactatcatttatttttaaataccttgcctccttctataaaaagaggtcaaggcaaattttagtaaaagtcaaatatagaggaaaaaatatagaactatttaaacgtgagataattcaaaacctgtgtc

SEQ ID NO: 59749 - DNA, 1038 bp, Homo sapiens
aactttgggaactttatactaatgaaattcttagagtaagcctgaaaaaagtaataaattgttatttaacatattaagagtaaaacaaaatgactagtcagggttggaataatatattacaaatatatgcatttaagatatggcccaatatcttaaaagaacagataatcttgataaatgtcttcagtgtccttttttttttttttttaaggtttccctttaaattcaaaaatacaaagttatagaagatctttagcaaacaaatcctaggctaaaagtttcattacccaaagcttatatacagttttttcctaggtggggagaaaaaatattttggtaactactgaatgtttctttttatttttgacagttacaaatgaaatatgttgtgttttaagattggagggttttgttggtattgtttatgaaatgttgtttttatgtttgtattctaggcttttttgtccaaggttttcctaaactcttgaggtttcaagaacatcatgaaaaaatactgaacaaatttctgtccaagcttaagcaacacttggtaggtagatgtgccactgacttacacccacctacccaccccccaaaaaaagctgggataattaaattgtctttggtccaattaccttattaatttatagtgtcatccatttcatttactatgcagttataattcccagttgtttacaaaccattagatttgtaaaatttaatattgacaggctatcacagttcttactgagggatttgaacttctttgaagctaatgatacaaacaatgtgataatttaaagatatgggatctcccagttgttttggaggttttttcattgtacaaaaaatattttttcagggtcacagaaactcgttgttagtgaactatatatatgccttactataaaacacagtagtttagtaaaacaaagaaagctcactgtaaaatatattaaagagaatctaattgttgtattacagtcctaagaggaatttattcttggagtgattttgagaagtaaatgtgtttagctt

SEQ ID NO: 59750 - DNA, 1062 bp, Homo sapiens
attaaatgatgtgtgtaggcattttctggtttttatagagtagctttttctctgtacatatgcatgtaattcgactgaactccccagcttctgtgttcccctttgctccccaggaagtcgggtattgtcaggggatgagccagatcacagctttactcctcatgtatatgaacgaggaagatgccttctgggccctggtcaaactcttctcaggccctaaacatgccatgcatggtaagaaaaccctgtgctttatctaaacaatcaaggtagggaaaaaagtagattaaaacaaaaccaaagatgcttgcaagagttacatacagcaaatttaatgtctcagggctcgttgagttcattagtatttgttactagtttcttctttcatttttcattattgaacttttctaaaacatttacatttattttcctttgtctttactccaaggtatattgttggcactttaaaattcttccttacttgcccttggtcaaaagaaactaatttaggtttggaggaatttaagaacaggtatattattgggagaaataaaagatgccttttaatcaaaacttttagatggtcatgaaattatcattttagtgaaatgtttaccattgactggatattgtgatatataacaacttgtcaaaaaaacagtaattgagaaatgacacttaggtttttaaagaaaaggtaataattaagtagttttatatttcaagtgtagtttttgttttttcacataaaattggttccactttaaataaaaggttgataacgtgttctaggcactcgattatttaatatctcagaacctgctgattttttggttttcaagttaacactgtttataataactgtttccttgtttttgccaaattaagcaataaactttatttcagagagtttagattacaactgttgagacagggtcttgctctgtcacccaggctggagtgcagtggtgtgactcattgcagtcttgacctgggatcaagccatcctcccgcctcattagcctctctagtatccggaaccacacaggcatgtgcctccat

SEQ ID NO: 59751 - DNA, 1424 bp, Homo sapiens
aagaactttcacatagttcagcagtgccaactctgaaaagttctctatcctaaattaaaattaactagatagacaggatggaagagaaggaaggtaggggaagagggagaagcaggcagtaggagaaatgggggaatggaggggagggaaagtttctattgtgtacctttttgtatatatagttttgattttttttaaccattgagtgatttttttaaaccaaaaactttttaatgagaattattatttgtcatagagttttcaacaactaatttccataaaaatctgttctgttctctctttctctcttcagaaattaaaacacagagcacggggctgttcacctgacatcagacaaatagacctggatgtcaaccgcacatttcgggaccacattatgtttagagacagatatggtgttaagtgagtaaagtttaatattatgaaatgttaatcgcatttataaatagtctttattaacttaaaattagaatgcctttatagactgtaatttcgatttaggtcctaaaggtttaagcttttgcagatcatttgcgtccatgttgtgtgaaacttaagatctaatttaacttaaattttttaacctttgatatagcacgtgctataaaattggtaaagactcattttataatctggggattcttagaaatgtagtagatacttttattagaagtcatagaagaatgacagtgtgtgtaaaaactttgtcagtgatcaatgtatctctataaccttgacccccatgcataaatgaaactttttttaaaaaagggacatgaaatgagaaattaatgaattgatacatcattgctatgacaacttataaatgaaaagtacagttttgctgatctctgtatcagtcagagagtctaatcaggaaacagaaaccaataggagatatatgttaggacatttcaaggtattggcttctccagctgtcggggctgattaggcaaggccaaaatccacagggcaggccatgggaaaggacagtctgggcctcggggatgagctgaagctgctggccacaggcagagtttcttcttcagggaaacctcaaatctgcccttaaggcctttcaacagattgaatgaggcctgcccaggtcttctaggataatctctcctacttaaagttaacagattatggatttttatcagtctacaaaatacgttcccagtgacacctagatcagtgttttgtatatctggggattgttgtttagccaagttgacacccaaagccaaccactgcagtccagccttgtcaacttggcactcacacacaccaccttaaacaatttccaagtaagatagtaaccaagtcatccttccatctaacatgataccattattctgctcacagctgaaatgtgctaattctttccccacgtgaggatgcca

SEQ ID NO: 59752 - DNA, 1056 bp, Homo sapiens
ggtggcctgtttgtcctttcttgtccccataaagctctgtgggtggtattgaagaacgtatgaagatgaataggtacagtggcaagaatcttttcttctaggttggaggagacatggttgcatagaaatatttaataatagtctgtgataaatactctaaaagtaggagttgaaaagagggtaagaaaagaaatcacctttatggttcaggaagacttcatggagtaggaggtgtcttggtgggactttgtttcctacaggaaggaaaaagattgctgaatttcaaagcacattgcaaagaccttccctgatctcctccaatttggatctgattagttttaacttgaagcttcatattgccgtattttaaaataaagtacctactttaccatgaggagagctgacattgtttgaatacttttatgtctaagtgctctatgggaattacctcatttagttcctgcaaccatgccaagatgcaggttttgtccttattatatttatcttacacatgaggaaactgagcttagcgaggctaggtgacttttcaccccaaggttagcaagtggcaggggtaggatttactatccaagctgtcttggctgctcccatctaatatgttttcctcttctgttatctcatttttatttttctctcttgcatttagcagtgtaccttacagatggtataggatcagaccatagtggaaaacagcttcatccacagccttagtgtggctcagtaatctcgtaggccaaactcacaatgataatcctaattttttttttttttttttttttttttgagacagagtgtcactctgttgcccaggctggagtgcagtggtgtgatctcggctcactgcaacctccacctcctaggttcaagcagttctctgcttcagcctaccgagtagctgggattacaggtgcccgccaccatgcccggctaagttttctatttttagtagagatggggtttcaccatgctggccaggctagtcttgaactccctgacctcgtgatccacccgccttggcctcccaaagtgctggga

SEQ ID NO: 59753 - DNA, 1221 bp, Homo sapiens
attaactgtagagactaatctaagtttttttcagtttgtaaccttcagtttctttttcttttaataagtttcataggcgaatttacaaaggaataccactccagctcagaggtgaagtctgggccctccttcttgagatccctaaaatgaaagaagaaacaagggacctgtatagtgtgagtagctaaagctaacttgttattttgaaattaaaaagtaaaatccatttcttttagcattcaaggtgacataagatattcatatgatcacttaaaattatattaaaattctatcgcattggaggttttggaggtctatttgttttcttgattgcaaaaatacttcttaaattttaaatagatacttcagtaaaaatgttattgtctgtatcaataagtatgaagtgcttttcaaatacataaatgatcaattaaagtaattagatgatcaatgttaggacgtggttgcatggaaaatggactaacacctaattatagctgcttgtttgccacatggtgttaatggagagatttgtggtatcactttgagagttcgtgggaaacagcagcagaattcagtttaaccaacacctgctgtgtatgattcttttcttctagcatgaaaaaaaagatgactttgccccaagattattagggtatctctaggttttattatttattaataaaaagttaaacttttgactgagtaataatttttttcttaaattaggtgctttaaatgtatctccttgtcatctcgtagctataccctttctgaacctaaattttctattaacctttgaaaggagtaagagatttacatctaagaatcttagacccatagattttgaaatatgttccttagaaaatatgtacaaaaaaattaatgtggaataaatgggaaaaaataaaaattgctgttttttttttcttcaacttttattttaagttcaggggtacacatgtgcaggacgtgcagatttgttacataggtaaatgtgtgccatgccatggtggtttgctgcatagatcatcccatcacctaggtattaagccttagcactcattggctattcttcctgatgctctccctcccacctccaccccttgctgacaggccccactatgttttgttcctcatcatgtgcccgtatagtctcattattcagctcccacttataagtgagaacatgcattatttggttttctgttcttgcgttag

SEQ ID NO: 59754 - DNA, 1718 bp, Homo sapiens
actgatgtctaagcctcagtttcctcatctgcagaatggagataatagtgtcccatttcaaagggatgaagatttcatgatttaatgcatgtaaagcacttagcattgtaccttacatagaacaagcattcagtaaatgttaactacccctattaatttcttgaaggaaggctgaacaataaaaacattttaaaggaaaaaaaggaaatctaacttagtcctactagcaaaacacaactgagttaactgttgggatttttgtccattcctcacacttttttcagtataatcctttcttttccctttttgtatagatacagattatcttatgtcaacatttgctgatgagaattccagggagcatgagtttcttgggttctactagttccacagaagcagtagtatagcctgatggtgaagaggcagattctagaggcagactatcatgggtcaaaccccagctctgccacttcctagccatatgaccttgggaaaggcatttaacttttttctgctgtactacctaccccattaggcttgttgtgaggattaaataagttagttgatgtaaagcatagaatagtgccaggcgtttagtatgcagtcagtatgtgttgcttattattaaatgaggaaagggctctctggttaaataaagttgggaaaacctgaactaaaaaaaaattaagcaagatttctttctttactgtaggattatttagtctttaatatgaggtatgaatttttaagagggatcttaaatcacatgaaaccgacttaaccatgggaatctttttgacatgggtatcttacagagctaatgagccttttctttttgagcatactaaatatccttaggctcttatattactttgttttcatcaggggtgagttcatttggggtggttgattttattaactgtctgttttagcattaggtttagaactcaggatgtttttaagaggacacacttcaaagtagaatattagttacaacatctgttctcttgtttaatattatgcagtctcagattggcctacatttgacaactactttacatctttgtggaaagattgctcaagtggtaattacagggtagatttcaatgcattgcacctatcctttaatctcacattcattctaataaaatatttgtagaatgaatattttgttattctgtggtctacatatgcctatgaaagtacgtaagcctctctaaaaacgaacaattctactgggctattattctgacagcaactctggctaatgcagttcccatttagtgagattttagcagtgccatgtctttgaagtataattttgaagcactctccgataactataatgctagaatcatttgatgatatatgtggcccaatttggtgtgaaacagaatgaaccttctaaaagaattactgctttcaattcacacctagttttaaattgcattcaagtaaaaaaactagcattttttttcttgtctttcaaggagaagtatgttttctctccacagattccttacttatatagtagtaatacagagaaattctaaaaatatttgaaataaaaatatagccctggtagggaatatttggatttttagaacccaagctttaatgaaaaaaaaaaaaaaattctgttaaggttgtttgtgttgcctctgttctcacagtgactgcctccctatgtacagtagtattgtaaatttttttgtttt

SEQ ID NO: 59755 - DNA, 1019 bp, Homo sapiens
ttataactcataagtaaagaaacgaacaacaataacaatgaatttcaattttattttagcaaaagcacctggaaattgaaagaactaccaaatggctgaaaatgctgaaaggatgggaaaaatacaagaacactgaaaaggtaatttaaaatcatgtttttccatatgaaactatataaactcaatgtggattttcatagtagaagttcttctttaattataagagtgttacattcatatttggttttgaaattttggtttaatttagcagtatgcctcgaattaggagtttttatattgtaagtaacgtaatacccgattcggattggtttcgacatttaagtctgtattgaatggttcagaggtgggatgggtttcaggagtgatttaattcagctgcttaatgaagttgcctgtgccatagtttcttccatctcttctctgccttctgcactgtcagccccatcttgaggttggcttccctttgaggtcagaatcactggagcagttccaggctttgtatccacagatcatactgctcagaaagagagagggctggcctctgaaagcattccctcaagcaggagcaatctcctttttcaaaagcttctagcaaacctcccctttaatgtttttgccttgcgttgagtttgtgctaagttagttagagaaaaatacatacatatattaatatcaccatgcgtctcatcagaaaagtctttaaacagtgagaagatgtcaagctcctggtggtagaagttttccaaagctgttaagttttatttgaaaggtcaaatatcatcagtggcaataaatactgtgtcagttatcttccttcaagtgacaggctcatttaagatatttttgagataatgtctgccagatacccagtgcttgagtggcagttgcttattctttcaagtaataacagtggtttgtgaaaatgttcatgattcaaagaatttcatcctaagcactttttcttgacacagtcattgcacttggttgtgcagcacaga

SEQ ID NO: 59756 - DNA, 1051 bp, Homo sapiens
gttcacatttgtcacatatgaatatgttttcagttacttcttcaaaacagttgctggaatagttagcttcggcatctttggtgagaaagtatatttcatctatgaattatagattcatgattgggggaaagagactttcatgtgcattcaagtttggtattgttgaatggacagcattatggagttagcacttaaacttgattgaatactgatacataattttcggatcctatagcttcccaaggggtgtgtgtgtgtgtgtgtgtgtataatatatattattttattttattttttgctgtagggaaaagcatacttaatgatccttaattttttttgtatgtgtatgtgtgtgttttgttcttgcagcgtgggaatgtatagcatttaaaataatctgtatatatgataagcattagaattcaaaagtgtgcttttaaaaaaatgactgcttcctaaagtgattcattgataattcatggtcataaaaatgaaagatagcaagagacctgctagatctcagcagggttgttcctggcaaagtgtatgttgttatactcttgggttggcttgaattatttggtgttttcctgttggtggaaaaaaggattatgctttgaagaagtcaggggagaaagtgcagaagaacaaaaaataccaaatggcaatttagatcaatcttaatttttcacagcttggccttctctaaagtcacatttagcagaaacattaattagatttcagtgccccactgagttttaaaattaaacatatttctggaaccatctgcaacagtttatcactaataatataatgaggaaaatatacttagccttttgaaaaatacgaattataaaagaatatctttttctcatgagtgctcatcttttattgtgagaaacccatcaaaaattttaaaaagagttaggtaattgagagttttaagaatatgcctaaaattgaaattctataaaaatattctcattggtgagataacttttcctaaattcaggattttctttggaattttatgtacttttaggtctaaaaa

SEQ ID NO: 59757 - DNA, 1442 bp, Homo sapiens
tcatttgtgagaggttgagctttaagtttccttccaattttttaactttttaagaattaatttttaaaattaatttttaactttaactttttaaaaatccagtccgttttgtcctcaagactttactcctaacaaatgccttgtatttatatagcactttaaagttttggctgggtgcagtggctcatgcctgtaatcctagcactttggggaggccaaggcgggcggatcacgaggtcaggagatcgagaccatcctggataacacggtgacaccccgtctctactaaaaatacaaaaaattagctgggcgtgatggcggatgcctgtagtcccagctactcgggaggctgaggcaggagaatggcgtgaaccccgggaggcggagcttgcagtgagctgagatcgtgccactgcacttcagcgtgggcgacagagtgagactgtctcaaaaaaaaaaaaaaaaagttttaaaatgctttatgagcttgattaaatgtgatcttcacaagaattttatgagctgggcaggaaatattttataattatcaggcagctgtagtgtaatgattttgagaatgggttctggatcccaactgtgttcacatcccgctctgccgcctgctgtgagacatttggaaacttcagagcgcctccctttcctcatctgtaatttggcagcgataatagtgactacaccatagggttgtttgagtttacgtatgacaatatgcttgagaaaatatgcttagaacactccaacctgctccaaacagtgcctgacttagtggacattgagcccctgtgagttcacgctcttattgtgttgtcatcattgtttttcttttatagattatgagactgaaacttgtgcaggttgtgacttgcccaagtttacatcaataataagtagtaaagaagttattaggaattctgttgaatcagatgaaaacaaaaatgaagtaaagttaatggtatatggaataattttgtgaaatagtattgatttgttaaatgaatcagattatgaaattattggctgtcgatttggggaaaattaaagtttgcatgtgtttacagatatccacacattccagacattatttgttagaaaagttgtttctaaagcgtatatcaataaagaaaccacattttccaaaagatttttgcttgatagtgtttaaaaggaagtaggcaattaactttggtttctgtttgcattccatcatacttgccaggcagtttaagcttctgatttctagatgtgcttagatttgtagaagaacagaaagccaactgaaggcaagtcctataagaaaaatccaaattgctttgggaggcctggctgggcggatcatgaggtcaggcgtttgagaccagtctgggcaatatgatgaaaccccttctctactaaaaacaacaacaacaacaacaacaacaatt

SEQ ID NO: 59758 - DNA, 1099 bp, Homo sapiens
tagtatctgttcacatttttgaggcatgcactgaaggatgactcactatcctgactcacttgtttaagttcactgtcattcagaagctctttcattctgcttttctttttctggttttcatttttaccccagtgaatagaattattatggtaagtctcacattgctgaatataacctttgttttttcttaattggtgtgtgtatgccacgcctctaagcacattcaaatcttttactaaagatggctgtcacttcaatgtttagtcttggcaggaagtatagtgtagtgggaattagcaatgtttaagagtagtgaaacagacttccttgttaataagatgaatatataaatactatattatttactttagtggaaatatgcacctgctatttaggtatgtactataaatttagttgtaacctaaccaactaaagcccattttaggaagtaccatcaggcctggtaactgtctctgcttaacaaaacaattgagctgccccaactatttcaaagaataatttgatacaaaattacagtgaaataatttgaatagtccttaaaacttatgatggaatctgaccattaacttaagatcctaggtgaataaactgaagttgtagaatgtcagtgagctttgctacactatatagacgttaaacatagttaagtgaacaggacttagagtcagagaggcctgagtttgatctgtggcaccaccactcagtagccatgtaatctggggccaacattgatctctctaagtctcatttttctcatcgctgcgatggtatctttatcactatggttgtgattacgattaaactagataattcttgttcattcagttagtctttcagtaactttattgagccaccaattagatgtcgggcactgtcctaagcactggttacagtggtaaatgacatggtctgatctgtcggttcagtggaccaaaataaacaagtaaacaaacatacattttctagcatttcatataaatgaagttctacagtatgaggtcttttgtgtttgacttcttttatttgcattgtttcgtgttatcagcagttttttcctttttgttgttgaatagtattc

SEQ ID NO: 59759 - DNA, 1065 bp, Homo sapiens
cgggattacaggcatgagccaccacacccagcctaatcttgctattttttgttatactgagacaaatctaatattgatgaatggagtgagggttcaatgaatggatgtaagtatatattcccataatatattaaggaacattgattttcagccttttatttagttttggcatacataacaggtcacctgagtgagtagtctcgtaagtgagttatatattatttctggtatccttgctgaaatgacatccacacaaggaaacctggaggctgaagttagtgagaggagtattattttagagaaagatttgaatttcagtgttgttaattgtcattattggcaagttacttgcgacatgcctgccaaatgatcccaatagatcacacttgggattatcgtacactgtcttgaaacagctttttctttgcattcaacaattcagtagccaaaatatggttgtggattaatgtgatagtggagcaaatgtaaaaggaaggatgattgaaaagaatattaaaaacttagtgagaaattacaggtagaggggtgaaggataaataaaatgttaaaaatgatgccagtgttctcacttataagtaggagcgaaacaatgggtacacatagtcatagagagaggaacacacattggagactccaaaaggtgggaggtgggaggtgggtgaggtttgaaaattacctgctggatacattattctttattggggtaatgggtacactaaaagcccagacttcaccactacacaatatatccatgtagcaaaactgtgctggtacccaccgtcccccaaatctattaaaaaaataataaagcagcaaagcttttgtatttaaggcctgagatggtgtgatggtgttggtagaaataggcaaattagaaaggggttccttgtaaggaaataagtgtttcattacctaaagctaagaatatgtttagtggatatgtttcccattggtgtgtatgaattttctgcataatgtgaattgtgttacaccaatataaaagagtttccttgatcttattcccaccctaaaggatgttataga

SEQ ID NO: 59760 - DNA, 1067 bp, Homo sapiens
gtatcataggggatagctgggaactggtagagcagaggtactaagttccacctggaaatgctttagagtagctctttgaatatgtctttacttattatcttacagcgtatgtgtatatgattattttctagagggtcgtaccctttattaagctgtgagcttcttgagggcaaggactgcaattcattaatcattttggagaaaagtgaataattctgaagaattcggtggttcatgagcttgcctggtatttgtttctctatggcttatcatctaagtgagataacagatagtagataattgataaatttaatctgttacctaattactgagaggattcgattcttgctttatgttattactgaaacagactgcccagtaatcttctctagagagcaattaggtttgcaatgagttattttattgagaatgctacttgaaattaaatgtttatagcactatcttgatataatttaaatataatttaaatgtgctgaagtatcttcattcagataacttgttaccccttaacaaaaggctgcttgagtattgtttctctcccatttggcaaacaccagatgcagtgattaataaaggtcattatgctacttagtcatggagcgcttttaatgactgttacctgaacatctgctagattcacgatggcagttaccagaaacatctaacaaaatatacatgctgtgctttgaaaatctggcttggactaatctaaatgactacctaagaacatttgaatattccctgaagttttattaattgtgagaaagcccttatctttctgtaatgtgaacaatccaaaatgtcaacaaaatgctaatttggaatggctgtccttgacaatctcagcttcctgagggctgcatgctcaggggctgggagtcgtctgtgtagagtcgatggagaccctggctctcttgcacttctgattatcatgggaagcctcgccttggaaatgtgggactggagttgagctgaaaagaaggaaaaactttacctagactctgcagggagcaagttgaaaagcagagaatgggtatattaattat

SEQ ID NO: 59761 - DNA, 3102 bp, Homo sapiens
aagcttacaaaactaaagttatagcatctaatttactttatttggttgtaggtttgtagttctttatttacaaaggattcatgcccttgacaaaaaagaagatactatgacaagaattatttaatgagaacttgagaaatggctgcttgtgacagacagtgttcattgtccacccaatctccattctctcttgtgtttagagtgttagtgccctaggttaaaaaacaaaccagcaaatgaactctctttcttaagatgtaagcaaaagcctgctgaggatttctggaaaggttttaccttctgagacagttgtcacctctgcttttctgttacatctttctttctacctggaatgtgagtgcaattcatggagtaatggcagccatgatgtgaccgtaaggacaaaagcaatatgggggagaagaaacataggaggctagtcttctgtgacaccagtgacactaaggaacatttgtaccaacccctagttacctctagaatttttggccttttacttgtagtcaaagtgattctcactagtatggtttctaatgtgataaagaataagactagaagtaaaagcatgtcatttaaatataaaactaaaacactgttacaaagtactttgttctgtgctgggatttggcagtcgtatttagaagtagcatatatcctaaggtgaaacacggatatggccattagaatgtggtgagagggatattgatttgggagttggaagacctgtgatctagttttactatcatatgactttaggtaagtcagcgaatgtctttgtgtcatggtgtttactatctataatgtgattagatgttctctaagatcttacagagcattgacattcatattctaattagtttcttgaagccatttttgttttttatggtaacctcttgaattacagtgtcaattcataatgcctccctatgtttactctttgcatacaagcacgcgcgcgcgcacacacacacacacacacacacacaactacctcccgacacacacattgatacatcaggtaacagtagtcttagaaggttgtgcatttggcttagctgtgactagcttttagagattttcacacgtgaccgctaagctgatccacagttacgtgagtggtttaatgaaaaggaaaggcagcgcagaagtggttagctaagagcgtgggcattaatcagacagacagaggtctcgatcctggatttgctcgctcatttgctgtttagccttgagcaagttatggaacttccctgtacactagattctttatctgaaaagtagaggtaataatagtgtatattttcccaggtgttatgagggctgtgtgaggtcatgtgtatgagggactcacacagtgcctgccacactgtaaggaataaaggtaagctgctgttggtatttttgttatttttattattgttgttattctgttgctgatattgctcttctgatctcttagatggctaataatttgtttgtaggtgtttatgtctggaacagaatacagagctctgtggatagcagtctgtttcaatatagtgatgtttgttaatttctataactgtgtcagctcatttgtacttggaaaactataagcagtatatttattccttaaattcagctatgtcatatttgaagtcaaaattgtgtatgttgtgggtagagttagttaataaaagttttgtcaagactttgttttagggagatgtatttagtacaggttgtaattaatttaataatgttttaaagaaaaatgagtccattttgtttagctcgttggcccagtgtattgtcttaactatggaaaggagtttttgaagtaagttggtaaattttgcagtcagttgttgcttgaaacttgaaatgaccttgaaaggttttctttgaattgtttaaaccattaaatttgtaaacatatacaattatttgtcaattaaaaataaaatgaaatttaaagaatgaaattgactgcaatggactatttaagcaccattctttcccctcccccatttttaaattttcgagacaaggtcaggctctgtcagccaggctggagtacagtggtgagatcatagttcactgcagccttgaactcctcggctcaagtgattttcctgcctcagcctcccaagtagctgggactacaggcatgcgccaccgtgcctggctaattttgtcttatatttggtagagatgaagtctcactgtgttgcccaggctggtctcaaatgcctgagctcaagcagtcctcctgccttggcctcccaaagttttgggattacaggcgtgagccactgtgccccgcaccattcctctcttgcttgtctctgagtctcttagtaaagcaggtccgtatattaattaagaatatggtctgaactctccagcatggtagccagtagccacatgtggttgaataattaaaattaagtaaaataaaaaatttagttcctcattctagccacatattaagtactcaatagccacattgcagcaagctctgttggacagtattggatagattgtatagccagattgcccgagttcagctctcgaatccactacttactagtcttgtgaccttgagcaacttagtttctctgtgcttcagtttcctcatatgtaaaattggattaataacctcaaacaaaagttcttataagttcgtgaatgtggattgaaggaggcaacatttgtaaagtgcttagaatggcccccatttaagcacacagtaaatatgtggcgtttggtaaataaacaaatatgcgtggtgttcagatttattatgctttgtgtgtgtaccgatttttttgtcctttcggtatcttttattgccctttgagaaactgtttatatatgccaacctgctgaatgcatttttcatgtttctcttttaccacagtttagactcatgtttctgccacacactctagcttaaaaatttattatgagtgctcactgctttcagggtgaagtacagcctccttcatcaggcatttcagagagtccagcctgcccttcccagctcattttcatagccatccagctctagccctgtgttttattccattaatcactgccttt

SEQ ID NO: 59762 - DNA, 1382 bp, Homo sapiens
cagtcttatattcatagcgtgtgtctagaatatgctgaaatacatttttgaaaacattttaaaattgcatgtctaacttacagatcttaaatgagctaatgtagatacatctttaaagatatacttatatattttactttttaagcatttaaaatagtacaattctaaaatgataattaggaattgattttcaaaaatcacaggccatcaagtcagttgattatattggcaatttcactaaattatggtttaaaatcagttggtaaattgatatatcagccttttcacatgtaagcattcacatgtattaagcattctatctttatatgatttgaaaagtgtacatataactcagatataaaatgtagattactttatattttttctttaatgtgatataatctgtgttttaaagtaaagcttatgagattccataagtcttagtaaaatgatttagcatgatagtatgaattgtgatacataaaatagtcaaccatataaagaatattagagctgaaagaaatcttagacatcttgtctttttttttttatttcattttgtggaagaatgtggtatttaagtgattgaacagatacgcatctcaaaaagcagagagactgttgtcatttacctttgaaaatgtggcagtattatttaggatactttacagttatttatctcctgctttctactttatttctgctccccttctgaaatagaaaactacattcccatctctaaatagcaggattctaacaattaggtatttaaagaaaatagcttttactatttccagagaatataaattagttaatttaatcccatctgtttgaaaatgtcagatttatgtagtttgacctttacagtcagaattttttattggaattttttttagtttttgttttcattcacaatcatagttacttggaatatacccagggaaaagaataataatttttgtgccttttaaaatgctcatatatagatatatctcatatattacaggaaacatcatgtggatatatgaaaaatactaccaaaagatagttatatattaaataagatatttatatcttattatattaaagtagtaggagtagtatattaaagtagtagaatggcttttgttctcagacttttgtttaaaatttttcagacagtttttttttttgtgaaaaacaggaagtatatacatagatttttttcttagaagcttgctttttcaaacctcttctaatagtgttcttcatcattaaccaatttactattttatccttttgcagaatattgttacatcttaccaatttttcatattgacagactccttgaaaaaaaaagtcatatggacaaatataaaacactgacccctaagaagagaatt

SEQ ID NO: 59763 - DNA, 1141 bp, Homo sapiens
acatggtgtagcacgtcgtgtctgaagagctgaaaacttcaccttgaattttaaaactagacatttttacagacggtgcttgctggagagaaagcagaaggctgatttttggatcggtttacttgtaaccttggttgattcactgtgctcagttgtccagctgaaaaatgggaaaataacaagcctttaactgtctgaaggcaaaggaactgcctctgatttgctctgggatctaatattttatgatatgttaaaaatgtcaaaataattcatgggaaggaaagaaaaataggagaggaaaattggcagtacagtaagaggaacaaattgctggtggagaatcagtttaataaacatagcatttagccatgttcacctgagtgtcatttttctcttttagttaactctgtaggtttactttgagaagggctgctatgggataaatagaacatataacaaatatattaaatattaattcagcatttgttacaacttggctgttaaacatcatatggaaggagcagtggttatacttgttttgaaattatctggtccatgccgctggatgttgagaccattgaatttacagactcctatgggaatttctagtgtgcatgtgaatttagacttctattcatggactgggatgtcagaggtgtatatgtgaggaggaggacaaggaatttataggatatttttgaggcaccatatcttttatgcaaatctgggagcttagagttagcaagatagattttatttttatccacattttattttccgtttcaaatacaaggtttttgagaaattggaaaaaagtattaaggctttcgacagtgcagggtattttggttgactacttaaaaacttgcacatagcatctgtgatgcactgtgaaaatttatagcagagcactttattttttctgtcatggcttttgtgagaaaatgttttcactttgcttagtgatttacagaagattacccacattttgttttgttttgtttataactagttaaggctgtgcatagtaatacattttggactttgaggatggggctttcacacgtgctgaaatcactttgaatccatcatttcaagaagatacagcctatcctttcgttgtttcttattaactgcttca

SEQ ID NO: 59764 - DNA, 6747 bp, Homo sapiens
atcatgtgaacctgggaagcaaaggttgcatgagctgagatcgagccaccacactccagcctgggcgacagaatgagactccgtctcaaaaacaagcaaacaaacaaaaaccaagcttaagtagaatgacaaagaaatgaaggaaatgaagtctattaactgatttcttaacccaaaaaagagagaagagttagaaatggtttatagtttaatatcctacagtctctttatattttcaggccagtggacatcttgaatatttacagattatgtttgtcacaataaaatcatctctcacatttttttcatctcatttatctacatgttctgaaaaggatgacagtagttcaattctgaaatgtatttccaggaaagccaaaaaagttttctgaaaagtgggttaaaaaaagtctgaatcattgccaagaatgaaaagatgctgggttgttattcgtatgatcaaaagaatttgtaggcttagagcagagtccaaatattcttgtctgtgttttttgcataaaagtgatgttgatgacacatatgaaagtgtgaaaacacgttagttccaaaagaatatgcataatagtacctcacttttgtaaaatcagtaacaaaaagtacaaagtaagtctaaaagattgtcagtagtgcttatctctgtatgtgggacctaagacagatttttattttcttttggcttagtgttagattcttatttttctatagtgaacattcattattattataataataagaaaaactattagagatgtgtattgacaaaaagaagaaaatagagacctattagtttgtaattctttaagagtctagggtgttggtttgaattacttataacattatttgctctgaataatagtataattttgctttagaattataccagtactcttgtactttttatatttagggccaaacaagattttgatatttttcctttgtgtgcctcccccatccatccatccatccatccatccatccatccatccatcatctatccgttcgtcattcatccattcattcctccatcaatccatccatccaacgagtgaaatcatgatattttatacctttcatgtttacatagtcatttatagttagcttttcctatgtcattcttctagaatggtggttctgaaccatggctgaaggttaggatcatttaggggagcttttaaactttgtggtgcccaggctgcaccctaggacaatgaagtcacagtccctgtggatgggttcagccatcagtcctttgaaactccccaggtgatttcactgcagattgacaatcacttgtctagaatgcaatttttttaatgccgtctagtattccatggtgtacactcactgaaactttattaagttcttgttgtcggacatttcgattatttcccattttttttgcaattataaataatacacattgcaaacatccttgtagctaaatttgtgtgcatgactatatttgttaatataaaattactgtcataatattactgttcagatagtatgcaaaaggctaaggcttttgattctttctgccaaaatggagatcatgattttgatttatctaattaggaaatttttagaaattatattgtttaattattgatatacccaaatctttattaaataacaactaatgagtctaaagctataataggaaagcttcagatgttactcaggacaaggtcaccatccatgagggacatggtctggggcagggtttgtcaactcatcactattgacttttggggctagataattctcgtggaggctgttacgtaaattgtaggatgttaaccggcatctttgggtctatgcactagatgccatagtaccccacctcctgttgtgactatcaaaagtgtctttagacgttgctgccccccccccgccactctccactggtggtttgtaatctgcaaactacagcctatgggtcatatttggacgcacattcatgtgtgtattgtctgtgtattgtacaatagagttgagtagttacaacagtgaccacatggctcacaaaatagaaaacatttactatctagcttttatagaaaatgtttgcagactgtagatctagtctatctcccccatgagggacatggtctggggcaggaaaataacttgtgaatagctaaaattcactgggataagcgttctgatagatttaggtatgtatagggtgttgtaggtatggggagagagggaacagctaattaatgccctgataagattgggaagacctctttaaggagataacaaaaattaggtcttgaaaatctgagtagagaaaatggggaagttcctgtaggcagggtgcatggaatatacaaaggcaatggtgttgtattcagggaatggaggaaagtgtcatgtgcgcactgcatgtaattgaagtagtactggcaagaaacttcaggaatcgtgtctgcagtgatagatggggactatcttattaatgaggccacactctatgctaaggaatttaaacttatctgtgtgcaaatggaaagccattaatgtttttagacagggaagtgattatcaatttgtggtttgaaagatttttccatatggtattctgatgttacattgcctggttcctgattctgtattgcaacctgccctgtcaactcaaaattggttttggtgctactttgccacttagcacattcttcttggttatgagtgtcttaagtctctaattcccagtgcctacctagcacatagtaaatgctcaatgaatgcttgttgaatgaatgtaagtattacttacaggatcttcaaactttttttccccctgcatccagtgttgtgctggtaaatgtttaacaaccagctactggggagtgtgggagggggaaaaccccgattgtagtgtttgctaatttctgtggtataaaaacacccaccacagtcaattttaaaacttcaagctaccagcaagctgatataaacgagatgtggcacatcactgcatgtacctagcaagtacctagtaaaatgacataaactgatccctcaggtttttaagttgaaatagaaaggtttttattgtagcttttaaattctgtagttataaaggatgatattttcatatattgtattgacatttaaaaataacattctcaaatcactgttctaaatcaggaatggaaggggatttccctaacctgatgaagggtgtctatatctgaattctttaaaaattttaaaaaataattttgatttattttttttagagatagagtctcactctgttgcccaggctagaggtggagtgcagtggtgcaatcatagctcattgcagcctcaaactcctgggctcaagggatccttccgcctttgcctcttgagtagcctgatagagtatctataaaaggcttaaagcaagcatcatcttaaattggaaaatgttgaaagcatccctttaaaattaaaaaagtagaaaagtatgccggttagaaccacttctattaaagattgtattgatggtcttagccagtgcagtaaaacaagaaaaatggattagaagtataaggattggaaggaggaaatgaattgttcataaattacagatgaggttgggtgtggtggctcatgcttataatcccagctctttgggaggctgaggcgggcggattgcttgagctcaggagttccagaccagcctcggcaacatagtgaaaccctgtctccataaagaatataaaaaattagctatgcatggtggcacaccctgagtagctggtggtcccagctacttgggaggctgaggtgggaggatcacttgagcctgggaggcagaggttgcagtgaggattgtgccacggcactccagcctgaacgacagagtgagactctgtctcagaaaaagaaaataacatcacctgtataataacatcacctgtatttttttttcttttattaggtagagaaaaccagaagaatttacacataaattgttagaaataaggaagatgttaacaatgtagctacaggtactaaggtacaaggccaggcacagtggctcacgcctgtaatctcagcactttggcctggtggctcacacctgtaatcccagtactttggggggccgaggcaggcgggtcacctgaggtcaggagttcgagaccagcttggccaaccaacatggtgaaaccctgtctttactaaaaatacaaagataggtgtggtggcaaggcacctgtaatcccagctactcgggaggctgaagcaggagaattgcttgaatctgggaggcggaggttgcagtgagccgagattgcgccattgcactccggcttggctgacagagcgagactctgtcctcccccaaaacaaacaaacaaaaaaacaaacaactaatatacagaagttagttgcatgcttatgtatcagcagtgaaaaggcaattaagagactccgttttcaatagtatcagaaaaaatagaaataaatctaatgaaagatatgtaagaattctaggctgggcgtggtggctcacacctgtaatcccagcactttgggagggcgaggtgggtggatcacgaggtcaggagatcgagaccatcctggctaacatggtgaaaccccattctattaaaaatacaaaaaaattagcctggcatctggcctggtggcaggcgcctgtagtcccagctactctggaggctgaggcaggagaatggcatgaactcaggagacggagcttgcagtgagctgagatcgcaccactgtactccagcctgggtgacagagccagactccatcgaaaaaaaaaaaaaaaagaattctaaaggaaaattatatatttttaaaaaaggattttaggaggacctagaaatagagaaatataccatgttttttgtacaggaaaactttgtatctgaaaaatatcatttctacctagttggcatatagaccaatgaaattcaaattaaatcacaatcaggcttaccagggaacttattaggtgattttaaattttatatggaaagggtggaaagataaagagccaaaagtagctaggacatttctgaataatatcagagagggaggatttttttctattagatatcaggacttattatgaagttacagtcaatttaaccaatgggatgtagcccttgtgttattctgtttgggctgttctaacaaaatatcataagctggatagcttacaaacaatagaagtttatttcttacagttctggaggctgggaagtccaagatcaaggcactggcagatttaatgtctgttaggggcctgctttctggttcatagatggcgccttctagcttctcctcacgtcgtggaaaggcacggcagctctctgggattacctcttgtaagggcactaagcccattaatgaaagctctgctcctgtgatttaatcaactctcaaaggtcctgcttcatgataccatcaccttgggggttaggtttaacacaggaattttgggggaacttagacattcagatcacggcatggagggaattgaccagtgggataaaatactgaagtgagaagatccacctatgttgtcccactgctccaccatgcctcttctgggtacactccagagagagtgagtcaggatctaattttttattttgaaataatttctgacttaggaaaatgttgcaagaatagcatagacaattctcatattcttttacctggatttccccagcgttaacattttatgacatttgtttgctcatcctgtgttaatattattgctttttttttttttcctgaagtgttagagagtgagttgaagtatttacccgtaactattttgaagtatatatcctgaaatccaagatgttctgttacataactacagtgcagtggtcatagttaggaaattaactgatgaatctatagactatattcaaatttcacctcttctcccaaaatgtcccgtatttcccctcaccctttttggcctactatctaatctgggatcctgttttgcattttgttatcctgactcgattaatctgtaacactttctcagtctgtctttgtcttctatgactttggcattttaaagagttcagctcagttacatacatcagagtatgtgatcagatattcttactgatgcaatgtgtgatgaaaaatgagagaaacaagaaaaagctattgattgcttagcagaagctaagcattgacagtagtgaaccaatgtgttcaaagtgattgctatgtgattttcattttcaaaaccagtgataataccagtgagataaggaagatgatgattgaaatttatgagacatgaatttagatactcctctcttccctggccaggtatggaggaaatagttgactgagaggttaatgtcctgcttatctccttccttgcagaaagagaaagactgggagagaggaaagctaatggaaagttacctgtcaaaacagtaccttccaaagatcttctctccagaagagaggaagtaatttctcaggagctggaaacatgattggaaaacaaaggcagtagatacttaacacttattacgtgtcccaaactgccctaggaagtgggatgaggcacagagagaattggggaaacttgaattgaggagttagatttctacttttatttgtttaaatttacatctacagaaggattcaagatcacagttttgacttgaggtttaaaacttagtctttgacccatctgaactcttactttgatttagt

SEQ ID NO: 59765 - DNA, 1221 bp, Homo sapiens
atatatttattggagtttcatatggttttttgtttgtttctttgtttttttgagacaggggtcttgctctgtcaactaggctggagtgcagtggcatgatctcggctcactacagtctctgcctccctggctcaagtgattctcccacctcagcctctcatgtagctgggactacaggtgtgctccaccacgcctggccaatttttgtatttttctgtagagatggggttttgccatgttgaccaggctggttttgaactcctgggctcgagtgatctgcctgcctcggcctcccagaatgctgggattacagtttgtgagctactgtgcccagcctcatatagttttattttgagacatgtaccattttgtgatggtcagaggagagataatgcatagtataccgaaaaggcagaagtagtaaaaggtttcagaaaggggggaagagtggagaatagtaagtaccaaagatgagtttggcctaaggtactattctttcagggacactgttggcagtcttccatcactgttgtaattaatgtgttatggtgattacagatttcatactgggggaatctctacaaaaatctctctgaatgttagagggacgtctgtgtttatatacccaagtgcttttgtgaattctttggcaatatgtttgtctttatgtgttttatgtgtatgtgcacttatgaaccttttatcttaaatgtgatgttacgttgaattaacatttattccaaggctatacacacagagctaaatgctttggtttgggaacagggtcttgctctgtcacccaggctggagtgcagtagtgtagtcttggctcactgaaattcttcctgggctcaagtgatgattctcccacctcagcctcctgaatagctgggactacaggcacacgccaccacacccagctaattttgtgttaaatgcctttttttccttttctttttttgagacagagtctcgctgtgtcgcccaggctggagtgcagtgacgtgatctcgcctcactgcaacctctgactcctgggttcaagcgattctcctgcctcagcctctgaagtagccgggaccacaggcaccctccaccacacttggctgatttttgtatttttagtagttttcagggttttgccacgttggccaggctggtcttgagctcctgacctcaggtgatctgtccgcctcagcctcccaaagtactgggattaca

SEQ ID NO: 59766 - DNA, 1058 bp, Homo sapiens
ttcccagagtcccagagacttgaggtggaaccctggctttgctgctggtagccacgttatgtatggcaagtggcttgacttctttaaccccctccccacacatcctttactcattcgtaaatgtaggcactagatagatcatctggacgccttctaactcttaaaatttactgttaagtcagtgagaaaattttcatttctaattttgtcttataggagtacatctattgggtaaaacaaggaattcctgtattagttatgaaatatgctacattacaggaaacacagttttcagggtttgggggcctactgtgttgctcagagtctgattttccaaagtaccatgattccaaatgcaggtgcgtgttctccgcgtccttctgcttgttctcctggcagccagagttcagaggggaattatgtttcaaattaatcctcttaaatattcgtcttgttatctctttcattagttttagaaaatagagtttgatttttacagttttcttcttgaatctgtgttattagagttgatgtactggttggaaaaaaatctgtatctcttttacattaacttctccaaaactggatttctatatgaaaatattatgtgtatgatttttagtattttttatttgtgaaaagatgtagtggaaagcaccgcttagtaactgagatttgttacatggtctgaataaaattccacataagtaacatccagtttttacaatagtatctggacagctatatattttcatttttttgcattgaacacaaatagatgtcttctactaagggaatttgtggctatcagtgtatgtgatgggtgccattgtacagaaatctcatttcctgtagtgtgaaattgatattagaaattttcaagcctctgtctttcttcctcagaattgatctaaaatagtattttggtgtgacttttttttggagataggcagggtgactgtgaaagtaattcttttcagcttctctttaaagctacgggttagaaaggtcggacatagagtgaaaatgtcttcccttatcccagtctcccactccta

SEQ ID NO: 59767 - DNA, 1047 bp, Homo sapiens
attaacatttatcacacttgcccattttgtttttctcagatggaaccaaggattaaattaagttgttatactcaaactgtggctatgatttaaaaggagctctcagatccataatataaatggtcacaagagaagtttgtacacaaggcacaaaatagtgattattttggtagaatatattttaaaaaaaactaagtgaaaacaccaaaacacaaaagtaattacagtattacttaatttctttttccaaagctttaagtaaaaacaaaaactaaaaaacaaaaaaacacttactagcttatttgctctgttttaaaattttaatgttctgtattttatttcagtttcttcaggaaagttttgctctgcaactaattacgtgatagatttcctaagagtttttctcttctggctgggtaatccaggagtgaatctatgacactggagtgtttgattctgccctttgttctaaataatgaaatgagttttttgaggtcatttttcgatatgaaatgtttctcattcacctgaggaagaataatggcagtgagtaatttggggtgtagtgtatttgtggttttctaatagtataggagtaaagaccttcattcactggagcaggggactaagtgttcatgctgaagtgaagaacaatttgttttaatatttgttagagcagataatgttataaataaatgaatagattactaaatctctcagtggtagtagaaggattcttcagagtcttactaagtaaaaaagttgtgctccaagtaacagaagacttcccataagtactggctaaaactctctaggacagtagcctatctagatagataaactgttttgtggaatagctgcatgcttcagaagttgggtagaagttaaaagaaaatttaagttgaattgtctttgaaatgccagcatgtctgttatttaatggaatcttaaatccccttacaaagtataacaggtatccttttgttatattaagactcatttatgtttgataaatttagatttgggaatataaagttctaaatgtta

SEQ ID NO: 59768 - DNA, 1052 bp, Homo sapiens
ctgtgttagtgggtcagagccctggccccatggtgacgttgagaacatcacagattcagtcactgagtcagctggcattaggtcagcaacctcttataagctgtagcctcagcacagttagtagaagcattttcaatctagtttcataattaaggaaaagtgccaccccagtctctggctttaggcacagagcctggctcttgaccctgattcctagggaaaacttttatttacagttttccccataggacaaaacttcctgctgctctgtcctgccctgggcccagagtccagctgaccttgtgccttcagtgtgcctcaccctttatgttcctgttagatgtctgatctacagagatgtttggggcatagctgtgccattttagtgacttgtgcttctctttcacctgttatttctgtgtgtttgtgtgaagaaggggaagctacagagaaagaacaatgccatcggggacttaacgccttacttcccacttcagattcttttaaaaaaatcagcttctgagtagtctgctagttcctagagccactgcctgtcacccacacagcactccagttgggaggtgagccctgtgcgctgcttctccatagcactctgcctgcctccttctgggacccatcaagctgtattcaaatcatctgcttatttgcttgtatgtttctctaatctgtgtgctccttgaggagaaaagatgatttcattcctagagccaaacactgttcctggcactaaataggtgttaaataaatattgcactaccttgggtgtttgtaagtaatgtccttagtatgcaggagctattctgtgttttattattattatttttaggtgaaatgggagctgttgccgtgagaagagtgtatgtgtagagtgtggcccgagacaaagcattccaggctggcggagcaatgtgagaaaggtgtgatgttctgactccacataggtgttgctagtgaattgaacattctggactctagagataggaagggggattgtaaaggtggaggagacgaaattggggtccaggtcattt

SEQ ID NO: 59769 - DNA, 1359 bp, Homo sapiens
tatcttcttagttgtaaggggatagtatatgtaatattttctctctattcctatatacttctgcttgtgaacaagagaactggattttacttttttgtgttaactgtttctttttagagggtgggaaaagaattgagattttaccctaactgggattatatggagatttgaagtatagatttcctgattatggaatctttgggatgcaatgagcattttcttattggaagatgatattagagtttaaatgtttttcacatagtatttgtattgattatatttaccttaatatgaaatagggcagcttttctcatcatcagttcaaataattaggcagtagataagtgaaaatgacgctgctgttgtaaaatattggagtgcttctactaagaataatattgtaaggaacggtctttgatttttgacttttcagtggtatactttttcggtagtgtactttgaagaaacaaagttagtggctagatgagttcagtacagattaagaaagagtttttttttttttttttgagacggagtctccctctgtcgcccaggctgcagtgcagtggcaccatctccgctcactgcaagctccacctcctgggttcgcgccattctcctgcctcagcctcccgagtagctgggactacaggcgcccgccaccaggcccagctaatttttttttgtatttttagtagagacggggtttcaccgtgttagtcaggatggtctcgatctcctgaccttgtgatccgcccgcctcagcctcccaaaatgctgggattacaggcgtgagccaccgcgcccggccaagaaagagcttttgttatttcagctccaatcatgacattttgtgagaaagtttatctaatgtaaagtgctaactctagtgaagatggtaattagttcacaaaaattaaaagaaatggcaagcattttaacttaaaaacgcttacatttttggaaagtgaaataaattttcttctactttgcaatttttgggttctgttaggatcagtgttgcagatgtaagtttttttgacggcaggtagcctgtgcctttcatgtttgaatttcggtgtttgatggtgtcttgtatactgcttaccctagaaaacaaagatcaaagtcttgcgaggatgaaggcagaggggaggaatggcttgccaagcaactaatagtgtttgaaccacataacatttttcacctttaaattgtaatatttatatttcatttgcaagatttttaactggttctttatatccactaatccactaattctttttcatgtccacttaaaacaattggttctgttattttatctctttgtggatcttttacatgcttattttaaagtct

SEQ ID NO: 59770 - DNA, 1009 bp, Homo sapiens
ctttcagtgcacaacaccagacgtttctttctagctcactggtctgcgctctctgttgagtttggctgggtttggctgtaagatgtgggttggcttcagttacatgttaggttatttattcattgtgggccattgctacctggggcatacatttcttgttctgcatgtaggagcacaagggaaggcaggctgcctcagtgctcctcaagcctccagttagaaccattccagcaagtcatatggccacgcccttagacttagagtacctggaaaatgagatgaaaggccaatttttgcagaaatatcccaatataatttgatgtgaaattatgggtttaagacattactttttccctgttggatggtgtgaaaaacagaaagtaaggtttttcttctttcacctctgtatgtttagtgcaaaagtagcatttaggggaggagaaagggagtctaaacattttctcctgtgtgctgctcaactaccttgttccatataacaattggtagactccttactttgaaagtaggtcggaggggctgggcatggtgcctcgcgcctgtaatcctagcattttgggaggccgaggtgggtggatcacgaggtcaggagatcgagaccatcctggctaacaccgtgaaatgctgtctctgtgaaaaatacaaaaaattagccgggcgtggtggcaggtccctgtagtcccagctactgcactccaacctgggcgacagagcgagactacgtctcaaaaaaaaaaaaaaaaaaaagtaggttggaggatctatattttaaagctgtgattagtgtaaataaagaatcctgaacgcgtgacttcagttatgtcatttataaatgtttctaagaactaatccatgacattccaaaacatgcattatttagttttgcaaactataaaatttgtgtacatttattacctcagatggtaagattataagtctagtgtttataagttttattatactggtgtttttgaggttactatttttggtg

SEQ ID NO: 59771 - DNA, 1032 bp, Homo sapiens
ggtaaatactgaatgaatgaatagtaagatttattatgcattatacattatatatttattgtaatacatattatatattatacatagtaaatccttcctgttatctatgttattatctgcctgttttaaatttaaaaacagaacattaatcatttaagtattgagttatagcctttgaggaaacaaatgtagcttggttgaggcatcatttctgatgcttttttctttctgacttgatgagaaagttgcgttaaatacgttgctcgttgtttattcattcattgtcattgaatttctttaagacattttaaatgagtacatgagaatctattaaatgtgaattaacaatgtagtcaatcccttgttatttggacgtgtgtgtgtgtgtatatgtatgtatatgtatgtatatatattgctattacaaataatacatcaatgaaggacattttcttctttttttttctttcttttttagggggtaggacagttcactaaatagcaacttagaaaaacaggatctaggaatttctgtgaaaaaatgagctgggattatacagctgtgaaggtgagatcagaagctttagtggtcagacagctgagataagacagcacaaatgatacaactcttggttagccagctccttctccacgtagataatgtataatcatcagtcttcacataaaagctatcttgcaatttgtgttggaatggctatcacttgtgtttgtcttttacttttaaggaacaaatgaaccactacaactcttttggcctcttaagcatggcttaaagattgtaaatgcatttaacccctttatatatgtggttacatatattaatgttacttttataatttcctttctgcatttcattggaaaagttttggtttttcatattaaaatactgtaaaatatattcatacaaagactatgtgtaatatgttacataaagactgacataatgatgtccatcccatcctctcctcagtttaagtgaaagaacattcccagtaccctcctggatcacct

SEQ ID NO: 59772 - DNA, 1020 bp, Homo sapiens
ctgaattcctagagctggttaatggcagagttgtaacacatttgcattgaggacttcctatatgttgagtgatttccctgcaaggcttatagtccaccattgtactgctgaattccagttttattgacatcctacaggaattttcctctcttcacctgtgtgtatttacacctcttggtccataagttttccgattttcactcagtacagggcctttatatagccttgactgtcactctggttgcccttagcacttttattctgaatatgttctgttagctgcagatggctggaaccaagcttgtcttgattgttttatcccaaggcccttgagcagtttttgcgtgttgtggagctgaattaatatctattaaatgaatagatgaatacattcttgtatttagaatccaattagatatagatttttgaagatagggcctggaattatttactcttttctttgtatttttcatggtgtctgctatagtgcttattgttacagttggcagtctggaatttttaactgacttttaaaatgatgtcggactcctgaacaccagatatattgtatccttcattttaacttttatctatggagcacaggcattatgtgcagttctgatatgatgtatcaagtagattaggcacatataccatgtaaactaattataggtcatttttaaaaggccctgactctgtaactgatagaagtagggaagacttggaatggacatttgttttcctaaatacctgaagttgtcatgttgaccagtataaacctactcggatttgataagtctgtctggaaacctacctgtggaaggggaaatttgacctcattcttatctcatgcctcattaacatacaagtgtaaagaaaccgatgaaaccagatgattgctcattttgctcttaggcccatctcattctttgatcttattagcaggaagtactttgttgatttagtgaatagcgtaaacaaacctcctttctctctagcaatgacagaagatttgcttta

SEQ ID NO: 59773 - DNA, 1052 bp, Homo sapiens
agaatattatttttaatcttcttaatgtattagttttgctgttagtaatgttatgtagatcagtgatggcaaattattattattattattttttccttttcctgtgacagggtctcaccctgtcacccaggttggactgcagtagagcagtctcagctcactgcagcctttgccttccaggctcaagcgattctcccacctcaccctcccaggtaactgggactacaggcatgtgccaccatgcccagctaatttccgtatttttttggtagagatgaggtttctccatgttgcccaggctggtcttgaattcctaggctcaagtgatcctcctgcctcagcctcccaaagtgctgggattgcagttgtgagccactttgcctggctaatattttattatagaattaatgcagtatttataagtcagttggctctaggttttttgttcttgtttctttttgtttggtttttggacatttaatgtccattggcatatctgtggtaagataaggtgaaataagattttgaagtcagtcacaatggaaaaaaattgaatagatgtgcaggctaaaatttataaaagttaggtatatatgtatgagctaggtgttttttgtgtatttccctggtgcccatattaaaaaataatgaattggcctataataactcttgattgcagtagtgcttaaaaattaattttggccaggtgtgatagctcactcctataagcccagcactttggagggccaggtgggtggatcacatgaggccaggagtttgaggccagcctggccaacatggtgaaactccatctctaccagaaatacaaaaattagtggggcatggtggcgtacgcttgtggtcccagctactcggaggctgaggcacaacaatcacttgaacccgagagatggaggttgcactgagccgagatcacaccactgcactccagcctggcgacagagtaaaactccgtgtcaaaaaaaaaaaaaagaaaaaatttcaaaatctgtcttcacctcttctatgttcatttttaattttttagcttt

SEQ ID NO: 59774 - DNA, 1127 bp, Homo sapiens
aaaacataagctgcaaaaataagttaaagttctggaaatgtattggttggaggggtcacattagcatatttttgtctctcctctctgtgccaatggctctattttaggaattttgtttactttgatgacagcagagtccccccacccccattttaatagaattgggagcatcttcatggtggtaattggagaagtaattattaagaaaactgccttcaaggcccttttccacctcaatttttcaaggaagcaccaaataccagcttcagacctttaacccaagagcttcacacaagcacagtgaggacagaactgtctgtgaagggtttgatttgttccccagagagaaaaatccacactcttcttcagcacatttgccaggaaggcaggcgggggtctgtcactactcaagagctgagcttggggccaccccctgcggcagcccccaccaagcttagtgtccttgttgtacaatagggctctgtccccatggggctctcagaaagaccaaattacagtgcctggttcagagtagatatttaataggagttagtgctttctgtgccttttttcacccttcttccatagaatcggataaactcacgcttatgaaaagtgctctggaaacaggaaagtcatataaaatgagagacgttggctgggcgtggtggctcacgcctgtaatctgagcactttgggaggccaaggtgggtggatcatttgaggtcaggaattccaggccagcctggccagcatggtaaaaccccatctttactaaaaataccaaaaaaaatttagctgggcgtggtagcccatgcctgtagtcccagctactcaggaggctgaggcaggaggatggcttgaactcgggaggaagaggttgcagtgagccaggatcttgccactgcactccatcctgggcaacagagtgagactctgtcaaaaaaaaaaaaaaaaaaaagcaataggcgttaatgtcgtgcctccctctgggtggaaatgaagtaggtgtgtttgtcccgcaggtcatgatgcacatccggaaccaccccgttcccgtcattgccatggtcaatggcctggccgcggctgccggctgtcaactggttgccagctgcgacattgcc

SEQ ID NO: 59775 - DNA, 1063 bp, Homo sapiens
cacctcagtgacatcccgtgtctccccgtaggtggccttggagatgctctttactggtgagcccatttctgcccaggaggccctgctccacgggctgcttagcaaggtggtgccagaggcggagctgcaggaggagaccatgcggatcgctaggaagatcgcatcgctgagccgtccggtggtgtccctgggcaaagccaccttctacaagcagctgccccaggacctggggacggcttactacctcacctcccaggccatggtggacaacctggccctgcgggacgggcaggagggcatcacggccttcctccagaagagaaaacctgtctggtcacacgagccagtgtgagtggaggcagaggagtgaggcccacgggcagcgcccaggagcccaccttcccctctggcccagccaccactgcctctcagcttcaacaggtgacaggctgctttcgtgacttgatattggtgtcatagcatttggcctacattaaaagccacaatttcatggggaaaggacaaaatggagagtgactgaggtgctgacctcagtgcaaggctggtgaaccctgcagcgggccagctatggtgggaagcctggcatttggggtgctccttgcaacgtcttaagcaagcgaccccccgacatagcaaaaggtggcaacccatggaggcagaaagaaggacgccagcctgacccttatctgaaacgtcctaagcagagttaatcctggctgctcaggagaggcgacacatttcaaatctccacgagatattctccacacagaaaatcttcttgattctatagagacttaatcatgcctatggctttgaataatcttatgtgatttaaataaattaaatctttatagagactggtatgttttatctccccagctacactgcaagctgtctaagaaaagaaaaaaaaatcaattaactgtttttgtatgctcacgctgatggcatagagtaggtgcctcctatttctataacaaatgcccttgttatccacgtttttgtgaaacccggaccccaggctcaacctgaggatgaaaac

SEQ ID NO: 59776 - DNA, 1036 bp, Homo sapiens
caccacgtccagctgtgtttttgtgttttttgtagagactgggttttgccatgttacccaggctggtctcaaactcctgggttcaagcgatcttcccacatctgccttccaaagtgctgggattacaggcatgagccaccatgcttcgccttcctttacaaaaaaaaaaaaaaaattccggtcctcctagtgggtatgaagtagtatctcatggtggttttggtgcatttctcgaacgacttcgttgctggacatctcttcagatgcttgttggccacatcttctttagagaaatgtctgctgagaactcgattctctttttgtgttagctttcgtatcatgaaattttgcatgtgactaagtacagttatttgtatagggctcggtttgtatatttaggttccttcctaaagcttcattctgttgtgggttttttcctgctttctcttttaggctgctgctgcttctcctcggaagccagttgtctgacttgcgctttgtcatttttaatcttctgcctgttgtagttcttgaccccaagcctggggtattgatcagttcatctggcagtacagtatttatggattgaccacgtacaatgtgccaagctgttgagcgggtcattgggcatacaaacatggaagtccttttttttttttttgagacatggtctcactctgtcacctaaactggaatgcagtggcacaatcacagctcactgcagcctcgacctcccaggctcagatgatcctcccccctcagcctccagagtagctgggactacgggtgcgtgccaccatgcctggctaatttttgtatttttgatagagatgggcctcgctgtgttgcacagaatggtcttgaacccctgggttcaagcagtccccccaccttagcccctgaaagtgctgggattacaggcaagagccaccttctctttttgatacatgtctctttgtgatgtgcacagattacattttattttttttaattaggttaatgggcatatcaggataaagaatggtactgcactgga

SEQ ID NO: 59777 - DNA, 1471 bp, Homo sapiens
ctactgagcagttacaccaaggagagcgtgaaggagatgattgagccagagaagaaacgggttgtgatggtaatggtgtgggggaaatgaacttgagctttaaacttgatttgagtttcagtgtctctgaattgaacatcccacgttggaagaagatacatttgggggctccaggactacagtagaaaagtatagagcaagcaggaaaatcttctagtaaaacttacatgcaggacaacaaaatgatgaaagatatccaaataccagataatccaccaggaaggcttttgtttaggaatttgtttcaagaggaacaagggatgagggagaaaaatccgttttatccatcagagtcagtgctataaaattgcctattaaggtaaaagaaaaatgtggagactattttactatacagagagcattaattcagatggcttagaaaagtgataccagcccaagaacagggatctaggtgagcccattgtaagtatcattgaaaacaaaacatgcccgtcaacatgtcacagaaaacgaacgaaggacaacaagaagtggatgagaatattttgttgaccttcatgggtttacagcctctgtctctaaacaaagtatggaaacaagtagagcttttattttgcttttgtttttgttttgtttttttttttgttttcccccactaaatagaaatgagggtccttagtctgtttctgacaatctgttaatttcttaggacagctgtctttggtttgctttccagcaggcgtagtatatttagtcggagagcacatctgtatgcgacaacttgattacatctttttttctagctattttgcattttttcttttaccatgtttcagtttctgcatgtagatttaaataaaaaacaaaacttgtaaagttgtaacatttcacatggaaatgctgcccaatcttcaccagcttcagaaatctgacctttgccgatgctgcaataaagtgttgtaatttagatttggcgtggtgttgttttgttgggtttgggttttggaaaccgattgaacgggtaaattggtatctcccagcgtcatctttgtgctttaaaaatacattctcggccgggtgcggcggctcacgcctgtaatcccagcactttgggaggccgaggtgggcggatcacgaggtcagaagatcgagaccatcctggctaacacaatgaaacaccatctgtactaaaaatacaaaaaattagccgggcgcggtggtggacacctatagtcccagctactcgggaggctgaggcaggcgaatggcgtgaacccgggaggcggagcttgcagtgagccgagatcgcgccactgcactccggcctgggcgaaagagccagactccgtctcaaaaaaaacaaaaatacattctcagacgactagtgttgtgttcaccttaaggattccatctctgcatgacttttcttaggtgccggagttaatgtacc

SEQ ID NO: 59778 - DNA, 1063 bp, Homo sapiens
ttttgagacaggttcttgctctgtcacccaggctggagtacagtggcgtgatcacaggtcaccgcagcctcgacctcctgggctcaagcagtcctgcctcagcctctcagtatctgggactataggcacacaccactacaaatggctaattttttttatttttagtggagtcgaggtctcactatgttgcccaggctgatattgaactcttgtaaacctatcttaagtagagtctgcattttttcatcagattttttttttatatatctttatgtaaggttaaattagtgatagttttgttatacaatagagtccattgtagaattgcatttaatccaaagtgtatattgtattaataaacagtttttgagctgatagatttttgagtcactcagaatgattgtttgcttataaaccagtcaaatgacaccttacactataactagtgatataactataccttacttagcaaagattttgaacatttttttcctgtcatttactgcatttatttaaagtattctaggttagatagctgccttttcttgacttcaggagagatgcttgaatcttctctttcattccctcagggaatacttgtgttctttccatcagttcatttctggaagagttacggatcttatccagctgaggatatacttttccatatttgcatcttaacgctttgaaagtttcttgctaaggtagcttgctctgtaagaaacaaactgttcatctgcttgggctgccatgacaaaatattacagccctagtagcttaaacgacagatgtctgttgtctcgcagcactggaggccgccggcaggaaacctgaggtcagggagtcagcggggctggttccttctgaggcctggaggaagactgctccaggcctgccttctactgctgggggtgccggcagtctttggcttccataccttgtcatacctcaccctggtctccgcctttgtcttcacgtggccttttccccctgtgtgtgtctgtgtgcaaatttccctttttatagagatgcagtcatatgggattagggctccaccctgctc

SEQ ID NO: 59779 - DNA, 1040 bp, Homo sapiens
catacaagatggtccctcaaaaccgtttccccctctaccaagctgttactctagcgatccatagttgatttgtcaactattgagcatcactacgtgccaggtactattctatttcaggtcctgaggctacagtgataaacagaacaatgttcctgcccttgtggaacttatctcctactgagagagcagagagacaaacgcacatatttgcagatagtgaaacatggtatgaagagaatataggccagctttcagatacacctttaggtgtatttaggtcaattctgtaaaaatttgtttacatcttaacatttctgagatcaagttgcttcttagagtccatgaaatcctgtgttaactgacagcatttctttctgctttagtgataagtaaaataatggtgtatcttagaattaatagaatgttagattttgttgcatatggtagctgccacagttatcttagacaagtccaataccacattcgtctacacagtcatttaacaagtatttattatttacctgctacacaccaggcacttctgtgtgcagaatatagaggcagttagccagagtccttcctctcttgcgagctttcattctggtgttgggaggcatatgagaaatacaccaagtcacgttgggatggctaccaaggaggataaagcagggtaagaggatagaaagagacacggatggtgagatgccaggagagggaggctgcctcttaggtaggatgatcagggaagaccctacaataagttgcatctgagatgtcctccccactagcacagcctcaaacagatgatgcctaaattttatccctgcatttgtcaggcaacttctcatgtacaccgagatcaaaattgtgcactatacttgtgcagtatacaagtgatatacttgtacagcatgaaagtgatatacttgagcagtatactacttgttgctgcagtgataccacctatataccaattagaattgtggtgtgtggccgggcatagtggctcacacctgtaatcccagcactttgggaggcca

SEQ ID NO: 59780 - DNA, 1729 bp, Homo sapiens
gaggcagggactgactgtgaggatggggtgaagtagtccttgaaaaccaccagttaggggagctgaaaggccaggtcttctgcttaacagcagtgtgcccttgggcagatcacttaacttttctgagcctcagttttttcatgtgtaaaataggaacaataaagcttgtccttccatcctcagacttgggtagagcaaacaaaatgaagtgtatgagaacaccttccaaatcgaagtgctttgtaaaaggtaatgctgtatcactgctttcagctggtaatgctgttacatttgaacttttgttggtttccattgcagttagatgggtattaaagaactactgtgagacattcagcctctccagatttgtttcaggaggaggagaacacaaaaggctcaggaaacttcttcattgtggaattcaagaaagagcttctacaatagatctctgtattgttagatcagttgaaggtagtgagatgggttttcaactactgatttgtcttaaacgttgctagctgactttgccctcccattggaaaccaactacctaaagagctaaaacttgagaataataaacaattatacagaagttttgaaatctttttaaggcatgtaaaatatggttacacttcgaaaagttatttaatcttctaatgttcaataatttcaggagggttctgataatgatgatgatgagggagaagaagaggaggaagagaatacagattaccttacagattccaataaggaaaatgaaaccgatgaagagaatactgtacgtatggctgaaaaatttactttttgaaattgtgcagcatttttatagtatttgaattttagtcacgaaactgaatttgtttcttttgattatgaaaaatatttctttagaaattcattttcaatttgttttcctaaccattttctttaaattcttttaacattgaataatgttagatattttactcactttactccttgagttatgttaaacaagttgtcaatactaaaaggctttgccctagaaaacattacagttaaaatttctggtctgattttgttgttttgttttaataaggaggtaatgattaaaggcggtggacttaagcatgtaccttgtgtagaagatgaggacttcattcaagctctggataaaatgatgctagaaaatctacaggtattaaatgtcatttgtttcaaagactcttctcaatacaaaacattgcagcccattacattctggttcatgtgaaggcctctcctatctaagtgtctcttctgcagcagcttttgctagatcatgtgtagacagcttgcagccagcttcttgtccttcttgtatcccacatcctgatttgcatgaggtagagtcggtgaaaatgcaacacacacaagatttggaacagaataatttcattgtgccaatctttgccttttatttcttaagtcatatttcttttttttttcttgagacagagtctcactctgttgcccaggctggagtgcagtggcacgatctcagctcactgcaacctctgcctcctgggttcaagcagttcttgtgcctcagcctccctagtagctgggattacaggcatgtgccaccaccccgggctaatttttgtattttagtagagacagcgttttaccgtgttggccaggttggtctcgacctcctgacctcaggtgatcctcctgctacggcctcccaaagtgctgggattacagc

SEQ ID NO: 59781 - DNA, 2937 bp, Homo sapiens
aaagtgacacgttttggccaggtgtggtggttcacacttgtaatcccagcactttgggaggccgaggcaggcagatcacctgaggtcaggagtttgagaccagcctggccaacatggcaaaaccccatctctactaaaaatacaaaaattatccaggaatgttggcgcacacctgtaatcccagctactcaggaggctgaggcaggagaatcgcttgaacccgggagacggaggttggagtgagccaagatcacgccattgcactacagcctgggtaacaagagcgaaactccatctcaaaaaaataaagtaaataaataaaaagtgacccgttttcagactattaagctagtgtttgatttcccactagaacttggtacattcatgtctgtcattaagggatctttactttcgccagttatgcaaattatataaatttacgacatcgcatatctgaagaaccacttttcatggtaaaggttttacaagtgctgctactgattgtgcaagtattaacttttcctacaacttaacccgtaaaggcatatatgattctttttgttctttgaacctttttccaagttacctactttcttttccttttgaaatttctaattgaatacatgatctcatattgagcagagtatttatgaacttatttcacttgctttggatccttggaaaattgttaagtcttagccttgtttcccaaaaacctgcatgaatggtattctctgtatagtggacatgagtaaatattagtgtgacacctagtttagtgacagaaaagagaacagttgtgctttgtcctttgtagatcaaaaggctaaattaaaggactgcaggcttcttgtgaggactttgtccttgtttagaatatggaggtaaaaatagatcgctgtttgtgaatgaaactctaaagatggtagcggccgcaatcagtgcactcccaagtctccatttgcttcctggttgaggaagaagacgtatgcagaaaaatcaatattaaatccgtttcctactgataaaccaaaagataatacagtattgtgcctttggtagttttttgttttcagacacctgaaaattcattgtctcatgttagttttatagtatcccaatgttaacataatagttaattggaaaacactaaaaccatttttatcatattttaaaaataacttttaatagtattaaaagtaatgtgttcatgacagtaatttttaaaaaaccaagaaagcaataccaatattccatacagaaagataatcgtgttaatattttaatacatatttttctactctttttaaattttttttgtgtttgtgattttctaaccaattggttctacttaatacattatgaaattttttcttgacattacacatattctcttaaagctttattttttgttttgtaattggctgtattcatttgtatctatgtgccataatttacttaatacagctgtttcactcttaggttgattctagttttataccactgtaaataatatttttagtgtacctgtgattttctcaggatagataggattactggctcagatttttattttaatttaagaacaaaactaaaatggtaattggcaatgttatttaattctggtttggaagtgttcaaagcagtattcatgaaatgagagggttaaatcacatcatcgctaaagtttcttcctgcttgaatcctctaagattctatgcatgaacaggtatttatttaacacctactgtgtatttattaatatatgggctgtcttaagttttgaacatttaagacaagttctttgtcctcaggggtcttataatctgatgtaatatttatgagatcgttaggaaaaaataacaacatgctatatcatcaaatgtaagatgctgtaagttctccacatgctttaggagcaaataggagaaaaagtaatagattgaagtactcattgacagttcatgcaggaagtaaaactgaaactgaacatgaagagtggatgggatttgaaagtgcatattgaagggtattctctattgagaaggatattgggcaagcaagatttcaaagcagtgtgttctgtgacaggagacgtctaaggcaacttcaggggagggcttaggagagaggagtgggtagcagatcagtgggatcagatgagaccacattgtgtgcatatcaaaagtagagagggtggattggaattccaacaggaagaagaattgactgggcagtgaaatgtgggatggacacaggaggtgaaagcaaattcaggccagggagttccattaggcttaggaggagaatgctgttattgaagaaaaaaaattagtctgtatggtgacaaagctgctatggcgttttgccccattcccccgtcttaatttgcatacattcaaattgatagccacatatgatttctccattaaagtggcacgatttttttcatgtcttttgagtttttggagactctttaaatctcacttggtaaagagtgtggccaacgctgtatcttacatatggctgagactgtacctcatctgttactgttttctacctttgtccaagactgagatatacaagattatccaagtatttaaagctgtaagaaaagagggaaaagtatacacacacatacacttattttttctcgctttttgttagttgtgtttatttgttgaaatgtaggcctacacatttagttttttaaatgtttctcaccgtagtttttaattcttttacctttgttctgagaaaatggctgttgaattcttaatgcatacttttacatgaattggtatagtgtagaaaactagcctgtgtctatttttaatgtatttttccatttccaccttctcatttcaaggcctagtaaatgacaaagactcaaaagattctatgacagaaggagaaaatcttgaagaggatgaagaa

SEQ ID NO: 59782 - DNA, 1074 bp, Homo sapiens
atattaaaaagtagccgggcgtggtggcatgcacctgtagtcccagctgctcgggaggctgaggcaggagaatggcgtgaacctgggaggcggagcttgcagtgagctgagatggcgccactgcactccagactgggtgacagagcgagactccatctcaaaaaaaaaaaaaaaaaaaaaaagatatttagtaaattcaccaaatagctcaagacctgtatagacagagggaaatgattggaataggatcattgctgttgaccattaatagaaatggtaagtgtcttttataacctttcagcttagtagttataactgggaaacagcacaatatagtttattattttaaaatattttgttactaatttcttatagctaaatttatttttcatttgttatcagcgttatgtttggtggaagaaaagtttggaggtttggacaaaagaccatccatttcctattgatatagattacatgatcagtgatacactagaactgctaagaccaaagatcaaactctgtaattctctggaagaatccatcaggcaggtacaagacttggaacgagaattcttaataaaactaggtaagcaattgattgcagacagaaaatgaaggtgatatttggcagattatttctggaatttgctttataatgttaccagtcagagcttacattgtatcttttctattttcggtgttgagtgttacgtagtagtgttaggtaatgcctgtgtggtgtgcttgatttcactaagtaatttcaaaccggaggacaacagttaagcaggacttgcaggacaggacttgaagcaggtgacagtgatgggggaaaaaaaacccacaatcctgtctacctctcttacttttagaatttttggttgctaatataaaatctattttttattaaagcatttcttatttttgcgtatatattttcaacaggcattatttcctagaaagtgcaagcaaagaaactgtagaagggagtacctgtcagaagtttggaactctaccctacaggatttcagagcttacccactggcagagttgcttctgtctctaaggactaga

SEQ ID NO: 59783 - DNA, 1051 bp, Homo sapiens
gctgtgtcacccaggctggagtgcactggcacgatctccgctcgctgcaacctcttcctcctgggttcaagcaattctcctgtttcaacttcccgagtagctgggactactacaggtgcatgccaccacgcctagctaatttttttgtatttttagtagagacggggttttgccatgtcggccaggctggtctcaaactcctgaccgtaggtgatcacctgtcttggcctcccaaaatgctgggattacaggcgtgagctactgcgcccggcctaacagtttcctcttactgtaaaacccagatttattgtttccttaattcactgatggcagagaaaataggttaagggtagaattacattttaactgttttagaaacaattcatgtaatgatagctaaatttaatacctaacatgttctttttatgaaaacactttaaagatagccatttcctagagagagaaaaggacacctagaagtaaccagtttattagaaaagatctgtcatttctctattcagtgttctttcagtaatagatattttcaagttacagagacaagtttaacctgttttcatatacactactcctctttaatgaaaatctgtggttttgttgccttttaggttaatcaacctaaatttaatcagaggcgcatcagcagtgccaagttcttaggagaactttacaattaccgaatggtggaatcagctgttattttcagaactctgtattcttttacctcatttggtgttaatcctgatggctctccaagttccctggacccacctgagcatcttttcagaattagactcgtatgcactattctggacacatgtggccagtactttgacagaggttccagtaaacgaaaacttgattgtttccttgtatattttcaggtatataagctgaaatattcagtttggcatcatttaacatattgcatgtgttttaaaagaatactatgagagaagaaacgttatggtattcatatattatatatatgttcataattagattatattcttcatataagaatgcttttgga

SEQ ID NO: 59784 - DNA, 1068 bp, Homo sapiens
attgagaaaatgtctgctgtgtatgtggcatgtgtttaaatacaaaacatctaacaataaatatagaaaggggtttgacattcgtttccacatatctttctgtgaaagacgtcaaatatattgaagtttttcaataaaaattaatggcagaacacaaaagatgctcagcagtgaacccaagtagactcacttctgttttttacgttttccaagttgttacacacattagatgtatgataatttcttctctactaggattgaagagttgcctttgtagttttcatcattcttcctgttgcagatgcttctgtcagacttctctcatcaccatattgaaatggcatgcaccctgctggagacatgtggacggtttcttttcagatctccagaatctcacctgaggaccagtgtacttttggtaagggcttgaggatgctggtaagagctagaggttcttgatttacctgtgcttcagaggttgaaaatattgaccagtgctggttatcttattctttcatatgaatacaaacatttctacttaaagtggaacatcccatacatatgagttgcaatccctggagagctgtagacatttttctcacttggctaccagcgagttcacagtattgcaaggggtaattaagttcaacctgtaacacttttaacaaatgatgcagatgagcaggcacccaatactgttttgttagagccatgtttatgaatgtttttgttatgttatgaatgttttggtgcatctcaaaccattattcatgtgtcatgtaagcacataaaatgtaagcttaaatatattaaattttaaaattaaggccaggcgcagtggctcacgcctgtattcccagcacttacaaaataccagccttggcaacatagtgagacctcctctctacaaacacattttagaactagccaggcgtggtgatgctttcctgtagtcccaactactcagaaggctgaggtgggaggatctctggaacttgggagatcaaggctgcaggagtcatgatctcgccactgcactccagcctgggcggcagaatgagaccctgt

SEQ ID NO: 59785 - DNA, 1065 bp, Homo sapiens
ctcctgaagtgctgggattacaggtgtgagccaccgcacccggcctatagcaagaaattttacccatatgtattaaaaatatctggagtgggctgggcacggtggctcacgcctctaatcccagcactttgagaggctgtggtgggtggattacctgaggtcagaagttggggaccagcctggccaacatgatgaaaccccttctctactaaaaatacaaaaaattacccagctgggtgtggtggtgggcgcctgtaatcccagctactcgggagggtgaagcaggagaattgcttgaacccaggaggcggaggttgcagtgagccaagattgcaccgttgcactccagcctgggtaacaagcgaaactctgtctcaaaaaaaaaaaaaaaaaaaaaactggagtgaattcgaatgcattaaaataatagtttttatcacagagattcaaaatgttgattaagcattatcttttctctcttaatttttaggtacggaaaaaggaccagatcaatattgaaacaaagaataaaactgttcgttttataggagaactaactaagtttaagatgttcaccaaaaatgacacactgcattgtttaaaggttagtgctgaattagttgattgtttttaattgaaaagtttaaagttttaattataaatggtggataaagtgaaataatttaatatttgattaatccaaaagaagaccaagaaaggaagaaaaagtaacgttaaacaagtgtgcaaaatacaaaacaaatagtgagatcttagatacttatgcagttctacgagtaattacgtgaaatctaaaaagggtgaaatatgtcaagtaaaagccttaaaaatataaaacttgattaaaacaactactaggagccatctacaacagagtcacccttaaatatgaagatgagaaaaattaaataaaaaaatggggaaaatatgctatacaaatactaataaaatgaaagctggtttctctgtattatcatagaggttaaaaatattgactggtggtagttatcttactctgtcatgtgaatacaaacatttctacct

SEQ ID NO: 59786 - DNA, 1177 bp, Homo sapiens
ttcttaaggattaaatgaaataatgcacatgcagctcctcacatagcatctgtacataaatattattttaataataattataccttctataccaccattctctcctggttcttacttgtgttactattcttaatctcctccaccttttttcctagctgagtttctttgttgggattggctcagctttcttccttcagcctcctttttaatgggatgcatttacctggcctttaattcacatctatttctcaacaaccccaaatatacatatcttgccagaatctctcttatgatacttagaaagttttcatgtacttggagctaaattagtccccaaaccaaattcattattttcttcttaaaaatgtcttttacttccttgaatctgcttctgtatttcccatgtaaatttacaatgtattttgtccagttactgagataaatacctctacttttgcacctagacatttaggagccattgtttactaaattcatttgatgctgtcttctaaaagaactaaaatctagcatctcctcttcatacctcctgccactgtctttcattttccatacctggagttatgatagtagatttttaacgagcttttcccgtctctgtcttctacctagatccagtatatttctgcagtctggtatgtttttccccctaagaacctcagctgagaaataaagcaggttaacaaagctgtatgaaatgtcactggcagttaaggaaattctagttgaaacaatgggtttgctaatttcactgacgattagaaaaggtaatagaaattagaaaccaacattctcagatacttcaggtgggaatctggtgaagctgtttggcactagatttcaagagccctagaggcattcacacattggacagctatgaggacatgtcctaagtaaacaaatctatgtaccaaaaaactgtgattcacagtatgactctaatagggaaaactgatcatctgaaagcccaacagtggattaataaaatggtcatctaatcacaatgctgaaatgatggacagccatttgaattgatgtttacaaaaacgtttttagggccgggcgcggtggcccacacctgtaatcccagcattttgggaggccaaggcgggtggattaccggaggttgggagttcgagaccagcctgaccaacatgga

SEQ ID NO: 59787 - DNA, 1064 bp, Homo sapiens
cgtgatctgggctcactgcaacttctacctcctgggttcaagcaattctcctgccttagcctcccgagtagctgtgactacaggcgcatgccaccatacctgtctaatttttttatttttagtagagacggggtttcaccgtgttagccaggatagtcttgatctctttacctcatgatctgcctgcctcggcctcccaaagtgctgggattacaggcgtgagctaccacgcccagcctattgattacctttttactttagaccttgaggtttccaaataacttaccctgagataaatgaaggaaatggctttaaaggattttgtcttgcactagagaagttaccttgagatttgtaaatatgcagttactcagtaattatgtgattaaaaatttaagtcgtgtcaaaacatactgtttttttgtgtgtggtgtttcatatttcatcaaaattacataataaaactacagatgtgcagtaaattcacggaatggaaaatgccagaatattaataaaattgtagaaggctcattgaattttcaaacacttctttatgatggcaataaataggcatgtctgtatgattatgagttttaagatcatttaatgtgtgaatacatctgaaaagtttaaattttaaaatgaattatttttgatatgtctttcctttgacacatatcacatataacttttgcaggttggatttgctaccattttatgcaagattggttgctacattgcatccctgcatgtctgatgtagcagaggatctttgttccatgctgaggggggatttcagatttcatgtatgtatttaagcatttattttgaaatatttatattcttatacgttgagtgaggattctttaagaatgtaattgttggtaagcatattcttgaaatttgatagtggtataacagtttagaatttacggcattctaaatttttgaaatgtgatttacttaacgaagcttgaaattgatcagtgatattctggttgggaggtgagctgttcctgctaccttgttcccccattgcgggaacagcactttttgcttttcta

SEQ ID NO: 59788 - DNA, 1008 bp, Homo sapiens
tgaccaccatgcccagcctaaccatacctttcaaatttatttccatccttcttttttcagtgtccctttagctaagggttaatgtatccatctgaggagctttccagatcgaattatgtgtttttttccctgaccatcaaacattttcatatattattgtatggtacagtgatgtgctcagcaataatctttttttgagatggagtttcgctcttgttgcccaggctggattgcaatggtgtgatctcagctcactgcaacctctgcctcctgggttcaagtgattctcctgcctcagtctcccgagtagctgggattgcaggcatctgtcaccacgcccagctaatttttatatttttggtagagatggggtttcaccatattggccaggctggtctccaggtgatctgcctgcctcagcctcccaaagtgctgggattacagatgtgagccaccgtgcccggcctccactcagcgataattaagactcgtatgattatttgtgtctgttctaattggcttcaagctgtcataatttttaagctcttgtaattttatagtttttagcttcctctctcactgtcagctccattatttgctgctgtcagttaagctgcttttatcagttgctcattacttctcatcttcagagtctgatctgctgagtgttgaatcattgattaatcaggttttacaaaataacatctatggcaggaatggaaaataaattttagcttgtgtgttgattccaactagtagtggccacctggagtgctgtgctaggcaggattctggagcatcattcctgtgtaatgggaaagagtgctttgacaatggaagagggtggcagtgtgagtgccacatatttgccatttactgtccaaattaagatcctgaatgaagatctgagtgggttctgtaatgagttgaaatacataaattagtatttagattttgtaatattattttgccttcgtagaggttttttcagttattgagtaccattca

SEQ ID NO: 59789 - DNA, 1083 bp, Homo sapiens
ataatgtatatatttttttgagacttagtttcgccctttttgctcaggctcaagtgcagtggtgctctctcggctcactgcagtctccacctcctgggttcaagcaattctcctgcctcagcctcctgagtagctgggattacagacatgtgccaccatgcccagttaatttttgtatttttagtagagatggggtttcaccatgttggtcaggctggtctcaaactcctgacctcaggtgatcctccctcctcggcctcccaaagtgctgggattacaggggtgagccatcatgcccagccgagcataatgtgttttataaaatctaaatatattaacttcagttgccaggtatacatgcagcttctaaaagaacctgcagattttgtgagtcttaatctacttttgtgcagcaggattttcatatgactttgaatttaggtatacttgtttgtttttcaacagaggcaaaagaatctaaggagaataaggaggtatcaagtcccgatgatttggaacttgagttggagaatctagaaattaatgatgacaccttagaattagagggtggagatgaagctgaagatcttacaaagaaacttcttgatgaacaaggtaaagaactaatttaccaactttcatttttaattggtttttacacacagagctcttgcctaagaatatagatcttttctccttaattctgtattttttaattccttgtttttctgttgttttcagtccatcactgttttcagaatttgatttataacaggacactacatacccagtattgtgtgtctacaaactttaatgatcatctaaattttaaataccttagttctaaataatattttttattttatttttttttctgaaactaagtctcactcttgtcctccaggctggaatgcaatggtacgatcttggctcactgcaacttctgcctcctgggttcaagcaattctcctgcctcagcctcccaagtagctgggattacagctgcctgccaccatgcccagctaatttttgtatttttagtagagatggggtttcaccatgttggccaggcttgtctcgaac

SEQ ID NO: 59790 - DNA, 1147 bp, Homo sapiens
tgggattttcactgacaaggaaggtctttccttaatctatgaacagctaaaaaatattattaatgctgatcgggagtcccacactcatgtctctgtagtgattagtttctgtcgacattgtggagatgatattgctggacttgtaccaaggaaagtaaagagtgctgcagagaagtttaatttgagttttcctcctagtgagataattagtccagagaaacaacagcccttccagaatcttttaaaagagtactttacgtctttgaccaaacacctgaaaagggaccacagggagctccagaatactgagagacaaaacaggtgattttcaaatgtttctcagagttgagaatttattttggagctcatacttaaaaatgtttaaagtcttcatgccactgaaagaacttatggaaaagggctccttacaggtgatttcttaacattccaggaaaatttcaaagtagaacagtctgagtactcatgttttaatgtgagtctacgatagattttgtttctgattttaaaaaaatctgccaagtagatggtgatttttgctttgtggatgtgtattcttcctgtgattttaaatactccttaataatcaaggggtaaaatttccttttctgtcacttaaacttacctgctaatatttttctgtgtgctttaacgttctctctataacaggtttgctttcattgttttgtattttaagttctttatgtcactgttgctcttcttaagaaaatgagtcattaattaccagtggtatttcagattagagttttgggaaataatgcacaaaattagctgtgaaaaaatttcttaaatgcaactacaaaactcatttgtaggagtcttcttcctgggggcattcatttaaaattctaaaggaggaatgtactgtgcctgtggtaattggtgaaaagacctgactttggggccaattttggttgttaaaaggtatggtagactactgtgtagtatttgtacctgaggagcaacaagaagctagaagttgatggagttgctaggcattaggtcaatttctatggaggatggatttggaggggggctgagggagtgtagcaaagaggtaatagccatagcacgtggctgagtattaaactattttaatatttctaca

SEQ ID NO: 59791 - DNA, 1040 bp, Homo sapiens
ggcgtcgttctcctcagaccccctgtctccgaggctcccatcaacgcgggagcccccgggccgggccatgcttggggggcggtggaggaggtgcctgccccacatgcctgggccgggcctcgagactggaggcggggagcccgcggtggaggggcgaaagtgttcgggggcgtggaggagagcgaggggaggtcgggggaagctcctcgagagccgggagggaagcgagggcgagaaagtggggagggcgcgtgtgtgggaggctgcggagtggggagaccggccgggaaggcttctgtggcgagggagtgtggggcgagaagttggggttggggcagcgatggtccgcgaaggtgaccgtggatacctgtgggaaggggagttgtgtcggggaagtgtggtgggtttagaggttcctacaccaccagagcaggggtttgtaggagaggtatgtgtaggggaaggggcttggggtgtatctggggatggtgggcatgggctgtttggttgacttccttttaatcacataggctggttgattcttcactttaccttcacctcttcaaggcgccaagcactctcttcttgctaggactgttggactaaggaagtgatcacaggatatttggtccccaggttggcagagcagagccagctgggtccacgctggggtgatcggaccttcagctctcttgctcatcttagaggacttacacgacacgaaacgatgcatcagatcaaagtgaaaccctcgctgacgctttatctcatttccatagttcttaggtgttccttaacatcgtcagtctcctcatttgtgagctggtacaatttctaacagttcttaatacgtcctttatactaaggatgttctttaaaaaataaagtcagaaactgggagatagtgttcctgtgctgttctgtcctgacagcattttgaataagagaattgaaaggtaaaaccgcattctctcatactggagtgttttcggagcactctgattgggatttcatacataatccatatggtactttgcaag

SEQ ID NO: 59792 - DNA, 1054 bp, Homo sapiens
tgggtgctcagtgttggggtcatcccccgtccatcctctgtaactgaggatctttgaggtccacgcttgggtggtcttcccatcttgctggtccggacctggtttcggaagggcttttctttcctttgttggaaacgtgtgagaaactctttttttctttctctttttgtttccttttttttttttttttttttttgagacggagtctcgctctgtggcccaggctggagtgcagtgctgcgaccacagctccctgcagcctcgaactcctgggctcaggctatccttccacctcagcgtcccgagtagctggggacacagagggatgaccacgcccagcttttttttttttttttttttttttttcatttttagtagagatggggtcccaccatgttgcccaggctggtcttgaactcttgagctcaagctgatcctgcagcctcggcctcccaatgtgttgggattacaggctgagccactgcacccagcctagaaaaccagctctttaatgaggcggagctgtgggagaagtaaagttttaaggtctcccaaggatacatttccaggaccatctctgaggcttcttttatgtgagcaggtgggggggtccaagactgcattgcttgggagaagtgggcagttagttccagtcttggaagacagcatgatatttattatgtatttgtctccttgtagctagtctgttactttaatttcagagtttaactcttaactctgctgaatttggaactatgtgctggtggggtttctttcttttccttttagccactctattgacaccttgatatgtgctggtggttttaatgaattaacagtcatgaatatcagcttttggaacttctgttgcatgctcatttgcgagactaattttgagtatttggtttacgctccaaaattattgtatcattatttatcctcacggagtagaagataagtacagattgcttattagaggaaaatcatttggcatctttgatctgatcattagattaatgttgaagatccccttcggcatctgggcacctgacct

SEQ ID NO: 59793 - DNA, 1041 bp, Homo sapiens
cctcccaaagtgttgggattacaggcgtgagccacggcacccggccaataatgacccaagttattaagaacaaagcactctgcgttgaagtaattattttggtatgttccagaattaacttgccacatgatttttttttttttaaattttttttaaatatgaaaatttattttgcataggaaacaataatctctggtaaaaatcattactgcatataacaaaacaatgccttcaattaaagggggaaagtgagtttttaaacattggggttaatttagaagaaaatacagtatataataatctcaacatcatgttaaggaacatgattattttttaagatgacccctttgattgtatttcacaggattattgaacatggggaaggaagaggcctcacttgaggaagtgttagtctatctcaatcaaatctactgtgggcagatttctattgaaacctcccaacttcagagccaggatgagaaagactggtttgccaagcggtttgaggaactgcaaaaggagacgtttaccacagaagagcgaaaacatctgtcgaaactaatgctggaatctcaggtaaaaaggagcatctaggccgggcacggtggctcatgcctgtaatcccagcactttgggaggccgaggcgggcggatcacctgaggtcaggagttcaagaccagcctgaccaacatggagaaaccccatctctactaaaaatacgaaaattagccaggcatgctggtgcatgcctgtaatcctagctactcatgaggctgaggcagcagaattgcttgaacccaggaggcagaggttgcagtgagccgagattgcgccattgcactccaccctgggtaacaagagtgaaacaccttctcaaaaaaaaaggagcatttaatagcaagggcataggtcagcctcactgcctataaagatatatagcctggctgacatagagaaaccccgtctctactaaaaatacaaaaattagccaggggtgatggtgcacacctataatcccagctaatcaggaggctgaggca

SEQ ID NO: 59794 - DNA, 1029 bp, Homo sapiens
gggattaaggcatcagccaccgtgactggcctaaaatttcttttaatatgtgagaaaaaaaagtcttttggtaacaggacatactgtcaccattcagggctatgtacagttgcagttcttgagacagtcttgctctgtcacccaggttggagtgcagtggcacgatctcggctcactgcaacctccgcctcctggactcaagcaattctcctgcctcagcctcctgagtagctgggattacaggtgcacaccaccacacccggctaatttttagattttcagtagagacggggtttcaccatgttggccaagtctcaaactcctggcctcaagtgatccacctgccttggcctcccgaagtgctgggattacagacgtgaaccaccatgcctggcctggtcttacttcttaagaactaaagatacttaagttcagaacttaatctgagatgatcaaaagatgacatgtggaagacaggctcagtacaaatgaatggaactgaacctctgctggggctgtgaccaggactctggaatgtcaagatggcaagaagccccttcctaatagtttgggtagttggatagtttgcagccttgattcataccgtagagccccgtgtgaaaactggggtactgggaagaggcagcagaaatctaaggcctggattccagtccagaagaacacacattctaagggggtttccttggggtgagttattctgccgctcaggttattctcctcagcccctcctactgtcccggatcctaggaaaaccatcccgctgtgtccgtgttatgtctctctccgggatatgtagtaaagtggcattgctgtggccacttggggagtgtggggccatctcacaacacacacagacttatctgccttccactggagaagctggctgtctcctggcagctcacgtctgacatgatgttctgcaggagtttgaccactttctggccaccaagttctcgacagtgaagcgatatggaggcgaaggggctgaaagcatgatgggctttttcc

SEQ ID NO: 59795 - DNA, 1066 bp, Homo sapiens
tgttacctttgcagtttatttgagttataactacctcccattgtgttcattgaccagagaggttctaaagcatgttaatttttctttcctgacaatattacttatttgtagtataagtcatgctgacaaccttcatcagagtatagacataggacagttatgcctgggaaacaaagggctagtgctggatgtactggaaagatagttttctctaaaaattgcagggcacatgatacctctccactcttatgcaatctcatcttaactatagacttttgaatattggacagcatatattaataactatctgttatcctaaggaaaattctcaggattaagccagtatataagaatttacagtcaccacaccttattattaggttatttatgggaatctgactttttttttcttgcttgcttaaggttttaatgttcgtctaagtggccaagatgttggtcgtggaactttcagtcagaggcatgcaatcgtggtttgccaggagacggatgacacctacatccccctgaaccatatggacccaaatcagaaggggtttctagaggtgagatgtttctatagctgttgtaaaatccaggtgccaacgattacacttccaggattcttagaacaagtaggaaggagtgctggcaactttgggttcagtacttttggaagtaaaggagtgctaaatgggtggatgaggtgggtctgtcaatttggaatgcaagtaacccctagagagtaggctggagctttcttcttctggtgacatatctgtaatcatgtaaatgtcaaatcaatgtgtgttttgtcaactcaaagttgacattatcatctgcatattgctgtaattcattaaagttagtcaaagatatggataagtcagtattccttgcctacttaaggatagcaaaatcgcacatcctcaaggttacctgttccctaaggtatgattggcttgacgaatgtacacataaccgtgtatttctttcttttttttcggagacttaatcttgctctgttgcccaggctggagtgcagtggtgccatcttggctcactgcaa

SEQ ID NO: 59796 - DNA, 1094 bp, Homo sapiens
cccggccgggagctgcccattcttgtaagagtggtgcctgcggtggtattggagcggcatgtgctgtccaggaagctgggaacgttcccctttgagtttgtcttccactcgtaaaagcccagggcctgtgccgtgataggttatggctttcttttttgagacggtgtctcactctgtccctcaggctggtgtgcagtggcatgatctcaggacactgcaacctctatctcccggggtcaagtgattctcccacctcagcctcccgagtagctgggactacagacatgtgccactacagctggctaatttttgtatttttagtagagacggggtttcaccatgttggccaggctggtctcgaacacctgacctcaagtgatctatccgcctcagcctcccaaagtgctgggattacaggtgtgagccaccgtgcctagcccatgataggttttcattcaatgaaatggacatttccctaagtatagcataacagttctagaaggtgcatgtaatgaaagcagttttggggggccaggcagaaaactaacattgatttccccagctgagtcgtgtcaggccactttgtccccgcttcgtagagctcttactccccacgtggtacttttccaggagaggccaagtggctcctacaaagcggcatcgtcatcctccttccacatggctacgatggggctgggccagaccactcatcctgtcgaatagagcgtttcctgcaggtaagggtaacgtcttccggagtcaatgaatcattttcctgcttcctagagcttttctacctcctgcggatagcttaacgcccacctaactgtaacacagcttagtatttgagtgaaacagatttgatgcaatgtcaattttctttggaaacgtaatgcctcaggtataattgtatcacggttttatggcaattaaagttctcttgtgccaggatcagcagttcttataccaggctgatcatcagaatcccccagagagcttttttatttttatttttttttgagatggggtctcgctctgttgcccaggctggagtgcagtggtgcgatcttggctcactgcaacctctgcctctt

SEQ ID NO: 59797 - DNA, 1072 bp, Homo sapiens
aaaaatattaaaattagtcaggtgtggtagcaggcacctgtagtcccagctacttgggaggctctggtgggaggattgcttttgagtccagagtttggggttacagtgtgctatgatcatgccactgaactccagcctgggtgagagaacgagactctgtaacaacaacaaaaataattgtccagattttgtcaactctctttctttcctttcactgcctttggggaagggttaggagttatgcctcagctttctgtcccaccaggatcttctgagatttaacttccttgccctcaatttttcaacctttctattagctgcttttgatttttgtcttaaagcacgcgtgcacacacacacacacacacacacacacacaatcgttttattacattaggaaagtgagattctgatagtgcttccttcccctgtcttaaccctgtagtaatcagaatatgtattttttttaaaaaagtcctttccagattatctttgctatcagccgtgtttgggaacaattgtgttagatgacacagaattgggccagtggagaaagccatcagagctctcctttggttaataccgcaccgttcataaattcacctgctgatatttttctgtaatgttgggcaatagcttttctgctataatcaagaacacctgtgtttccctttggccagcccattgtcactacgactgaaatagatgatctgaacattcttctcctttcttgccacttctctcccagatgtgtgacagtgcggaagagggggtggacggagacactgtgaacatgtttgtggttcacccaacaactcctgcacagtatttccacttgcttaggagacagatggtccggaacttcagaaaaccactcattgttgcttcccctaagatgttactcaggctcccggtaagcagaaggtggtgaataagccttcctccttttgtcattttttgcactccatttttccctattttccatatctaattatatttaaattacagaaacacctttttagtttcaactgactttgctactttcattttttttgttgttttttgagacgca

SEQ ID NO: 59798 - DNA, 1019 bp, Homo sapiens
actgtattcctctaagatgttgggattgatatacgtgatttaatctgcaataggtggaataaccaggggaactggttatgaatatgtgaatgcaaccagcaaatttatccttgaaggtgtgatggtagaaataggaaaacaacaaaagaaaaacaataacaaaaaaagaaagtgtgatggctgggtgcagtggctcacgcctgtaatcccagcactttgggaggcttaggcggctggatcacctgaggtcaggagttcaagaccagcctggtcaacgtggtgaaacgccgtttctactaaaaatatgaaaattagttgggtgtggtggcatgcgcttgtagtctcagctactccggaggctgaggcaggagaattgcttgaacctggaaggcagaggttgcagtgagccgaaatggcgccactgtactccaacctgggcgacagagcaagactccatctcataaattaaaaggaaagtatgatagtgttatggattttagctctgagtgagctggaaaactaggtcattatctagatgatttcagacttgaccctaattgaccatatatgaccaggaaacacttctgagtttacagctccgtggagatgacctcaacactgcctcttgatttgtttgatgcatgtcactttcattaattttccccctcctttttgaaagtcctgtggcagtactaatattttcattttatgtaatctctggtgctgctttccagtcactgtatgaagtgtctccccaacactagcaaatctaggtcctactaaatacaaatctctgggtggatgatcttctagtactgtatttttaaattaaggagttttagttataatgaaattgatttgtagtctgttttgccgtaaacttgtttttctttaaattgttcttacagtgatatcttactatttttaactgtctggggtttctgatatggggatttcagcccctggttaatcagtcttgtccctacaagtccctgatgcagtatgtttatttgtgatgt

SEQ ID NO: 59799 - DNA, 1079 bp, Homo sapiens
ctgaggcaggagaatcccttgaacccgggaggtggaggttgcagtgaatggagatcatgccactgcacttcagcctgggcgatagagcgaaactccgtctcgaaataaacaaacatatatcggtgactgcccatcatttgtagaggcttttttaaaaaagataatatagtcaactttaggcaactacagaaacgtaatcactcacgtcagctttaagacaattttgggatgttggtatatagaatccagtgtctgtaggggaagaaaagccgcagagcctaactaatacctagctgcggcttgtctttctccacattgcagaccctttggcaaaggacagaagcttgagagattgtcattttcaccctccagttctctggcaggacttgacttaagccgtgccagaagacagtgtctatccttaaagaaccttgatttatcttacctttatatgttataagagtagtctgggaaaacaatactttctgatgaaatgtaattgttaattctctgggttgattattttacacaagcaagtacttttctattacctgggagagtaactaggcaatgaaatgtggtctgatgaaatcaaacagagattacataccttttttttttttttttttttttttttttgagacggtctctctctgctgcccaggctggagtgcaatggctccatccgggcttactgcaagctccccctcctggggtcacgccattctcctgcctcagcctcctggggaggggggactacaggggcccgccaccacgccctgctaatttttttttttgtatttttagtagagacgggggttcaccatgttggccaggctggccttgagctcctgacctcaagtgatccgcctttctcggcctcccaaagtgctgggattacaggcgtgagccaacaagcccggcctacatactttaaaaaggtaactacaggggctgggtactgctcacgcctgtaatcccagcactttgggaggccgagacgggcggatcacgaggtcaggagttcgagactagcctgaccaacatggtgaaaccccggctctacgaaaaatataaaa

SEQ ID NO: 59800 - DNA, 1034 bp, Homo sapiens
cctgccacccctgtacccttcggagactccacttctgtcattccatattctatgtccatgtgtacacattgtttagctcctacttttaagtgagagcccacagtgtttgactttccacttctgagttgtttcacttaagataacctcctccagttcgttccatccaggttgctgcaagggacatggtttcattcttttcatggctcagaagtatttcattatttatatacagcatatcttctttatccagtcatcaagaagcatctgtgcatgtgtgtctgtatatatgtgtgcgtgtgtgtatatgtatgagagagaaaaaaatgtttgtaaaactttgtacctaataaacaaaaatgcttcctttataacacataacggacattcccaatttctgtgaattaggccccaaagaataacctcaaaactctgctgccccccaaaaatttgctgtttcttggttttgattgatgattctttacattttgttgtacagatccagtttagagagaaggttctgtggactgctataacgctcttcattttcttagtgtgttgtcaggtatgtaactatactattaaataaatgtctgcaccattgttctaaggttttgattggttagaatttgagaattttttttgttaaaataaagaatacattgagctcaatatattgagcattattatcctttttattttttattattaatttttttttgagatggagtctcactctgttgcccaagctggatgcaggggcatgatctcggctcaccgcaacctctgcctcctgggttcaagtgattcttcttccttggcctcccaagtagctgggactacaggttcctactaccatgcccagctaaagtctcgctctgttgcccaagctggatgcaggggcatgatctcagctcactgcaacctctgcctcctgggttcaagtgactcttcttccttgggctcccaagtagctgtgggactacgggtgcctaccaccatgcccagctaatttttgtatttttgttttattttat

SEQ ID NO: 59801 - DNA, 1104 bp, Homo sapiens
agtgttttttaaattgtggtaaaagtatagaaaatatgccatcttcatcatttttagatgtgcagtttagtaacattaggaatgttcacattgttgtaccaccacactccataagcgatgtatttactagtgaatgcaccaagtgatgatttgttgtttttatttttattttcactttctggttcttttaattattttttttattaacccttatctatgtgatggaatgtttttctttttattttctttttaataaacagctttaccttgaagatatgcttgtttttgttgaagaacataagaatagtttttaaaaaagtattgcaagcagtaagtgaataccttgtaaattaagtgcacactttatactttttttttttgagacagagtctcctgtcacccaggctggagtgcagtggcgtgatctcagctcactgcagcctttgcctcctgggttcaagcgattcttatgcctcagccttatataatacagtttcataaactattttgtgtactattttagatcccactgtttggaatcatgtcatcagattctgcagatcctttctactggatgagagttattctggcttccaatagaggtatgcgtgtcttttctgtctccacactcctactcacagcaaacagatggaaacatgtggattagcaatgagttttcaatgtctacagggagggggaggatatcattgcctagaaaagcctagtatgtagataatgacaacaccgtgtgattaatgtaatcatagagaaatctgttcttgggttttcatggactggaaaaccctgatcttcagtgtcaaagaaggtgatgtccagataacattggaattggagtccaggtggggcgccgtggctcacccctgtaatcccagcactttgggaggccaaggtgggcagatcacctgaggtcaggagtttgagaccagcctggccaacatggtgaaaccccgtctctactaaaaatagaaaaattagccaggtgtgggtatgcacctgtaatcccagctactcaggaggctgaggtaagagaatcgcttgaacctgggagatggaggttgcagtgaactaagatcgcaccactgc

SEQ ID NO: 59802 - DNA, 1694 bp, Homo sapiens
tttgtttttgagatggagtctcactctgttgcccgggctggagtgcagtggcgcaatctcggcttactgcaacctctgccttccaggtttaagcgattctcctgcctcagactcctgagtagctgggattacaggtgcccgccaccacacctggctaatttttgcatttttagtagagacggggtttctccatgttgtcccgttggtctcgaacttctgacctcaggtgatccacacacctcggcctcccaaagtgtggggactgcaggcgtgagccactgtgccaagcctatagtactttttattcagggcattgctgcaggattgtgttaataaatgagaacttttcttagcaagtagtgtttaagaaatgaaaatttgcttgttaaaattttcacgtgtgtttcagttgaggtaattagggagtgcgacacctctaaatcagtttgtatcgtgtacagcaaacattgcacacttctctccccttcctttccaggaactttaatggaattgggtatctccccaattgtaacatctggtttgattatgcagttgttagctggagccaaaatcattgaagttggagatacaccgaaagatagagctttattcaatggagcccagaaacgtgagcattaatgcaattaaagagcattctccaaatttgagagtgctcgtggtaaagatgttttctctagtcttttcttgtctttggtggtaagcgtgctctcctttccccccaactttcatcagtgtttggtatgatcattaccattgggcaagccattgtgtatgtcatgacggggatgtatggggaccctgcagaaatgggtgccggaatctgtctcctgatcatcattcaggtaagaaatcctatattttcctatgcagataacaaaacagtttgattcctttttccttttctaacagttctttaggtgattggcttattcattttcttacttttgaattatttaattctagtattttgatcactgaagtgatacgtgtaaaatttttttaaaaccttctgtcaccgtgacgtgttcaagttgtgttgacgtgaaaaattcaaatttattctaatagcttcataactgcacaatacaaagaattatggatcaattgtattttattgattcttaagatacacatttgtcacattttgatgtctctagaatcaggatgtttttgtacagtaaacagtgccttccacttgcggtctgccaggaggcagtcatggtggtgtcactgcctgtgcgtgtgtcagcctgttcaggtcatgctgaccttagttggctgagtgtgatcttcacagaatgggtgtttgagttcaatcgctgtctaaaggtgttcagaaaatctgttgtgatttgttattgaaatgaaagtttatgtatagaagggcaagctagatgataaatatctaccactaggtctaaaatacgtttttgtaagtagaaaattaaaattctttgcaataaggtattgtgccataagttaattggcagtattcttttcttagtagtacacaaaataatgatgttttacatggtaatgtcttagagtcagtgaaacactgtttatacacacataaatatattccatgggttttttaaatggatgcttaggaatggaatttttaaaggtcaacataattattagtgtcctaagtatctttttttttttttttt

SEQ ID NO: 59803 - DNA, 2638 bp, Homo sapiens
cgggtgcagtggctcacacctgtaatcccagcactttgggaggctgaggcgggcggatcacgaggtcaggagatcgagaccatcctggccaacatggtgaaacgctgtctctaccaaaaatacaaaaattagcagggcgtggtggcaggagcctgtagtcccagctatttgggaggctgaggccgaacccaggaggcggaggttgcagtgagctgagattgcaccactgcactccagcctggcgacagagcgggactccgtctcaaaaactaaaacaaaataaaacgacaaaaattagccaggcgtggcggtgtgtgcctgtaatcccagctactaaggaggctgaggcaggagaatcgcttgaactctggagtcggagtttgcagtgagccgaggtcacaccactgcactccagcctgggcgacagagtgagactctgtctcaaaaaaaaaaaaaaagattaactttgtctttgtctttatttgtccatttacaaatcacttgattggcaaatttacagcccttgggaattagggaaagaggcgcattggatggggagagatgatattctggagtctgattttagtatctttcagggcttagggtttctcttcgtatgctttaggcattgttgaggttatggacaggccaattgttgccttcagttttgtttctttacagcattttctttctgcaatccagagtttagaataatcttgatttttagaagacacttagaactggcatgtagctcgtagaacattatacatcaagaaaagctctctagtatcttacttaaggatctattcagattcctaaggaatctccactgagcgattctcagccagctagctacaggattgacttcttacagagtcagttatggattgaaattgatataaaatagagttaagctattttgctgttcattttcagtattcagaaatcagaaatacttacagtccaagaatgaaacaagtgaagtggatgtacactgattcatttacatgaattctgatacacaaatatgcgtgttatggctaattcttctaatgttaatatataaagaggggtgtcatgtttgattgtaggtgggcagtgacccattggtgtcttttcaaggcgttactaacattgaaaatatgtggatacactgaagagctatgattggatcagtgtgtttcacccagaaacataggttttgaaaactgtttgcatgccgttgtggaaggtatttctcaccttatttgtttatgtttcattcacgtggttagtgtttttcagctagtgagtttagaaatctacatagcaggtcttgactaaaaattttaaaaaactattagagaatatcagtgtgcatggcacataataaaggtaagtatgttttgacatactgaacaaaagatagtttgacaaaactaagttgtgtgtaggtgtcgtgcagggttaaaatgttaagtgccatgtttataccggctcatcatacatgtcgtccattccccgtgaacatgtagcagttagggttctggtcccatcactgtagacgctgctgtcacttcctgggttctcatcccttttcacaggcatgcatgatatttactggcttttattcccttaattatagaaaccgtttctcatttctgtataatttcttcctccctttggaaaaacccaagtttaattttcacaggacatatgtgaaccactctgtagtccgatggtcactgttctgaacagggggtgtggagaattagagttgtttcagagctgctgtgggactctggagaggtcatttctcaaggcccatcacgatgctttctgtggctgatgttcatggacggctgttgcctcctgcataggatgggtttctctatgatggggagtctctgttcactaattacatgattgtggttaaatagaatcggtagtaagtcctaacctctacattattttgtcaaaatgtcgaacttggttttcaagcagtaaaggattagcatgatctctcttagaagtttggagaatcgtaccctttctcctgcccattgaaactcagactaaaagcctgtaaatagacaagttaggctctgtccaactactgaaatggcagttaaggagaaaaacaacactgtgtaaggtaagcatgcctaaaatggtctcatgtggttactttggtcgctcttccagcaggtgatattggataaagtgagtacaaaatgagggtgggcggcttgagagctgggaggaatggaagtgacttcctcacttctgccggagggtgtctttaaagtggggacatgtgtgaggttgggggcatggaagcatattttcttcctgtcttgattaggttatttgagtgcagggaaggggtcatatgactgaggaggtcacttgaagggctagggactgtttttaattaatgcatacttttacaggaatgtcttctccaagaagcaagttcagaattttcaatatcccataaattaaagtcagtatgctttcatttttaaaaacaatatgagcttaaccttaaccgtcttcaaatttacattcaatctttgtcactatgtgtatagaatgcatttttacattgctgctcgagtacgtatttgagtacatatttgtgttctagttttttatt

SEQ ID NO: 59804 - DNA, 1748 bp, Homo sapiens
tttcaaaggatcaacacagcccttagacttatcctttgatggcagtgtacatttccatcttgctattataccagaattcatctgactttttacttccttggaggtatttgggatgttttcagtttcttgctgtcataaattctagaatactgtgatcattttttgtttcagtgtgcttttcaaacaggctttatttaaacattgcaaaagaaactattcagataagtgtaaatagactttaaaagttgaaatgtctgctttataatacaacagtatttccagtcctcttactgttctagattggcctgagtaaatgaaagcaggccaaaagatgcagttggtcatcacagtgagattgcaacgatcaggccttaatattcaaaacgcccctagcttggaaatagccaatggtgttcctctccccctttcttgagtttgttcttgcttccgcttacttgcatttctttccccacagttgtttgttgctggtttgattgtgctgctgttagatgagctgctacagaagggttacggcttggggtctgggatttccctctttattgccaccaacatctgtgagaccattgtctggaaggcctttagtcccactaccattaacactggcagaggtacatcgcacagcgactgcaactgcacgcgttttgctggatgtgtgctgggaacaaacccatcgtgtcgcagtacatgcctagagccgttctggtttgctctcctaggggataaggaatgcgaattcttcaaaacttaatgagcagagatttgtggagtaagcaatactacctcagagagaatagtatcaaaattttagcctctgcttatttaaaatttcagtggttgcaaacagattttcaaaatttcttttgttaaccttgcttaaggcattgctgcagaagtcatttatttgactgatttcagcatccgtagggggataaaaaggtagtggattttagatttttcaaatgaaaagactgttgttcattgaatccacctggagcactcctactctgctgctcttctaattggctttgtaatagcaccaaagttttgaaatatttcattctctctttccccttcctcatctccacttctaacagatactgtcctaagtggttaatacctaaactctgatcccagccttaagaaaactgtaatgatgattaatgttcttggtgcggtaaacttcgaggcaggctcgatagagtgacatctgtctcttattctgacatctctgctctgcttcgctgctgtttatttttcctaaaaacactctctcccttccctgaagtagaggagaggcaaatctctatgaatgaaattttgctttggtaaattttacgttgtatgttttcttcaagaatagtctcttgagaaaacttcggatttatgctataaaaacatagatttgcctcaatgatctaaatatttgtagaacctgctcacatggctatatcataaagcaaacattggcgaattcttttgacccatattttctgctgtatactggactttcacggttagttgtttgagctttgggacagctttggacgatgagtccacaggtcgtgtctgtcttgattttacaggtactgagtttgagggtgcagtcatagctctgttccatttgttggccaccaggacggacaaagtccgagctttacgggaggctttttatcggcagaacttacccaatctcatgaacctcattgctacagtttttgtgtttgctg

SEQ ID NO: 59805 - DNA, 2186 bp, Homo sapiens
gttaaagtcttatgtcagtattttagttgattgcattaatattttcatatggaaggatcattcatagggatcttaatgtactgactggatactctcatagctcagaaaatttcagattttaagtataatcagaggttgattgtaaatgtaatcatattcctattttcagtaatggaagattttgtaatatattacaatttttaaaaatgactcaatattttcacagtgtcttgcatgtaataggtgttcatcgtataactttgaaggagtgaaggtagtagacacaaaagtacattctgaaactacatagaatgactagctgtagatgccttgaacttaaaacactgtcatttctgagaagtttgaagtgacatgcaaatgtattcctgactaattaggttgaccacttgttctttgtactcctgttctgtaggatgtcagtgggggaggacccgcacgttcttacccagttggaggcctttgttactatctttctcctcctgagtccatgggcgccatctttgaggatcctgtccatgtcgttgtttatatcatcttcatgttggggtcatgtgcattcttctctaagacatggattgaagtgtctggttcctcagccaaagatgtaagtgtttggtttattttaaaataaaactcttggcaatgcatggtggcgcacatctgtaatcgtagcactttggcaggctgaggccgctggatcgcttcacctcaggagttttgagaccagcctgggcaacatagcgagaccccgtcatgactaaaaaaatacaaataaaaatcggccgggcacggtggtgcaagcccgtggtcccagctacttgggaagttgagacggagcagtaacgcttgagtccgggaggtggaggttgcagtgagccaagattgcaccactgcactccagcctgggtgacagagcgagatcctgtctcaaaaaaataaaaaaggccaggcgcagtggttcacgcctgtaatcccagcacttcgggaggccgaggtgggcagatcccatgggtaggagatcgagaccatcctggtcagcatggtaaaaccctttctctactaaaaatacaaaaattagctgggcgtggcagcgcatgcctgtaatcccagccactcaggaggctgaggcaggagaatcgcttgaacctgggagtcggaggttgcagtgagctgagatcgtgccactgaactccagcctggcgacagagctagactccgtctccaaaataaataaataaatagataaataaaaaatttttaaaaaagtaaaataaaactttgtttttggaaaattcatatttaattgtcaaaacagtagtggatacactcctttataacttaagctttaatttatacatttttaatgagtcagtgtcaccccaacaggctaaaaattggttcccaaaaggtaaaaaattcttagatattacagtggtttgcaaccctcctgcaaaacaaaatcttgtttggtaattgaagaagggttgagaagcaccggtttcatatgggtaacatggagcggaggagcactgaagctttggtttcctcaggcttaatgcgaatgatatgacaatgcaactttcaggttattgtatgttacgtgttagtgtgtggcgagcacttcgcatagaacgtggtagatgtaagcagtgaaatgttccagttggattttgaaagtcgtttttctctcggcaggtagctaaacagctgaaagaacagcagatggtaatgaggggccaccgagatacctctatggttcatgagcttaataggtaaggctgctagactgacacctttataggcctgtgtttgtgtttcagtctttcagtgttggctaaatgtttttctttgttcaagttcatatttaaaacccttctattcacacagatgaatcaaaatttcacacaaaacttgttttccatgtcaaaaccaacacctgaatttttcattgaaattgtgagcactgctctgctcatcccagtgataaaatcttgcagatcagtgctgttctcagcattggctggctgcacatacaatcaccagagagcttttaaaaaggatttcccaggaactgtggcttatttggtctggggtgagttccaggcatcagggttttattttttggtaacagctttattgagataaaattcagataccatgtaatt

SEQ ID NO: 59806 - DNA, 1965 bp, Homo sapiens
tgtgcagccaaaggttgaattactgaaatggatcctcaaaatcttatgacataaatttgttcatacctactcttcattccacaagagggaacgaaaggttactcatttaaaaatcttaaacattttaatatttaaatctgtccaggaatctcatgtcctgtaagattacatattgtctttcttggctgttgactggttcctggaaattagggtcagagtctttgcctggatcagagctcctgttcccatgccgtgccctgcacacccctccacactgcagcctgttccctctggagttcagggaggctttagacccagctatggctgctgcgcctcgacctgtcttcgtctctagctgccgtgctgttcctggtctctgctgccgcctaacttggggttctgtctcctaggtacatccccaccgcagctgcgtttggcggtttgtgcattggcgccctgtcagtgctggctgacttcctgggggccattggatctggcactggaattctgctagcagtcactattatttaccagtattttgaaatatttgttaaagaacaggccgaagttggtgggatgggtgctttgtttttctaaatgttcaaatatttcattttgtgcgtgtgaaagggaaaacactttgacggatcgtttttgtcagatgacactggtggctccccttttctcccctcacagtttcttgtttcgagtgctgactgacccgtttctgaaatgggcaccgagctaagtctgtgtgcagcattagtacccgctgccttaaaactcaagtttacattattcattaaaaaaagtacatctagtgttgcctgtaatgctggaaaccagtgtatctaccttgctgtgttaaatcatgacagtgagacggtgagatggattcgttttgcacacaacattcaaaacacttcatattgcccccacttgttgaaaaataaatgtagttcaaattgccactttccagtatttttgagcttatttaatgagttctggaacatttatatctaatctatattttagataattactttttatacttttttaactcatggtatccccactccccacccccacctcatttttatttgtcccttctcaaagcagccacttagcccacatgggcgaaatcaagtctccagttatttctgccacaactgcttctaaggcctcctccttctcctcctcctcttcctcttcctccttttccttctcctcctcctctcttcccagtgacagcatcatcgtgctgtttgcctgtattggctatgccttctaactccaaccagtcacttgagaatattctttcaagattctgggccccgattcttttctgtttaaatccctaaagcaaagatctaattctcaagcaatgtctgtagttcagtgggggtgaacaatgaatatattcatgctaggaatttgtgtctgttgttgtactcacagcagcaacatgagtgtaaacagtagacaataaacttttatttaagaaaactgattcagttgtgttggaaaaaataaagaaatctgatattaaacgttttctaagatcatttgtataggttcagtgtattcataagaagtccaccctgagatgcctgtaaaagtcaaatgtaattacacttcaaactttaatcctaaattattgacagatagatagatagtgaccaacttaagggtaatcatatatgtgactaacatttgggaggaaacaggaaaacagtggtctcaaaacaacaatatcccagtctccatttgaaagagcatagatcttggtaaatcattttgaaaactatgtgctttatttcccaaaagatcaaacttaatttttaaaagacacccttttcagaagtatgggttttcattgctgtttagtttcttaggtgtggtatgtcttacgtagcttatgcttacaaagccaaataatcgcagggcaaggcagataaaggcagg

SEQ ID NO: 59807 - DNA, 1064 bp, Homo sapiens
gcactttgggaggctgaggcgggtggatcacgaggtcaggagatcgaaaccatcctggccaacatggcaaaaaccccgtctctactaaaaatacaaaaattagctgggcgtggtggcgtgcgcctatagtcccagctactggggaggctgaggcaggagaatcgcttaaacccaggaggcagaggttgcagtgagccgagatcacgccattgccctctagcttgggcaacagagcgagactgtctcaccaaaaaaaaaaaaaatcattatccctgatgttcttgtctcatgctaggaatgtaatcttgcctttatagtctttattctttaagatccttatagaccaaaaaaaacgttatcaccagcatctagcataggaagtgacatatagtagtacctgctgcgcaaacactgattgaataagatgttttgtccttccttaacggcatgatctaagttgttttctttgctttccacagctctggtagctgaagaacatctcacagtggacgccagggtctattcctacgctctagcactgaaacatgcaaatgcaaagccatttgaagtgcccttcttgaaattttaagcccaaatatgacactggccatttttgtaaacgagaccaccaggccttcttcactaagactttgtattcaacttagtttaatgtagatttgccattagctttttcgtaaaataaaagcacagaacagatgtggtggtggtatggaattgtaattacaggtaggttgtgaccttcctttaaatttgttataactccagctaaaattaacaaagaatataaatgcaagtatgtttactccaatttttttaaagctcaacagcagttaactacagctcagttacttttctagtccagtctggtagacaggggtatttgtatagagaaatagacctgagttctcaattaggtcatttccactctcaacccccaatataaaattctaagctgggtatgcaaataaccatgtactccgttagtgtttaaaacagcgttaaaaagaaaaaaaaggctttttggcctcttctaattgaatttt

SEQ ID NO: 59808 - DNA, 1542 bp, Homo sapiens
tctacgtatctgggtgcccagaatagacaaactgatagaggaagacagtagagtaagcgctactagggatggggaattagtgttgagtggatcccgagtttctgttgggtgtcatgaaaagttctggagatggatactggtggtggttgtgcacctttttgaatgttatttaatgctactgaattgtaccttcatagtggttaaaaggtaagtttttatatgttctgtatattttacataatacgcagattcatatctataaaaatatacatactatcgaatatgctttaaattttgctacttaacattatgtggagaacaataacttcatactgctcgagtttgacaatgtatataaattaagttagcagaaacccaggcttctgtgaaattctcaaagcctttttgacgcctcttgtataaaagtcttccgatgttaccactccaggccttgctgaaatgttttccttctgtttatttccaggggatggaggtatgttctgcaactcctggtggccgagcgtgtatgacttagtgtagtggtgatggctgcagacattttgggttgttttggtaggctcttgacgttagctttgttttcacttgcactttgtctgtttagagtttgtggaagtcatttctttacccaagaatgacctgctgcagagacttgatggtaagcattctccagaccgccacccagtttctccagttctccccgtccccatcccagcaaactgggtactaaatataactccatttctttatcttttttgtatcactaaagtcaaatgcctagcaacttgtaaaactgcaggtgaccactactaattttcctttctgggtggcacagagtttgaaaataagagcaaagcattctgggtcaagtgcaaacttttggtagaggctttttctcctacagaatggcccagatgacattcctgctgagtagccaaaacgattctacactttaaaccttcagtccatagcaatgcaaaggtgtgggtagataagctgttagcttttcctcaagtatgctagtatgagggatggtcctttgtggaggctgtatgttcaaggagaaattgatgatgctccttcaacaaatacttgaggtatttcctgtatactccgtgtgatatgcttttcacataataaaccaaaccagctgtgtggcccttagaaatcactggtcatgtagatgcattgtataattcttggccacccatcttttagagactttgtaaacagtaagcttatggggagaaaagtcctttgataaaaccacgagaggagatactgtatggagacatgaggagatactgtgtggagacgaggagatactgtatggagacataccatgggcccttcaaggagcacctctgtatgggctggcaaatccctttcactcatctagaaagaagcagacacttgtcatcatgggaatattttattgggtataagtgttttaggtaattgataactgatttttctactgtttttaagtgattacttcaaatgtgatttgaagcattgtttggc

SEQ ID NO: 59809 - DNA, 1025 bp, Homo sapiens
ctgggcaacagtgtgagactcccatcttcaaaaaaaaaaaaaaaaagagttccaatcctcaggtttctctgtaagaccacttttcacagtgctccgattctcctaacgtagtgcagcagcaggtgtgttacaagaatgaggggttcagccgggcgcagtggctcacacctgtaatcccagcactttgggaggctgacgtgggtggatcatgagatcaagaattcaagaccagcctggctaagatggtgaaaccccatctctactaaaaatacaaaaaattagctgggcgtggtggcacgcgcctgtaatcccagctactctggaggctgaagcagagaattgcttaaacctggacgggcggaggttgcagtgggccgagatcgcaccactgcactccagcctgggcgacagagtgagactccatctcaaaaaaaaaaaaaggagggtttaaagaaccggatttcccgctcccatcacaccaatgatttggacttgcaggtctcatagatgatggtgaaaccccagaagcagctgctctccgggagcttgaagaagaaactggctacaaaggggacattgccgaatgttctccaggttggtattgcttgaaaattcaccaagtgatggattcctccgtctgggaagggattgattatttgggtgttctttacgctcagaattcactgaagagaaagaaatcacagattaggactggtcaccaagtgtaagggaatctcccctcccaggaggaaactggagccagaagggcctgaagttgggggagaattaatgaaattaaattgccttttggctggatgtggtggctcatgcctgtaatcccagcactttgggaggccgaggcaggtggatcacctgaggtcaggagttcgagaccagcctgaccaacatggtgaaacccatctctactaaaaatacaaaaattagccgggtggcgcacacctgtgatcccagctactcgggaggctgaggcaggagaattgaacccaggaggcagaggttgcagt

SEQ ID NO: 59810 - DNA, 1869 bp, Homo sapiens
aagtaggggcacttgcctacatttaataattcttccattaataaatgggaaggttctaccttcttaaattgtgtgttttaggtcacatattttaaaaatcaaaatgatatgaaaatctcaatagttcacgttgtccatagtagcttttgttcctagagacggggtgagtcttttcctatggcttcatttgcattacctgcttattaatctgtcactggctgtgctccttgcccagagacataggatccaaactaaagttttctgagaaagcggcagctcacatgcttagcaggctttctgtttcgggggcacccagaaggtgaggtgtagggtggcaagagttttcgttgttaattttcagaagctataggaaagcagaattagcttctttaatgcagacgtttattgctgtggtcttcttgaccagtatcatgagtacatttgcatgcattgcatttaagaagttctggttgtacagagaaaacctaagaaaattctcttctgtagcactaatgacttttttttcttctctgcctgaacagaacttgggaatcagtgaaacgtacaaccaggaaagagcagactgcggatggtaggagtgcaaacctattccaaccctttagaaaggaagttagcacttgtgatcgtaagagggttttcaatggaaccaagttaacttctattaggatgttgtgtctttaaatctccgcttaggttttgccatactatgtaacgaaattaagctttctttataagtaacttctggcttctgttatctaagcccaaaacattgtttttgaggggaagttgttctaatgtttataactaaatgtaaatcaatatagtttgaagccacacctgtgtctagacgtgttatgacttctagaagtccttgtgtcctgttggaaggatctagatgagaggctttagtttggaaagttacttggcacaccttcatgcttatggaccacttgctttacaggttgatgaggacacggaattaattgggcaaagcctattccattcaccctcccctccaggcatgaatgccttgactgcaaagagcctacaaacaatcctgagaatcactctggtcgaggggaagttgggcactaggcttttcttatttttccatttagttttggtttccatttttgctggaagcaaacagtagctatgctgctgctgctggcttcacagataggaagctgtggggagccaggggaccctcctgggtgctttgtgttttctgaaacccagtcgtttttgtttttcttaggttttaatgaaggccaagtaacttgagaggaaaggtcttttaccctaaaactggaaaatcagtcttgctagcatttattgcagacagtggaacttacttgatttcttgctcaaagttgacccaggagcacagggatggctgtggcctcaccagtggtagggctgccacacgctggaaagtggttctgtggaaggtcagtgtagtcagaaaccttacatccttgaccctgtaggaaatgtttcgttttattccgattttagtttaagaaactgtgacaattaaacagcctttttgtttaaaaaagaaagtgtaaacaacatggaagtgatgatttttaattacatttttaaaatagcttccaatattaactgccagtattgtagattaaaacggagtttcttaaagtctggggttttcattagcttgctctaaacaatgtgctggcattgctgacctctcattagggatttccttggttccatttcctggtgacaggtgtcgcggtcatccccgtgctgcagagaacacttcactatgagtgtatcgttctggtgaaacagttccgaccaccaatggggggctactgcata

SEQ ID NO: 59811 - DNA, 1813 bp, Homo sapiens
actcccacagagggtcatgaaatggcatgtgtgcagaccggatgcccagcagcagttccccacaacaccctacacagggctgagacctatgtgcatgactcattgtggggttctttggcttatttcctgctctgtggggtaaagatactgttcaaaatgtcaaaaaggcctgcatgacacccagagggtaaggcaaatatttcaaaatctgaaaaaccaaactctgaaacacttccggcccctcgtttcgggtaaggaatactcaacctgtacagctgtcacttggtgtctgtcggggttggttccaggaccccctgcagataccaaaatccacagatgctgaagtccctgatatgaaaatgcagatactcagtatgtatttgcctctaacctatgcacatcctcccacgcacttcatctctagagtaatcacagcacctaatacaatgcaaatgctgtgtcaacagtcgtactctattgtttagggaataatggcaagaaaaagtgtggacctgttcagtatagatgcaatttttttcctaaatattttcaatgggtggttggttgaatccatgaatgcagaacccacggatatgaagggccgagtctaagagataaaatagcagctagagaatcctatgttccaccgtctcattcatgaaaggggatgtggggttaattttagaaatataaaaatattccagtagtgttgtgtctattgacattcaagacagtgccgaagtcaccctctgaccctcccgcctcttgtgttggtgaactagagggaggaaggccaacaggcttttccataacaaagaagactaggaataggatgatctcactggaagcagaatcctaaagctagaagaggttttggagaaaacatactcattcctgctttttacaaaggagggaagagcctcagggaggctggagctctgggcttagctggcgggcaagtagagacgaagagctgacttccagtcagctgtgcatctcacaggccctttgaagttgttggagctctcactgggcaatcttattccgagatttcttatcaatgcgtttctgttttattgctggtgatttatggctcgttactgcttgtttccttcaccttaaccacgataatgatgctcctctttttgtttcccttattcctagtgtttgggatgggaccttcagtgcttttcccagcactgtcttcttcagtctttaggactaaccttaggaggcagcagagagagctatgccaaaaggtgttcatctcttgcaatctgtatgatttacttaccagcattgcttgttggtcagctccttgctactaacaggaatgttgggctgctgtgagttgtcatagaagtctgtttgattttcctgtgttcattttgacatatttggccttcggaatttgggtacaatgctgaaagacctacaatttccagacagtctttttgttttgttttttaaaaagcaaattaaatatttgaacaattttaatgaaaatatgacaaggtccaaattttaaggacagccggataggaagcatgagcaggagggttccgaggaggatatcttgcagctcttactatcgagatgcaggtggtaactcctttttatcccaagccccagagccacccacatgtttcacttcctttaaaagagatcctaaaattgtttgcttctccactctggtctcttaccactgcttttttctgttgtagggagaagagagtgaagggagaatgttccttttatgcctcgcccctttaaactgcataattgtgtcagtaactgggtttcctgtacaact

SEQ ID NO: 59812 - DNA, 1123 bp, Homo sapiens
cgctctgtcgcccaggctggagtacagtggtgcagtctcggctcactgcaaccacctcctcccgggctcaagcaattctcctgtctcagcctccggggtagctgggattacaggcgcatgccaccacgctgggctaatttttgtatttttagtagagacggggtttcacaatgttggccaggctggtctcgaactcttgacctcaagtgatccacccaccttggcctcccaaagtaatgggattacaggcgtgagccactgcgcttggcctcaaacacatgtttagactcattagagttgagggctatgttttgtgttataaacttaatttgacaggcaaaagagaaccaaactgtatcactatacattgggttccaacctctctatagtttcacaaatataaatacatttgaacatatggtgctccctaagacttgggccttgccacatttctgtatcgggtttgggccctacttattttgtacatttagttttccatatcaaactcacttggcatcttaagtgaagagttacagtctttcatggttggtggatcatactgtgcttagctttcttactgctgggttttaattcagcagtgctatctatctcttaacatgtttcctacagctctcccacattaggccttattaagggctttgctagtttagtagatataatcacagttgttcagatgactggcaagcccatgtatttgcatcttgacgatctatttcatcacaaagaaatcatgtactcttattggatcactttgcaaatggagttctcatactgatgaatttttatcacgtgatctggttactaaatttcatcctcattctgttgtactccatttaaatttcactaagtaaaaaattaattttcatagtattttcttcttatagtttataatatcaaaagattgctatgcaaaaatctggaaagtaaaagaaaaaaggttaaccacacagcttttttcccattttgctataattttccttccggctttttcttacacgttatttggcagagtttgaaaagcatatacatacttttctactttgttatcaacttaggagcttttcccatattgctaggttgtcttcagaatctgctttttaga

SEQ ID NO: 59813 - DNA, 1035 bp, Homo sapiens
cagttttgtttgtttcgttaaaagaatgagaagtaactagctgcttttatttatttatttgagacggagtctcactctgtgcccagattggagtgcagtggcgcaatcttggctcactgcaacctccgcctcctgggtttaagtgattctcctgccttagcttctcgagtagctgagagcgcgcgcgcgccactacgccggctaatttttgtgtttttagtagagacggcgtttcaccatatttgccaggctggtctcgaactcctaaccttaggtgatctgcccgcctcagcctcccaaagtgctgggtttacaaggcgtgagccacggccccgggcctaccaaccagccgcttttaacccctagtcgtgtcgcttaccacacgagctttaggcttgcgcgaggcatctgcgtctaaaagtatctccttaaatgtacattcttcctggttcacctaagtagttttaaattagaaacagccccaccgactgcaggcctcttcagaagggtgttccttagaataataaacaattatctgcgtattttgagttagaaactcttccccccaggaatatatacattgttttgggttgtgttttgtttttctcaaaaatgttactggctaagtggctagttggaagcagtgctttaaagaatacattttcaaagcagaggtaaatagattataatgttgcagagtatgttggtggggatggacagtcatgattcatcatttatgccttgatccggaactatgcagtcctttctgatttgagggaaagaagcaatattgtatatatgtctggagggtggtgccagaaagacttaatggcagacaggagcagtcgctcaaataattgttttgatttgacttagaaagtaaaaaattgcgcggaaggagatgttagcatcgatgggggatttatttaggtcagatgttttctaatgaagataggaatgaatgtacggaagagaatagatcccgggaacatagcccttctgcgaggagcagtactttaacagcccaagaaacat

SEQ ID NO: 59814 - DNA, 1893 bp, Homo sapiens
ttattatttcaaggtaaaaaacaaattatcccataagtttttaagagacttcaggtatggctttgccatccttaattatgattacctgaaacaaattaagctaaagcatgcctagtttaagcagctttatatctctggtgatcagttgaatagaaagccagcaagacacatccaaaagtatcatgaattcttagcggtaggtgctcactgccaacccaagaatggtttccagatcttgactctacttctgccctctatctttagaaggtgaccaaatgctagtcatcttctagttgggtttgctgcatttcctgtgttgcagcaaatatctgctggtctctgatttcttaaagacacataaatgttgtgctcactcagaatccttttgagcttgttgctttcatactgtgatttccatctggtggtttggatttggctggtttttgtttactacaaagaccattgtggcaataagatgaaccgcagtaatcttattattctgatttcttgtctactgctaccaaatgtacatcattaacattttctactttatattaaaagaaagacaattccaaaattaatcaagtgtagagatttttctctctgcttatagttggtcttttaaaatgatgccttttttggtgttttttttttagtgtcattcttccacttcctcagaatgtgaaggattatttactcgatgatggaactctggtggtttcaggaaggtaaagtattttagaaaaaaatttcttaaactttatcataaagaaacacataaaatgaatgaattagcttaggcaccattctttccctttagctctttttctctcctagccaaaatgatgtgctgatctttgtctcatattccttctcaatgttcacttaatattttcaacattaagtacttttccctctaataattacaagttgtgaaattgagcagttcctttcatctctgtctttagaaaacagttatgatgacaacttttccttctgacggtagcagggtgggggaagtacatattaaaattctttgagatccttcagttttgacgattaaaaattcactgttgcaaacaggctttatcatctaattcctcaacattttcttccccacgattgaactaccgtggccccccctccactttctagaagctgttcaggtagtttccctatttatagaataaagggaagaagttactgtgtttcagtcttttggatgcaaacttgaaaacgttgaagaatcataggatttagtgaagttctcattttttaattcgagtctgctcagaagtcacgttatgagtgttcagccctcaccagcctttctaaaatagcctgacagtaaccctatgccctgacctcccttcatttttctgcataacacttacttccacctgacaattgttaattgttccattagaatgcagtttcatgaaaacagggacttggcccatttgttcaccccagctcatggaacagtgcctgatatagcagaagtgcttgataaacatttgttggatgaaggaactatagaaatacagtaagaattgtgtgttttcagtactactaactggaccccatatttttgcctgttgggtttttagtgtggttttctggattatatttctgtttttggtattcacagagcctcaataacctgaaaattattaatgtagcgcctcattaactttgaataatttgaggctgaggaaacagtaggaaagtcagataagtctcaactttaggatatttacagatataattttttttgttttgtttttcttttgagacagagtctcgctctgtcacccaggctggagtgcagtggcgtgatctcagctcacttcaaggtctgcctcccgggttcacgctattctcctgcctcag

SEQ ID NO: 59815 - DNA, 1083 bp, Homo sapiens
agacatccaacagactcaacttttagaaattgtatagagtagttgccctgaacttttcaaaaacgtcaaggtcataaatggtaagaacaacagagagaggaactgccacagattgaagaagattaaagggacctgacaactagatttagtccatgattctggctagactggatgcctggaccagaaaaaaagtttcagttttttttttttctgtagaagacgttactaggacacttggcaaattttgaataagatctgtattgtgtcagtgttagttccgtgattttgatagataatttatagaaaatggtaaaatcatgactcatataaaactctttaatgcgtgttgaagatgttatttaactcatgagggaaccagacagattgttagaactggttcaaaagagaatccaaagaaaagatatatttttagatcaggaatattgaaatgagtatgtaaatgaggcaaaactggttttgcctccctgcagtatgggagaaaagacaattggacctcttccagatgagatagaaattgcctgtccgtaagaattagttcatgtcactatcacttacctagaatttgccaagttgtaaagtagctcacagacctggctaaaaacagataacctagaaggttgtgctgtatgtaaacagtacatagtcttccacttaagactgtgcataaactttttataatttaaatttgttttaggattcttatggcaggttatcctaaagttgaataattttgaggatttgaggggactgatcacatcttttaaaaggcatacatgaaaagtaatccttagatgtcaagctttatgggataggaaaattaaattgctttgtctttgaaagttgaattctttcccgttgtaaagtttgtgcaacaatgccgttcataggaaatactgccagtgcccatctcacagaagtggggtttatggctagagcggtaggggagccaagtcagccgcttcaggcaattataaggaaatgccctcacataaatcataattgctttggatggggagagatgaatggaaaataaaggactcagtgctgctgttcattttgaaa

SEQ ID NO: 59816 - DNA, 1051 bp, Homo sapiens
ccatttaaagttgtagtggttcagaatagctcacctccttctctttcagatttgatagacgtggggtgtaactgctccagccgccaaagttcaagtgtttggctgccactccccagaaacgggaagagtggaaattgatctctcttttcttggagagtagctggtcaggctatttctttactaccttaatcttgtagccaaaatgtcgatgtttctgatacctcattttcttctcttctattatcagtaagaaaaacactgggaagtacttaggcctgggctgaaatgtgaggaccctgacatctcagtgttcataaccaagtgtctgaaatgcagtggtgacgctttttgttgttaagcataatttaacatttgacagtactgcttaaatttacttgactttcttccttaaacccttgaagtgatatgcattattgattttgttataggcctgagcattcatagcagccaacatggaatatggactaaatagcatgtgcttcattctttaggatgcgtattggatagcaatgaatagttctctgaaatgtaaaaccctcagcgacatctttctgcttttcaagagttccgatttcatcactcgtgacttcactcagccgtaagtatctcttattctctcatgtcaatagtttcagtatttgtgcaaatttctctatagatgaaattccattacttatagtactattataaatcatagctccatataacaaagctatttcatattgccaaaatgacctgttaaagcaaatctttcttttccctttatagaaaatggtgtataatgaatatctgaaaatgttaaggacttcctgcgtctctgcccattaaacatttcagtaattttttttctattataaaactgataaatatttatcatagaaaagcaaaattagggattacagctaaataaaaacaggaaatataaaagctctcatggccgggcgcggtggctcacgcctgggattcccagcactttgggaggccaagacaggtggatcacctgaggtcaggagttcaagaccagcctggc

SEQ ID NO: 59817 - DNA, 1023 bp, Homo sapiens
ccacctcagcctcccaaagtgctgggattacaggcgtgagtcaccgcacccagtccaaaaataattttcttaaataatagaaaacgtatagaggaaagctctagatacatgtagtacttatcaatatgctgatccttgggggcgaaagggcagttttttaaaggataaaaataattagttaatttttattaacttgtgagagttcatgaccttaatttttgaggcaggatctcactctgggctagagtgcaatggtgtgatcatagcttactgcagcctcaaactccggagctcaagtgatcttcccgcctcagccttctgagtagctgggatgacaggcttgagcctccgtaccggctaatttttatattttttttagaggcgggacctagctttgttgcccaggctggtctcaaactcctggctttaggcagtcttcccacctcagccttccaaagtgttgggattacaggtgtgagccctgtgcccagtccttaatttttattgacgtaaaataactgttaagcttaattattattaaaataatttttaatcgaaagctagttttctagttttagattattagtcctcaagataatgtactgttaagttagtttgatttgaaataagagatttttgctttacagagaaaaactaggttgtttttagttttttttttttttgaaacggtgtcttactcggtcacccaggctggagtgcagtggcgcaatctcggctcactgcaacctccgcctcctggattcaagcagttctcctatctcagcctcctgagtagctgggactacaggtgtacaccaccaggcctggctaatgtttttctttttttgagatggagttttactcttgttgcccaggctggagtgcaacggcgcgatcttggcttaccacaacctctgcctcccaggttcaagcgattctcctgcctcagcctcccatgtagctgggattacaggcatgcaccaccacacccagctaattttgtatttttagtagagatgagtt

SEQ ID NO: 59818 - DNA, 1084 bp, Homo sapiens
ttggccaggctggtgtcaaactcctgacctcaagtgatccacctgccttggcctcccaaagtggtgggattacaggcatgaaccactgcacccatcctggggtacatggcatgttttgatacaaacaggccatgcctaattatcacatcatgtaaagtggggtatctgttccactcaaacatgtatccatcctttgtgttacaaatgatccagttacactctagttattttaaaatgtacaattaaatcgttgttgactgtagtcaccctgttgtgctgtcaaatactagaccagctatagaaatgatcctggaaggtacagtcttgctcataacattgtttcgatgattaaatgagttcatatctcaggctgcctaggctaatgcaaagcattgaatacggctcagtaagtgttcgtcgaatttgagttagtctcctgtttctggatgcttttagtaaaacgttactctcatgttaaatatatgttaagtgtgtgcataaactggcaccagtaacaaaaagattcagttgccttttcttcttcttccaaaggtttattcattgtactgatgattctccagatccatgtatagaatatgaggtaagaagcttattttctttgataattgtagatgaagatgtgttgagaattgctatttattcttaagtgaaatgaaatgaatgaagtttcttggattaatttcttcgggaacctaaagccactgaaattttaaatttatgaaatatacacataaaaggatatatattatatatagagtgtatataccaaatacatgtatgcagtatacacttgctacaggatatacgcagacacctttaatagaacaaacacctttatacgcctcacaggtgcacctaattgtttcagcattttaccatttttatattgttcactcaccttacaaataacttaataagaggataggccgggcgtggtggctcacgcctgtaatcccagcactttgagaggccgaggtgggtggatcatctgagatcaggagtgcgagaccagcctggccatcatggcgaaaccccgcatctctactaaaaatacaaaaattag

SEQ ID NO: 59819 - DNA, 1069 bp, Homo sapiens
agaaattttgatgagtttaaacatagtaagcctcaatttttattccagattttcctagttttgaaagtatacacacaacacacacgcacataccctgatctggaccaggttcttagctacaactaactgctcatcaactgtcatgaatggatctgaaacataacttttttttctttttttcttttttgagatacagttttgctctgttgcccaggctggaatgcagtggcgcgatctcagctcactgaaacctctgcctcctggactaaagcaattctcctgcctcagcctcccgagtagctgggattacaggtgtgcacaaccaccatccagctaatttttgtatttttagtagagactgggtttcaccatgttggccaggctggtctcgaactcctgacctcaagtgaaacgcctgcctcagcctcccaaaatgctgggattacaggcgtgaaccactgcgccctgcctttttttaaatgcagactccacgtttcaactccgattcctggtccttcttccacttgcactgtcaaaatgcaaacttttagaaactttgacggctcatagtttgttgcaaagaggatggccatctttgctccataattgcatttttacatttatgtgaaaattacattttcatttttggtcatataacaccaattcgaattagtgcagtaattttaaaatctgtctttagtgtctgtttgcttctagctacttttttatatatgtacacatgctttcaaaatttgtctgttgactcactgcattgagtaatttttaatgtgttgactgtagatattgatgtatcttttaggattataccatatacatggaacagttaatttactagttaagttactccttaccaagccaccaattactagatcttagagtgcttgtaggtgagattcttatatacaacttgtgagattttttcccctcacttaatagcatagtgtgagcattttcccagcttattaaacactcctataactttatataatatagtcacagctattgcttcacgcaacgaacatctgtctattaagtacctggctgtggt

SEQ ID NO: 59820 - DNA, 1019 bp, Homo sapiens
tgggaggctgaggcaggagaatcgcttctcgggcagcagaggttgcagtgagccgagatcgtgccactgcactccagcctgggcaatagagtgagactccgtctcaaaacaaaacaaaacaaaacaaaacaaaacaaaaagtaaattcttccagaagtaagaagacatggcaatgtaggacttcaggattcacctgttcatatgaatccttacagctgggtcgtgtgtaatgccgtacccatcagggtgatcttctaatctactttaatggttctttccacaaaatgtttaaatcacgtattgatgtttttgaaaagaatattgtataataacaggatgtaaaatattttcttgtcaggtatttctcaaagagactacacacaatactatgatcatatttctaaacaaaaggaagaaattcgcagatgcatacaagactttttcaagaaacacatacagtacaaattcttagatgaagactgtgagtatttttttattgatccagtaaaatgaaatgaaatatacattgttactggaccttatttactatggtgtgtatcctaataactagatttgaaatactgtattgtaagcattttactatattattatttgttatttttgatagtttgtatgttaatttctttttattattattatttttatttggagacagtcttactctgtcagccaggctggagtgcagtggtgcgatcgcggctcgtgcagcttccacctcccgggttcaggtgattctcctgcctcagcctcccaagtagctggggctacaggtgcacgtcaccacacccggctaattttttgtatgtttagtagagatggagtttcgccatgttggccaggctggtcttgaactcctggcctaagtgatccgcccacttcagcctcacagtgtgctgggattacagatgtgagccaccgcaccagccatgttaatttcatcttatttaactaaaatctatttttactgctaagtcagttccctgtcttgttttagatgt

SEQ ID NO: 59821 - DNA, 1079 bp, Homo sapiens
tattgtgtaagagttttcatacatctgaaaattatatctgctatgatttacaatttctctacttgccaagactgggctctgtggcagatttgacttaaaataagatgaatcatgcttcaaggctcattagattttatgctttctattataagctttactcattgcattctaccagatcagtgattgatgcccgtttcactagtactttgctcagtgactcccatctttcccatagaaccagtctataacggggaactggttgagatgatattggcgtttggtttgaatttttaaatataggggcttatggttggggaacagagaacagtaaagcaaagttatataaataaaacattgcaggatgcctttttatgtttgaagttttgaggtttagaagcatgaagtcctcagggtcatttatattctgctgtctttgattaaaatgtactttaattttcaaaaggagatttacattgtgaaatattagttcattaataactgactttttttctcctttacagttgtgttcgatatatacagagacagtagggtaagtaaaaactctttctgatatgctttaatataagagctggttttataagcaggcagagcatgcctttgttatgtgtgtgaaggatccatgctcaaaaaatattttgtctgggtgcagcagctcatgcctgtattcccagcactttgggaggcttaggcagggagatcatttgagctcaggagttcgagactagcctgggcaacatagtgagccctcatctctactaaaaattaaaaaaaaattagcccaggccaggcacagtggctcacacctgtaaccccagcactttgggaggccgaggtgggaggatcacttgaggtcaggagttcaagatcagcctcggcaacatggtgaaactccgtctctactaaaaatacaaaaaaatgagccaggcatggtggtgggtgcctgaaatcccagctactcaggaggcagagattgcagtgagcggagatcacgccattgtgctgcagcctgggcaacagagcgagactctgcctcaaaagagaaaaaaaaaatatccggg

SEQ ID NO: 59822 - DNA, 1013 bp, Homo sapiens
cctcccaagtagctgggactacaggcgcccgccaccacgcccggctaattttttttttgtatttttagtagagacaggttttcaccgtgttagccaggatggtctcgataccctgacttcctgatccgcccgtcttggacatgttacttttatgggcagaaaacagcactacaaagttgtttcaggaaagtctggctgtgaagctggcaggaaaggagagagtggctgggtgaagaaaccgggttgaacaatgttttgtttttttcggatgggaggtatctgagcatgactaaatccggatggacagagttgatagagaggaagaattgcaaaaagagcagagggcatctggagaaagaggaggaggacacagtgtcctgagggggaggtaagagaggaggacacagtgtcctgagggggaggtgagagagggggacacggtgtcctgagggggaggtgagagaggaggacacagtgtccggagtgggaggtgagagaggaggacacagtgtccagagtgggaggtgcgagaagaggacagtgtccttagggggaggtgagagaggaggacacagtgtcctgagggggaggtgagagaggaggacacagtgtccggagtgggaggtgagagaggaggacagtgtcctgagggggaggtgagagagaggaggacacagtgtccagagtgggaggtgagagaggaggacagtgtcctgagggggaggtgagagagggggacacggtgccctgagggggaggtgagagagaggaggacacagtgtctggagtgggaggtgagagaggaggacagtgtcctgagggggaggtgagagagaggaggacacagtgtccggagtgggcggtgagagaggaggacacagtgtccagagtgggaggtgagagaggaggacagtgtcctgagggggaggtgagagagaggaggacacagtgtcctgagggggaggtgagagaggaagacacagtgtactgaggggggaggtgacagaggagga

SEQ ID NO: 59823 - DNA, 1012 bp, Homo sapiens
tcccacttctcctgccaccgccgccctctccgctgccttctccccacgcgtgactgtgggctgagcatggtggggatggctgtttaccggctgtgtgcgtttactcgccgtgtgcatgggcgcaccgcgttggcgagacgtggtcacgagaagatcagcctccagtcgttcccatttctgtccttacatcatgtatttctatggaattggcatctgcacgtacgaggtgtaggcaagactttgggtggccacgcgaggatggaagggaagggcttcgcagtgctcagggtcacacgtgggcagagcctcaccggagggtctgtgcatttcacgcgggctcggccgcacgcgccggggagcgcgtctccaagggagggtctgtgcgcgtcgctgcgcgggcggtgctctctccgggctgcatcgagtcccatgctgatggctgtgtctcaagaaagcagaaataatccgaagtcgatggcaggaacgctccaagcatgtgctgctcagctcagctgctgttccctttctgcccaggagttgggtcttgtttgttttgtttcggagcggctcagaataggtggggaggctgatagtgaaagagaatcaggacctgccgaatgagtctgaagttcaagttatttccttccctcacacaatcagtatttgctctgcatcagtatctgtcagtgtggattcacgcacaggtgtgcagtcagaaatgcccattttgcaggggttcatggaggtgttgattaggctgggaagagaaaggggagctatttcatgggataaatcagtgcgttgttgggtgccctttctttccttcctcctttttttccgtgtgcttgtttttgtgcttggtttcttttttccagcaccacattacccagcttgtcttcacctccaggctcggcgtctgctgctgttcagtcatttcccctcacccccacgcagatctgcagggggtcccccggagagaagttgtgagggtggctttcccagtcctgcttct

SEQ ID NO: 59824 - DNA, 1588 bp, Homo sapiens
cataatgttatctaaacttggaaaacttggaagcatttcagagcttttggattgtcgtccttttgcttctgtggactttcttttttttttttttgagacggagtctcactctgttgcccaggctggagtgcagtggcgcaatctcggctcactgcaagctctgcctcatgggttcacgccattctcctgtctcagcctcccgagtaactgggactacagacgcccgccgccatgcctggctaatttttttgtatttttagtagagacggggtttcaccgtgttagccaggatggtctcgatctcctgacctcatgatccgcctgcctcggcctcccaaagtgctgggattacaggcgtgagctactgcgcccagccgcctctgtgtactttctagaagtggtccccagttcaagatgcctgctccaccctgggccatgaccggtgactctggcccgagtcttaatgtggagttgacttctggtcccttcagtggggattttgagtctgggcccttctcttgttttgaatgaaatctaacacaaatgaaaggcatcgacaattaaccactggcattcatttccaaagtatgccgcagttccagtcactttgtttgccctactttctccctacgtctttaagatacgaaggcaggaaagccttgtaagaagcagggctgtcagctcacaatgttcacatgtatttaaaataaagcattgcaaaggctggaggagcactcattttgccagactttgtaatctgatatccactgccttatccaggtatctcacctcatggagccgagcatttactgttggaagctaaggggtcaaggcggttaggctgtatggttagagggaccttgctggagagtgggggccgaatgggagtgaaggttggcccaggagggtggaaaatgagattgaggaagcaaagagcagcataagagaaaggactgggctttgtggtctggcctgggttgtctgatgcacctctgagtcaggtctcagggacaaacctttcaacctgtgcgcttcagtgcagcctcctacaaaagggaatcccagaacataaccatatctctgaataaggtggtgagacttaattattgtctattaatcaacatgttttcagacccttggcacactatgagaacaaataaatgttatgtaatggcaaattaggaggggtacacatttctgttggtgtatttgccaaggctgttcaggccgtccctatcgtagctatctttcagtgactactgaagcaaaaaataaaaaaacccctaaaatactattcggagaagtatatggatgggaggaaagcttcggtgtggtgtctaggaagcaccctagactcatagaagtcacttctgcaatttccaggctgtgaaatgtatgtgaatggaaaggcctgggtacttggcacgtggcagaatgagtctcccaacaaacctcatttcccctggagtacagaacatggcatgccctagaaaatggatcttcatctccgcgggatatgaatgcatgtttttcgtgtagactgagcatttgaagttgaagttgttcctgtctgtagatggctggacaa

SEQ ID NO: 59825 - DNA, 1056 bp, Homo sapiens
ctgctcacggaaacctctgcctcctgggttcaagtgattctcctgcctcagcctcccgagtagctgggattacaggcgcccaccaccacgcctggctaatttttgtatttttagtagagacgaggtttcaccatgttggccaggctggtctcgatctcctgacctcaaatgacccacccgtcttggcctcccaaagtgctcggattacaggtgtgagccaccgctcctggcctatttgactgttttttaaaaattatagttaaacgcctcctccagccattgaatatagctggctgatattacctaagtttggggttccgtctcctggctttggagcctcccctaccccccgccggtctgtgtacagggaagctgcttctttctttcttcccccttctttcttgcctattaaactctctgctccttaaaacaaaagacaaaaaacaaaaaagtgtgcttaaaaaatacatagtataaaacttgccatcgtaaccattttgaagtgtgcagttctgtggtgttaagtacattacagcattgtccaaccatcgccaccatccatctccagaactctttcatcttcccacattgaacctccactccacctatgaaacactaactccctactccctcctccctgaccttctgatacacaccgttccaccatctgtctcagtgaatttggctactttaggtaccacatagaagtagaatcatgtgatacagtcatcccttggtatctgccgggggctggttccagaatcaacctgccgcggataacaaaattttaggatgctctagtgtctgatataaaatggtgtagtatttgcatataaattttgcacatcctcccatgtactttttgttttttgttttttgtttttgtttgtttgagatggagtctcgccccgtcccccaggctggagtgcagtggcgccatctcagctcactgcaagctccgcctcccgggttcccgccattctcctgcctcagcctcccgagtagctgggactacaggcgcccgccatgatgcctggctaatttttattttttatt

SEQ ID NO: 59826 - DNA, 1026 bp, Homo sapiens
ctgtcccaaaaaaaaaaaaaaaaaaaaaaaaagaataaaaagaataagatgtctatggcgtttgaatttctgcttggcatcaggtacttccttagacactcgacggggcctttaccccatcaccaaccctgtggcttaagtactgtttgacagatgaggagaactaactggcctccggtcacgtgactaaaagaataagtcagagggcggggatttgaacctagatctgtgtgaagaagcttccggaaggctgtgctgaccgagatggaacagacttttccagagccggctttgagcctcctctagggcaggtcctgggaaactccaccaccggccagtggtccagggagtgccgccaggggcaccttcatgtgttggtgtgaagggtctttgttagtttattatggaatcatcaaacctgtactcctgtcatgcttctcctgaggtccggtggaggccttgcctggagcctggaactggaaatcatattaggctctgcagatgagaatgcagggtctggattcccccacctgctcacactcctgagaaacctttgtgctgacagaggaatggccttagtaaccattttttttcttttcttttcttttttttttttgagacagagtcttgctctgtcgcccaggctggagtacagtggcgtgatctcggctcactgcaatctccaccctctgcctcctaggttcaagcgattctcctgcctcagcctccccagtagctgggattacaggcacctgccaccacgccctgctaatttttgtatttttagtagagacggggtttcaccatgttgaccaggctggtcacaaattcctgacctcaagtgatcctcctgcctcggcctcccaaagtgctgggattacaggtgtgagccaccgcacccggccttatttttataggtcaagcacacattttgttattgcatggctatttctctcctggcaaatgaagataataatttttgaaacatccagagaaccctgagattttgaatcaggctgttggcaa

SEQ ID NO: 59827 - DNA, 1036 bp, Homo sapiens
actataaagcaagagtaaaacgttttaaaagaaaaaaaaactgttttgctatatactcacgacacttctgacactcattgtgtgggtttttccacaccagtccattttccttggaaactgtgactttgagtgaaatgacgtaacaaaaccacaatttttcatttttttatcagtgttgtaatgaaatgatattgaacaaaatgatgatattcaagtatgtcattttgcttaaagtcaatttccaagaactgactggacattaagtggggacttgctgtaccaccttttagggagaacagttgaacaacagttgtctgagctaatatttggaatatattaatgaaaaccatgttgtagaatgtgtgcccagcctctcactatatagtcagccccatggacaccttttatctgtgtcatatcttgtaatgataatgtatgtgaaatccttatggtatgcatcacacttgtttatactagatgataaggtacttgtgggtgagcctgacgcatgttttggtaacttacataggatctttcatatgaaatactcagaaataaaggtgctatagtctgtttattatcatacccagacataaaaatgctaatactgtttagaaagattttagctataaaagtttaaaaaccaggatgggcatggtggctcacacctgtaatctcagcactttggcaggctgaggtgggcggatcacctgaggtcaggagttccagaccagtctgggcagcatggtaaaatcccatctctactaaaaatacaaaaattagctgggcgtggtggcggacctctgtaatctgagctactcgggagactgaggcaggagaatcttttgaactcgggaggcggaggttgcagtgagctgagatcgcgccactgcactccagcctgggcaacagagtgagacttcatctcaaacaaacaaacaaacaaacatgacttcaagtaataatagcactttctgtgttccttcctagcactttgattaaatgtgtcgtttaatctgtacaacatccctgcaag

SEQ ID NO: 59828 - DNA, 1026 bp, Homo sapiens
gcttagcacttccagccacgtaggctccccgtggccatgtccacgtccactgggcaggctccttgcctggtgtgtcagagccctaccttctgctcttcctgaggtttgggtttttaactcagtcgtaaggagctgaatgaggggcccaggaagacgctgattttatgcaccatctctgtgtttggcccacagctgtgtttgtgtgattttaaaacaatttatcgctcatctcgactgggccctgtcggctgacccagctcctccgcagccattggtaatctccattttaattaatctttcaaagaagcagattaagttgattgcttcccaagctgagtttggtgtctgtacctttcagctgccttacagaagtgattaaaataaggatttttctatgagctttggtgcccagttaagattatttttggatctcgtctcaatggtttatttccatcatgtgcctgtttttaacataagagctgaaaatgagcggggctggtttttgtctcctgcaggtgttctgttctttcaagcgccctaggatggccatgacctttggttccgtctgctttgtgtgtccttgacccttggagccttctaaggtagccctgctgagtcactaacatggagtcacaccttttttcttccagtcctggcttctcttcccccacacggctttgcagataaaaccatttattcttgacctacccaagcggaggtcctgtaggccactctccccagtcctaactctagccctgaattgaacagactgcattgaaaatgttggttacctgtcagtttcctcttccgctgtgccgtccttgaggggagggctagtatttcagccatccctgtgaccctggggcctaggtgagtgcctggtacaccaggaagcgctcagtgatggtctcttgaatgagtgaacctccttgaagtgcacagaaaaattgactgaagagggtgagtgttgcttagagccaaggtagtaggaaaaatgttggcctaaagatgtgtttagtttggctt

SEQ ID NO: 59829 - DNA, 1053 bp, Homo sapiens
tccgcctcccaggttcaagtgattctcctgtctcagccttcccagtagttgggattacaggtgtccgccaccgcgcccagctaattttgtatttttagtagaggtagggtttctccatattggttgggctggtctcgaactcctgacttcaggtgatccgcccaccttggcctcccagagtgctgggattacaggcgtgagcccctgcgcccggccttatttgagcttttctaaaagcaagaaattgaggaagaaactcctaactgggcaaatccagaccttttcttagtatcttcagagaatatacagttgtgtctaattctttttggaaatatggtatgccttataaataggtacaccttaattagttgcaaagatttaaacaagtgtaggaaagctaggagagaaagctgtttgttactgttcattatgtattgtacagggtgatgctgagattgagttattcttggtatgaataacttcctttgaaagttagaatgatagagttttagaacgtaagggaccttagattttaatccgtaatgaccaagaaaactgtgtttttaaaaattttttttttttttgagatggagtctcactctgtcacccagaccggagtgcagtggcatgatctcagctccctgcaacctctgcctcgtgggtgattctcgtgcctcagtctcacgagaagctgggactgcaagcatgcgccaccacacctggctaatttttgtatttttagtagaaatggggtttctccatgttggtcgggctggtcttgaactcctgacctccatccgcctgcctcagcctcccaaagtgctgggattatagacatgagccaccgcgcctggctggaaaactgtatttttgagcattaagtaatttcctttaaatttttgttgataaaggagagacccagctgccaaagaggcttctgttctgggggtaagactggtcactgcatgttgaattgacatcattcaaccaaatgtggtttagcctgagccatcgtattgtgggtaaatgtgtagtttctgttgtgtctttgga

SEQ ID NO: 59830 - DNA, 1046 bp, Homo sapiens
gtgcccgacctctttcactggtaccctgatgtcttcagggcttctctatgttataacatggctcagaacttcattcctttctatggttgaataatattccattgtatggatatcacacattttgtttatctgtattacttgaaatcttgatacatactttttattttctaagcacttccccataattctcatccgattagtttgcctgccttattactggcaaataatttcttgattaattgaatttgctagcaattttgaacaagatgatggtggttacaaggcagaaatgccatttcctgttctttctgtctctttctgtgtgtgtgtgtaactctgtattttcttgagtgtgtatctctctgtgtgtcttctaagtgaggccatccagttggtgcacttgtctgaagataatacaggtgcaggggtgaaactgcagggccttagaacagttcgccccctacctcctgaaggtgttgacaggaaaagctagcctcggccctccattactctcagagtctgctcaagacagacacaactctgtctccttgtaataaatgtgtctcacagagctaaagcaatgcacagaagaaaggacttctctgaaggcctgctcagtttatcaacaaaattgatcaatttttgttgtttgtttcacagatcaatgaaggacacatccagtgtgatgaggcactggggcatatatagaatgtatttgacaacagatattagttctttgttagcaggaatgacacacgtttagcaggaatgacacacgtttaatgttgtgaccagaggcagagtcattctagatcttaggtgcgacctgagctttgtggagcctcagttctgtcttgaaagatattcttcactctgccctcttttattgattaattttaggcaatctctgcgggtatttccagtgctcttggcttttcttgactttgtactaattgccaaaggcggcagaggatgaggacttgttggggtggtcgtgtgtaccagtgatgtttctagagagtgcatggttagcctacactcttcct

SEQ ID NO: 59831 - DNA, 1067 bp, Homo sapiens
ggttagtcttgtgctacgacgtgcagtatttcagaataaaaggtggtatatagaattcactttttggatattattcttgttttttttttagcatctacattttttttaggagatacagaataatctctttaaaaaaacagcgttaactatattaatggagaagtcgctggaaatgtcacttcaggtggaaacatttagtgtggatttaactttttatggaattatgcatgcaatgccatttgcatttgctgagattttgtattattaatagaatagacagatcagcattttgtcggtgtatgtaaaactttgcttgtttttcctgtcttgattgcttgctggttgcacataaaatttagagttggaaaaagagtgtagcacagaacaggggttggatgactcaagggtctccgctcctgtctctgctctgctgcagctccggctggaggccttcatttataaactgtcggatggggccaggccaagagtccgtgcagaaaaatcccacagttgtgccctggggaagctgctcatggtgaagggcttcatttgcagagtggaattgctgtaaggccggggtcttgctgagcaccggagggagggctctgactagcactgggcggtggagagaagcagaactcacttgccatactctgtgtcagtttccagcaagagtgaagttctgtttttccggtgggttctgccctttccttatcagttcagctgagcttactccagggcttcccctttgctcccagctttccagggcatgttctgccaaaaatgagctttgccttgggtgtgtctgattgtgttgttggtagactccctaaaaaccttccggtgctagcgatgctgtagacggctgagacccatggaggtggttgttaattgtcactgggggcccggggtcacactgcttgggcctgcatcccagtttaatggtgggactttggacaaggttcctcaagcccccgaagcctctctgtcctcatctgtaaaatggggacagtggcagtacttgtctctcatagaacatccatgggaggaacttacctcagtgcctg

SEQ ID NO: 59832 - DNA, 1035 bp, Homo sapiens
gcggccatgccttgtgaaagaagaaagcttggccagctgttgactgattagagatggagatgggctgggcatctggctcatgcatgtaatcccagcactttgggaggctgagatgggagggtcacttgaggccaggagttcaagagcagtctgggcaacatagccacatcctcatttctacaaaaaattttaaagaattagctgggcaccgtggcatatgcctgtagtcctagctactggggaggctgaggtgggaggattgcttgaacctaggagtttgaggctgcagtgagctaggatcatgcactgcattccagcttgggtgacagagcaagactctctcttattttaaaaaaagttatgtattgcactccaactagcaatgtgtgagcatgaccttcttatcacatccttgccagtgatcagcattaaattttttttctgatttgctagtccaaaatgaaaccttttaaaaagtattaaaacgaatgaaggtattactagaaaagacttgatcagtcagttgagcaaaggttccaattgctgggtgtgtctgggagttgcagacccccacgtggtgggagatggggagtgaccgtccacccctgccgagggatgtcctgcagagtggccatagatggaaggcctcagccgagagtggccataggtggaaggcctcagtcgcgggcgtggtgtgtccgaagccgttgctcacagaacacttaagagcagctgcctgtttcaacattggtgcttgactttccctattgaatgaacttccctgtctcttttggacctcacattcggaaaggtgtctgagaggtcatccgtttcaaacttcatcatctcaaatgaatggcattccctcctgccttttaaaaccccagggacgggagattttataagctataatgactttaccatatattttcctcaaaactcaacagccatgatctcatgaatactcacccctactttctgcccctatgaaaaaaaaaataaataaaaggcaagagtgagaaaaccaaactcaag

SEQ ID NO: 59833 - DNA, 1031 bp, Homo sapiens
gaaagcaggatttgggcttatggaagtgtttgagagtctgagctctctttgggaaatatgtgggttaatataatttttttttttttcttttttgagacagagtctcagtctgtcgcccaggctggagtgcagtggcataatctcggctcactgcaacctctgcctcctgggttcaagtgattctcttgcctcagcctcctgagtagctgggattacaggcgcctgccaccatgcctggctcatttttgtatttttagtagagacggggttcctccatgttgatcaggctggtttcgaactcctgacctcaagtgatttgcctgccttggcctcccaaagtgctggagttacaggcgtgagccaccgagcccggctattgtaatgggttttgcttgtaataatttatacactatgacttgtttcttttggggagggtttgcttttgtacatgaaacttgggcttgtatctagaaagcacgcgatgtttttatgatgcagaataaaggagggaagaagggatgttgatgccgcttctgtgttcttctaggacttgggcaatttccttttgtactatccatctcatctaatattatacgggtgaccacttagctgtatcataaagaaaggccccttcggccaggtgcagtggctcacgcctgtaactccagcactttgagaggtcaaggtgggaggatcgtttaagaccaggagttcgaggacagcctgggcaacaaagtgagaccccatctctacaaaaaagtagaaaacatttactgggcatggtggcttgtgctgtggtccttgttgcctaggaggctgaggtggaaggatcacttgagcccaggaggttgaagctgcagtgagctatgatcctgtgactacgctccagcccaggggacagagtgagtctgtttctaaagaaaaaaaagaaagaaaggccccttcaattctacctcatgacaaataaattctattacctccggctcctgtgtgagttgcctgtgaatatccagaactcccaggtacaggga

SEQ ID NO: 59834 - DNA, 2216 bp, Homo sapiens
agagtgtcatgtacttggaatcctgcagtatatattcacatcagcttcttgttagggttcttactgagagctggtcacataggcacctgctgcctagcacagacccaaattccagaatctcagaaggaaagcagatgttcagcaaaaaccactttgcttgcataaactgtttaggtgcagtgaattgctctttagttaggatggtgggaaccctcctggaatccaggttctcaggtgccagccaagggccaaccttgtgaggggccttttgaagcacgtgctcttttctgcacacctcatgatggaccatgcttggcaaagtgcaattcaggtgtctgaagtcgtgggtccttcgccttgagcttgggaccttttccttttgtttttggctgctgcatggctgacttccttggagaaggaccacatgttaagctgcccttggtgtcttttttccatctctgagactttgcttcccctgtcgtgatggaattatacatgtggctattgtccctgctgaattgggaagatgaaaaaggtataatcccccatgacattcattcagtttctttcttaagaagattctaagaaaaccctgtttttgaagcactgggtgttccatcagttgaaattcctggacatatctttctttaaaaaaatttttttgaggtcacattcttgtctttactggggccatttttacatgttgtttcactggtttgggaatgaaagattttaatgaagtttgcaacgactgctgacctcttacccaggagtggtggctgcacatttttgctgttgcactaggaatgacttgagacttagaattctcaccatgacttttgaaggttgaggcattgcagtagagatgcaataaattatttctccttagaggaaacctttgcttttcttccctgccttgctccattctaccacagagttaatggtcttgattttagtgaaataacaataacagcaaacctgcctttggacgttaaatacaaactgcatccttggacagcaccgtgttactttaattttttaagaaagacttaatatttctaattgatttttttgctttctatggaattttccccaaacctcagctttctggtgcaggctctttcctgtctcttcctctcctgtttattaaaatagagtcatttgcccgtcacgtgtgggagactgtcgccagggtaggacagacatcaggcactatcgtctgtgtctaccagggcctattatcccaagttccattgcgcaggctgtctgaggactttgccttgtgtaccacagactaacattatttttctttttcataactcatattcgaagtcattcttgacaggtgctttctgtggctgaaaaggctgcatacgtctcagagccctgagcagttgtttgttatggtttaatatttatcgaaaactcccatctgtgggggcatttattgactggaggccagacagggagagccacgtgtttttcaaaattactctgtgctcgtgtatatgtccctttatttttttcagggagcattattgctgttaaatgggcatgactgaaaggatatgcatgttattgtttgcctgcgttttagggcttggctgtgataacagctgtgggatttgctctcaccagtcctcctccctgctgtaggtagtgttgtcaatgtgcacatcggtgaagggtcccggttgtagagccacactgctgagtgctttgcagttgaattcactgtcccgggaatcctgagagagggatcgaggacttacttgtttgttctgctgtctttgatataagacgaatctgaggagattttgtttttctaaataaaatgggaaagaccttagtggcctagagttttcatattagtccgttttcacgctgctgatgaagacatacccgagactgggtaatttatagagaaaaagaggtttaatggactcacagttccatgtggctggggaggcctcacaatcatggtggaaggcaaaaggcacatcttacatggcggcaggcaagagagagaatgagaaccaggtgaaaacagaaaccccttatcaaaccatcagatctcgtgagagacctactcactaccacgagaacagtatgggggaaaccaccccgtgattcagtgaactcccactgggtccctcccataacatgtgggaattatgggaactgtaattcaaggtgagatttgggtggggacacag

SEQ ID NO: 59835 - DNA, 1150 bp, Homo sapiens
tgcagcagtaataattcttcaagtcttattaaagaattcaaatggaccaaaactcagtaaaatgttaactctaggctcaaggacctatgaaggtagtctttcttaataacttgtttttcttaaaactttgaggccgggcgcggtggctcatgcctgtaatcccagcactttgggaggtcaaggcaggcggatcacgagttcaggagatggagaccatcctggctaacatggtgaaacctcgtctctactaaaaatacaaaaaattagccagatgtggtggcaggtgcctgtagtcccacctactcaggaggctgaggcaggagaatggcgtgaacccgggaggcagagcttgctctgagctgagattgcgccactgcactccagcctgggtgacagagagaggctgtgtctcaaaaacaagcaaacaaaaaaactttgatttctcttagacgttatatggaaatggaattttattctgtgaatgttttatttcagatagacttgcaaagcccttctatacatagacactgtttttagtttttttgtcaccccaaacctcaaaaatgcatctcagcttgaaagactttctagacttttcctgagtccaaagtcatcctgctgatatcatggtttaggttctgaaaggttttatatcgagtgtttttttcttctttcctaagaaggaaaggatcagaaaggaacttgtaaccattgttgagcattttaggaaaagtgaaaaccgacttcatccgtttcatttgtaaggagaagcatgttagatgtgagtatatttggaaacgtccaaaatttaaccatgacaagagacagcagtgtgatggcaaatttcaggccaaagtctggaatttctttgctttcttcccattttatcttgtcttctcatttcttttacttttctacttctcttctctcactatttctttgctttctaacgtttcccatcaattttgagccattttctttattccatctacatatgaactcacagcagtagcaaaaatactgagctctcagaaatatatttatccatgtatctaaggactctggaaaacagattcaaagatgtgaagcctcagtagtgaaactgactcgaggaggaaagacgtttatgtgcggcagatcttctcggggt

SEQ ID NO: 59836 - DNA, 1046 bp, Homo sapiens
gatagtagccatgatataaatcctttctctttttgcagttggagactttacagcaagctctatgccggtgattcccaagccctttggagttagaactctttgtccttgttgttctggtttgagtctacccttccttccctgctgtcagatactgtgtgctgtatcttagttggatgttgacttcctttgagaattctttgatcttttctgagaattacatgagataccttaaattgggctaaatgtagggaagggattttggaatagaactagggagtgtcccaactggcagcttccccaattcatcctaagacattttgccatgtctaggatgggttgtttaagacaacgtctccttttctgggatgttcgaaactcagtgtttgggtctaagttttttccactgtgtctctctctctctgtctttttttactgagtatattcttctgcagaatggtctgtatctcgtgttagcttcagaaggcaccactttcaagaggtaattaaattataaagatttgttcgaagtcattatcaatactggagaagttagcaaaggtattggaaggccaacaacaatttatttcccatgtcactctttctgcagaaactcacctagagtccttaaagggaataactggtaactttctgatatatcatgatgagaggcctctgctggccactgggcagccttcagatagttttttccttttttaaaatgtttaaatttttagggctaggtgtggtggctcatgcctgtaatcccaacactttgggaagctgagacagaaagattgcttgaggccaagagtttgagaacagcctgggctacatagcaagaccccgtctctccaaaaaattaagaaattagctgagtgtagttgtgtgcacctggggtcccaactactcaaaagagtgaggtgggaggattgcctgagcctgagaggttgggactgaagtaagccaagattgtgccacagcattccagccttggtgatagagtgagatcctatttcaaaaaaaaatattgattttaagttaatttt

SEQ ID NO: 59837 - DNA, 1017 bp, Homo sapiens
ttgtgtactggccagagagaaggaggctgtgtcctggtctgagacccagcaggtttgaggtcttgtattttctagtctccataaatgttcccaatgccatttcgagttacagtgaggacttggacagccctttgcatttagttttgttttgttatttgagactctggtgttttcttcaaggaggctaaatgctgggtctattgggttacctgtctaaggaaactcccattgttccagaataaaagaaggatgaaaaactcatgctttgactgcctggcggctatcaggtgctgctggccccagaggttatgagccaactggcatgtcctgcgcctcatgcaggctcccactgtgagaaccagctttgaagacctcccacctagacctgcccgccatgtaagaggtgcggtgctgggtgtctgccatgggccggggagtgaggagaaccattctttcccacatgagctctgaaccaattgagaagtagggctgaggggccaggcaggtggagatcaaaatgttaaattcattcctgataaaagttccattggaggactggggcatgttttaataaagggcttcctcactctcaacctcagaagcagtccgcctagccccctgcaggctcctcctctggcccagaggagagatgtagtctgtgggcttcccacgggttcccaagagaaaggagggagaaggagctgggctggtgccctccatcccctcctggccagctgggtaagtctgttctcttgccttgggaggaggaagaggtaggagggcctggaggagattcctctgtagacattgggaacctgctccatcttcactcttgccctcttcttgggacctggtatccccagggacccagtgccctggctccatttgaggatttccaccctggggcagctcttttcctgtctcagcttcacagactaatttatttagagggggcgagagaaatgagataaattctgataatagtggcacttaataaatattaattgtcattcatat

SEQ ID NO: 59838 - DNA, 1046 bp, Homo sapiens
caagtacaaaacgcaaggtgaaaaacagtgcatggagtatgctgctctttgtataagaaagctgggcggccgggcgcagtggctcacacctataatcccatggggaggccgagacgggtggatcacgaagtcaagagattgagattatcctggccaacatggtgaaaccttatctctactaaaaatacaaaaattagctgggtgtagtggcgcgagcctgtagttccagctacttgggaggctgaggcaggagaattgcttgaacccaggaggcggaggttgcagtgagctgagattatgccactgcactccagcctggcgacagagcaagactctgtctcaaaaaaaaaaaaaaaaaaaaagaaagatggacatacgaacatatgtatgtgaatttacttatatttgcatcaagaaacactggaaggataaacaagttataataaaatgctcttctgtctgaggcacaggggaagggagtgattgggaataggtgtcggaatgcctcctttgcatgggtcttttgatggattgtgttgacctttgaatcatgtagaaaagcaagtcagcaaccagcaaaagcaaatcagccagggaatgcctttgactttgaatgagaccaagagcaggtggtggagagtgaaggtggttgactgcatttcttagctcagaagcaaagtcagtgcattcattcattcattcaatctgcaaatgcataccgagcctctcccatgcactgtctgctgttgcacatgccgaggatacagctgtcaacagaagcattaaggtccaagctttcccagagctggcattcttgagggggcaaacacatgacaaaaaggtgattagtgaggaagagaaggctcatgcggcaggacctagagaggaaggcgagaggagtccatgctgaggccagaggggacgttcattgctgatacatattcctatgtgttcatcatgcatttgcaaacagtatttttttaattttattttttaaagacagggtcttgcactgtcacccaggctggagtgcagtagcacgatca

SEQ ID NO: 59839 - DNA, 1046 bp, Homo sapiens
caagcacatcttgtcattgttgtgaatttctcagaacaaaaatgtgttgcctcaggtaaagcccgtaccatttgtgcaaaaggaaaatggcttcaacttactttttaaaaaaaactttcagattcaggcgaacatccatttcttctaatgagtgtgtgtgcaaatgaccttgtcataatgcaggatatagtgatagcaattgtagtgagtctttagaatgagctaaatgttatcaagggatgtttccagttagttataaccatgatatgccttttccgatgatctaagacacttctgttttaataggtcagtttttttccagttttaaaaaattttaactgaatttttaaattcaaagactcttttctcataaatggcacaaaacatttagctctctaagaaatgcagaatcccagaatggttcatgtttgtgtattgctcatttagctttcgacgtcctttggaaagttgaggaataaacaggtggacaatttgaaaggatgaaaatactccaacaggttacactaatagaatcaggaaggaagaatgtccaacaggagtcattgttgtctgttgaggatttagtgggtgaaagattgaaaaattggaaatacatattcacctactattggtaaaacttttttcctcaaatattcctttatatgtatatattttttttcttcttgagacagggtctcactctgtcactcaggccggagtgcagtggcactatctcagctcactacgacttctacctcctgggttcaagtgatcctcccacctcagcctcctgagtagctggggctacttgtgtgcgccactgtgccctctatttttttggtattttttgtagagatggggtttcaccatgttgtccaggctggtcttgaactcctgagctcaagcaatcctcctgcctcggcctcccaaagtgctgggagttagcccaccgtgcccagcctatgtgtgtgttttcttaaatgttcctggttctctaaaggatgtaggcaaatgcattcttggtaaattaccttggttgccaatgt

SEQ ID NO: 59840 - DNA, 1064 bp, Homo sapiens
ctgttgtatgcacggctctgtgctaggggctcggaggaaataaaaagaaatgaagaatgtggactctgttcaccaggaattcctggcttatctgcggagatacgcatattccagcagttctcgactgagagtgattttttttcccgccaggggacatttggtgacatctggaaacatttgggggttgtgtgtgccgcttctagtgtctgtgggcggagatcgaggatgctgttaaacatcccttaatgcacagcacagcctccccaccctaaagtattatacagcctgagtgtcaggggtgcttgggttaagaaccctggtatgtctcaagggtgtggtccccaaaagccatttgatgcttttggagtggtgtgtgcagttggtgagcagtgctgctgtgacctccatggaggggagctggcggcagagtggagtgctcagagctgcaggccctagggagagtaggggaagcctggactgtgctgagctgggatagaactgaggcagctgcagggagggcaggcagccaccagggcaggcagccaccagggcaggcacaggctcagggtcaggaacgagtgtggagctggtggcacggtgaggaggacctgtcatagggcggaggctctgtgccgggagcagcaggcagtctggaccgaaggaatgagagacatcgcagaccgtgggctgagtgatgctgtgatggatgcagagctttaggaaggtattcaatggtgctgggcaagatggggcagagaaaggccagtccaacggaaggagaacccagccagggaatggaaaatcaggcggtgatgtaccgtgcaagctggagggagcattgccaatcctggcctgtttctcaggttaccagtgagaaaatcaggtgtagggcgatgaggcgtcttggcttgtgggcagcgctgggttcaaggcaggtcctcggccgcaggacctggcctctactgaccagcatcccatgggaaacctcagcctgtcctctcagcagccccgcaaggcagacaccatcatttacctccaccatacagaggaggggacacacactg

SEQ ID NO: 59841 - DNA, 1186 bp, Homo sapiens
ctctgaatgccctgggaagcttgtgaaatgcagagtcctgggtcctgtccctggcgcgttgatttgacaggcctggggtaggactgagatgctggtgtttttaacgagcatcccgagacacttggagaaacagctctaggaagacgattcccaaatccagatgctgcctgttctcagggagaaatcctgctttccagctctgtgctatgtatgtccttggcacctcagctgaatctttctggaagtaaatgcatcgctattcatgaaggccaaaaggtggaaacaacccaaatttccgttgacggatgaaagagcaaacaaaatgtggtctctccatgcagtggaatattatgcaaccttacaaaaaaaggaaattctgacccatgctgctgcatgggtgaaacctgagaatgcgctaagcgaaacaggccagacacaaaaggacaaatgtcctatgattccacttactcaggtacccagaatagacaacttcacagtagggacaatggtggttaccagggactggggggaagggaaatggggacttcttgctcagtgggcacagttcccattgggaagatgaaaaaattctggaggtggacggcggtgatggttggacaacaatgtgaatgtacctagtgccactgaactctacagctgaaaatggtaaaaatggtaaattttatgtgacatatattttatcacagttttttaaaaaagcaaacacatgggtctcctccctttctccctccccaactaaactccccatcctgaggcctctctgcagttcacataaccctgataaagccgagggagagggcttgggggacccacttgacttattttttgcacttaagctgaaagtcatgaaaatgcggtgtccttctttcccggactctctttaagaagattaaaggaaaccacattcataagccacaaggacactcctggaaaattctttgtcctgctccccaaatcttttctgcttccgtttgtcctgttcattgatggaaccccgctgggaaggactgaggactgggctggagttctgctggtataaatcaccttggagaggggatgtggggacagagtcttgaccattcacagctgattgcattttgtcttgtgcagagagagcagtaggtgcccagagagagaggtcaggggggaaccttcctctggataa

SEQ ID NO: 59842 - DNA, 1014 bp, Homo sapiens
agttagagaccagcctggccaacgtggtgaaaccccgtctctaccaaaaatacaaaaattagtcgggcatggtggtgggcgcctgtaatctcagctactcgggagcctgagacaggagaattgcttgaacccaggaggtggaagttgcagggagccaggatcgcaccactgcacttcagcctgggcaacgagaggaaaactctatctcggaaaaaaaaaaaaaaaaagaagaagaagaaagaaaaaaagaaattcattgattggggctgaagataaccactttgccaatgactgaaaatggctaagctggtaaagctagtccttgaatttctcaggcaccaatacagctttttaaggatcaatctgagctgcttagaagggtctaaaagagagagagctcctctctggaaagctcgcactggaatggagaacacaagcaggaaatgtgaaaagtaacggttgaaagccttacttatgatgacacatagggaggcaggtgcatatcttacaattctagacacttggataccttgggaaaccatattgaaagttaccttgatttctttctttctttctttttttttttgagatggagtctcgctctgtcacccaggctggagtgcagcagtgcgatctcggctcactgcaagctccgcctcccagcttcacgccattctcctgcctcagcctcccgagtagctgggactacaggcgcctgccaccatgcctggctaattgttttgtattttttttaatagagacagggtttcaccgtgttagccagattggtctcgatctcctgaccttgtgatctgcctgccttggcctcccaaagtgctgggattacaggcgtgatttcaaataaaaccatgcaatccccataaaacaggctttgagggatgcagtaagttatttagtgatggtggtggcggtggtgtgcgtggttaaagccgaaaacttgccaagctttgggcacgtacatgtgagcctgtctgctgaatgagcttaggcttt

SEQ ID NO: 59843 - DNA, 1164 bp, Homo sapiens
atccatccctacatgatggcagatccctcatgactgaaacaattcctagcactgctgcattgaggatttacgtttccaacacatgaactgttggaggacacgctcaaagcatggcagtttccctttctttagttccttctcccacagcactgtgcaaatgagtatttaaatgcctgtctgatagtcaccctcactaccttaattccaaaaagtcccctgcttaatagaatccaaactcatttgcaaacgagcccccgactttgtgatctacctctttggttttcatcttcccacccctcaccccatgtttcagtttagttctcctgaaaggaacagataattgcatctttcctgctgcagtttgacacacacctccttcaggacacctcttgatttcctgtctggatgggcccttccctctgagattccacggcaccaaggtttgcttctatcattcctgactgtgccatgggatctctgctgctccaaactgtggacttcctgaatctagccctgaactaaaggcaacatggtgggaatggaggcaaggattaggggaactcaggtaaaattaaggatgttagaaaccctgggactgggtgctgattaggcaaagaaggtttagtggaagggaggaatctatgctgacttccagttctctctggctttggtgactgtattagttctccaaagaaacagaagcaataggatatatgtagatacacaaaaagatttattatgaggtattggctcatgtaattctggaggctgagaagctccacaatccaccatctgcaaactggagacccgggaaagccaactggacttggcccaaggccaaagacctgggaaccaggggagccgacgtccaagggccggagatggatgtcttagctccaggagagagaaaaaccaggtgtagcggcacgcacctatacctgcagctacttgggaggctgaggtgggaagatcacttgagtccaggagtcgaggctgcagtgagctgtgatgacaccactgcaccccagtctgggcaacagagtgagactctgtctctaaaaaaaaagggaagaagaacaaattgattcttcctctgcctttttcttctattctggctctcaatggatttgaacatacccgcttacacgggtgaggataatcttt

SEQ ID NO: 59844 - DNA, 1840 bp, Homo sapiens
attccctcacagacacaccagaaatacagaaatactgttttaccggctgtctgggcatcctttaggccagtcaagttgacacataaaattatccattacattgaccaagtggatggcaggttcctcaaccaatatggggcattccagaagaggcggaaggtttgagagagagagagagagagagagagagagagagagggagagagagggagagagagaatgaggattcctttatggcaacagagtatacttaaatctggtctggcctctcctgccaccttgtatactatacatattactctgtagatatttagagtagttgaagaaacaatgtgttttatcacacttttaaaaccagtgttgcgtctttgcatgtttatttccttgtgccatctctgtcatctaatgtggatatttacatgggagttcagctaatatgtggactagttggtggtttaaattcctctaataatatatcttggcagatctttcccctttcttctgtaaacttacttagctaatgatttatacagattccagttaaatgatttgaagagcagtctgtctgtctatctatctagatatctatctagatagatagatctgtctgtctagatgtctctctctctctctctctctctctctgtctctctctctctctctctctctctctctctctcataggctaatatttttaaaaagtcagaatagcttacattggagaaccacactaatgaaagattaaatgcaagtaggcctgagatggactaagatggcagatatagaaaaagaaatagacaccaaagattcaatttttttttttctgttaagctttatgttgtgtccgttctgtcttctatgtggttttggcatgattcatatggcaaatgaattattttagtgaagctttatttatgactcactgtgtattttaagttgtatgtaattggattaacaaatttcatttcacatgtgtgaagtccagggctatcgtttgagtagtttgaagagttgtttactgtttttaagctatataactgtttttctcaaagcttaaagttgaggtcagaggctctgatgattggtctgaagccaggtttgggggaataaattttttctaaagtaatagttggatagaatttggtaaatggattaatatccattttttagctatttgcatttttctgttatgaatatttaaaaaatagttttgactatatgatatggataagtaggaggtatcacttgggatacaaacacataaaagggtatcttttaagaaatacagtgctgcaatagatgtagtgtttttggttcttgtcaaaagctgtagaactgatgacctaagtatacacacatgtaaatgtactatatgtaggtgtgtaaataaatatgcatatacacacattgtaaatatgtcttggaggccaatcacagtgtctcatgcctgtagtcccagaactttgggaggctgagatagaaggaccacttgaggcaaggagtttaagaccagcctggacaacataacaagaccctgtctctatggaaaatcaaagaaaattagcctggtgtagtggcatgtgcctgtagtcccagctacttgggaggctgaggcaggaggatcctttgggtccaggagtttgaggctttagggagctatgactgtgccactgcacttcagcctgggtgacagagcaagaccctgtctctgaaaacgaataaatacctacatacatctccgtatttttaatttttattttttattttgagatggagtctcaccctgtcacccaggctggagtgcagtggcacgactcggcccactgcaacctccgcctcc

SEQ ID NO: 59845 - DNA, 1049 bp, Homo sapiens
cacagatgaggaatttggacttatttaagacatttttaggggccacataactggtaatatgtggagaggaagttacccaggtctgtgtgtctctttccaatatgatttgacccgtctgctgtccctgtgttctcttgtgaagaaaggggccgcttctccttgatataggcaatagcccactctaggtaggaggtgttcactaatggtgaaagaataaatccgtaactgtggcttctcagctactagaaaggcaggatacagtgtggtgaagtcctgagaatcagctcatctgagtttgcatcagactcctgctttagaagctacttgaccttgggcaagtcatttcaactctcagcccccattttcaggataatggggatgataatagtatctgcctccaatagtcgttgtagggatcaaacagtcagtgcatgcctggcacatagtgtgggctctccaaatgtttgctgtgtacattattattatgtgtaagggacatcttgctagacagcgggaatagggggaaggttccttcccagaagtcacatcacgcaagtgtcgtctccctaaggctccctgttgaagcctaagggagcccttcttgaaataggagacagaggcagcagcgatgaggtggccggccttcttccaggggtgaggctgctgctgtcatagacccaacactgctgcagagttgccaaggatacatcagtttcaccatttttcttgctgactaaactcctgtgaaaactcttgctttcctcggttatctgaccgtctgcttctcttaatgttagagtcaccagagcattagaactagaaaaggaacttagacatcttggtccagttctctagactttcagatgaggaaaggggtgcagagaggtaaagtgattgcccgaggtcatggagctaagccgggcagacgcggagccagaaggatggtttctgaccttcgaattcagaactctttccacataaccatacttgcagagcctctttcaggagaatgcgggaaagtaactcttcctcatcttgcagaggtcctt

SEQ ID NO: 59846 - DNA, 1059 bp, Homo sapiens
aagcacatgtatcctaacaaaaagcttttgagagtagtaaatatgtattcatttcaaagatagaaagcagcacccaaaaactaaacccccccccaaaaaaaaagttctgatagaatacatgaaatcccaagcagaattggtaccaaattttcagttttgttgtcactttttctcagatgggaagtggaagactcttgatttgctttggctctacgtccccacccaaatttcatctctaattgtaatccccatgtgtcaagggagggacctggtgggaggtgattggatcatggaggtgtttcccccatgctgttctcatgagagtgagggagtcctcacaagatctgatggtttagaagtggtacttcctccttaggtctctctcctgccaccatgtaagacgtgccttgcttccctttgtacttcatcctgaaatcatcacagtctaggggtttgtatttcatttgctaggccaaggggtaaccattgaaaatttttgcatagcaaaggattgaggcggaatgttgggaagatgagggatgattcctgtggtggtgtgtgggatggggatggattaggcagtttcagaatagagaccagttggccacctggcatctgactgtgaaagtcctggctggaggggaggggccctaggcaaggcaatttactttttttttctaaagttttaatttttagagatagcatcttgctctgtcgcccaggctggagtgcaggggcgagatcacagctcattgtagcctcaagctcctgggcttaagtgatcctcctgcctcagcctctggaatagctgggactacaggcatgccaccatgcacgactaattttaaaatttttttgtagagatgggaagtctcagtatgttgcccaggctggtcttgaactcttgggctcaagccatcctcccacttttcttcccaaaatgctggattgcaggtgtgaaccaccatgcccaacccaagcaggttgacccagctggataccttgagaaggaagaatcagcagagctctgcgagtcataggaggtcaacaggagggagg

SEQ ID NO: 59847 - DNA, 1007 bp, Homo sapiens
cgttctggagactcggctctgtatttctagagctttgtagacaaatccatgctggtgtctggcttggtcctgtgcatgtcagtcagtgagcacacctgcatgccgtctatctcagaatggagagctggagtgtctggcagaaaaggaaccacatctctgcgagtgacacagagccccaaaacccagcctggggaaaggggtggagagaggccgtggaaccagttccagaacactttcacgtgcatcttggtttctagcacggactgggatgcctttgttaatatgtgccaggctggggcacttgcaggaggtgacggccaccttgactctgtatgctgaagccctctggtcactcacccatgtatgctgcagtccccccggccaataacacaagccaggacaagcccaggggaggtccccggacacacagcgaaaattcctggctggttctgtatgtcgccgtgttgggttcccagcccagttccagctctaggcttgcaggtctctcactaggaactatgcctccagccctttggtggattaacacctgccacctccagttctgaatctgacctctccctctaggcctccagcctggatctacccagttctggattcagatcgttacaggcccaaagcactgaaacattgcagagcacattgcttttcttctttatttaaagaactaaattaagcattttaaaccatataataaatgtaaagagatccaacaaagttctgtttctgccattattactatatcatggctatttcggaatgatcaaataggagatttttttttgttttcaaaaagtctctgtctttctcttttgttgtctgtattttgctgctaagccaccagttctcgattggttcactccctcttcctgctacagattgtcttaggggttctattcatgagacttctggagacctaaaccccactccggccaatgccccataacggggtatgatgcttggctgacatcgttaactcagcccctcca

SEQ ID NO: 59848 - DNA, 1049 bp, Homo sapiens
ctgaaattaaaatcgaggttccttgaattgaagcctttttttggaatatcacattgcttcctaatacaaacatgctttacaattcctgcatttaaaaaagctaaccaacaaaaataagcaagtcacatatagatttaaaagactaccaggaacatttggactgctgggcagctaggttatgtcctgatcatgtcagtcattaggctgggagctaatgttcagatcaaacatgttgcctcccctacaaagaggtctgttgaggataagccctcgctgagaaattcttcacagctcagccaggctttcttggaataattggagattgaagctggtagttcctgaaatttaaggtcatcagaaccacccagagggcttgtgaaaatgcagattgctgggccccgtccccagatgctggggcctgagactctgcatttctggcactcagtgatgccgggcctactggcctggaggccacacattgaaaaatatggatttaagctgcctccgcctggggtctccattctgaccctgtagttgtttctcaaatgcaatgaccaagtacagttcctaggagggctcagtctggaccactgtatttgtccgttttcacgctgctgataaagatatactcgagactggataatttataaagaaaaagaggtttaatagactcacagttctacatggctagagagacctcacaatcatgggagaaggtgaatggcacatcttacatggtggcaaacaagagagaatgagagccaagtgaaaggggtttccttttataaaaccattagatctcatgagtctgattcactaccacgagaacagtatgggggaaaccaccccatgattcaattatctcccactgggtccctcccacaacacgtgggaattatgggagctacaatgcaagatgagatttgggtggggacacagccaaaccacgtcaatcactaaagccagtcttcagtgacctgccatctcgatccttcggacactccatggaggcttctggacgcagcatctgtgctgctcagggccgttcc

SEQ ID NO: 59849 - DNA, 1055 bp, Homo sapiens
gcaggcacagacaacagtgtggagcccctctcatcatatcccgcatgcaaaattcagggagacttggagctaaaaacgcattgacttcttagttgtctccatttgttctgggttaggtgatggatccacagtgacttagcagctttgatgacagccggggcttctggaggcttggcggcatgttaaaaccacctgggtctattccagatggattaaatcaggctctctgggactggggtccagacatcattaaaaaaaaaaaaaaaagtctccccaggtggcttcatatgcagcccgagttgagatttattggaccagactaacaaacacagctggaagaagagggcagggaggactccttaggatgtgcagatggagtggctcatgcaggctgcagtggaattcctttccttcttgtaataaaacaactcctatttacatatcattttagaaaaatattttcccccttgtcttatctgatgctcaagagagaatagagtttgccttagcatctccgtagatttgttttttttagatgtatgacctgtcatcaataaacccagagacataaattagggaatggctgtgctatagaaagcacttactgatgtattaaagattctgccttcaagctcttttaaatagtgcctttctcggtgatttggacttaaaaatttaaggatatatgtacatgcagctttgtgggagcacttgaatattaagtagtgcctagctaagttgtgttgaaatgagttggtagatcgtagataatataaagtaagtgaatatttccaagggagcggagaaacttggatggctcagtaattatggaaattggcagggcatttggggaccccagctgctctttgtccctttgtcccataaatgggtgacagtctgcaaggcacggagctctgccagatgtttgcaatagtggttgggtggggagaatttcagagctggtttggccacaggaagatgacgagcttgttaagaataatgatcggacaccctgcatattcgctgactgcatgcttagcaaatttgcaaactag

SEQ ID NO: 59850 - DNA, 1049 bp, Homo sapiens
catagttactgttccataattattgttgaatgaatgcacttgaacaaaacacaatgtgatttgttttgttttccagatcagctcataatgaattatatgtatctaactgggcagacgtaaagctgccgcctgtagaataaaagagccatccatgattagaatcacagaagcagaaaattttagaactataaaggacttgagattttaattcagtctgtttattttggagatgaacaatgagagttcgtggagatcaagtgacttgcccaaggtggaattgctggtgacacatgaaccagccacccacttacttagacaatgactggtcacatgagagctgacattgctgacaattgttttagctacctattgtggtacatttaaattgcatcaatctttatgcctccgattttccttggagaagatagctaaccgatttttaattttatcttctctgaatttgtggctcattcatttctttgtttttcctctgtctgctttctaaaatttctttatgccgctttcaagaaagctgactggaacagtctgttctccccgtgttagacacagaggggtcagggacagagattgattattctagtgggcaatggccagatcttatataaaagtggagttctgacttccagtctgcagcagccagtccaggaaaccaaccaataacccctgtagcaattggcccggcatgcccaggacttgatcaattactggcagctgccctaatttttgtcgtgacttccaacttcggaccaaacagagaaggccaaatatgctcccgtaaccgatcacccggatgggctgcttttgttatccccctacggcacctgccaacagctgccacccagagctttcccttcttccactaaaaagtgtcacacttctctgcctgcctttgagtttctaccaaacacaggtgacagtggctgacttcttattatagcaagctctgaataaatagcttcggcttttctcattttggtgggcttcatgtatttccacgtagggaaagacccaggaagaagcccggccct

SEQ ID NO: 59851 - DNA, 2410 bp, Homo sapiens
ctagtgtctactcctcctggcctccagtccccctttcccacccacattttttttttagacctggtaattttttttctcttttctgcatttttcttgtggtttttttaggtgtctttattaacattcccactggtttagagattgaaagcaaagttcctgtctttgctttgaacactctagtgaaacaggatactcaaggtaaatgctaagatgaggctattatctctggagctcagggtctaattcatccaacgtttattgagccccttcaaagcacccatcagtggggatggaaaataaaaaatacacagctcctgccgtgcaggagcttgtaaccttgtggggaagcttagcacttcttgcctccctaggtttaagcagttggaggtgcagtatctatttggaaagaagaaaaatgcttttgaaaactgcacgtggtctgtatggtggctgctccttgtcctgaatgcaaggttgccctccatgattggggaagcatccatcacccccttgggaactgaactcagctataatgtttgtgcttaggaaacttgacattgaacttccagtaactgaggccaggaccttcttgaagcactgccttgtggttcagttctgcctgcccacggtcattggccttctgggctgaccgtttcctcgctgactcccacagacacgctgaccatctggaggctaaaggatctttcttcctagcaggtccctcatggtaggggctctggggcccctaccaggcaaaggaatggttgggattagaccctatgcagaggcacgtgacttttcatagaggggcacttccatggcccagttgttccctcattgagggcgttgtggggagccggttccttcctgtggattgtagccttcctgactttaaatccttgctttattcagatccttggccagttcttctgtactggtctcctgggccacccatagggctgtcttcacttcctaccatcagctgttccctctatccaaagatgaaggagccctgtatttgctgatgtgagctgcttcctttatttatgctctcactggatctctgggagatgtactctaccatcagaacactcagagacagttacctggacataaagtgttggtgttggcatcgttatcaaacaataacagaaaacacgtcagcaccaactgcatctgtccctgtgcttgataaggaaaaaacaacatgcacagtcctgtctttgaagagctgacattaagatggacgatgccgtgaaacacacgcatttgtaagttgcagacatcctcctatgcaagcactctagtcacatttgtttggtaaaagataatcacttttagcttcagaaagaactcattcatgccttgattttcagtgttgccacgggaaagcaatagcagaacctgggtccctgctgtgaaaatgaaaatacttaaggatgttcaattgcttttctgttattcatgtgcatccgtggtaggacatcatggcagagcagctgctcagagcgtgcgattaggtgtgggttcccacttcagcctgggattgtttcatttcctgcagctgttctccagcatggtaaaattcgaacgatgtcgataattttcccataaggggctctcaagatacatcaggttgtgctctctagagtagtttaaactactatttcttgagtacttactatgtactgggcagcattttccatatctcaggaagcagtctcattttcaaaggaaaatgaaatctgtttcgggtcacaccacttcctgcagattcaggacaccccactgagagatttaaaaaccgtggatgctcttttcagtctgacaagatgcttgtcatagagcatcactgtctgggctacagggatgcagaaaggaccgaaggtctgaagggaggaaaagggctctgtactggtgggtttctggaaaagcctttactttgaggtggtccattgagcttgtgtagcctggaggggtagaagcaaaattaaacgaatacgggtcaaccttttaacgcgtatcttgcaaataacatgctactggctctatgtgcaatgcctggatataacaaatctatttttacgaggcctacaaagaccaaaatatctcgatgtgtgtgatgtgatgtaatctctgcatttggggtgggaggtgagtagggaaacaactactttggaattagcacgaatgtacacaatttctgagtaatgatgcacgagaatgctcaggtattcatagaattcagagagggggtgtgacctgcccatgatttaggaaaggccttaggtgtttctgggaattgtatgttcatatgttcctacagccaataactcgcatataatgatcatcattatttgttgaacagttaggctaactgagtatctttttgggggttacttggagcagt

SEQ ID NO: 59852 - DNA, 1045 bp, Homo sapiens
ggaaggggaagttgaggacgtctgagcaaagaccggtggtggatctggacccacagtgactcccataagcatcacatgtctttctaactgcttgttattattattattattattattattattttgagacagagtctcgccctgttgctcccaagctggagtatagtggtgcgatcttggctcacagcaacctctgcctcccgagttcaagtgattctcctgcctcagccatctgaatagctgggattacaggcacgcgtcactgcacccggctaatttttatatttttggtaaagatggggtttcgccatgttggccaggctggtcttgaacttacgacttcagatgatccacctcccaaagtgctgggattacaggcatgagccaccgcgcctggcctctaactgcttgttgatgtttcctaatacatttcctacagtgacctcaagctcagcatgtccgcattccggattcctcctccccgcccagactggctctgcctgctgcgtcctgctgggacaccagttgcgcagtgcctgaagccaggaacctggacctccttccaggtcaaccccgcctcccaccctgacccgtgcacgcctgtccttgatcattatatcatatggcttcagcctctgaaatgtgacttgtgtgtcattacctctccagaacccatgaccactgtcaccttttacttctgctgttgtaataggtccttacctggccttctcacctgccttcctccagtccatcctgtgctattcgatggagtgggacctcgggttgagaacacggctccaggacagccatgagaagggtgcagaaggcagtcagcccgcggctggattagcacccgctggggatcattctcccctctttcccgcttgacccattcccccagtcacacacctcccttagtacaactctttgcttcccttgcttcttctccaggataaggaacaagctccttaacatcacatctccaaccagtcatgaaggggcctgaagtgatctttgctgtttcatctttcccccatctccagcc

SEQ ID NO: 59853 - DNA, 1107 bp, Homo sapiens
aaacgctgtgtacccagaggtctctgggagtttgcagcacctgcctaagctgaggaagcccttatctacctgaaaaatgcatgcctgcttcatagccagccaccgtgccagtggccatatccctaggcagggctggcctgtgccttctctggactccgatagtagttaagttcctctgtcatactgggatcgctcctgtcaccccccatcataaatacttatctgtctgcatctcagacagaagtgagcctctggaggcctgggacccgttcttatgtatctctgtaattcttagcacccaaccaagcctgtgcctggtacagaatcatcgttcattgtgaacgaatgtcatagaacacaggcaatgcagggagatgggggttgcgcaaacaattcaggtacaaattccaaggatggtggaagttgggaatagggagtggtacaagtgccagcgtctttgaagctgacaggcgttaataaggaatcagataaacagggaaaaaatacagtgaatctgacttcttagcagaagtgtttggccgtgttggcccttgggaagctgaacttttgcctcacccgagacgccatcagggtgcttggcttctctggagaactttccagaagtacttacttgatgctattcagagtctcagaaacttgagggccacttttaattatctccaatggactcattcccaagaatagtattaatttaccacctgcaagtgatattttgagcatttctagggagttgcttcaaatgtttcaggttccagttgactttggaatgtatatccatcatctgtcatgtgtctaaggtatatgattccctgtaggtgccaggagctcccaaaatagaaggaaggagtgactacttgggtagtatgaagcatctttaaacttagttgaccaaagcacccttttcctggagactagtgtgccatggaacctcactttgggaaatgcagatccaatgcaatccttttttttcttttttttttttgagatggagtctcactctgtcgcccaggctggagtgcaatggcgcaatctcaactcactgcaacctctgcctcctgggttcaagtgattctcctgcatcagcct

SEQ ID NO: 59854 - DNA, 1028 bp, Homo sapiens
ttttacccaccctttacggaaaaatccaaaggacagagaggtcaagtatctttttgtttgtttgttttttgttgttgttgttgttgttgtttttgagacggagtctcgctctgtctcccaggctggggtgcagtggtgtgatctcggctcactgcaagctccgcctcccgggttcacgccattctcctgcctcagcctcccgagtagctgggactacaggcgcccgccactaagcccggctaattttttctatttgtagtagacacggggtttcaccttgttagccaggatggtctcgatctcctgacctcgtgatccgcccgcctcggcctcccaaagtgctgagatgacaggcctgagccaccgcgcctggccgaggtcaagtatcttctcaccagctagagtagaggaggcagggcgggaaccgaggtggtctctgtcttgagtccatacattataactgttgaattaccggacacccacttcagtggcatttattcggtgaagtgtttggggtgtagggaaggggtggtggtgactggaagtgtagcttggggatcgcctttttaatatccctgtctagtcacaaaaataaggcatgttctaatcaactaagcacttgaccatgaacttctcgtaagcaaggtgagtggtagattttttttcctcaaggatgcaagcagctgatagaattgggaagaaagttattagttgcaaaaacatttaagctttgcagtaagattactagtgcaccaaaggaatcgtgactgttaagccctctagctgattaactggtgctgttattttattttaaaatgttgtaattttttcacaacaagaaaagtaatgtgtattcctagaagacaaatgaggaaaaatacataagcaaaaagaggaagaacactcataactccactagccagaaattccccgtgttaactctggcgtcacttacggtaaatatccccattcatctcttcttgctcccagaataaattagcagcagcttttcctcagagcaggggaac

SEQ ID NO: 59855 - DNA, 1008 bp, Homo sapiens
tcttgaagagtgactttcagtcccatcctgggtaagaacagctgttttgcatgttgctgagtaatttctttgcaggtccttgtgtcctagcatcgtcctttctcacctgcctttattctgtttcacgctgcacagtatggagtgtgcagtgattcattggggagagaagaaaataaaaccaaaaagcccatctgctttgtcaggagacacctccaaacacagatgctccctcatcctcctacagcagctgttttcagccacacctctgggctcaagccatcctcctgcctctgcccccaagtgatcatcctgttgtcccacccattgtcccgtaagcaggagttcaacagggacagagcgcggggtgggaggtggctggaatcatcccatggcttagtggtgtggggactaaggaactattgttccctctccagctggagctgcacatccattttctgctgtcagatgccatccatgtaggagatgctccttccagacagccccccagagccgcctggctgaccttccactcccgggctgagtgtcactacgagtcttgactttctcgtcatgctggtgtttcacaaccttgtagctagagtccggtgcagcttttcttcctgccggcccatcagctttcgcttctctctgccgctgggaggcaacatctcggggttctccaaggggaggtctcaccttgaatgagtctggcattttgaggtcatgatggtggccgggattctgcccatgttcagtgggacttgggtggcagcacaagcagatgaggcttggttttgttccattctttgtttagttgctcactcattccttcatttggcagatgccatatactgtgctggaagagaggatgcagccgtgacccagacagacaaagtctctgttttgatggggcgtatgttggagagtggaggggcagggacagtggatgatcaacaagataattttggaagctgataggagctgtggggaacatgagagaggttgatg

SEQ ID NO: 59856 - DNA, 1046 bp, Homo sapiens
ctaacaaaagttataaaattagctcatcactaggtttagatctgtgacatcccaggggactgaggaaattgcacttatcacagaagagtcacagctgaaatgtttgagaaaacaatgtaagagaggttgtcaaaattcccaaacatataaagggtagaagatgagatctatagactggaaagcttgacttcaatgcacagcaaaattctggaacagaaaattaagcagatggtttgtgatcatttagtaaagactgtagtggttgctaggagctaacatgggttactaagaacaaatcttcccgaacatcccatttcccttttaaatagtattatgtggtgtgtagagctgaagaattctacttctgcaaagcatctaattgtctccttatggatgggatggtaaaacacaggctagatgatagtactgctaggtttgcagctagagagcaattgaagccagctgattaacgtcatggttatcttgatgcgggtctctggtggaataccatggagctctgacatgtaaccttccatttaaaattttaattaggaatttgaatgaagacacatgggatggatatttaccaagtacacagatggcccaaagttgggagggataataagagcaatagatgagtcaatcaacattcagaacactgctgatcatctgaaacgctgcatggaatccagaatgattggatttaatgaagctaaaggtgaagacattaagctctcacaatatcaacccgagtaagaaaggagattgtgggctgggttcaatggctcacgcctgtaatcccagcactttgggaggccgagatgggcggatcacgaggtcagggatggagaccatcctgactaacgcggtgaaaccctgtctctactaaaaatacaaaaaatcagccgggcatggtggcgggcgcctgtggtcccagctaccagggaggctgaggcaggggaatggcatgaacccggggggcggagcttgcagtgagccgagattgcaccactgcactccagcctcggagacagagcaacactctg

SEQ ID NO: 59857 - DNA, 1048 bp, Homo sapiens
gtatttttagtaggaatggggtttcaccatgttggccaggctggtctggaactcctgacctcaagtgacctgcccacctcggcctcccaaagtgctgggattacaggcatgagcaaccgtgcccggcctctactttactatttaataccgtattcatgatactgtattttaccctgggatcagtatttccagatctgaatgctagagtctggacaaatgagtgatgatagagcaatgagaagaatataaaccgtattgtaggaagactggtcagcattgagaagactaagcagaggcattatatccctcaaatctgtgcaggatatatgggaagaaggtggaagctagttctctgttggtcctaggagtcattactaatgaccaggaggctgatttctggtaagtgtgagacaggctgtctgagaagcgttctagctccagccagtgcatgagtaccaggagggctgagactgcctttcttgtgtctcgttctccaccaaattcagagtacctaggactgtgcctgatacatggcaggcacccaacagatatttattgaatgaataatgaaaagaggaaattgagcatgaaatgagcctttgcctggaataggccttcatttggtgcttgtgccctacttctagggcacaatgcatggatagtcgtatggcattttttgaaaataactcatgcactaaaataatgttaaaactttacgttcagattttgcacattgtaagcaatgtgagggtggaataaagtacctgagaacagatgtgggaggccagaataattttttttaaccatgtttgaacagctccaagttaattaaaccacttttcttaagagacattaagaggccattttaggatttatttgaaatttctcaagtatgcttattcaaacattactcattccagctcaactcccagcaacttcttgagaccttctccataattctgacccattcagggctctgctttctctgaacttaaaggcaattctacagaatttagcatttgattcttttctaatttcttcctgagtt

SEQ ID NO: 59858 - DNA, 1039 bp, Homo sapiens
ctttccagggatgccgggggagggaagcagatggtaactgtgtatacccgtttcttcccttgtattattcctttgacagataacagcacatgtgactgaaaagggaattcgtgccagacataagagaagtataattggtgtcagaccatgacattatccccctcattagattatttttgcattccattaacactggagattaccaaaagagggaagaaatcagaaagccagatattcaaataaagactttacttgaaaatgcatttttaaaaatttagctgaaattagcctccctgcctgcataaatgctttactctaagtgataagattcctaggaatatcccagggctacatttagtagaattaactgatagaaactgtgtcggaatattatgctttaaccattacctgaataaataaatgctggaacatcataagattaagtttaatgactgaggagatttttgttgaacattagaatatagacttaatttcatgatttattaatgattttgagactttggattgttgagggtatggagaattgatgattaggctcacaatttcttttccatagatttttcttttccttatgaatgtttgaacaacacattaacttgggatcatgttaggatgcaaataagtgttcatcggtgcatttagttaacctttcatgatcttcaaaatatttttgtaggttatgatatttttgtataaatattttaaagctgtctatgccagaagcatatgtatgatttctctctgtcaaatggcagttccaggtggtgactagcagttttagagatttgtatgttatagtcagccatggtataagtcaaagaagtttttttacttcttggttaccatgttaactcgagttaccttttctagttccttgttcttctgtttgcgttacactttgccgtatttctggtttttcctagagagagctagttctccccaaatttgggagcatgccctagaagttcatgtgactttgctttatgcaatttctgctctataaagatgcaagcacatc

SEQ ID NO: 59859 - DNA, 1011 bp, Homo sapiens
tgacaatattcatttttgtcatagggctatccagttttcagcatcatttgttgtaagttctccaactttagtttttttatttatttgttttttccttaaaatagctttggctattctagagtatttgtattttcatgtaagttttagaataggcttgcctttttttttttttttttttagtcagagttttgctttattgtccaggctctgatgcagtggcacgatattggctcactgcaacttccgcctcccgggttcaagcaattcttgtgcctcagcctcctgagtagctgggattacaggtgcccaggtcattttctatagttgagtacaggtttggtttcaccatcttgcccaggctggtctcgaatgcctgagctcaggcaatcctcctgtctcggcctcccaaagtgctaagattataggtgtgagccaccgtgcccggctgccttttttaatgcttgtgggaattttgtttgagcttacgttgaatctgtttaccaatttgaggacaattgacagcttaaaacatgtagccttttgattaataaacgtaagtgttttcattttatttaggttttttattgctctcagtgacattttatagttttcaggatgtaggtcttcatatacttgttcaatttattctgaaatattttttattctattttcaatggatctttatttcatttttccagttgcttgctgctgctagcatataaaaatataattgatttttgtgcattagcctctgatcttgctaaactcacttactagttccagtgttgttttgtggatttcttaccattttctatctcaataatcatgtcgtctgaaatttacattaattctagttagtccctgaaggaatcctatttggtaaaactttgatagtttagttctaagtattaggtgtattttaatagcataataatatgtcttaaaatattttgtgttagacattttgaaaattcaaattagcctctcttattccctttttgcctccattag

SEQ ID NO: 59860 - DNA, 1017 bp, Homo sapiens
ccactgctcctggcccccatcttttctgtctgggtcagtgagaaagtggaaagagtttttgtttttattttgtttttgtttgactaaagagctaagaaagtctttagcttctaaatatatgaggaggatctaaaacacaacattttggaggactgtattttacaatgtttgtgcctcggaaagttttagtttcctaggaaacagcatcgtgggcactgagatacaacaggggatgctcagcaccttaatattattacctgtctaattgctatttcaattctgagtattgcagtagatttgttcctgtactgctgcagcaagagtcttaattgtttccaggagtctatatttaaattttatttgggtttttggaaaaatgcttttttttttttttttttcagaattctgtttttggaacattctgctttagatagtaggaagtcattatgacatagggagaagtgatagatggaaagtcagttcgtttggaatttatttctcatctgacttgacttgtagaatattaatccagggtcaggcgcggtggctcacgcctgtaatcccagcactttgggaggctgaggcgggtggatcacgaggtcaggagttcaagactagcctggccaagatggtgaaaccccgtctctactaaaaatacaaaaattagctcggtgtgatggcaggtgcctgtaatcccagctactcaggaggctgaggcagggaattgcttaaacctgggaggtggaggttgcagtaagctgagatcacaccactgcactccagcctgggcgacagagcgagactccatctcaaaaaaaaaaaaaaaaaaaagaacattagtccatatattcggagataagaaaggacactgcctcaactcctccccctttacaagtgtaacaacttaggaagtaaaataaacttcaggctgatacaatgcaaaggataaatcagaaatatttttaaaaagaaatagattatattgctgtggaataagaacatatttccagtaagact

SEQ ID NO: 59861 - DNA, 2117 bp, Homo sapiens
tactacaatcattatgtttatttcttatataattttttaccaatgttgtgagttttttaccagtgttgtgatttcctgctgagcttgaaaagctaaggacaaaacacccattctttaaagaatattaatttggttcctggtacccccaaggcatgaaaatagatcagcctccaagagaaaatatggtctctgtactctgttgtcttgtgcagtaagctgtttgcacagttccctgtttgtgggggtcaccgctgttagctgtcgtgtggatattgtattcataattcatagtctgtgttcccagaaacagttttaattagaacacaaattatgactcccaatagaaagccttctgtaagtagccaagcataataacgaagaaaaaaatgtttccgaatatgacaccttaatatatttatatataaattaccaaaatcttatctttgttcacagcagatactaattgaacacctaacaggcctgtggtttctgctgtttagcattgcgggggtgggaaggggcttgggggatacagacaagacacaatcgatgctcctcagtagtgctccttatagagaggagagattataaccctcggaggttgctttcgtgaggacagtgcagggcactctgggaggagacaccttaaatggagggtgattaagagtcagccagatggaggtgctgccacgagataggtagctgggctccaggcagaagggcaggtaccactagaagggttagggagcctgggagggaagaagagtctgtgaggggctcagtctatgaggggctttgtctgagaggagggctgagtctatgagggactttgtaaggagagctcagtctgtgagggtttggtctgtgagggatttaatccatgagtggttttgtcctgtaggagttcagtctggctggggtcagtggtaatgtgacatcttggtgggagttatggctggagatgccagcagaagctaactcaatacctctggttgctactgctgctgctttgtccttctccggactaacgattgaatatgctttgttctttattttttctgccactggaaaacctgctgatacataaaagatttagagagttaagaagataaagaaaaaaaaaggcataatctggagccagtcttactaggttcaactgtatgaagttgccagtacataatcatgtttttcaaggtcttcttttttaatgtaagcatttatagctataaattttcctcttagcactgcttttgtagcattccatacattttggtatgttgtgtttttatttatcttaagatattttcccttgtgatttcttctttgacccagtggttgtttaatagtatgttaatttctgtctgtccctgaattgtttagttttccttctacagttgatttctagtttccttttattgtgattggaaagatactttgtatgatttcagtcttttaaattttattgacactattttgtggcctaacatatggtctaccctggagaatattccacacgaacttgagaacaatgtgtattttcctgttgttggatgaagtgctctgcatatatctgttaggtccagttgttctccagtgtcatgcaggtcttctgcttcctcactggtcttatgtttggttgttccatccattattgaaagtggggtattgaagtcttgtagagctatttctcccttcagttctgttgatgtctgcttcatatattttggagcgccaatgtttggtgcatgtatggttatatttgttacgtctacttggtgaattaacacttttatcattatataatatccttccttgtctcttataacagtttttgactttttataatcatgtttttaatccaataattttttttttgagacagagtctcacactgtcacccaggctgcatcttggcttgctgcaacctccgcctcccaggttcgagtgattctcctgcctcagactctcgagtagctgagattacaagcatgcaccatcatgcccagctaatttttgtatttttagtagagacagggtttcaccatgttggccaggttggtctcgaactgctgacctcgtgatctgcctgcctcagtctcccaaagtgctgggattac

SEQ ID NO: 59862 - DNA, 1009 bp, Homo sapiens
caaagtattcagcaaattaaatgccccaaacagtacattttgaagtttgtagcaaatagtaattattgaaaacaaaacttgaaatatattcctacaaaagaaagaaagaaaacaaattaaatgatgagagcttaaatgatgtataagagttagttggctgggtgcggtggctcacgcctgtaatcccagcactttgggaggcccaggtgggcagatcacgaggtcaggagatcgagaccatcctggctaacacggtgaaaccccgtctctactaaaaaatacaaaacattaggcaggcgtggtgttgggtgcctgtagtcccaactactcaggaggctgaggcaggagaatggcgtgaacccgggaggcggagcttgcagtgagccgagatcgcgtcactgcactccagcctgggcgacagagtgagactccatctcaaaaacaaaacaaaacaaaacaaaaaaaagttagttttgacattctgtgattgtgtcttctggaaagtgtctttgtggcgcccctatttttaattggataattgtatatctgtacagcaatggaaagagattgaaaaggctgattattttgcagtatccaaatttggggaaatattaaatcattaattggagaaggtttatgttataaaattatttacttgtcaaaaggtagcaaaataatcatacctataaaaatattttgaaggctgaactacttatatacttggattaaaaatttacaattcagaatttgctcatttagcaagatttgctgtgaatatagatattgcagcagttgtagagagagtattttccaagttaaaaatattatgatcagtagaaaagaatcaattgaagaaggtgtggacaatttaaaacttagtaatcatcaaatgcaactttgaagaagactgaagacagttttatgaaaaaataaaaataatacatgttaaaaaatgaatttcccagatacgggtttagaaacatataaattaaaaatttgattggccaaa

SEQ ID NO: 59863 - DNA, 1697 bp, Homo sapiens
gtacgtgttgatatggaacgattgcgaagatatgatgttaatgaataagtaccatgcatgatgttgtagtagtacatactttttatttatttatttattttttttggagatggagtttcgctcctgttgcccagactagagtgcaatggtgcgatctcggctcactgcagcctccgcctcccaagttcaagcgattctcttacctcagtgtcccaagtagctgggattacaggcacgcaccaccacgtccagctaattttttgttatttttagtagagacagggtttcaccatgttggtcgggctggtctggaactcctgacctcaaatgatccacccacctcggcctcccaaagtgctgggattacaggcattagccaccacacctggccatatatacttttatttatggcttaaaacagagttatatagaaacatatctgcttatttgtacaggaagtgtccggaggaatatatagaaaactgctaggcttaattctcagagggaagattgggtgtttggagtgggaagcaaacattttttactgtatacacttgtactatttgaattttttaccatattaaaaaagattaaacaggctctatttgtacttcttcccatggctttaaggcttaattataaaaatcacttcccagatccataaaaacctttagttccctctagcagactggatctttgactaccaacctcaaatagtaattattttcataccaccaataattctcacagcagtgagagtcagttatcaatatgacaaaaaaatttcatttttctggcgcaatcagagcgtaaaatcttcctctgtagagagatatgattgagagaaggaggtaggtacagggatgtgtaatatacttgaaataggaagagacctgaagtggtccactctcagaacatattcatttttaatatcagccttcgtactgagcccttaatgacttgggtctttaattatctcactgaacaatttatgttgattcaggaccagctattctctttgatttattgatactatgctcagaaaaaaaaaaaaatacacagcatgttttgacaaagtgccttttaacacaatgcctcctgcgttgtgccccaaaaccatgtgccagaaattttttacatctgttttctccctactgggttttacatttgtagtagctgaaaaggtgcagtttgattcccgttacgacttcaatatatgattgtggaatctctgtgagctgacgagctcctaattttgttgtaatgtgaagtggctgatggatggtggtgattggcgtctaaattctaactaaattatattctcacatgagcaaatcttgaaaccaaaggcacatgatcaaatcattaaaccaaaggcatatgtacagctcagaagtgtccaagacaaagggtggaaggcatcacactaggacaggaggcatcatttgccccagtgcaaacaagagagccatgactgaaagcaaagccagatctctcaattccggagacaaatcaaaaagaggggatgctgaagttcacagctgttgcaggctacagtgtcaggaattttcctccccattgatgagctctaaggctgtaatagattgtgctttcttgccaatatacctcctgttccttcctcccaaggttctcaaggtctcaggaacatcttgactcataagcccaagaacagcatg

SEQ ID NO: 59864 - DNA, 1050 bp, Homo sapiens
ttaactaaacaaactatactctttagtaacctatttcgcctgttagtagtttgaccacctgcttcataaagaagtcatgtttctctctcaccctcatcccacatttaaaatgcatttgaacagaaaactcaggtaaaagtacccgtgaagtggttttctcacaagagtagatattaagaattggtttgaacttgccgggcgtggtggtgacacctgtaatcccagcactttgggaggccgaggcgggcggatcacctgaggccaggagttggagaccagcctgaccaacgtggtgaaaccccatctctactaaaaatacaaaattagccaggcctggtagtgcatgcctgtaatcccagctactcgggaggctaaggcaggagaatcgcttgaacccaggaggtggaggttgcgttgagccgagatcataccattgtagtccagcctgggcgacagggcgagactccacctcaaaaaaaaaaaaagaaatggtttgaactgagcctgctatttataatttaaaatgtctttatattcagcttattattaagtggggggaaaatgaggtctatgttgggtgaattcatttttatggttcattctggtttggagttcaacctttgattgaaaggtttatacaaagtaaacaagacattaacatacggagggctgtcatgtacagagattgtcggtgctggcaaatatttatgttgttttgtgacttggtgttgacagtagcactgtcctgtgacctgagtacggcctcgtgctctgtggctgtggctggtcatttctcttccatctccgtgtggacctgatagcttcactcaggccttgtgttgaacgcctgtctcacatgactgtagacctggtgacccagagaactgccagaaatatgtgtagccaccatttatggagtacttcctgtgccagccattgttccatatactgtgtcttgactcatttcatatctcagtatctattatggaggttgttaataaaagaccatgagatttgtggaggaagagtcattttctataagaaacaatc

SEQ ID NO: 59865 - DNA, 1036 bp, Homo sapiens
ggattctttgagtatgaggaggacaagtaaatgttttgaggaagcatggcatagcaagaacaccagggggcctcgcatacctgcctttgaagtttattatgtttggcaagaccctctcagagcctacgttcatagctgtgaaattagccataaacatgctccctccaaggccttctgttgggaggatttataaggatttaaatatgcttagcacagagtgcaggccataggagatactcagtaaatgggatcccccctctgcccgacctgtaaccctacgtggaatcctatgatagactttgcctaagagtgaccgaggcagcattgtcattgccacggctagagcccccattgtatttagtttaaccttcgctctctaaaggtcagaatacatttctacaacacaatacattttatttagtgctgcacacacagtggttttagtgagggccttaatagtccccccagaggttccacgtatgcacctcttgcactctgccacctgtgctgtggggctagtatcctgcaatgacagtgcactcccagcttatgcctgggagacgttcttaaagtcccagtggcgactgatacgtttacatgctgtttatgaaagagatggagtttgggtggtgatgggagggagggaaggagaagaaggaagcgccgtaactccatctgatgggcacagaagcagaggaagagtaacgcatatgctgtgcactcccccttcccttcttgccacccaatccctgatcccagctggatctcaatatagaataataaaactgtgattaagatcacgtaaacacaatttattttttcattaagctccataatatacttttgcacttgtttctataaagcttcagacggcctcagcaaaagagttgacgctttgcctgtaatataatttgcatgtccctatcctctttaaaagtgccagtttccttgaattacagatattaactcccaagacagtataagcatcatggccttttggacaggtgggctgttttcttctattcattttgaggtt

SEQ ID NO: 59866 - DNA, 1050 bp, Homo sapiens
taacggcatcccagttcgagtctcagccaagggagcaggcacccatgccctggggcctgaactgtggcatgggagtggggggcacagatcttttggcagaaggtggctacccaggtccaagcctcagacatctttcctccttgtcagaccttcctcctgggtgagtcacctatgtggggggcgggtgagaacctctttgtggaggctctgggaaagccgacttggagcttggagcctccacagttatataaatggaaaattagaaaaaaacaaaaaggccttgtgggcttgtaaagatggaatacattgtagctgagaaaattcttggctgagaaaatgtgaggagtgctaaggccgtggttggaggatttttttttttttcttggtaaagggagacagtggctgcagaaggcaccagctgtccccacctctttgccattgttgaaacaaactcgcaaatggaaaggactttgcaatgcagagtctaaggagggaaaatgaaaatatgacagatacaaagaactgaatgcattctgaaatcttaggggaataaaaatatctagtattgagacagcccaaagctaagagtctgcaaactcagaaacagcaagaagctttttcacaagaaaaggaaacttagtgctctaggtacatagaggtggagaggagggcctgtgtgttttaatctgtcacccgatatcttgtatagctgtaggattatggagtgattcagtttcctctctgtagcaacatccatgaaaatatctatttacttactgcctcgggaaaacattcaaatttatgatttaatcagcttcaaagtatttctgctgagttttgttactttgtttaacttttttattatgtggtagctggtggattgtaggcatatttagcagttgggaaatgtctaaggaaagattacctttgataaaaagccagtaggaagggaattgaaggacgcagagtcgatgcctgcagtttcttgtttttgtttccccagctctggagtcagactgcataggtttgcatcctgactcttcaagttac

SEQ ID NO: 59867 - DNA, 1035 bp, Homo sapiens
gttcagactatataccatggatctttgctgggtggattaaggttttgaatgtattgcttgtgtatttcatcatgcagtcaaaatccacctcccacataagcctgttgttggatagagctcccagtcatgaaagtctgtcctctttttctccccttctatttcttggtattaatttcagcttaatcaagtcttctggccctgtgattccaggaacagttgggttctggctaaaagcaaaagagaaaaccgcctgtttcagtcgcataaggtgatgtggcaagaacttgtttctgaggaatccaagatctagccattttcagcagtggtcataggggactggaacgggggcgccacctgcaggctaagggggaaaacacagagcgagaaactgaaccttgctttaggggacaggcatttaaaggcaaaggaaattcagtccctctgtgatagacagtaatgaactcagcaggctgtcttgtagataaatatgcatgagaatgcatcgttggaagagctctcacgtattcccttcattcctgccttttggagtttcagaatgttttacattttatgttcatttatatttttctttgtcagagtatggagatcctaaaatcatctgccagggtatttgctgcttcttggtactgcttgctgctcttttcagagagagcagtgccaggtaaaatattctgcattctcataagaagaggtgaatgtcattgcgttccctgttaatatgaggcagggaaggacgctctggcccggagccggagtcctcacaccactttggtctctgtcctttctagcagatctaaatatctactctgtctacaccctgtttttacagaaacaccagtgctagtctagaatgaaggcaacattgacagcagtgatgatcaaacgttcgtttttcaatatgccatgaaaaataacttggtccaaaataaaattctgtccttatatttctatttagatgtatacctcccataaaggtaaaatgtttttctcagacgtaatttcagattttctgtg

SEQ ID NO: 59868 - DNA, 1755 bp, Homo sapiens
gaggcatggtacctatttcagatctccttagagtttctgttaagtgggtgcctcccttttttttttgggatggagttttgctcttgttgcccaagctggagtgcaatggcgccaccttggctcactgcaacctctgccttccaggttcaagcgattctcctgcctcagcctcctgagtagctgggattacaagcgcacgccaccaggcccggctaattttttgtatttttagtagtaacagggtttcaccaagtgagtgctgcttttaagaagtcaaatgataggcaacttgtggacgatgcctttagtttatctaagtcctgtttcagctttgaggtttccatgagttgcgttttaccctgaggttggtgaagtgcagcattgggttaactttgctcccacgaattccaggggtgcccattgctaactggcttctcacagcaatgacatttgaggccggaatggtctctctgtcggcacggtacacagttgttcactggtggcttattggtcagatcaaaaaccaaaaagaaacagggagggaatgcggactaggatccatgtttgtagaaatctgagcagggagaaaggaagaaaggaggattgggggacccctacatgtcctcccttcagttgcagatgtttgttaggatgtggtcagatgtggggaagggcaggtggccatggaagcagggcccccaacaagtggcattcacctggatggatgccccacagcccagcatctagacttcagctggtttgtcaacacaccaagtgtggatgcttttgttggaacagaatccctcaacagagacagaatgccagtattattgattcataataaaatgtataattatccagtgggctcatgttggctaagtagcatcgtctttcccctttagggcaaaaatacttagaaaggcaaactgtaatcagaagatcgcttggatggatgggatcagagcaggaggagggaacggggttatgttgacagctggtaccatcaggctgtgatagctggtctggaaccctcacctccactgtaaggacatccctgccacagcccatggtcacggcatgtagccaggactctgctttcccagtggtcctgtggaggggctgctgacttggaaggtggtgggcttctctaagtctcttatccatggtcaccctgctgaccgaccccaccgtcaccccccacccccgtaggcatagacatattatatctttagaatatgaatccagacaaccgtctaccttcatacatggcatagtccccaaaacatgcacccctgtgcaaaatggaacagtacacttacatgctcccagcccagagaggtttaaaagtatatttatatttttaattataattttaaaataaaaagtatatttatatatttataaataggtgcattaaggccaggtgcggtggctcacgcctgtaatcccagcactttggggggccaaggcaggcggatcacgaggtcaggagttagagaccagcctggccaacatgatgaaaccctgtctcactaaaaatacaaaaaattagctgggcttggtggcaggtgcctgtaatctcatctactcaggaggctgaggcaggagaattgctttaatccaggaggtggtggttccagtgagccgagatcacgccactgcactccagcctgggcaacagagcaagactccaactcaaaaaataaataagtaaataaataaaaataggtacattaaattacacacacacacaca

SEQ ID NO: 59869 - DNA, 1048 bp, Homo sapiens
tttagaataatgccctaaacttgtaatgtgagcaggtcttcagagtttcgagctgaagttacaggtttagagttgtccgttggaggtttttgtttcttcgtttaatgatttaaaaacaggttatgatacaagatcttcaaaatggttttaccacatgcatcatgacttagaatcttcgttggctcttttggtttttttcattcaaagttgaaatgcctcacctcttctttctttttctctctactaaccattttctactgagcacaccgtaccttatcagtctcataactgggccacctaactctccctaagacagcactaggagttgacacccagagaatctgtaagtcatgtactgctcatctaacgaacagtccctgctagccttgcctgcttcttttgcatagaccccactcttgggcacttccacatctgctaagtccactgaaacccagtggggtagattcatctcatcaaaaagaaatagagacaaggtacgacaattacacgatttttgaccgaaggttctcatgggaagttccccattaaaattgttatagaggccgggcacagtgctcacatctgtaatcccagcactttgggaggctgaggcgggtggatcacctgaggtcaggagttcgagaccagcctggccaacatgatgaaaccccgtctctactaaaaagacaaaaagtaaccaggcgtgatggtgcatgcctgtaatcccagctacttgggaggctgaggcaggaggatcacttgaacctaagaggtggaggttgcagtgagccgagatcacaccaactgcactccagcctgggcaacagagtgagactgtgcctcaggaaaaaaaaaaagaaaagaaaaaagaaaactgtaaaaagaatttccctcatttcatgaatgcaccaccctaggtctcttgtatcaagagaaatctgggaggaaacactttcctggcgcctgtgggcaggggtgaggcaggaaggagtgagtaggctggattgagcaatcttcaacagaatcctgtttcactttttagggttag

SEQ ID NO: 59870 - DNA, 1018 bp, Homo sapiens
aattggccgagttgtgcaaccatcacctgaatccagtttcagaacgttttcatcaccctaatggcacacacaccctctttttaaaattatgtctggtagattttgaagcaaatcacgtgagctgaggtttcagctcagtgaagttcttagcttgaagggctctttagctgggaataatatgagcgagtgaggtgccattgaacagttatttgagatcacatcatagaagatcttgggagatgtaactaactaaaagctgtttccaaagagaatgactccagctccctgtgttaagtggtttattccccgaggtcgtctaagaataccacatctgacaaagagctccatgctttagagttcttccagtttattcttcaagaggagagcccgcgtcagagacggggactgtttaaacacatatggatgtgcgcaagacagcaggtgttaaaagaggaagggtgtgtgggaaaggaggcatagctctgatgagaggtcatcttggtatgtcaccagaaaagaggaagagtaaagacaaagaagattgaacaagaaaccaagacaaggctgggtgccgtggctcacgcctgtaatcccagcactttgcgaggccgaggcaggcagattgcttgaggtcaggagtttgagaccagcctggctggccaacatgatgaaaccccatccctactaaaaatacaaaaattagccgggcatggtggcaggcacctgtaatcttagctacttgggaggctgaggcaggagaatcacttgaacccaggaggcagaggttgcagtgagccaagattgtgccaccgtcctccagcctgggtgacagggtaagaccctgtctcaaaaaaaaaaaaagaaaaaagaaaaaaagaaaaaggaaaagaaagacaagggaaaactaggctatttctaaggtcgtataaaaatttgccttcatttgtcacatttctgctcctgttgatgaaataatgggtctataaaaaaagggaagaatgcacttaaaaaataggta

SEQ ID NO: 59871 - DNA, 1076 bp, Homo sapiens
gcttttgtccaataagggactggaacacatagaaagtgtggatgtttgtttgtttgtttgtttgttttttgtttgtttgtttgtttgtttgttttgatgaagtctcgctctgtcacccaggccgaagtgcagtggcacagtctctgctcactgcaacttctgcctcctgggctcaagcaattctcctgcctcagcctcccaagtagctgggattacacgtgcccaccaccatgctaaattttatattacaggtgcccaccaacacctggctaatttttgtattttcagtagagacggaatttcaccgtgttggccaggctggtctcaaactcctgactgcaaatgatccgcctgcttcgttcggcctcccaaagtgctgggatgacaagtgtgagccactgtgtccggccagaaagtgtgttttaaaagctgcctacaccatagccatgagtagaggttttgttctattctcgggttgcagccatttgcgctgagtgagaaggagccaaggacagtggatgcttacctggaacgtctggcagctggtctgtttcctcatcttaattctaaaagagcacatcaattgacaaagccatttcagcacatactgtacatttgtgcaataacaagggaaggctttaaaactattatctgtcaaaattcgcaactgacaaattcccatgatttaattgttttttttcccaggcgctgagtatgtgtgttttgattaccctgccctgtccatgtggcacagtttgggctgtgacattgccagccagttgtccccacccgggggtcactctgtgcccacatgctgtgcatatcactcactcactcacttaccctttagcagatcattctaaatggttttctggcatgatttttgaaatggatgattattaaaatgcgctgaagggttcttttgtttagatgtaaccttcgattgcagagggaagtcaccaagtcttgtctgctgggggtccctgcacaaagccaggaccagccaggtgggacagccattccctgggtgggctggaggttctagaatattcttctgagtgtgaggcacccactcc

SEQ ID NO: 59872 - DNA, 1051 bp, Homo sapiens
cctttgacagagccatctcctgtctcttccacttgtcatgtactcaaggaatatcaaatgactttagtatcggaaaaagtataattgaaaaacaattggccgggcatggtggctcacgcctgtaatcccagcactttgggaggctgaggcaggtggatcacaaggtcaggagattgagagattgagaccatcgtggccaacatggtgaaaccccatctctactaaaaatacaaaaattagctgggcatggtggcgtgtgcctgtagtcccagatactcgggagactgaggcaggagaatcacttgaacctgggaggcagaggttgcagtgagcagagatcgtgccactgcataccaagtacaatcttcctaactggaggtaattgtggaaaggccaatatgtgaccatcaaagagctaattacaaaatattttcaaaaattaatacattcgagaacatctgttagtgcaaagctcgtgctggctgtgttcaaccagaaggtcactagctggggctatgccatgtcagtgactggttcattaacctaggacacctcaggaaatatgtcatgctaggttgatagctctgaacctcatcttacaagtcctcattagactaaaagtttatagagagatatctaattaatgcagaagtcacaattctcagttgtgagatttttttccaaataccatccaccccgtgtggtccttgggatcttagaacgggctgcctcacccttctgcccggaatgcttttcccctgaccacacgtggctgcctcgttcctgtccttcagaggggccatcgctgaacgcactcaacagtggctgcaccagccacccactagactgtttgacctctccacccagcatttctaacccttctctcatggcctgtattctccgaaagagtgagttctggctgctttcactggttcccctttttcagtataattccatttactgggccttggctgcccactgggcttctcttcacttaactaaatactgctcctcctttttagttttatttcttatttttttgagacagagt

SEQ ID NO: 59873 - DNA, 1001 bp, Homo sapiens
gccaagtcttggacgccgtgtactatctccacagaatgggcatcgtccacagagacctcaaggtgaggccatcgctcagcagcatcctgcagccactctgcagcccgcaatgcacgcgaccaagagggctgatgccagtgggggcatgcagctgctctgatgtagagtgggtgcagcagatggtgggcatttgtgtactttgagttgtcagggcctttgggatccagacccagaagtatcttggaagaagatgaagattcacatggctggccactgttcatgagatttttacaaccattatgtagccaaagggttacagggaggtgggttatatattgcttcgagcctatctaagagacgattttgctcaagacacgtaggctacagaaaccctcctcccggtgcagttccgcagcacctttgccaattccagccccattgcagcacaacacactgtataaaagaaagagagcagtggtcagacatcatgagaggaaagtgaagggaaacagaaggtaagcagatatagaagagggagaagagaaatagaagggaaaaagacaggttaaaagagctatgactggctgggcgtggtggctcaggcctgtaatcccagcactttgggaggccgaggaaggcagatcatgaggttaagaaatcaagaccatcctggccaacacggtgaaaccccatctctacaaaaatacaaaaattagctgggtgtggtggcgcgtgcctgtagtcccagctacacaggaagccgaggcaggagaatcgtttgaacccaggaggcgaaggttgcagtgagccgagatcgcaccactgcagtccagcctggcaacagagcgaaactccgtctcaaaaaaaataaataaataaaaatagtgtcttgcaggttcttttcttacagtttcctaatgaggttttggtatattgaccctttccccgttggcacagaaggatctgggccttatattggcatatatgcccctccccagcag

SEQ ID NO: 59874 - DNA, 1014 bp, Homo sapiens
tgtagattcttgtcgttatcacaggagaatttcatccattgccatatacttggcctaaaggactctcgtttatggaaattggtaaagggcagattcacctgagctttaaaactaacatattgcacttacagaatgctttccctttcaaaagacattgatcaccttttgcagttttatccttttgaggtgtgtttcacatccttttgagaatctaatgaaggtcatggatcctatcccctaataaaatcacatgtgtgcgcgcacacacacacacacacacacacgcacgcacacaattttgcataccattttctcggggggtgtggtcattgtcctgggtaagcagacactggacaggagccctgtgttactcaccctggctctctaagtcctcaattagaaatcttatcagaggtcctgcctcatccagcttgactatggaaggcttaaggaaataaatgctaggccaggcctcttcctgcaaagaactgaagctggtatcagtcatctagagaaaccttccctggggctggggaaagtagccctttttctggccttctggttatttgttcctttatgtctatctggaccttgaaccatgactatggtctgcacgaatgtctgtggactccctttgggtttgtttgtataattatttccctgaagttacagccttggggtggggcattggtacagctctggttaggtacttgttgacagatgctgccagatgtttcttagaatgactgggataagcagtttaaaactaagcaatgatgtcttagtcagatcaggctgctacaacaaaatgccatgtggtttaaacaacagatatttatttcttacggtctggaggctggaagtccaagatcaaggtatcaaccaattcgtttcctggtgagggctcttttcctgacttgcagacagccaccttcttgctgtgtcctcacatgctgtagagaaagtacagaagagcaagctctctggtatcttttctaatccagtcactggcaa

SEQ ID NO: 59875 - DNA, 1028 bp, Homo sapiens
tttgaggctgggggtctgatgtacagggaggcccatgcacagctatagtaggtcacagaatgcagtggtcattgaggacagggaaaagcaccatcaaggcgggtctagaaggttggataagcagagagataagagcatcagacaggacaggggagggaggcaaggaccagagcagggtgccatggcctgtgtgagggctcatgaagctatcctctgactgttctgtagcctgggtttgtgtcgatgtcagaggtgggcactggatttaagcagcgttagacatcagaactcgtttgtctcattctcagactctttctccttcctgtgggtccaccgtgcctggtctcccattcccacctaaagacttatgcacaaggccactgagcggtccatgagcaacaggcagcatgccagggaggccacctccccacacggaagtcacggagcgcctcattcttcccagccactgtaatggaaaagaggtcagcccctgcagtgttttggagcatagcactcttattttttatttttgtttgataaacctgtcacgctgagatatcagactgcagccaaagtggccgtgacaagccgtggcaccgagttttctcctcttgcacgccatataaacattcctccttttgctggtgtgcgcccttgataaattggccctcttttggtctccatttatctactattcatcatttggaaggagaagtattttttcctaccaaggacactcatttttaaaaacccatgtgatgagttcttatcctgccaggaatcttgctttggggattaggacttgcaaaaaacatctttgctcaaatagcttatgctgccaggaagggctgaggacggcgtgggttgcgctttgtgataagcgtgttggtgtccagtgtgacgggcttggctcagccaagatagcataaggtccaaggcacaaattttctcagtcaagatgaacctcagcatctcacagatcaatcttgattctgtgataacatgcggcccgcctttcttctcagaac

SEQ ID NO: 59876 - DNA, 1013 bp, Homo sapiens
ctctacattgctcactttttaaaatttactcacataaatgtcgatttgcctgtgcatgcagctgaattagctttggaagaatggaacagggaaggcctaatctgcatgcttatatccatgttctgaaacaagagatgagcctcgccaaggcagttcccatccctttgagcaattgacagctggctcttgatggaatacatatgttctaaggagaatttgagcccaggcatcccccagagagaatgcagcgtggtcaccgagccccaagccccggggggtcgtgatggctgttattcctatcagcatgaggagtgctgactttaatagggactgttcactgatgtggccagcgggcaacagtcgcctgcttatattcatgagctttgtgaggtggggcacggtgcctcattcaggccactgtgggcccatggtctggattttggctttagaaatttggaaacttagtttgatctgtttattcatcttgttcagacatctttgtgaattgattcacagtaactagactcagaggagaaaaaaaaagactggactgtccacttactaaatcataatgcagtttgtgcctcacaaggtaattggatatgcatgtcagcaaacaaacatgttctctcccctataggaaatgctccgtgagaaaccaaatgaaaagcagaagttttctttcttttggaacagggtatcagagcagtggaggcgggtggccttagatatattcacgaagcctgtgctggtctccaggccaccttctccatagaaggatgattccgctgagcagctctttctcttggctgggtagcacagctgaccagttcctttttttttttttttgtttagagacagggtcttgctttgtcacccaggctggagtgcagtggtgcaatcatagttcaatgcagccttgacctcctgggctcaagtcatcttcccacctcagcttccaagtagctgggaccataggagtgtgccactatgcccagctaattaaaaacaaa

SEQ ID NO: 59877 - DNA, 1061 bp, Homo sapiens
taaattacaatctagtcttaccagctgcctgaaatgggagggaggtggtggggcagctcctagaacagagctgggactctgccctggcctgaggaagccttcccaggataggttacagcgatctgggtttggaaagatgggtgagaatctgccaggagagagctagtccaggctgcgggaagagctctgtcttcaatatctgcctagagagactgatggtttatcctctcaagactcaattatctaaagataaaatgtgctgtttgtgtatgagaaaagagatgccattcaattagaaacatagtgtttaaaatagagtttgaaggagttgatcgagctttgaacttttaatatctcaaacttggggatggggaaaatatagtctctgaattatcaggatttttcattcccctagcaggacactgtgcacacagaagaatcaggggctctttattatggttttatatatgtattggaggtgcacagcagcagcactcagcaggacaggagcagggcatagatggtgaaaagaaccaaggaacatgcacagggggaaaatgcccagctccacggtgggtggcacaatagcaagcgggtggcttcaggccccatttgtgacgaagagagtagagatggaggccaggaggggagggattccatcgtacaccagcaagtcagggaaaccctggaggacacgggtgggaggatccttggaagagttgatcagaagcccacgactcgacgcaacaccatgtaatgtggtgcacggtgccaccttcccgcttttggtctccttgccgtccacgttccaagggcttgttttctagtccatctcagaagtgcattgttgggagtcagcaaagaggacacgccgaaagtgcagtgaaaggcctcagccaatggggtggagggagcacgacattgccctggggccattgtcagcctatgcagatgcgtaactgcttacccatccaaactaggagggagggagggaaagagggagaaaaagaaggagagaaggaaggaagctagggagggaaggagggaggaaggaagaacct

SEQ ID NO: 59878 - DNA, 1043 bp, Homo sapiens
cccctgtaatcccagctactcgggaggctgaagcacgagaatcgcttgaacctggcaggcagaggttgcagtgacccgagatcgtgccactgcactccagcctggtgaaaagagtgaaactccatctcaagaaaaaaaaaaaattgggcccccccgccccccaccataaacccagcccctctgacacctggcagtgggaagcagggtgagaatttacctctgaaactctgaagcccacttctgctgttccctgcaggtctggcaccttccacgctctgtagtttcatttcttcttcgtcgggggtctcaggagttggagccgagcggagacccaggcccaccactgtgacggcagtgcactctggaagcaagtgactggccctggaggtggggcccggggtcggggctggggaaggggagccccagggtcgccagagccgcgagccactccagcgagaccccaccttgcatggtgccccttcctgcataggactggaagaccgaagtttttttatggccatattttctactgcaattctgaagtgttcatttctcacaaactgtactgactcgaggggcgctgatttcataggatctggtgctgtatatacgaatcttgcaaagctctaactgaacggaccttcttattcctctcccctaacaccatcgtttccactcttctcagtgtaggtaaccgtctatggtgtgttttttcattaatgacaaaaaaaaaaaggtttcaactggattatttaaatattggtaaatattgtgcattagggtttgtttttccttttaagaagtatgtcctttgtatctctaagttacatgacctatatcttttcctctttaatagtagttttatgttaacctttaagagatttgtttttcctcaaaggagaatttaaaggtattttttaaaattctaataagaggatcagccgggtgcaatgactcatgcctgtaatcccagcacgttgggaggccaagtcgggcggatcacaaggtcaggagatcaaggccatcctggccaacatggtgaa

SEQ ID NO: 59879 - DNA, 1109 bp, Homo sapiens
catgtaataaactctgcaagaagtttaacccacataggtttgcggcactgcaaaattgttcatgggtctatgtagcaaatgattctctgccttgacaatcatgtatacatatcaagatttctatcataatgataatgagattgatgacttcctgttttcctccaataaagacaattaatcaccttcagatgctcatttcctctgtcatgagaaggatgtggagtttcagtgtctctatctttcctctgcttcctgaagtttggatttgaaggaaggagtttgaattgagaccccccaaactcatggagtcccccttaaatatttcaggtcacctccccagtgagcagggagtggcagggatgggtgaagggatggtacatcgtgcctttggggttggggacaggtgcccaggttccatgatcactggacaggaaagctcccccttttccctgctgctgcagagggggactggaggtgagcctgggaactcaaatcgcactaactcaatattcctaagtcatgtggaggaaaagccaatgctgatccccaggaagcgcctctgagtcatgggtggcttggcagcctcaggcttcagcaatacacacccacgttcttccatttcctcggcatagcagtgcccaaaggaagattcttttccaggcagaaggctggctgctgtcttttgtgggggtttgggggagatgcaggaggaggaactacagttcatagctcatcaaatgtattgtggggctcgggtctgatggccagacaattcttccaatccaaatagggattgtgtagggagaaaaaaatgaattggacatgtgttatagaaatgtagaattaaaactgtcccacacagccagcatcagatgaaaacagcatgggtgggccttactgaaaaaaggctatgagcccaaaagaaaggcagtgcccactgtctgatgtctagttcttttgtggttgattcttgcttctgtagcccagaccctaatgatgagttgcatcaatacaaagctatcattcagtgggtgaatatgtgatgtcgttattgcaggttttatggaacataacattttgatggcaaaaaaggagatacaaatcgtgtg

SEQ ID NO: 59880 - DNA, 1051 bp, Homo sapiens
gatggattgtaaaggtcaacaaggttaagagatctcagaagcaaagaggagatggagtgagcagttggcctatgtttggtcatagtctgtatcttgagaggaggtaaagcagccttctaaataaagaaaaaatatgatcgcttaatgtgttaatgaaacccagtctcaattgcctcttctttcccacagctattttctttcactagttgaaagtggtgtttaactgcagacgtatttttaaaacagccaaggtctcttaaccaaataaaaagcatagatcccattacttttgatgagggaagaatggaggtggaaaatagtgtatataagtatgtaagtttaaatctttttatgaaaacacacacataaagcttggaagaaaccatataaaagctgtcaaccctagccaaaaagaaggaaaagaagaaaattggcttcctaagcttttagctataaataaaaataaccttcctgatctatgtttgatgcattacttgggaaaaactttactcttgtgtattctgaatgatttttgagtgtttttcacacttaaaaatccctgtaatgtttgatgtcattttataccacttaggacttagcttttccttctgaccccttgatgtgtcattttaaatgtaacagtgacagttgtaagccgttcgaaatgtaacagcccattttatttgtttaaatttttgttttttgagacagagtcttgctctgtcaccaggctggagtgcagtggtgcgatcttggcttactgcagcctccagctcccaggttcaagcaattctcctgcctcagcctcctgagtagctgggactacaggcacctaccaccacacctggctaatttttgtatatttagtagagacagggtttcaccatggtggccaggatggtcttgatctcttgacctcgtgatccgcctgcctcggcctcccaaagtgctaggattacaggcgtgagccactgtgcccggccaaaagcccattttattatggcacttcattaatgcatcaagttttattcttgcaaccttgagatttggg

SEQ ID NO: 59881 - DNA, 1030 bp, Homo sapiens
tctgtaaccttcgaagacatgtgcaaggatatgtaatgtatctctgtctttcctcagttgaatgtagctcaaggtgatgttaaaaacagagaatgaagctttctgtaactggcattccaccgacagatatttcatatgtgcactgcacagtgatagctcatagtgatgtcctaagataacctaagaattatgaagtgccctttgagtcatccaaaatcagttaaattagtttttttttctttttttttttttttttttttgtgagacagggtctcactctgtcacccaggctggagtgcagtagcatgatcttagctcactgcaacctctgcctcccaggttcaagcgattctcatgcctcagctcccgagtagctgggactacaggcatgcaccactacacccagctacttttttttttttttttttttactattacaaaatttatttaacaaaaagtctaatatgaaaatgtacatgacctaacttttacatcatagtaaaacaggccctatggagagaggacatgggtttctctgctgaacagccattttttatactcattccaaggcttctaacatgaggatactgtttcctcgtattaccaccattccagtattgttctgttgcccactagtcgccatctccacacattcatctatcacaagattcataaagggatcaagtccctgcaatattccttggacgtgtctgccaccatttaatttcaatgataacttcttgtccataaatcccttctagccatctggttagaacatgatgctattcgagatgttcaacaaaaggtggcattcgagatcttcaaggaacgaagaagggacagcatgggggtgaccaggggcccgaccgcaggaccgggaggcgagtcggccagaaagaggtgcagtggctgctggtggtaactacgccgacgtgcgagctctgctactaatttatgtatttttagtagagatgggatttcaccatgttggctgggctgatctcaaactcctggcctcaaatgatctgcc

SEQ ID NO: 59882 - DNA, 1053 bp, Homo sapiens
gtgttaagaatggtgttactttttttgttgtcgtttattcggtgacttttaaacttagctgtgtcctaaaaggaaaagtctttccttctctaatgaattcttatgaatgagataccatgttcatggaacacacatgcatccacatgtgtaaacacaaacaatttcaaaaacattgctgcataggacagttgcatggaaacaaatggtgttcaagatgagtttcacttgccttttacctctgtgtgtatttgtctgtgaatcaattctagccaattttaggatgaaaaataaaactaatgctaatatagtgaatgtgtagagattttgaaaacccctgatcctttatcccaattgtaaacaatgttctttttagtacttctgtaataattgctatttctcttaaagccaaagagaaagtaacttttctatcttctgtgattttccagagtttcagattttgaaaagaaaacaagtaatcgttctgagattgaaacccagacagaggggagcacagagaaagagaatgatgaagagaaaggcccggagactgtgagtcctaagattccacggccactaccacacccacacacacgagagtagtccagccactgaattcaaatcttgtgatgggttatttgctttagaaatatagaaatcatgttgatattgaatattatctatctattccttttatatgtccttgtcctgctctgtgtcaattgtagcgagatgtatttcttttttgttgttgttgttggagatggagtctcactctgtcgccaggctggagtgcagtggcacgatctcagctcactgcaacctccgcctcccaggttcaagcagttctcctgcctcagcctcccaagtagctgggattacaggtgcccgtcaccacgcctggctaatttttgtatttttaatacagacagggtttcaccatgttggccaggatggtcttgatctcttgacctcgtgatcctcccacctcggcctcccagagtgctgggattacagatatgagccactgcgcccagctgcaagatgtatttctat

SEQ ID NO: 59883 - DNA, 1017 bp, Homo sapiens
caagcctactgtaggaaaaggaatgttgtccactttataatgagatcatttgaggatatgacttagaaacttgagggagaattgaaagatttgggttctatcccattactggtttgaataaagtagtttgaaaggaaaaggttcactgttgtcttgttcagtgttgtctggtaattgagagaggtgccttcgagtctgcagagagtcttcagctttcggaagttaatgaagccgtgaaggttgatagccataggggcccacgtgaaaggcatttacataaaatattcactttaggtaattaatttattcaacaaatatgtacattgaatgcctattgtatgtcaggagactgagaccttactgttgaaagaagagagaacatttagaaaacagatgaagagaccaccagtgaataatagttccctgttgactaaaacgaattcaacagccagtagcagggaaatatggtctttcaaggcatcagaaactcatttacaaaaattatagagctgccaggaaaaaggctgcacaacaaaaatagttgagtaaactagaaacatacactgggaagagagtatgggggcaagttgttagctggatagataggactgtgctttgacacctctgtggtctatgatctctgaacctggaatagggttcattttaatagcgataaagtcattatcccagtgcatccaaattgattagttcatgctttattaggaaacagaagttacccaaaacttagcaaacctaagtaccaagtatccaaaacattcttttcctacacaatgtttggggtattgtcaaagttggattgattcaccagccagtcttaattggctactaatggttcagcctgttttctcctaaagaggtttgtttaatgtcagatgataattgtacagatatgtttgggatttcccgtatgataggttggaagcgaagtggaagcactgaacctccaggtgacatctctgtttaaggagcttcaagaggctcatacaaaactcagca

SEQ ID NO: 59884 - DNA, 1050 bp, Homo sapiens
acaaaaagttagagctacaagtggaaagcatgctatcagaaatcaaaatggaacaggctaaaacagaggatgaaaagtgagtatgttgagtcagaagggcagcgacggggcagaggagggagaatcgcctttttatacagattggaattcggatttgagaataaattttaaaaaatttctttttcacttatctgaaggagtcctagcagacctctcagagagggggataaaatttaaaagttttgtcataataaaattatgctgattgtttgcactctgtcttgatttttcagaaaagattttttttgagagtaagaaatgctagtaggtcgtggggtgataaaggtaggcgagaagatttttctactggagtgttcagaaggttgggaggcaagactataagtttctatgatattttccccaggattccattttttaatatcttttttaataggtccaaattaactgtgctacagatgacacacaacaagcttcttcaagaacataataatgcattgaaaacaattgaggaactaacaagaaaagaggtattcactgaaaaaaattacttccatagcctagtaatgaacagaaactgttgaacgttttgtatataaaatagttacatgaatccttcactaaatctggtttcaaaggttgttttccaatgtatcattatttcttgcatctagggtttgtaacttctgatgttccacatatgtgtaatgtgctttattgcgtacaaagatgatgtgaatgtcctatggtcagggattaagcacttcgtatttctttttttttttttttgagacggagtctcgctctgtcgcccaggctggagtgcagtggcgcgatctcggctcactgcaagctccgcctcctgggttcacgccattctcctgcctcagcctcccgagtagctgggactacaggcgcccgccaccgcgcccggctaattttttgtatttttagtagagacggggtttcaccttgttagccaggatggtctcgatctcctgacctcgtgatccacccgcctcggcctcccaa

SEQ ID NO: 59885 - DNA, 1054 bp, Homo sapiens
tgttgtgagagaaagagaagaattgaaagtgacatttctaatattgctttcacacagccaagattctacattgctcatctgggcatctgagcctccttcgaagtttcctgtcacaactgtcctcttgacagcatggatggtaagacctggcagttttctgttactctgtttcaaggaaaactaaccttttgtccatggacttgttatttattctacctgtaaaatggtgaaaatgctccccagccctcaggtattgtcttagtggttctgaagcaatctcacatctcacagaggtcactgaatgttacttgcttttatcaggggagatttcttctggcaacagagattgtctttcataattacaatagctggtaggtgtacagtgggccaggcactgctccaagatccttgtggaaattaactgattcagtcctcaggcaaacgtattttataggcagaaaaacagggatgtttagtaacttgtcacagttcaagctggcatagcagggctttgaaccaggcagtctgacttcagagtttacatttgataatgaaatctgctgaagcgatattagtctagctctgacttaagtttttattaatatcatcctttctaattttgttcattttgcaaggatgtgtacaaaatgtttacctagaaaagagatgttgcactaattagcgatcacctaaaatgattgtgctgggctggacgcagtggctcacgcctgtgatctcaacactttgggaggccggggtgggaggattgcttgagcccaagagttcaagaccagcctgggcaatagagtgagacctcatttctatttttaaaaaattaaaatgattgtgctggttgtgaagagatctagttgcataattgaactcataatctgaaactgggtttttttaaaaaattcaaacatattacactttgccctttaaaacaaaacttgaaattcctcacactgtgatgcacagtggacccccgttgtccctgagagatgtgtttccacactcccagcagatgcctgaaacccaggatggtaccaaaccc

SEQ ID NO: 59886 - DNA, 2292 bp, Homo sapiens
ctatgtttggtgttttaaaattattcccttgttggttgaatttcatggaagtcggtgtgcgggaagctgtctcattgattggagtagaatgcttgaggacatttggccccgtggctggcccactctactcactaagcagtattggctccttcttagcccagtgtcccctaagaagcacctggggacaagaaagatggagacaaggagaacaaagaccaggcaaaatggtgcatctgtaggtttttgttttttttgtttgtttgtttgtttgtttttttagtttcagctttcattttagattcaggcttgttacagagatgtatatatagtgtgatgctgaggtttggagtatggttgaacccatcacccaggtaatgagcattgtacccattaggtagtttctcttacccccatggggtcatttaaattgcctaaagttgaatgtttggaattagccgtgcttattctctgtcctttctcttcttttcccctagaggaggaagacaatctgtctctgctgaccgcactgctggaagaaaatgagtcagccttggattgtaattcagaagaaaataacttcttgacgcgggaaaatggcgagcccgacgcatttgatgagctctttgatgccgacggcgacggtgaatcttatacagaagaggctgatgatggagaaacaggagagacaagagacgaaaaggaaaatctggccactctctttggagatatggaggacttaacagatgaagaagaagttcccgcatcacagtcaactgaaaatagggtcctccctgctcctgcccccaggcgagagaaaacgaatgaagagttgcaaggtgccctaactacttgccttccttatttctttcggataagttggatgaagaccaccaatctgatagttgtcatcaaaatagctgctgattcaagggtagagataaatgactttgtaaaaaaagaaaaaaagaaagaaaattatatgagttggtagatgaaatgtttgggccagcatttcagcacaaactatagactctatcagtgtcagccagctgcacttgatcctgtacggaatggctctgaaacttttcatatttcttatggaatagtagcactttgggatgtatgtggatgtggagccagagacaaggttgcaaagctgccacatatctatttgagcagagcattcctgaacagaagctttgacacatgttcttttctcattcctggcatctcatacatgtttaagctatagtaaaattcaatggttagctgtttcttctaatacagaagccagcatttattatattagttatgatatccaatttatgaagtaaatataatttttttttttttccgagacagattcttgctgtgtcacccaggctggagtacagtggtgcaatcttggctcactgtagcctccacctcccaggctcaagtgatcttcctgccacagcctccctagtagctggaaccataggcatgcaccaccatgcccagctaattttttttattttttttattttttgtagatacaggatctccctatgttgcccatgctggtctcgaactgctgggctcttgcgtcctcctgcctcagcctcccaaaatgctgtgattacaggcacgagccaccatgcctggcctataattatttctcaactcctaaaaacttgttaactgtggattttatttgatatctcttaatagtaaagatttataactagtttgattattgggtgcttcgtttactttaaataaaatatgtatttctctaagagacctctttgaagtaccaaagttaatcatgagctttgggtatgtgattatattgtgggtctcaaggtattggggcagggagtggacaacaaaaatattgcccgcatttttgtcatgtagaacgttttctcctgcctggttcttaaattaacatattttcatttcctagaggaattaaggaatttgcaagagcaaatgaaggccttacaagagcagctaaaagtaacaacaattaaacagacagcaagcccagcccgtctgcaaaaatcccctggtaagaagactgtcattctggcaatcgtgtgcatttattttattagaaattatcacatcatttctgcatccaactcctgtccaaacagccctttgaacctctttctgaatgggtttttactcacttattttacttttgattaagtagagaagtctccccggccacctcttaaggagaggagagttcagagaattcaggagtcaacatgcttttctgcggagcttgatgtccctgcgcta

SEQ ID NO: 59887 - DNA, 1066 bp, Homo sapiens
cccgtctctacaaaaaatacaaaaattagccgagcatggtggcacatacctgtgttcccagctactcagaaatcgcttaaacccaggagatggaggttgcagtgatcccagatcacgccaccattgcactcctgcctgggtgacacagtgagtccctatctcaaaggaacaaatccgtaaaaacaaatttccaaattccgttcgtgattatcagtgtggttgccttttcattaattgtgttaattttctagatcccaaaagctcatcttcaaggatgacaagtgcaccctcccaacccctacagacgatttctcggaacaaacctagtgggataactagaggtcaaattgtggggaccccaggaagttctggggaaacgactcaacccatctgtgtggaagccttctctggtctgcggctcaggtcagtagctaaaccatctattcatgtgcgccacggcatagctttttgtgcctctcggagtcctttagaagtagtgtgtttatacatcaggatccacaaaacaccagcagctcttgaactggacaaaacaccactggaagactagcagtagccctaggtttgactaagtacagttgcatataaaatgtttaagaaagactttttcttgtgtatgtaatcaacaaagaatctgtatctataaaaagaaatggacaaatgatagtatatttaatcagaaattgacagatggaaatagtagatttttaaaatttttctccatctctattgaggtataatttagactttttaaatacacagacagtttaaccaggataatatttatgcaattaagcaattactggattgctttggctcttctgggtcttttgcggttctgtataaattttaggatcattttttctatttctattgattcttgtagttgatgttaagaaaaatagctatgctgtttttctttctaatagtctttttaaggcaaatttatattctttgcatctgttatagggatacatttaagatagcctgttataataggaatatattccaagctcaatccaattaaaagctatattcaaatcttgga

SEQ ID NO: 59888 - DNA, 1050 bp, Homo sapiens
ggtgccttctgcatccctgttcctaaaacggttatagagccctggcttcaaattcctttagaccactaaaacctctctcctttttgagacggcctcactctgttgcccaggctggagtgcagtggtgtgatcacagctcatttcagcctggacttcccaagctctagtgatcctcccacttcagccccccaagtaactgggactacatgcacgcactaccatgcctggctaatttttgtggttttttgtagagacagggttttgccacattgcctaggctagtctcaaactcttggcctcaagcgatccacctgcctcggcctcccagagtgctaggattataggtgtgagccactgcgcctggcaataaccttcttaaatcagcaccaaccattcttttttctattcctgctaataaaaggccataattttgtccgcctttaactcctgccccaccttttcttacaggtgtgtttatctatcgatcatcctcagaaggtcttaattatgggtgaagctcttgacctgggaacctgtaaagccaagaagaagaatggagagccgtgcacgcagactgtgaatttggttggtttcagccttgttaggatggtttctgctaaagaaaagaacagttaggaataaactgttggtgctttagctgtgatgaccagtttggaactgagtttcccacttaaaggaagagtcaaaatgagaaaatttaatgtgtggttaataactgccagtttaaaaaagtgagggcaggggaaaggtgaggggatttaacctcttaggaaagtgatcttttatctgaccaagaagtttaagacagaatttttgtttgcctttaattcttgtaattccacagagcaaacatgatgaaatacaatgaaaattgtattttagcctatattttaactccattataccttttcttagggctttttaaaaaataatagcttcatttaggtataattcacataccatgcaattcacccttttaaagtaagcaattcaggccaggtgtggtggctcactcttgtaatctcagca

SEQ ID NO: 59889 - DNA, 1028 bp, Homo sapiens
agaacttcttcccctcagggactgagcagcccttccacattgggaacggtcgtggaggtcagcagggaggactctgcatgcgtcatgttccgggaagtggggagaaggaactgtgtctgctcactgctgtttcccagcctgttgccctcatcctgatgccactgctctgccttttgcagcgtgactgtgagtactgtcagtaccatgtccaggctcagtacaagaagctcagcgcaaagcgtgcggatctgcagtccaccttctctggaggacgaattccaaagaagtttgcccgcagaggcaccagcctcaaagaacggctgtgccaagatggcttttactacggaggggtttcttctgcctcgtatgcagcttcaatgtaagacgttctcgggcttcttttgggcagaggattttgcttatcaaagactaaacctactggttgtaccttcctgtaaccgtcataggatacttgtacaggttttatctttcataactcactacttgaaacaagttggttaaagaccgcttttattcccaggtagagagaaaaactttcaggagagagagagattgacttatgttgtgttggactttaagagagcccactcttcctcttcaacttttttttttttttttgagacggagtcttactctatcacccaggctggagtgcagtggtgcagtctcagctcactgcaacctccaagtcctgggtttaggtgattcttctgcctcagcctcctgagtagctgggactacaggcgcgtgccaccacgcccagctaatttttgcatttttggtacagacagggtttcaccatgatggccaggctggtctcgaaatcctgacctcaggtgatctgcctgcctcggcctcccaaagtgctgggattacaggcatgagccactgctcccagcccctctttgacttctaatgtgaatagtgcaccttcatcagggccattaaaaatgtgttaattacagtgttaacacccttttaattatttctcgtatgactatatgagt

SEQ ID NO: 59890 - DNA, 1091 bp, Homo sapiens
tgaggtgggaggatcacctgagcctgggaggcagaggtggcagcgagccgcaatcgtgccaacgcactctagtctgggtgacaaagcaagaccctgtctccaaaaacaaaagtaaaatagctcttaaaactattttttgccaggcatgatagctcacgcctataatcccaacacttgggaggctgaggcacgagaatcacttgaacctgggaggcagaggttgcagtgagccaagatcatgccactgcactccagcctgggtgacacagcgagactctgtctcaaaaaaatcaaaaaaaagaaaggggatgtaaaataatcgctgcaagttacagtgtttttcattaatgacttccaaatgtctcacatgtattgtctcttcccagtagcataaacaaagatgcagggaggtgcaatgagttcctacaggccctagagctgacggtaggggtgggaatacagttcacaccgcgtcttcagctgtgttccttgtggatgacatccactggacagccaattgataaaaacagttatcagttctaaagtgttaggacaattacagcttattcaaagaaaactcaattaaggaggagttagtaaagctagtattgttcttatcgtgtgcaaatttgaattaccagcctagaaggggacattattttgctaacaactagctcccaactggtggcctgcctgccgcctcccagtccactttgagttctagagtttttattttcgtaaaccctgtttgcgtattttgactgtatgttctttaaagatttctgcagagctcaagtgaagttgagagcccagctgtgccatcttcatcaagacagccccctgctcagcctccacggacaggatccgagttccccaggctggagggagccccggccacaatgacgcccaagctggggcgaggtgtcttggaaggagatgatgttctcttttatgatgagtcaccaccaccaagaccaaaactgagtgctttagcagaagccaaaaaggtaactggcatctcttctctttagcacttgagtttgcattctgtagagcagagctggaggaaagacagacacctaatagctctt

SEQ ID NO: 59891 - DNA, 1038 bp, Homo sapiens
agaagccaggcaggatgagaagcaatccttggttgtgtcggtgactgtcacatgcattgcagacagtgcagcaccccggtccctgccagccacagaggtagcaatcattgcaatgaaaaggaaagtgctcccaccaattttcaaaatatccccattcagtatcactactctgaatgatctgttcttcctttgattaacaaataactaatgagacagttctgcatcatatcttttcactggacttgaaactcaggagagatgccagagctgactgcaggctgcagagctgagctcctcgcctctgtggaacccttggccccaggccctcctgtctgtggagcagcactaatcccatcgctgcacccacattctgccacaagcatctctgccctcagggctgttccctgatgtcccgtgcacccaggaaactcaccagtgggggcctggaataccttgtgtatgtggagtctgtattagaacagtagaaataactgcctttgggcacacacttgacatactgatactgtcatgttaggagtgtttatttgtatttggtgctttaaaagtcaccaaatgggccaggtgcggtggctcatgcctgtaatcctagcactttgggaggccaaggcaggcagatcacctgaggtcaggtgtttgagaccagcctagccaacagggtgaaaccccatctctactgaaaatccaaaaatttagctgggcatgtggcgggcacctgtagtccctactactcaggaggctggtgcaggagaatcacttgaacccaggaggtagaggttgcagtaaggtagagattgcaccactgcactctagcctaggttacagcgagactccatctcaaaaataaaataaaataaaaataaaaatcaccaaatgctctcatgtccctttgtttttgcatattaagagctcgtttctatgcatcatcatcttttgctttgcagctcatgaggtgctgtccagggccctctcacacttagcctgcctcttccattctgttctgttttgattattatcagc

SEQ ID NO: 59892 - DNA, 1924 bp, Homo sapiens
aaggcttttgggttataaagagaaagggagaaggatgatccagactagaaagaagattattcctttcttagctcaacctttttgctccaaaaaaaagaggaggaaggggccaaacatagattatcctgcaccagagggccagctccttaaatctgagtctcatcccaaccaccatcatttgtaaaaaccaagggtgcattcattacctgcagtgcgtggatccctgtggtgccatcattatcatttgaagctccatctctgaagcctctagctttgtaaggacctacagaccacttcccaagtcattgcaggtttatttttgtcgcatttgagcataacctcagatttggcatacaatacgaatgtcaccttgaacagcttctccttgaatgggggcctactctccccaggtgcagtgagcaccgtcgtctttacatgagtgggcctacaccaccctgctgagtaaatccatctgttctgtttcagtaactgtggcctctacaaatgggaacgggacggaatgctaaaggtatgccatttgcgtactaatttttgactccttttagtgacccatgctaataatgtggaaccatctcctattaaaatattttcatttttctaggaaaagactggtccaaagataggaggagaaactctgttaccaagaggagaagaacatgctaaatttctgaacagccttaaataacccgaacttcagacattttcccacagacttcctggcctcctgtgactctggaaagcaaaggattggctgtgtattgtccattgattcctgattgacgccgtcaaaaacaaatgcttgttaagcccataagctttgcctgcttactttctgccattgggttggtttgataccacatttaacattgacatttaagtggaaaaccaagttatcattgtcttttctaagctcagtgtggatgattgcattacttcattcactgaagtttttgcccaaaaattggaaggtaaacagagagctatgtttctgtatcttttggttatagagtgttcacttctttatcataacaaaattctagtgtttatacgaacacccagaggcaaaagaatttggcttaattctcactccaggtaagtagcttaacttctgggcttcagttttctcatctgtaaaatcaggaagattggactaagtgatcctgaaatgtattttttagcactggatttctacaaataataaaactttcccatctagataatgatgatcacatagtcttgatgtacggacattaaaagccagatttcttcattcaattctgttatctctgttttactctttgaaattgatcaagccactgaatcactttgcatttcagtttatatatatagagagaaagaaggtgtctgctcttacattattgtggagccctgtgatagaaatatgtaaaatctcatattattttttttttaatttttttattttttatgacagggtctcactatgtcaccctggctggagtgcagtagtgcgatcgcggcacactgcagccttggcttccctgggctcaagcagtcctcccacctcagtctcccaaatagctaggactacaggcgtgcgtgaccaagcccagctaatttttgcattttttgtagagatggggttttgccatgttgctcaggctggtctcaaactcctgagcactagcaatccacccacctctgtttccaaaaaaaaaaaaaaaatgaaaggtcaacccctatgcaaattaccacagcaaaggtttcattcaggagattcttccatctgggcaacctggttttccaaatatcatttgacctaagtgaatgttgatactagctaaagattgggtaaattggttgaattattgtattgaagcttgagctgtagctaaaagtaatttaggtttcccctaagatgtta

SEQ ID NO: 59893 - DNA, 5703 bp, Homo sapiens
tctgtcacccaggctgtaatgcagcagtgcaatcatagctcactgcagcctcgacctccaggctcaggtgatcctcccacctcagcctcccaagtagctgtgactacaggtgcatgccaccacacccggctagttgtttttgttgttttgttttgttttgttgttttgttttctgtagaaacggagtctcactgtgtttcccgggatggttttgaactcccaggctcaagccatccatctgcctcagcctcccactttgggatatatttttatatcccaaagtgctggggttacaggcgtgagccactgcactcggcctcgagtatcctttagtagcaggttttcttttcaggcaagaagacgtcccgtcaccccctgcaccaggacctgcactatttccccttcaggcccagcgatctcatcgtttgcgcctggacggcgatggagcacatcagccggaacaacggctgtctggttgtgctcccaggcacacacaagggctccctgaagccccacgattaccccaagtgggaggtaggtctgcccggcggctgagtcttgatccgaatctccttcgcagtttctgtttcacatcagtacctctaaagagtttacaaatgagatggcatttcctttctgagcaaaacattgtcctaagatttgcagtgaggatcagagaaagttcaaggatgtcagagaaaacattcatcacacctattttcaacactttttttgtttgtttgtttttgagacagggtcttgctcaactcactgcaacctccaactcccaggttcaagccatcctcccgcctcagtcgccctagtagctgggactacgggtgtgcaccaccacgcccggctaatttttgtggttttagtaaagacagggttttgccatgttggccaggctggtcttgaactcctgacctcaggtgatctgttcacctcggcctccctaagtgctgggattaaaggcatgagccactgtacctgcccttaacacgtgtttgaaagccagccaaggtggggagcttgggtaggtactgtataggatccgagattgtaagtcctagctgcagaggtaagacataaacccttcgaccccagatgtgtgtggtagacaccaagtcagtcttactcactaactgatggctctcagagtaaggaaggagagattgtctccttgcaactgcagagaccagcaaaggatctggggaggctggtgtctgacctgagccttgcaggacagtgtacaatgtcccatagggaagagtcgatataggaaggcacaaggtcaagggcaagcctgaacttgaccaaagaacaggaaagacccagggagcttgcagtctagatgggctgggcgctgggggtgtattttggggagcagcagaggaggtgagcccaaaaatgtacattaggaccagattagaaaagactgttttactaacaagtctgcagtttatttgggggaagaatgggaactttttagttcaaacttttaggaagatcgaagaccctttttgtttttttgttgtgttttgttttgttttgtttttgaggagtctcactctgtcaccaggctagagtgtaatggcacgttctcggctcactgcaacctctgcctcctgggttcaggtgattctcctgcctcagactcccgagtagctgggattataggcgcgcaccaccacacccagctaatttttgtatttttagtagagacgggatttcactatgttggccaggatggtcctgatctctttaactcgtgatccgcccacctctgcctcccaaagtgctaggattacaggcgtgagccaccacacctggctgaagagcttttaattaaaaaacaaacaattaaacaaataaacagtttcattgaggtataattgtcatgtaaattgtacatattttgcatgtataatttgatcattttccacacacacatacctgtgaaatcatcaccacaatcaagatactccatccttctccctgctctaggcaaccactgagctgctttctgttactgcaggttagtttgcattttctaaaatgtcatagacatgtaatcacatagtatagatttttttgtcccgttctggcttccttcactcagtgtagtgattttgaggttcattgatgctgttgtgtatgatagtagttttttgttgtttttttttttttttttgagacagagtctcactctgtcaccaggctggagtgcagtggcacgatcttggctcactgcaacctccgactcccttgttccagcaattttcctgcctcagcctcccgagtagctgggactacaggcacaagccaccatgctcagctaatttttatatttttagtagagacgagttttcactatgttggccaggatggtctcgatctcctgacttcgtgatctgcctgcctcggcctcccaaagtgctgggctcaccgcgcctggccaacagtagttctttcccttcccttgctgagtagtattccattgcatggctgcaccgtgaaccatggtttgttcatccattcagctgctgatgcttggaaatgttaaatgcatttgagctcatgagtgatgggatcaaatcggctcttcaaggacagtaatgtcacgttctggtgcaggacgcgttagaggtataggcatctagaagcaaagaaaccagagagatgactattaacgcgttaggtctaaggtgaaaagaccctgtgggagccaaagtgggaggatcgcttgagcccaggagttcaggaccagcctgggcaacacggtgaggtctcatttctaaaaataataataataataattagctgggcatggtggcgcatgcatgtagtcccagctattccagaggctgaggcaggaggattacttgagcccaggaattcgaggctgcagtgggctatgttggtgccactgcactccagcctgggtgacagagcaagttcccgtatcaaaagaaaaagaaaagatcctgggctgggcgcagtggctcatgcctgtaatcctagcacttagggaggctgaggtgggcggatcacttgaggtcaggagttcgagaccagcctgaccaacatggagcaaccctgtctctactaaaaatacaaaatcagcctggtgtggtggcgtgcgcctgtagtcccagctactcaggaggctgaggcaggagaatagcttgaacccaggaggtggagtttgcagtgagctgagatcgcgccactgcattccagcctgggcaacaaagcaagactccatctcaaaaaaaaaaaaaaaagaaaagaaaagatcctggaatcccatgatgctgcgaatggaaagagcccccattgttaaagcagggagaatgagttgtagttcgataggaaatgaggaacatggttttaggaactcctaactcgtctggacacagtggctcacgcctataatcttaacactttgggaggccgtggcgggtggatcacttgaggtcaggagtttgagaccagcatggccaagatagtgaagccctatttctactaaaaatacaaaaattagccaggcatggtggtgtgtgcctgtactcccagctattcgggaggctgaggtaggagaattgcctgaacctgggagatggaggttgcagtgagctgagatcgcaccactgcactccagcctgggcgacagagcaagactccatctcagtaataacaataataataataatagaacgtctcagatttcttgcaccaataattagtgtcaaatgaaaatatgtgagtgtctggatcctgatataaaaccatttaatgtgaaactcatcagtgaagccaaggtttaaagtttggtgcatgcaactgcagtgggctttggctgacagaaggcaaagggaaaagtttgcagggcttccagagcgtgtggagtctcagataccctgctcagatgcagagtgggaggtatgattagcttagtgtgggtcacacattcaccctggccaggagagaagggctctgggtcagagtctcagcactgtctaagagggatgtcgtcattcccagaaggaactggggatgctcttaggaagaggaatgggctgcttcccttaccctgactcctaaggtgcttctcatgtcaatttctttaataaagacataaccgcattacctaaagtagcaactaatttgggaaatagttacaaacaaacacagtgttttaatttactattctttcattattctggatgtaacataagtgcctttgagctcagaaaaattgagcattttctcccccctattttggggaaatagcttctcagagacactcctgagtaagagatgaaggatttatttaaagttctgggcgaggaggagaacacactgggaacactcacagtttcaggctggaaatgcccaagagataggtggttgcctgcattaaccacaaaaggcaaagctaagctagatcttcatgtataatgcagtcatgaagggcaggtggaaattccacactgttcatttcctccaaaaaatcagtgattttaatatcaacatgtgacttctttttttttattaccattatttttcgagacagagtcttgctctgttgtccaggctggagggcagtggtgtgatcatggctcactggaacctccccctcccggctcaatcgatcctcccacctcagcctcctgagtagctgggaccacaggctggcaccaccacgcccagctaatttttgcagtttttgtagagatggggttttgccatgttgcccaggctgatctcaaactcctgagcataagcaattctcccaacttggcctcccaaagagatgggattacaggcatgaaccaccatgcccggccaaaatgtgactcttaaaaaccagatatctgagaggcttttgtatactgaaaaaaatgtaagcatttaatttagacatttatttctcttgggagagagaaatgctttctttccctgatgtttgctttccctgatgaaccattgacaatgtttttaattatggtactccctcaaatgtagacttcacttgcctcttgttctaggggggagttaacaaaatgttccacgggatccaggactacgaggaaaacaaggcccgggtgcacctggtgatggagaagggcgacactgttttcttccatcctttgctcatccacggatctggtcagaataaaacccagggattccggaaggtaagcattcacattgctgcacctgctgcagaagtgtgggttagaaacaaaaattgtattcaattcattgaattcaaattaattgaataaaattttaattaaattgcattaacattttaaagatttgtggcttttaaccaacctggactttagtccagtttatttaccaggaaatatatttgcttaccttgggctttctgtgctcttatcagtaagaagccaggtgacctcaggatcctaaccttgtcaatattgattatgggccgggcgcggtggctcatgcctataatcccagcactttgggaggccaaggcgggtggatcacgaggtcaggagatcgagactatcctggctaacacagtgaaaccccatctctactaaaaatacaaaaaattagctgggcgaggtggcgggcgcctgtagtcccagctactcgggaggctgaggcaggagaatggcgtgaaccccagggggtggagtctgcagtgagccgagatcg

SEQ ID NO: 59894 - DNA, 1014 bp, Homo sapiens
ttttttttttttgagacggagtctcgctctgtcacccggggggagtgcagtggcgcaatctcggctcactgcaagctccacctcctgggttcacgccattctcctgcctcagcctcccgagtagctgggactacaggcgcccaccaccacgcccggctgattttttgtatttttagtagagacggggtttcaccgtgttagccaggatggtctcgatctcctgacttcaagtgatccacccacctcggcctcccaaagtgctgggattacaggcttgagccaccagcccacacccatcagttttttaaatgtttctttttgagactctgtttcaaaaaaaaaaaaaaaattatctgtaattctacctcaaaagtcacgtttttggagactatgtattcatggtaaaatgtctatgctgtaatctaaggtgaaaaaaagatgcggcgtcacctggagtttaagaagctgcacgcaagtattgaattcctgacaatggccaagaacaaatttagagggcagaagtccaggaacgtatttcgcatagctagccaaaaaagctttaaggctaaaaacagagtaaaaccaattaccgctaatcttaagaagatacacattatgaatgatgaaaaagtcagcagagtaaacaaagcttttggaagtgtacaagaggaacttccacatttctcaaaaggcctttctcttgatcttctgcagaaagagctgattcctcagcagcgtcatcagagcaaaccagttaatgttgatgaagctacaaaactaatggctcagctgtaacacactggtgatgcacctaattctccacaaagaccaataaattaagtgttttctaccaaaaacagatgcaatgcagtctattcagtgtattcagtgtgataccaactttgaaaaaatatatacgtatgtatgtatgtacctgtataaaatgtatatttttcaactaaatgtgaatgggaaaaaatatagtgaattgtaacagtggttttcttgtgaaga

SEQ ID NO: 59895 - DNA, 1094 bp, Homo sapiens
acatagcacaggcattacccgtagtcgtgtcaaatagcagttggtgtcttcattttatgtatatttatcatataagtctgatttttttttttaagcgtcttgaatggttttctggagagacagcattggtaagtggcacatgacggtatcccagtcataagagggttgcatgattcctttgagtgtttgatttgaaaagcctagtcttgtctctcaagagcatctcggacccagaacattctccagtagtgcattcagttcaacacagcaagtgcttcattgcatggaaaacactttgaagacaaaaaagaaatcttatttctttttttgtagccttcctgatatttacagtaataccattaactgttttatcgatagcaaaaaaggatactttttgcaatgttattagatgttctatagtgctacaaggaattgccttccgaatggaggttcatgtataatactcatttacaattcaatatataattacacaaataatttttaaatataatcaatagtaaagactgttctgtggatggtagtgtttaatacattttctattttgtacagtgatttcaggccttttgttttcttaaaatcagcagctgtttggcctaattcttagcattattttgtcctttgcgccagtacttttttgtgcacgctttttgtgatctgtgttaaaaacctgcattgccaacattgcagctcgaacttaaacttgttattcaaataaatatttaattttttaaattgctcttgtataatcagatgccccttttagtattattttagaagcgttgggagggttttgcctaaagtacaatttatcgggaaaaactagattttagttttataaaacttttaagtctttcatgggacctatattttcttgaattaaattttgtagttctagaataaataggcaatctaaaaaggtgttctctgtgttatgtaaagtggaggcttccttatattttaacctactaagcaatgaggagggattcctgtcattaagcacaagggcgctggatcctcaagtgcccatcttcgtgagagaaaaagcagcacatcctgcccatttctggtgcttt

SEQ ID NO: 59896 - DNA, 1644 bp, Homo sapiens
acagttttgcatattgaatgcttgattgcagtaggtaagccccagcttggagctttaagatttttctgtaaagaatttgctcggcagggggttagctttgtttacttggccctgagatagcttcgtctttcatgtcttaaacatcactaagaaataatatgaaggagaattggtggaaggcgtagtgtttggggtataaataaaaccagggttattgacagtttaaattgttttatgcagtttttggttgtttttgtttggtagttttgtctttttaaactgatgagtaactcagaacattttgataaataattctcttgtgcagaatgaatctatctataatgaggatatgtcttgtgagtcatttttccagtgagctataatcatactttaagattggttttcttcattgccgtaacaactcacaaattaataagattggggtatattctcacatatcatggtgcatttaatttctacaactatcatctgaaactaccagtcctgagaaacagttgaaagagaataatcaataattacacgtctttcatcaacctggtatatcttagcttgatgtcgcagggtagagaaattctctaaggctgccacgttctttagcagtttttccctcctccccctgtgatggggagcagagcagaaggccactgcggggatgttgcgcagaggtgccttccagccccacctcccaggcctgagctagcagggagctggaagcaggtgaggcagggagtgtcacggatgggggagcccttctccactagcaggacactacactgcatgtacagcagtgccgccgtgtgtcccgctagactacacatacccaataaatcacagcacttaattacagaaatgtgggatgagaacagaaaagacgccatgctgacaggtctaatggacacctaaaatactatccacagaaaaaccagagttggaaaattcagttttctgaattaaagtccctagaagttaaataagaaaaagttgctgtttttctcagttgctagaagtaaagattaatcacattttcctctctttctctccctcacctacatttctattatcagcctgagaaatggaataagattaaactagtggtcacccaagaagatgtagagctggcctaccaggaggcgatgatgaacatggcgaggctcaacaggacaggtatgacaggtgggaagggcgcttcggtcccaggggtccaagacagtaaatgtcttaggcttttctggccacatactgtctcagggtaggtggccagatttttggccagtgactacagaccgtcttctcctggtaccaggttggcattccatagatcactgcagatggtccctgacttacagtgctttataattaagaaggaagtcctaacttctgacataccagaggaactatttctagaaagcgtttgtgtgggttacctatgtaagatttggaagcaaaccattcagaatggaaatttagaaagtttaagatactggagctatttccagaacataaccttggaagtctagaagtgcccccactcccacccatcccctgcattcctgcttaggtgtaaccactgaattttgtgtttattttcttgcattttagaatatttttattgcacagcccttg

SEQ ID NO: 59897 - DNA, 1371 bp, Homo sapiens
cagcgcttttggaggccaaggcgggtggatcacctgaggttgggagtttgagaccagcctgaccaacatggagaaaccccatctctactaaaaatacacaattagccaggcatgatggtacatgcctgtaatcccagctacttgggaggctgaggcaggagaatcacttgaacccaggaggctgcggctgcagtgagccaagatcgcgccactgcactccagcctgggcaacaagagcgaaactccatctcaaaaaaaaaaaaaaatagatgtattaagatataatttgcgtactataccattcacccatttaaagagtcagtggtttggagtatactcagagttgtacagccattaccggagttgatgttaggatgttttcattgctacaggaagaaaccccatcctcctcggctctcactgttcactcctgctccatcctggattttgtcacttagcatagtattagcatacttttaagggtcatctattttgtagcatgtgtcagtattttaatcctatttttaagacattttaggtgtttttgttttttttttttgagacggagtcttactccgtcgcccaggctggagtgcagtggtatgatctcggctcactgcaagctccatctcccgggttcatgccattctcctgcctcagcttcccgagtagctgggactacaggcacctgccaccatgcccggctaattttttgtatttttagtagagatggggtttcaccatgttaggcaggatggtctcgatctcctgatctcatgatccgaccgcctcagcctcccaaagtgctgggattacaggcgtgagccaccgcgcccggctgacattttaggttttttagttgaagtataattcacgtaacaaaatttcacataacatagaattcagcattttgaagtacacaatgtgttggtttttagtattgacaaggttgtgcacccatcaccactatccaattccagaatgttttcatcaccccaaaaagaagccctgtagctcactcccatttccctcctgctcccatcctctggcaaccaagaatgtgcttttgtctctaaggatttgcctgttctggacattgtatagaaatggaatcgtgcagcatgacatgctgtgtctggcttcactcccatagcggaatgttttccgggtccatccgtgttgtagcatgaatcggtatcgcattcctttccatggctgtataatccattgcatggatggaccctgctttatttagccattcctcaggtgacggacctttgggttgtttccacctattaggaatgatgctgccatgaacattctaagtttttgtgtggacataagttccggtctcttgggtgtatacctaag

SEQ ID NO: 59898 - DNA, 1189 bp, Homo sapiens
tttcttaagatgatttttctgtttatctcatacatccttgaaaagaagctacaaaaattttttttgttttttttttgttgttgtttattgacagtcttgctctgttgcccaggctagagtgcagtggcacgatctcagcttactgcaacctccacctcccaggttcaagcaattctcatgcctcaggctcccaagtagctgagactacaggtgtgcaccaccatgcccagctaatttttatatttttagtagaaacagcattttaccatgttggccaggctggtctttaactcctggcctcaagtgatccacctgattcggcctctcaaattgctgggattacaggcgtgagctatcacacccagcctaagctgcaaacatttcttaatccaagtgcacaaagactatctccatctctataaccactaaagccagccatttttagaatctgtttgggatatgtggctgtttccaacttttctttaggagagttgtttgcaggctttttcgctccatagctcttcccccaagactgtcggttctaaacttgcttctcctcctcattcgctgcacatataccccttcccctatctaaataaattgcagacttctaaaatttagaatggagaaaaactggtacattctttgtcctgcacaagaaagaggtggtaacaggaatgtctgagaaaaaacgaatggcctagtgactctgtgatgcaggaaaggttgccagtctgcaaatcatagaaactgaggaccccatcctagtagctgctactcctggaaagtctccacgttctctgtggagtccactccatggctcactcagtttctgcagatggaaagtccccggtcgtcctttctcatgtttccctctcttcccagggcaggatagcgtgtgccaatgtcctcagtgacctctatgcaatgggggtcacggaatgtgacaatatgctgatgctccttggagtcagtaataaaatgaccgacagggtaagtaggagctacccggctgctgcctggtccgtgttgtcccggtggcatctctggccttggttagacttggtttcccatctagaaagcgaggagcccaggccatatggctccctgcactccttctggctctccactttttggcagttaccagtaaattaaaatgaggaagcctggcctagtcatctctgcactt

SEQ ID NO: 59899 - DNA, 1349 bp, Homo sapiens
tcatcttcaaagaaattgtatacggtaccagtcacacgctacagtaatacagtaaaataataaaagtcatacagtgaaaaagatttttattcaaggcatcattaaggattaaaactatgccatattggagttgagtcttgatgagtaacattttcattggtattttccatcctaagctggatatgtttcacgtttatttcagttacgcttcttgataggaaacacatggcttcattggcagcctgcagtttccataagtatcttatgagctcttcctgttcagagcactggtgatataaaatgaaatggctttcccgttttatttttggatgctaatgacttccatctccacaggcattggaatggatacttgtgtcattcctttgaggcacggtgggctttccttggttcaaaccacagattacatttacccgatcgtagacgacccttacatgatggtaagcgtgagccgatgtgtttttgtgactggaagggcttatttgtttggtttgggttgtggctggggttttgtatgtatctgtggggttttggttttatttctgttatatcccgactatactgccccaccctgcccagactcctgcagttgctgaagtcaggcctgtcccctgcccacacttggcactgggcataaagcaattagggaggaagcagggaaggccctctgctgctgttgcaactgagtacatgctgtgagtaagaacacctcttgtttagtagcatgtcaatggcctgtttttgtcattttcttctttcttgcaccttctcttctttgacattggtaacctccatcacccctgtgttttaggctggagatgttactgtcctctgtaataggactgatcctaaatgtttccttcaagagattaaggagctagtatctcatcacaattagatgcctcaaacattaattcggatatctggttaattcactcaacccagccacttgcacacccaccaccgtgtgatgtgccgctgtacatagtaggtttctgaccactgagttaaagttcctggctactgatgatacactgctgaggtgtgttccccagttgtttactgcgtagttgcagccagccaccctttgatccacccaacctttaaccccaatttgctaccacccaggaggagccagtggagagactaggaaaatctggtttgctataaaatgccaggtgttcttcgtgtgtggcaaggacagtgggatcaggctgcactgtagggactttatcatgaggcagccacgtggggggtgttcaccctcaggtaccagtgacaaataccagattattggaaacctatatttcttccgcacatctgtccgtttt

SEQ ID NO: 59900 - DNA, 1054 bp, Homo sapiens
agaagatgagcagtttctgggagccgttatgccaaggcttggtaggtaacccagtgtttctttgatggtctgcgatccaatcagtgagtcaaaaactggatttctcgcctcccatgttgcctatttattttttattattactttttttgcttttatagatttgaggaatacacatgcagttttgttacatgaatatattacataatggtgaagactaggcttttagtgtagccatcacccaaatagtgtacatcgtaccccctttatttttttttaatttttgtgggaaggattagaagagcaatcaatgttatgattgctatgttatgttcttgtaacttatgtagagaaagtacttgaaacgcatcaagaggggtactcttgacagtttttaaatcatggagtatgcaattgagattgttattacagtaaaaactttttaatttttattttcaatttaattgaattgaattttctgttagctgaagattaagcagaaatactttattcccttttcctaaaaggactcctaaaatgctcacattcccttcattgccctaggaaaggcggttccagccttagggttcttgtgctgtacttggatggcagtgactgtgtcaggagggcattggggttctctgcagggtgcatcgggcgaaaagcgtgttacggtgaggaggtgggactgctccagacccaggactggatggatctgttcttgaccccaggatgtcatctggaaccagggcaatgtctttttctttactacattcctgatgtcatgagtgatttcacttttcccaaacacagagcttagaaacaaattctgggctcctgggatattgtttattcatgtttcttgtgcagtttattaagtacacagtacaagactgtgatcacttttcttgtgttcgacgcatagtttcggaggtttggatgttcgataattactgtgtgacttgatcagttttcttcctttttttttgaaatggattctcactctgtcacccaggctggagtgcagtggcgtgatcttggctcactgcaacctctg

SEQ ID NO: 59901 - DNA, 1087 bp, Homo sapiens
ctcaagaaaagccacccaggagctggggacaatttgcattaaaaaaaaaagtatagagaaagtgaaatcaaaacagtgctttctaaaatttaaaatggggcttccaaatttgaaatggggatgttcatctagacttagcaattgtcataaattggcattttacatacttttaaaaaattaataaaagtgtaaggaagaacatttcaattgcttttaccacccacagacaaccattattggatgatttttctcaaatgtttctccattttatttatttatacagtggagatcaaatatgtaaaattttgtttcctacatgtttttttgatttttacctaacaagcatttttccactctatggcaaatcttcatatgcattattttaatagctgcataatattctgttttgcaggtaaattatcttttaggccattttccatgactggacaatatgtggatatactctaatagtaacacacattcgtggcctttctcataaaaaatcattacaaatttccaatttctacaattgctcatggaggacaactaaagccttggctaaaaacttagcgacttaagtgtgaaacacagacacctccccagtaaattgtttacttgtccagaacgcccacctccagccatgtcacagaaccatgtacaactcttccttagagaagcggctctccgccttcattttcttgtctctgttgtaggtaatatatttgacaccaggagagaaaacacggaggacacagaaccaggtttcattgcctagactttgattttagtgacattgttgagtggcatatgtaacttccgtttgaatttccacaaagatccacgtagcatttcaggttcctgcaaagtgtgggtgttctgtcaagcttacctgtcatgtttgaatagtttcatatactttctttgtaatgtgtgataaccaagcctccaatctggtataagattttttaaatcatttttagggttgatttgttaccctttaaaagtccagcatatgattcagtgagttcattgtccattataaagaagtggttctctcttccctgttttcattcaaaacctcagtatg

SEQ ID NO: 59902 - DNA, 1038 bp, Homo sapiens
gactctactgacttccctccaaaggatatctgaagattctctgcccacaaaacccaggtacccccaaaaaccctcttactgaaaaggttcaaccgaatgttttttcctctagttttggggtggtctgtgttgattaaattcagcaaatattagtggagtctctaggttgtgtaggaacttgactaggccatgtattcattgacagcacatatcccaaaatggcaaggaaagccacattcgcaggcataggatgggcctgtgctagtgaacttcagagcttcagagcaacaggaaaattcagccgtgtaagagacacattgctttctctgccactgagtagctaagcaacagatcaatggacagataaatcaaatgagctacatagtgcaaaaagacctgcctacatcaagttcttcccatacagagtcattatataaaagagatttctgttcttctttggctgtgttttcacatttgtgaattaagagaattgaaatacgtgatctctgttgttccttcccaatttgtcattctctgaatatcagggcacgcatatcagcctcattcttatcacctgggcccaatcccagccgatccatgaaatcctaatcgtaatagacctagccttcagaaggcccttcaggggagcaccatgcctttctagctgtgcttcccaagtgccctcccaccctggccatctgcactgcctgtcctcctgtgtcatgtgacacagtgagcttttattatttgaaagccactccccttgaagtttatattcacccccaagtggtgagtacggaatgcctttgtattttcctatctgaagttggagatacgtttccagtgagaaaactgaggtcagagggtgctagaagagcctcatggaactgaaaaaaatgtcaaggaatctgagaatgagaaggaacttgagagatcctctagtccaatcccttctttttatccagtccttttattttacaggaaaaaaagcctgaggcccagaaacattaagtggctttcccacggcctcacagctgg

SEQ ID NO: 59903 - DNA, 1050 bp, Homo sapiens
tccaatcttcgttattttaagcaccttcctctcaacacctcttgatcactgcagataccattttgaatccacttagccaggtacaactacctgggggcaaatcccaattagaaatgaaggcaggacagtggagaccaagatgtatatataggatattcaggtctcctgcagggcatggggcctgtgctggcctctttctgaagagtcagcggtagccctgcttacccacacagcagtcatcttggcggtggcatgggccacctaaccctgatacccccttgcaactacattatttttagcagaggcatcaactaactcttcaagtttgaaagctcagaaacaccttgaatgcctttttttctttgcaactcaccctgctcaattacctggccctatcaactccttttgtccctcctctctcattcagtgccctttggcttctttgacaccatcctggtccagctgtgcatcactctgtccttgaaattctgcaaaaacactcttgaaatgtcctgcctaaccctcctttctccttccagttcctaatgtatcctaacagcctagtaacacccagaaaaccaaatctcgtgacatcgttttcctacttacttccccttggcctattcagtccgaactctggccttttccaagactccgtaacttgaatttctctctccttgtgaacatatttcccggtgcttcctcccgggtgagccagcaacactgttcctcaagcaccactcgttcattgtggactctgtgttatgctgttctccacagggccgtggtgcccttctctccccgctctttatagacaagcctgacttgttcttcctggtttaccccaagtctcatcccctgtaccatgagactttttcagatgccctaacctgtactgattgcccctttctctgagtgccagtaccacttactgcctttagactgcttagcagggcatcttaactctccgccttgctattgatgacttctatggaggatgagcatgtcatttactgcgcacactgggacactcctgagggtcagtatggt

SEQ ID NO: 59904 - DNA, 1138 bp, Homo sapiens
ataagctcaaaaaagggatctcatctcctcaaaactgtgaattcatatgtttactacataaggagcaaatggaaatgtggagaaacttgttaagaagggtgtggctttttttgatctttcttcagcctgtcacataatgggcaggaaccagttgtggattcacttgcaaggattccactccaactccccgttactgaattcttacaaaacctgcattttaacaccaccactaggggtgacaaaaacagcctcctgtcaaaagagatatgtttctggagcataaacagggccactacagtagaatgtgcattgcacaccattgtgggcactgttgccgttgtggacactgtcgatttgtatatttattgtgacagtttccctgcagcctaaagtacagtgtcttgaggaaagacacctttctaatctgaacaatggctccatatgtgccagctgtggccctgaaaatagaaagcagtgttttctgcgtggtccatctcttctttatttaactccctgaattgtgtggctcatcagagatgctcaccagcatcctaaggtaatgccacatcctcctattttctctccttttgtggggaagcagaattgtttaataagttcagagtcagtcagattgcattcctggtagcttttcttctggatctacaattttgatgccagttatctagcaagtgttccaattcagttccataacacgtattgactatctcctgcaaggtatgcatcaaaaatctgaacgactcaggaattggtatttgctagtatttctgccctgaaagtgcattgcaaatgatcatggaatactcacaaaaaaactaaaagtgtatgcaagcttccaataagaaaaccccttaaaaattcataactttcggctgggcacggtggctcatgcctgtaatcccagcactttgggaggttgaggtgggcagatcatgaggtcgagagattgagaccatcctggccaacatggtgaaactccgtctctactacaaatagaaaaattagctgggcgtggtggcatgtgcctgtggtcccagctgctcaggaggctgaggcaggggaatcacttgaacccgggaggtggaggttgcagtgagccgagatcacgccactgcagtcc

SEQ ID NO: 59905 - DNA, 1046 bp, Homo sapiens
aataaaatataagcctcttttgtagagattgtattttttacataatcttatctgtcttatggtgactaacacttaatgataatttatttaaaatatattgataagtatgactcaaggtattgctgatgaaagagtttttaattagaaacattcacctaagcattttgaatttaagaagaaacaacttatgatcttaccaagtagagtcttaggctttagtgctggggataaagcttagtgtcttggatttgattcagaattgatgttataaccagagtggaggttagtacccaggtatgttttccttacctgctgaggctagaattggtccacatctagttcttgctgtgatatactcggtagaccatgcagattaacgtggttagagttgtctaaatatgatagaatctttgaatccctgaatgctcttcagaaaatacagttgcaataaagcgatttttagagcccccgttgtaggatttttaattcgacttcatagtgatgagttgagaaagttttattactatcaaactgtcctggagtcttgaatcttcttgcattcagtggaaattacataggcacgtcaagtgaagaccttgttgggggttcttagttcatgccacacagcacaaactgccgctctcctgagaggccagccttgatggtctgtctggacagccacaggtatcagaacttctctgggagggaacactccttgtttggtagccctccaaaaaaataactgcgcttcttacaagattagaatgggtgcctggccgcttttgctgtcacactttcacaggctctgcagaaatgaccaccaaaacctcttgttttattcttgtgactctagatacctgtagggtccatatttgtcatcttatagtatctctatttccattaggatttaataaaaaaaaagtgaatagctcttttctatttgatctcacgtagatttaaattaatacggttggggtggaatttgcatcgatttatttattgatagtaacttatctgcgttctcagaactttttataagaacaagg

SEQ ID NO: 59906 - DNA, 1050 bp, Homo sapiens
tttaggaaatagaagtacttagttcttaccaaaaagaacataaaccaagtctcaaaactaaacacaactccatgaaaaatgagactctgaatcaggccttgcttaaaactggaataacggataggggtgctgtgcttcctagctcagttcctgcattgttgagttgtgaagtgggactgacgcagagggccttctctgcccccttctgttccccattatctggcaaaatgagtaaatgaattcagtagtgtttaaaggatgcttgaaagtccacaattaactttataaaataatacggtatttaaatggaactagcaagtaccaagcaccctttgttcatggccagaaggacataagccttcattaacagagaatttctcatgctcaatcagaattttttcacttaaagtgacagttgagttgtattaaatatgaaaagctacagagatatcacaaactgtgccatttctgaaaagagtgattcagcctgaagtgacactacaaacaacatgacagaatttgaaaaatggtcaatgatgtaagtaggacttcctgaagtgaagaagggtcccttctcaaaacaagaaggtcaaggctactggtgcttttctgaaatgcagcgaggaattgttttaattttctttttttttccccagggcagcatattaatattatgaaagcatttggaaattagggaaccataaatgaccatagtccattttaatgacagtagaagagtcatcctaataatagatagtaaagaaatagattgtgacaagtggatcgatgtgggtttcttctgccattttccatctacactagacatgcaagagtttgaaaaagtatattacaggccaggcgcggtggctcaaacctgtaatccctgcactttgggaggccgaggtgggtggaacactgcaggtcagcagttcaagaccagcctggccaacatggtgaaaccccgtctctactaaaaattaaaaaaaattagcggggcatgatgatgcacacctgtagtcccagctacttgggaggctgaggcaggagaat

SEQ ID NO: 59907 - DNA, 1016 bp, Homo sapiens
gctatgtaacttttgggaattttatagtatttatagatttcccttttgacaactagagaaacttgcagactatatgtgggaaagaagaaaagaagactggtaataattttcttgtctggagttttcttttctgaaaatgtgatgccttatttatttagacaggtttccagtttttgtctccgaaaggaggagggtgatggcgtaaataatctgctcactaatttcttttgcatttttaattttgcagtgacaattttcaatttccttagtgtagagacctaaaagaatataattaaatcctttgtagatgggcataaatgaacagggccatacagataagatcgcacctttctggaaacacaaactaataataaaaaaggagcagtcatgctaattctattttatagatgcaagccacaccactaattaggtggcagcgccatgccatttactccgtgtaatgataggttaaggctctgcaaaggtttttctattttaatatcacagccagaatgttgccgcagtccagaatgttggatgacatccgagataaccatctgacttgctattttacattcataggaccataaacgaatgtgtttaatagtgcactatatttgcaattgcatttctatttacaatgtctttctctaagtatgtttgtgttgtgaaccttaacttgttgggagagttcttaaaataaacaagaatgggggatctgttcttatcagattgcataggacgagaatcctgctgcgaactcccgcaggcctgtataggattggaggttggccataccttttaaactttaagtaggaaacaaattgctttttaaaaaagttttaaaaattttgaaagaaattgtgggaagacagtttgctagggtatatccacattgggtttttaacaaagggaggggacaaaaatcatcatcttgtgacttttttagattggaaagttgttggaacttttacctaattctcggtgttaaaggttcttttttttttttgaaatct

SEQ ID NO: 59908 - DNA, 1081 bp, Homo sapiens
gttatgcaaaactcaggttgtattttcagccatgtacttttcataggcataagttctggaactctgaaactgaggtcatgacaaagcagatttgccctcagaaggttccagaatccttgtgacgccttcctgttgctaatggtagcactgtatctatcctagcattatatctacagagcagaggcaggacctttggcaggagacacatcccttctcctgtgatgtgtcagttagtgtagagaagcaagctggcatggacttgagagccggggtgggtatctgccccatgtggcctggctatggctgctctgttcagggagcctggggtcaggggtggcggccaccaacctgtgccagagaaggctagtctctgcatggacttcagtgcaggcatacccggcctgatggggagggctgtgggtggaaaccacacagaaaagatgcctcctcttgcttgaattgtggtgttaactagccgggaacgtatgtgtctggttgctgaaattaataccgcatttgcctgtgggcttatctttcaggattcctttgggacctcttccagacacaccctgttccgtagcctctcgagaaagtagtaaattttgctgactctgcgttattgaaatctcgcttggtcgttcattctcataaaatctggaatatgatttattgtttatatattgtaattttcacaggggtttgaagtagaaatagttttatctcaaattagaatatttctcctctcaagcatatgccaacaacacatagcaatattgtaaatttggaaatctgtgttatttccgtgttcactcatgttcaattagacagaattaatatattctgtaatgtttttagtatcatttttaaaaactaaagatatttacttcaaaatagtgaacagtaaattcaaaataaacttccttatttagtaacataacacatatattaataagctaaatatctaactggaaagcacaaaacggctaggttattgtgcagttaccagttctacagagaaacctggcttatcctaagtgcaatcattatgttgatccatatatatatatacatatccttatat

SEQ ID NO: 59909 - DNA, 1026 bp, Homo sapiens
ttctttgctctttttgaccctaactgcccatctcaagccctttgtgcctttttggctttcagtacctgttttcccactaggatccttggcgttccttcttggtacctgtcctggcttcacatcttcagccatgattacaaagtgctcctgtcccctggctggggttgaccgccgtgccgcttaggcctgcccgtcgatcagaagagtgccattatactcttagagctgtgtacacactcttttgtttcctgtgctaggctgtaaactcctgaagggaagagactgtgtattacatttttttttcggtcacattgtgtctcataatttagtagtagtacagtaaatatttattaagtggataagtgaacctgatagtatctcaacagatttaaaagggtcttagctatcctttaaatgtaaatgccatgtatacattgggctgcttaattattttctatctgtagttctcagctgaacaggaccctcaagcacgtggagatatatttgtgtctagatactccttttcatggtatttgattcatccaattaaatgattctatggccactttttggtctttccttttccgtggcattcagcctatgcagtgtggagcccttggagttcttgagcatcttccaagggcggcttcaggaatcgggttctggcgcagtctcctcagcagagctttgctcttctttatttattggggttccactttagattgcacttgggaaaaaaaggacttgtttggaaaaccaccaccctgttccatagactgatgcttttcacactgttttttgctgagttcgactcccagtcttgtgtgtccctcataaacatggctgttgtccctgcaggctgccagctgggaccttgatggcatctgcatgttaatggggtctggaaagaggtgccagcctcaggtcctcaaagcacagggtctgtttcagattcctcttctttcagctcacttgtggaggttgtgcagagagctgcccgcaagcctgaaggccctggctccgtgc

SEQ ID NO: 59910 - DNA, 1061 bp, Homo sapiens
atctgtaaactgatgttgacattgttgacttctcagatttcacatgaagcaagcttttctaccttaatttaaggacataaagccatgtattaaagatcacaccaacaaaccttagtgcctgtcgggtttctgagggagttgggcccctgcacacagccaccgaagttgtacctgcccaagggggccctgtgaggggccagtggggctgacatgcagcctgcagcctgctcgccacggcccgcatgggggcagcagctgtcctggggaaaagccacctctttctgtttctcaggaaggctcattgtggttcagcaactgccctataaatgaaaagtgtgatatattgtggtcttttacttttcttacactggtcatgaccaaatcattgaaaaaaaataataaattcatgaaggatagaatctaaggaaacgtgttgacaattcagcctccctgtgattttgttttctgaggaaaatcatatggccatctatacagtgaaataaggattttgaaccagtgtgttttgcatctcatagttaaaaatagacctgggatgttggcgcgggaagtctgttatccttataactagcagattatcggagagaaagtgacctggacagcagtgcctcagcagtagcaggggagcggggctggcgaagggcagaaacctgaacctgcagccattgcgatccacacggtgcctttcggctcctgagagtatcgtgtgcaacttgggctgcccctctgcctgaaattcttttccatttttcagagacaggctctcgctctgttgccctggctggagtgcagtggtgtgatcatagcttactaaagcttccaactcctgggctcaaggtactcagcctcccaagtagctgggacttcaggcatgcaccaccatgcccagctaatttttttattttttgtagagacagcgtctccctctgttgccccagctggtcttgaactgctggcctcaagcaatcctccagccttggcctcccacagtgctgggattataggtgtgatgcttgaaattctttatcatctaagtgtaccca

SEQ ID NO: 59911 - DNA, 1051 bp, Homo sapiens
actttgactgacgtagcaagtttttcctttttccttttttctttttcttttaattataggtctgattcttctctttctctgcaggtgcagttttagaaaataaacttgcatattaaataaagtgcagtagctgaatgcgaaagagtcacttgtgtgaaagatgaaaatcttgctttcttatccaaatcatactacatttgaaataacaaatcagtatttttcatgtgtgcttgcctttaagctgcttaaaggctgagattttctgggtaaactgagaaaactagagtgctggctaaactttaaagcatactgttgatatgctggtgaaaatgggttgtgaagagaaatttggaaacctcccctgctctatgattgggcaaacatacttgccacctcaaagaaaaaaagcctaaaaattggcatctgtgggtacaatttaccgtgaacatggtgtgatcaagcaaagctgtcttctaaagccaaagtaatctttcaagtttgcgtactccagaataagcaaagttttaggaattattattgactacaaattctgtgattatttcagttctcaaaaagtttatttataaattatagagtatacaaactaaatagaatgagattctagacttgactgcttattcctatcttgaggtccttaggattctaatttttggttgttttctcatgccagattatcaccacgaggtgtataagatcccagaattcagcaacgatgttaatggggaggccaaagagacacagcccatttttttaggtaggttcctatgtcaattaatacctcagcaaaacatcgtgaccatttgcaattagggggaaaaaaggaaattgttcaggaacgggaaatgtctgccattgcttaatgtatgacattcttttcaagaccttttattttacagattgccaatatatcccttattaacattgctaaaagttgtaatttcagacataaatgtttattagtgtctacacacagtgctaattatcactcactcacagagccagatgctgactgtgcagttttgtggctctg

SEQ ID NO: 59912 - DNA, 1322 bp, Homo sapiens
agataatacttttgtgcatgtaatggggaaagttctggaaatggatttatcctgcatagcatttttagaaggaagcatgaggaatgcacatggtatgtatatgcatttggtttgattttgtagtgctgggagaagacaagtattaaagaaaaatgtagttttcaaaagataccaagaagtgacttaaaaaaattttaaaatgtaattatatttctgatgtttttaaaatatgggaaagtttaaacttgtattttgattttttccataaagatatttgttttatttgcttaattagaaatgaaaataagttttatgttaataaccattgagtagatagatattcagaaaggaactctcatttttgccttgcccagtgttgtctaacacacacttggtctggaataagaatcacttacataggtttactctgctggcttgtggcattcccagattcttaaatttgaaccttttcaactatttgataaggtaggaaagtaacttaatatagtggcagtttttgcttttgtttagtgtgtttttttgtttttatagaggaaagccctgaaggaaagtaattactgtaaagataattgttgataacttcgagtccagctcatgaaatgacttagattttttccccagagctattaactgccattatataattaaatgtgtttttaatcctgagatttttggagaaatatgtttccatgcttaaaaagtaaagcacaggtgtttctttctaaagatttttaaagatttccttcttggtagtaatgacatggtatccattccttttattcttttgtagaaatgagttagcattttttaaggcttggtgctgatttgacctgtgaaaatagaaaggcttagtttgttaccttaattttacctcagtatcaattagttacggtaaacataaacttgaactgtaagctatagaatcatgaattatgtaatttttaccatatagcctttcttaatgtgagtttcttccttaatgttgatcttcttttatgttcttttgatcttactcctactttcagcattttggatttatcttatggtcagatgggaaaccacgtttcagtatcttttttatagactccacaaaggggcttgtaaattgctgaattcagttttcttaaactgagacttgagcaacagatttgagaaaatatgtgaagagattgtttttcctacaggttcatatgaacaagaatgcccactgttttcctgggtggcgttagtagacaggtgcttttttccttgtgtttctgcaaggttggtagctcagtttggaccaactcttcgtagcatta

SEQ ID NO: 59913 - DNA, 1015 bp, Homo sapiens
tctaaaatatttgaaggattttatactttacacagaggcatgtatttggataattagcttttattaaacccaggcttggcttttaaggtacaatatacaaattgtttttgagatgtttagttttttcctctctcaaaagtttaatagctgggcacattagctcacgcctgtaatcccagcactttgggagcccgaggcaggcggatcacaagggcaggagactgagaccatcctggccaacatggtgaaaccccatctctactaaaaatacaaaagttagctgggtgtggtggcgggcgcctgtagtcccagctactcgggaggctgaggcaggagaatcgcttgaacctgggaggcggagcttgcagtgagccgagatcgcaccactgcactccagcctgggcaacagagtgagactgtctcaaaaaaaaaaaaaaaaaaaaaaatttactgggtatctgtttcactttgtaggtcatcagaagattgagagaaagaggagaaccaatcagactatttggagagactgattatgatgcttttcaacgtttaaggaaaatagagatcctcacaccagaagttaacaaggtaagaggacagaacaaagctagaaaaataccactgtactgcattcactagaatagagtttgactaattgcattattgtaggcaacaatggaaaagtaaagtgagcagattattgctgctgaatggaagttttcattaattttttgaaaagctcatatcttaagtataacatttaatgcattttgacaaatacatacaagcatataaccattgcccttataaagaaatagaacattttcgtcaccaaagaaatttccctgagagcatcaggaagaatagcgaatggatgctgggctcaatagctgggtgatgggatgatctgtgaagtaaaccaccacgacacacgtttccctatgtaacaaacctgtcatcctgcagctgtatccctgaacttaaaagttgaaaaaaaagagaaaaaggaaatttc

SEQ ID NO: 59914 - DNA, 1049 bp, Homo sapiens
atattatagtttttgctttacatttaaggctctgatcttgttttatggcttagcatatggtttattccatgggctcttgaaaagagtattgttttgctttcatggtacagttctacaaatgtcagtgatgatagtgttgttcagatcttctttggccttgctaactttttatctacttgctttctcaattattgagagacaggtgtggttacctatgactatgtaacagactactccaaaacttactagtgtttgtttatttattataaaggatttatcattaccaaatctgtttttggtgattaacaagccaccctgaaacttgatagcttaagataatttgttattgtcttaataattaccagttctgtggttttattgggctggattgagcagtatcttgcttggggtctttattgtgattgcagtcagatgaaggctgcggccgaaatcatgtgaggctgcctctggactggtcttctaagctgatatcttgcccctttcctggcgtctcagttggaatggcaggaacagctggggctggccaggcccgctccccgacctgctctgtctgctagcctgggctgtctgactgctttctttgttgccaaaccactttcctgctttacttcccagcattgtcattccagccccacaacactagcagttgctttcagtcctctgtgtctgtaatgatcatttttcctttgcttgctgtgtttctgccttgtatgctctggttgaaatcttgtttttatactttcacatgcaattcagtgaccacatcttctctcggaatctatttttggtcccagtcagaattaattgcttccttctccatgtgcctatgagtaaacctttgttagtgtacttactgtttttcgctattattagagttatgtgcatatttatctcttcctggtgggcaaaggctgttttacctttgtatgccaagtcctgtgccgtgcatctagaggttttgaggacaaagcacaggagcacaaggtctggattccattcctggattatagtaatcaattatttggccg

SEQ ID NO: 59915 - DNA, 1044 bp, Homo sapiens
atgctttttcttgtgtgtacagtttagatacaacatattattcatcaagattctgaatatattgaggatacagcatggaagtagatagggcataagaattagtatgaactagaatttcctctttgagtgatggcctcttcttttttaggatatgcatagatgatgcccctagaggacaacatcctcctcagccttctctgtttcctacttccaggaagggtgccctttatacagttaaacccaaggggcactgaggtagttatctaggggtgggggtggagtgggaatgctgggtcttggcttctttatttctgtttctctttctccttcctctcctttagtcaggtgctttcatggtttttaaacttaatcatggtctctacagcatatgtagaaagtccagttttcttgtaactcgtaacttgttgaattttatgtatataatacaaatacaaatacaagtttatttcctctcaaatagttaactatgaaacttgatagttgttttctgagggaagcaaattatcctgagctaggaatagatgtagactagggaagttggtgacttgccaaaggtactacttcaaagcattatcatgaccaataagcagaactagcttattctatattatttggtggcattttaatcaagacatttactttaaggatgattgtattctgtttttgtgtgctagagagcatttagatgtactgaaccactgggtggcattgtagtctaagtttacccatcctttcaacagtttcttcttggcgtttgggctaaagaattgaatgccagagaagattatgtgaaacgcagtgtgcagggtaaactgaacagtgcgacccagaaacagaccgagtcctacctaagaccactttttagaaagctacggaaaagggtgaggtttcttggaaaatactttttttaactgactttaaaaatacagtataaatttagaataaatgcagtctgttttttccctatacatctatacatagtagcttccaaaatttcttatttatttttttcagaatcttcct

SEQ ID NO: 59916 - DNA, 1082 bp, Homo sapiens
ttgactctccctatcaatctcataggtgtctgatttttttaaattaaaatctccttgaggcctggctttataagcttctcttaacccttgaggtcctttagaatttatttgctttatgtttttcttgttcttcctcacagctagccaggcttggttaggaaaaaaagccttttgtcttcattggtttctgtcttcattttttgtggctgttctttaacggttcttggcaggtagggggtggggtggggggcaaagtggagcgatctcatccttcagctattcgactggagggccagtgtttcctctctgtttacacatctgttaaagaccctgtgtggtcgtcggcacatactgagcccccacttccttcagagagccacagtgctgtgtagggagtggatattgtttagggttggacgatgaaaaactacttagcccctgtcttctacatgaccccctgtggagaagactgggtctaaaggagaccaaaactagaattttcatcagtgcattgaagtgcctacctggtaattccagatctgcaacatattaatttccagcatacaaaggctgcaaaggaatgtttgccttttttttactcacaacctagctttggtttctgttttttccatggacattggtggtcctgggcagggcagtctgttaccctgtattttaatctgttttgtttgaataacagtcatggtaatattttccatgtgcccaaaaggtggacgaaaattacatcataaagggctgtgaaatactttcagtaagaatttgagccagtacaacattttcgcctttctgatttcttcttacactttcctttcaggcaaatgatgcttatcttcagatggccattggaaatgcgccttggcccatcggtgtcactatggttggtatccatgccagaactggcagagaaaagattttttccaagcatgttgcacatgttttaaatgacgaaactcagcggaaatatattcaggtaagcagtttggagagccgggaattgccctggaagtgaatattctctaattcccaaaactctaagtctggaaagcaggcagagaattaca

SEQ ID NO: 59917 - DNA, 2118 bp, Homo sapiens
ggaagtcccctctggataagcactgacactgaagccaccttcactgaataaagtaaaaacctttcaactttcatatatgttggaagacaagggtgaagtattgtgctttaattaccttagcactgaaataaaatgattgcagtttgctttttttttttaagacgtgtattaggaagtaaaagttgagctcatcagagaaatgtgggagtttagtgaagagcaacaaacttagagtattttacaataaatcctgctttgttgctttcaaggtaaatctaacatctactgggttcaagatgtatggagagtaaagacttggctttaatgtacgtagcacgtaacaacacttctttagtcatgtgaataggtctaaagtgccgatggtttgttttcttcaagttatacatgcttcacataaacttgttggtactgtttttgggctaaacttttctccctagtgggaagaaaatcgactataatgtagtgtttgccagattgtcataaatcccagattgtgtctgtaaaatgacttgctggatgatagttctaaaacttgacagtgatactccggaagtttacttaaaatttgaagttcacttaaaatgcataaagtgctttcagattttgtgccagagaacagtcattaccatattcatgaaatatctttttgtttttatttcacttccaagtgctgaatgttaattcgtgtcatgctttatgccttagtcacatataatagctttttaaaatatgatttcaatcggactccctcatgtgaactgtatacagagttcaaatatacttctggaaattcaaccacatttccattttttaataaccaccagtgagtgtattaaaggcagaagcttttagctgaaaaaaaaaaaagttgcttagctttaacaatagaaaacaggttccaaagattaaatttgctaattgtgttcatctatattgtggccaaaggtatagtgtataaaagttcatatgattaaatcaatcgtctgaaagacatttcttataaacagtaatgtgattttcacctccccgaggagtgatttttttttaagtatacctagcatttattcaagaattctggtttattttggaagctatgtaatgacctgtccttactccattgttcttcctttttaactgttctcttcccattaaaaaaaattcttcttttgccccctaggtgattagagaaaattgatgagcatactgtatttgaaatttagctaggtgtttgaggcagacccagtggtattcttgtggatagggcaaatcaggctggactcatagctcattgacagagggaagccatggagcattaaataatggactcgtgtctcttagggtagatgctagagatgtatgtcaggggtcttagggacctcagtgctgtcctgtcgaaccttttaatgactgacttggatggctataccgaaggatgggtttatcaggtttgcagacagcaagaaactagaagggatggagtgtatgttaaggtggaaaagaaactgctattctagaagttcttgacagacgagagagaagggcagagtctaaaaatacaatatttaggaaggaaggattaccataagaaaattggacccatatacccttttgcttaagcttataatttgggcagtggatataaaaaagaattagaggctgagcatggtggctcacacctgtaatcccaacacttcgagtggctgtggcgggaagattgcctgaggccaggagtttaagactagcctgggcaacatagcgagaccccatttctacaaaaaatagaaactagccaggcatggttgtgtgtgcctgtagtcctagctaccggagaggttgaggcagaaggatctcttcagcctgggagttcaaggttgcagtgatttgtgattgcatcactgcacttcagacagagcaagaccctgtcaaaaaaaaaaaaaaaaaaaaaaaaaagaaagaatttagtggactaaatttagtgtaataaaatttgtagtatgatatggccacctaataacttagtgtaggttctccagggcaagaacatagttcagtattgtacccctagaatctagaacaatatctgactcatggtgggtg

SEQ ID NO: 59918 - DNA, 1261 bp, Homo sapiens
gtattttctcagtcctccaaacatgatacataaatagtctcctaaattttagatgcataagggagaagttatctcgttacatacaatggatgccttaggctgggcatttggagcttaattctctattggaacctggttgagactggccgaattgttacatgtagctagagttaattcatttttactgctgtaagatatcccatttgtgagcacactaaagtttttttcatatgtcctcctatggatggaaatttgggttgttaccagttttttggttttgttattgtgaacagttctgtgatgaacattcttgtgtggacctgcaggtgcacaagaaaaatttctctaggcatacatctgagtgaatttgcttgggtctgctgcattttatggggacattgacaaactgataacgagttcagaggaaggcagttaagaataatttaaccatgtcataaccaacctttgttttccttattttcttagggattgaagaggttaatgaccatttgccagaaacactttcctacagacccatccaaatgtgtggagtacaatgcactgtgagatctgtgtatggtgtgttaataacaataagaaacttagggaagcaggctgtggacttctggaattaccaacaggaatgaggaaagaagaaaactggagtttccagtctctgagttctacctgatgtaactcttgattggttttaagaactttgttggccttcatttcatatctgactgcaagctgatttttctttcttgctttcattttaattagtccaaaattaagttttaaagatttttcctcacaatttaaatccatagacaacagaagggggtttaaaatgacctttttttcagttgacccgaaagttgtggttagatgattaaaaagaaacatttgaggatggacttaattatttcagtaaaatattataatttgcctattgtcttttatgtaatatttatataaaatatttttatatatttcaaaaacatgggaccattgaatgaaactttatagtccttaaatgttgctgaacttttgctgtcttgcaatagaatttgaatgtaaatattattactggtataactcaaatgttatttttcttgcatttcaaagcttgcttttatcttccaagaagtgtaaattttagtatttgtcatctctcaggacagatacaattaataggaaatagaagtttgaagaaacagagatggcacatcatagcaaactaagttcaaaacagaataac

SEQ ID NO: 59919 - DNA, 1094 bp, Homo sapiens
ttccaacaaacatcatgatagtctggtagtcaagacagagattaagtaaaacaggttttactgtttagctgagttcagttaatacaaaatgtacataaaacgttagtcctttgagactgacatgattaatgatcagtgtggtgggaaatgatgtagttattgtacacaagcacttgcaaactctttatccctatttctttaaaacaaaataaggtgaaatacgaagtccttggtctgatataaagcccctattggattcttcggatgcgtaaaagaaattgcctgtttcagccagaagactggtgaaaacacatacatcagactatgttgtgagccaggttgattttttattttattatatgcaggtgagtgttgaaactgttaaaattccaatttgttttcattcagtattagtttagttctaaatatagcaaaccccatccaggtgctatcagatgaccagttactgcttagttaactaggtgtaaagttttacatatacattaatgtcaatagtttattacaagttgtgtaaaatggactctagtttaataatgggggaaaaaagattaggttgctcctgaaactgactgtagagcatgtaaaatgattttactggattctgttcaactgtaatcaatgaaaaagatgtacgttgtagacaaagttgcagaattaaaaaaagaaatctgcttttaatttattctttttgtattaagaatttgtatagtacctttacattttgcaaaacagtgttgtcaacacttattaaagcattttcaaaatgaaaagatcccagctgcctcctggagattttgttcctttgtctgtcagcgataaatgcttgcgtgtgcactgggaatctgtaattcaggtgcttgtgtcctcagtgggctcctttattaaagtcaatctatagatggcatttttatgagcttgctagatgatacagagaagcttggtttgttcagctgaggtgaattccctcttattctagtttccttctgttaactgtgcaagataatattgtctaaattatgtattcctgctactacaaaaaaggacttgagattagaggtcaatctttatgagga

SEQ ID NO: 59920 - DNA, 1043 bp, Homo sapiens
tttgcaggacaggtgtcccagaatcatccacataccacctacatatagtaatacccatggccagtgtcataatcaagggccttttcttactttgcttctgaagctggtttatttctggtgctccaaacacaggactctcattaaaatccaccagtatatgcacagatgccttgtgattttccagctttcatggattttaaggccagatgagaaacatttacaacatccagttgttcctagagaggttagcaaatgaaatagaaagctggggatgactgatgattctcaatcgtgaagctgtgtttggtaccgaaatgctcctaaaactcacccgctctgaactactttgggttagggtcccttcctgtcacccatccctcaccactccccatggggagatcagttgcaggagaggaattcaaagggctcattcaggatcattgaagagaggctgtttttccgaatcatgatccctagtaatgactattggcttccacatatctatgattgcttcttaagatttaagaattacttctacccaacctaaatggtgatacctccctaaaatacttaaaaaaaaaaaaaaaagccttttattttcttctatagactttcctattttaaatgaacacacttttataatcacaaaacaatgcatgttatttagaataaagcaaagtcatcattgattttttttaaacttttaaaacacaattcaaaataccaccgcagtttcactatagggaaaactcacattttgaatgttcttccaggacagaataaaaatttcctagtgacatctgttagccctggggtctcacggaggacaacccgggcagctgtcgtgtgggaaaagtcccctgaggaaagcccagaggttctggctttggctgcatctgagaatcacctggtggggagctttgacagttctcagcgctcaaacacaccccaaatcaattgggcccaggcatgagtatttctgggagttcccaggtgctccccggatgcagccacgctgaagaaccaccgcactgagtaagtta

SEQ ID NO: 59921 - DNA, 1039 bp, Homo sapiens
gcagaggttgggggggcatgtagagatggttgcccactgtgaccatgccatagggatgctgagaccctgctctggggtccttcccagcatccctggaaatggtgacctctggccactgggttggtgtcagccaacaagtcgcaagctctttcacctgtgtctgatccctgtctgctctctgcctttcttgcaccacctgcatgtagctgccttacctcaaagccagagaagctcgacaccgtcaagtgaaattggagccacccccccaagcagcccccaccacatcctaacctggcagactgggtgagttctccttctatgttcttcactgtgtcagctcgaaagagtgtcatagacgttcagatcctggtgacataaggatatgtcagtaaatggatgatgagggttcatcactgggaggtgtcttcctttcaagagaagccccatgatctgctgtcacctctgcctactccttttcctggctgtgcctttatagaggtgaattgtctgtgttctcttaaagtaggcggtggtccttgggatgtggggagatggaagcacgaagtgggactgtgcttctttggtaagatttccagacagcatttcatttcggtttggattatactcaggctgactcaaaatgccaggcaagaatgtcagggggagaaagagagctgatgaagacagcaaatacactggggcaggtgaaacagccagtgtcttaggatgtctcagggtgcaagaaaaagggctgtgtcctggccaagcacttgctctttctcaacacacaaaagagatcaggtgccctgaagccttcagtggaagctgcacacaacaaaattaatgaaaccgaaaggcagctccctttgatagcttgacatgtttgcatacagcattatcatctcggcgccagtgaggctattctgaactactggagggtctggcagacacaggtaacccgcctggccctacagcacctgcctcttctgttgcccctgagacatcatctctaagtagatgttaggttctgtcaacatct

SEQ ID NO: 59922 - DNA, 1085 bp, Homo sapiens
tagggccagccctctgttgcagtgctcctttgctgggagcacagaatgaggatgactgaaattcacagttaacctgcaaacgttggtattgcaatagcctaacaagcttggacccagaagataggtcagctccctcatttcacagcctaagaaatggaaactgtaggatttacaaaccatagtttcagctgggtattttactggatgctgctaattttttaaaatgaatgttcagttatttttttccattctcctctctctctgttaaattacatttgcactcttcaccgagtgccagtgagccatggaatctagccagaaagcaaagctcttccagagactcccagccaccatcaaaaggtgcttggttttcaaagagcttcaatttcaatgctctctgaaatgaactattttatttctaaaatttctaagcctgatgaaaagttctccaagcatgcattttttcatgttaaaaatcacatctaattctctataacagtccccagagatgacacgtttatcctgcagtctgcaatgtggcattatttcccgtggtctcctgggacatcttttatgtaaggaattcatcactgaggatttgtcaaggaaataaatatctttttatcataaagaagaattctaaccttttcctcatatttattcctgggatgtctgccaaaacttttccttacagcttttactgatctgctgggaatataccgccttcttcatttttttttttttttctctaaggtctaaagagacggattgtcatttcccttctttagttctagaacaaccgattcctttcttctttggagcattgtttgctttgaagtttcccctccttccagagaggaaagcaccccttctctgtcttctgaaatcagtggctggtcatcaatatcccctctgtgtcaaaaacagatgagccacgcgtggctcctgacaacgtcctcctggcagaatgtgcgctcatatccggtgctgagtcgcccagggtcttctgaacaattggagcatttctggctcgcggctgaatgaggctgaaagaggctgtccttccatgtgtctgccggccggga

SEQ ID NO: 59923 - DNA, 1067 bp, Homo sapiens
atttgtaaaaatcattccacttgtaaagttaaccatccattagtcagtaagagctgttcccactaattggtggactcctggggaaagcaacatagttagaggttagagtaatggaccaggtgcccttgacttctatttctggttccttcacttacttgctgtgtggccttaggcagttttccttaatttctctgggccttgtttcacccaagaagtaaatttcccacttgatcttcttgagggatgccaaaagatcaaaggaacgatgtttgcagggctttttaaagatgcttaagtgacgtgcactagaaaccccttgatttaataggtatgaattaatacattctttgattattggtagaactaagtattttagctttttaattagctccttggatataattggccataggcgttacacaaatccctaagggaaccggcccagtcatcctgatgatcattatgggtgcctgctgtgtttttatgcggagaggcagagtgtgttggcagctttacatggtggtgggttatgacggctgcactgagccagcgcaagctcgggaggctcccctgaggtggcgcagaccatcggggctgccccgaaaccagctcagtcagagcccaccttaccctgtttacaaaggggaggcaaggtggagcatctcctgtttgttgatttgattgttgtgtttgctctgccagcctcagagtgaggtatttaacaggcaggacttctaagcctcaagggcccatgggcagaaatgccccagaccccatgaagaaaatgatgcttttccagcaagctgcaccccggccctgggcaaggggcagctgcttccaccctcctggtccctactgccttcatattcctgctccctagctcaccccctccctcctaagtgaagagaagtcagatcaggctactgttctgacatgcacaccttctcttctgttcctgggacccttttgtttttgtgtttgttttaagaaggagccttgctgtgtcgcccaggctggagtacagtggcatgatcctggctcactgcaacctctgcctcccgggttct

SEQ ID NO: 59924 - DNA, 1030 bp, Homo sapiens
gtcttgctatgttgcccaggctggtctcaaactcctggactcaagcagtcctcccaccttggcctcccaaagtgctgggattataagcatgagccaccacatccagctcttttttgcatttttctaaaaatggaatgcagccacagtgaactgtcttaaggtgttttataagttggcatttatcatatgtcatgaactctggggaaaatgtcgaagtggaagacattgagggaggaagctgtgaacttctagaacattcgttaggccacagccttgcaagctctgggggtagagtgaccaagtttcccattaggggagctttctgattttcagccacagagtttggccagattgacagggctagacacccctaagttattgcagatgtttataaacagcagaaaagcaaacagaacatttctatagatttgtcctcggggaaggatgaagggccatggatcccttccagaatataatggatttggacaggtttcacgccttggtgatttcttgttagatttttttgtgtgtaaccttgccctggagcagagctagagaactcactgcaggcttcagtgaggaaatcaaacctgtggctgtcatcagggcaacttgtttgccaacaagcaagggtttggtgggtaaaacgatcccttcctcctggagttccttccttccccaaatatactttagatgtgatgggtgtgagtgaaacccaaactcaagtttcagctccttcagggagccactaattgcctttctcatggtttcatccaataaagttgatctgagaaaagtgcctttcacattgaagccagccctctgtgtgctgatggaccaataaatcaaatcccttttctcagggaacttaccatgacgcagggagagaagatccggaaattcatcagtgtgggccctcgagtgtttggtgaattgaatacttgctgaaactatgcctttatagcatgtgcttaaaaattaccgactgtacttgggattggaattgagttttcctgaacactaggagttt

SEQ ID NO: 59925 - DNA, 1012 bp, Homo sapiens
tgtcttcccaccaccctagattggttcttatccacaccgttttggtctttgtgttgagtcctatgagaacatccaatgaaatgatccttaaattcaatgcatgttaaataggcgaggtcagaaataataatgcagctctttccatcagattttgtaagcatgtgcaatgcctggggcgcttgaatctttaatcattttccctcccactggccacatttcacctcctcctgtttttgatatcttcactgggagatagatagtcaaggtcaggcttttcacccgaaaagtcaccacagttaaaggtgccagttctcacttaacccgagaacaactatggtgagagagaagttgaatcaatcaggttagatatttgatggtgctttcctgtggatatttttggtagctttcctgtggatatcagttatgttacagttaatgttcaccaatgatactctcctgggaccacataatgggctgtgtaaaatagaataaaagaccttccttcgtgttacccgcctccgcgcaggtagagacatcttcgtttagcggatgaatcaaatagcaaactaaaagctatgttcacacttaaaagtgttattttctgatggttggttttgagttgcgcatcagataagcctctcagcagatgttaaatattagcccgcagtcgaccattggctgtaacataaggtgtaaatgtttgacagaaaagcacacatacaacagcacgctaacaagtgcaccccaaggcattcaggtgggaatggaaacgcacagagtgagagtagaaaccatctattgtggaaatcctggacagtgtttctgtgaagccatctgtacactgttaaatgatttacattctgatgggacctgctaatcccggaactgcaattccaaacattcttccgcatcccagcaccgacagcctctatcaattccaaccgccgtaaagctctttcagctggttaaacgtaaggaattattgtccccaattcttccgtaggctctcatg

SEQ ID NO: 59926 - DNA, 1033 bp, Homo sapiens
attctcgggtcgggatcatctgagctagtttgggtgggctgttgcttgtggagtcaggaaacctcttagcaaggtctgcgctccatctagagtgttcctttagactcaaatagatgccctaagattcagtcctgctaagtgtgcccccaaaacccgtttaaaatgtaggtctgattatgattcagctgtggtgaggccagcagatgaggagaggacagacattgaaaagattgtcactcagttcctgggagaaggggccacaccatgccacgcagggccatgtgggaggcattggggagccgggaaacaattgggcaagagcattttttgtggtttctttggggaggaacgggcaaggctgggagagcaggcttgggattggctagtttaaataatttcagcgggctctgcagcatgggggctgccccctagttgtctggtacgtgtccctagggtggtgagggcagggaaatagtggccctgggtgtgagagccgagaggtggtgggaggggtggaccctggatccatggtgacatgtggaagtcttggggtctggaaattggctaaccctggcaccagcagtccctccaggcccagcaaggtcacagacatccaagcatcataaagccatggtcaatacacagccagactcggaactgtccatgcagaccctctgaatccgagacatagccttcatttatttccctggttacccagagacctggaatgttctttgtgaaccctggaagcactccctgctccatgctggtagttaaggaaatgcaacattgccacctactgctgaggctctcctgaaaatcagaaaaagaagccactttttttttttttctttttttttgagacagatctgcctgcctcggcctcccaaagtgctgggattacaggcatgcccggccaaaaactatgcccggccaaaaactatgcccagccaaaaactggattaaaaaaaaaaaagaagaagaggctggcctgtaacctgagtactttgggaggtcagggtaggataattac

SEQ ID NO: 59927 - DNA, 1916 bp, Homo sapiens
aagatggggcagattggggaggttagtttttacccactatgaggatagcatactcatcaaaggctatacctcagatcttcagacacagaggagcttctatggcatcagtgttgggcgagaaagctgacggcatccaaaccgactccccatttgcctcttgccaggaggatgcagtaagcagacaaccacacagataatttcatgcagcactgtaaactcggccactccgagcataacatttcccttctttgggttgcagagaaaaaatgcctgtcatcctaatgtttcatgcttattccatatagcactttgagattaccaagtgaaatctgtgcttccaaatcctctattgctctgagtagatcatacgttactcacagtaggggagggcaaacagtcaagagtgacatactaggaattaatatttgagacgctcatccctaaatccacaggcaatttcctgacacccacgtctttaccaggtagctccttaagtcctgaaattccacttaagagcagctggaaggtgacgtgagcattcagccccagagcatgcctgcagccttggttgtggacacatgcaggttgcatagacagattgccctgcagttcagcccacagacagcatcttctgctctgtcttccaaaattgtttccaccagttggaaatgtactttaaaaaaagcctttatcaggccggatgcagtggcttacacctgtaatcccagcactttgggaggccaaggagagtggatcacttgaggtcaggagttcgagaccagcctggccaacatggtgaaaccctgcctctactaaaaatacaaaaaaaaaaaaaaaaatagctcggtgtggttgtgcacgcctgtaatcccagctacttgggaagatgagacaggagaatcacttgaacctgggaggcggaggttgcagtgagccaagatcacaccactgcactccagcctgggcgacagagcaagactttgtcccccacctgaaaaaaagaaaaaaagccttcatcaaaatgagaggagccaccctcatcgcagtcttggaaccttctggaggacgctatagccagatatggggggcggagcatgttttatggtcagccgaactccctaagtctcgttgtcatatccttgctccttgaaaattattttcttcatttattctctgacccgaatgtatatttgggggagtatgttgagagcagagaaagggaagtgtgctttagccatagtgagaatgatttaagtaagaatttccggacagtgagagttgctagatggggtacaggaagccgttagtaggaaagattctggactctttctcttgaccttcataaaaatagagtggattttcactagaatggaatggctgaggtgtggcccttccttatttggttctcttgaggcttgtgagactgtagatatcctgtctcacagggagcctgcccagtgccagaaaaaccgacctgaccttctactgctagacaggcttcgtttcagtgcttctccccatcactttagatgaatggttggccgaatttcttccccatccccactttttgggttttttttttttttttttttttttgagagagtcttgctctatcgcccaggctagagtgcagtggtgcaatcttggctcactgcaacctccacttcctgggttcaaacgatctcctgtctcagcctcccgagtagctgggactacaggcctgcatcaccatgcccagctacttttgtatttttagtagagacagggttgcgccgtgttgacgaggctggtctggaattcctgacctcaggtgacccacccacaacagcctcccacaaagtgctgggattacaggtgtgaaccaccacacctggcccccacttttttttcaggcagggtctcgctctatcaaccag

SEQ ID NO: 59928 - DNA, 1097 bp, Homo sapiens
aaagctttgagaaattgttctgtgtccaattagaatttttgatttgactaacagatacaacataacatctttatttctgtaactgctcactaatgatatgcaccctggatatatttagactctcgtttgccggggccattgcactgtaaggtgctacgttactgtctgtgacagcatttccaccaagaggcttgatgaggatgggggtggggagacttttgggtttgggagtcctctccctcgctctttccacccctctcaggcctgaccttccatgcccaggcttacatggggagcagctctaggacttatcccctcctgggagctcctgacactggaccaggcgcccaggggcagatctccatgaagtgtctgggatggttcatggggcagccagccagtgtcaaaacctcccccaggaagaatggaaggagggatctgccagcacagctcatgcaagaccaagaagtccctgccagcgacattccagcagaaccctttccaaagtacttggttatgtaaacagaaaggcggtagcctctagcccagatggactgctccgtgtggatgtcaaagtcactgtggaaacttccccctatggaagcactacgggtccccaagctctccctgcagctctgtattggaatggggagggttggggacttctttttgacctcatggaactgggacctccgtgtaggactggtggttctctagttctcgagcgtccctgtttctcagatgtgtcttgctccgatgccactagaggtttgatctgatttaagggtgtcactggagtcagctgtcggtgtggagtgcttcctgctaaacgtggcaggacttggcatctgagcatgtggaccttggatttaggcacttagtacaggagtgctttgtatccaacacaggtttagcaaagcaggtggcctggcaggacatactaacctcataggtggccattttcctactgtatgtcaagagccaccaaagacccaagggtggaatttggaaaacttgcaggtggtctagaatactattttctgctccacacctccctgggaggcaatggagattatgactatagtagtatacaaaga

SEQ ID NO: 59929 - DNA, 1047 bp, Homo sapiens
tttagcaaaggcaaatctgactgtgttcctcccttgcttgaagacttcccattgattttagggcaaagaccaaaatccttaacatggcctccaggcccatcatgctctggcccctgcttgcatcgccaactcctcttgtacctctgcctttgttctccttgttccagacttaccagcctcctctctgctccagggctttcccacctaccaactgcctttcctcaaagttctcattctcccctttgtgcttagttaactcatgttggacccttagatcccaacttccttagggaagctttctgaactgtgcagagcaggtcaaatcaatctcataacacagttttacttcttctttgcaacattaggtaaattaatccttgtgtaattacttaatgtctctcttatgtatatgagctacgaagttgggtataatatctgccttgttcactgcagtattctccatttagggcttggcatacagtaggcactcaacacatatttgttgaatcaataagtgaacttcccagagttcacatggtcaatatatggcagaaccaggactcaaatccagtttgactaatatcaaagtttatgcttttaatcactgtattctactattgtcctctatgccgccaccatgataatgtcttaaagacattaagagcttgagcacaaatttactgtatacagaatgaacctttgtgttcttttcaatagaatgttgggcagcagctgcctctcaagctgactgttgctttttacctgttctcatatgtgattctactgaagtgagccaggaaaagagctagtgataaaaatcaagaggtctaaaataattattcttagtcaaaaagaagatagattaaaaattattcttagccaaaaagaagatagattaaaaagagtggaattttaattggataacctagaagaagtggataaattcctagagacatctaacctatcaagattgaatcatagaaaagtagacagtctgaagagaccagtaatgagtaaggactttgaatcagtaagaaaaaaacaaaa

SEQ ID NO: 59930 - DNA, 1102 bp, Homo sapiens
tgttactcgtgggtgatactgtcataaaggggttgaaagtacttgttagctgtatatgtcagaattgattaaagagaaccaactattcttgtgcaagggatggtattgtagttaattatgacatttggagaaactaatttctgtctgtcgacactatctctgttccatttagacttagagacttacatgggcaatgcttgactttttgcattcagcacagaaagttaagtaatccactgtggtaaaatattaactaaatttatatgacttcttgactgctgtaagtagagaatatttatcatataagcaccattttcctgaattttttgttactacatattttatcttactgtcactattgtgtaaaatctttgaaaggaaaatgaatactgtgtaatagttaaacccattcataggttgcaatagagtgtcagccaaatgtgtcatacatcaaatcttcagcagcttttgcataatccaggagaattgaataatagttgaagttaattttgccagtgaaatgtagggaaagaaaaatgtttgaaatttaaattattcagatagctaaattcttaatcctaaaatttaaaccccttaattctgtctgtagtgttatatcaagactttttgatagtcatgaaactgagtaaaactttattcagattacttaaaaacagcttttcctgtggttaataacacctttattttgaacagagtactcttaagcaacttatattgtgctgattaaagatttaatctgtgcatattttttatcctgttgtttatttagttttgataactgtgaaataaaccataattaaatcacaaaagtcacctgcctcttttgtttccctggaaatttggccaaattttttttaacggaaagttctgctaatgaaaattgggaaattggagacatatattattttgactgtgtgtcctctgtcattaaagatggactatactagctgggtgtggttgctgatgcctataatcccaccactttgggaggccaaggcaggtagacggcttgagctcaggagttcgagaccagcctggccaacatggtgaaaccccgtctctactaaaaatacaaaaaatt

SEQ ID NO: 59931 - DNA, 1036 bp, Homo sapiens
tgcctcggaccctgggatgacactttgaggatcaccatgctgtgcatttgtacacacagacacacacgtaggcatttgttttccaaagtaaagggcatactgtttggagcctaatgtttttctcctatttagtgccttgtgaatattttccctttcattatttattctaataatggatgattttaagctgcactgtattccattattagatatttaaatggcttccattttttccgctatcatagaccatgccggaataaatatcattctgtgtacacttgtctacatctctgttgatgtctttagggtaaattcctaaaagtggaattactgcgttcaagggtgtttcacggtaaggccttttgctacacattgccaacaaattcttcagagagtagcagaaatttgtcttcttacaagtagtctatgagagtagatgctgattttctaaatgtaagggaataagaaaaacttcatgattaacttttttcacgtgtatttgggctttggtgggagtaggcaagaagaatatccgtggatttatagagtaagcaaaagtatgtcaggaaaaactaggaagaatagggctgaactgtggcttgatttcaggagagtttctgggattcagacttgaattaactgaatgatgctgtaatgtataagtgttggtataggtgattttatgcaaagaagaataaacattggcttacttttatttatcgtatacggtatgggtgactactgctgctagttcaagggtcttgattttttaaaaatgtgtttcttgactgtggtagctgggagccccaggatacagacttttggttaaataacatctgctccactctgccttcccgtgtgggcctctctaaccctgggccaagcagttgagtctctcctcggggtgcctggagtgagggtggatacagcttgggtaattcagcatctgtacctaaaaacttactcaatgtaggcttcatgtaaagaagtcagtggttcttgggaacaggggtgagtgaatggaggcgaaaggtgg

SEQ ID NO: 59932 - DNA, 1048 bp, Homo sapiens
ccaaaaggcctaaacttctctcatctttattgcttattgcagcttttattatagatgctgcgagtactcagcacttctaagaaactccgattgctcttgtttccctttcagcttggagctgggatccagagtagttaactgaggggcctcgcaagccccttgtcaggaggatggcctgcctttgaaggcagttgactcttgtatgtgtcttagtctctttaggctgccataacagatgccacagactgggtggcttaaacaatagatgttggtttcctcacacttgtggaggctagaagtcctagatcaaggtgccagcagattgggttcctggcttgcagacagccgtcttctcattgtgtcctcacatggcattgaggctggagagtacagggagagagattgagaaagaaggagctctggtctcttttcctcttcttataaggacactgatcccatcatgtgggctgcagcctcatgacctcatctaaacctaattacctttcaaaggtcccacctccaaatactgtcactttgggggttagggcttcaacataggaattttggggggactcagcattcagtcggtgtgtgtgtgcgtgtgtgtgcgtgtgcatgtgtacttgtagaggagggttgattgtccacctgacagccgttgccatcccctcttccctgctggatgccaatttgcatttttctggcacgttttgcggctagagtggtcatgtgacactgttctggccaatgaggcgatggaggaaggcccccgggggcttctgggagtgcctgccttcgcagctggagagagccctcctcaggggctgtctctgccttcccttcttcccatgtgtatctggggcagctgaggcagggctaggagaagagcccaggttcctcctgccacctccaagcgatgaagcagccctgggccaactccagcattctcgtgtgaactgcagaggagccctgcgcttccagctacttgcagccaggtgctgttacctacgccccacgcaccctcacagacctgtgtacaagggcacaa

SEQ ID NO: 59933 - DNA, 1054 bp, Homo sapiens
agatggtgagagttgggaaacaagcttaggacagagactgaccacggagggacccgtgttggattgttgatccgagaaggtgatgttgaaatacagactgagaaggtgaggaagagccaggggtcaggagaagtgtgggaagggggctggcttgggagggtcatgcgctccaggtggggacatcatgtgcaccaagacatgcagcccagaaagagtttggtgtgttccaggaatgaaggcaggcctgtgtggctaaggcgcagggagcaaggtggcggagagactggcatgaggcatgagaagcaggcccaggtcagatcaggtggggagtgagggccgctgccagggcattggagaagctattgagaggccctgacaatcccatggggggaaagtccattcttagtgcacgtttcctgctttgaactttttctattcaataacgaaaacctgggtgctatatttgttttagccacaaaactatctgggtatctttgagaagtggcacttgctgaggtggccttctaaatctttgcctgctgttccatggcaggatgccttgtgaagccaggtgtggcttgtggcctagatggaccagggagatctcaagtgaggggcagtagcacggagcacacagtaggtgtcagtcaagtctaaacgttgcgcacggctttgttttgtccagagctgagctctcgttaggtcggggcttgacaaatatgaatattgtggcctgggctgctctctggcatgctgagtgctgactggtgtatttcctttttcagccagagaatcctggtcaagccctgaacagtccagaaactctgaggtcagcatttctagatcttctgtgcatttgggaggagtcaccattgatgactttatcaattgtaaatttccgatatcaaattactggccttccagtcagtcggttctgatgacaggaaggacgagggctctggaaagtcactttaagctagtcattgttagtcaaatagtgctgtttttgtatatcgagtattgagaagggaatgtgcttggtctgtcttctctc

SEQ ID NO: 59934 - DNA, 1040 bp, Homo sapiens
gtgtgcgcatgcacatgtgtgtgaatgtgagcacgtgcacgtgagtgtgtgcacacacacactggtggggaggcaggtgatgatgggttgtgtcatgaatgcccaagtctggcggtgcatttaatggagtagtccagggaagcaggaggaaactgaggaacagggagggcaagcttgaggaattaaggaattacctggactcacggggaggagctcaaaagacgaattcgatctttttctaaaaacattttaaacagtagtttgcctgactccaaatcaggaagagacagctttacctcatctctcctgcctcctagcctgtgggctccattagcaagggatgaactatcgagtaagagctggcactctggcatcaggtagacctggctgggacctggctgggtcctggctaggccccggctaggcccctccaatggcatcaccatgggcaggctgctaatccccctgggcctcagctactcctccgtcaataaggataataatacctccctcgcagaactgttgtgaaggttgagatgaaatatgagagtgtttaaagcagtgcctgggatgcagtaagcacttcgaatgttaaccagtagtagcagtcatatttttgtggattacctgggaaccaaaccatcatcattgatataatttctattaccagttttaaacagttaaatgacaaagaatcccattttaatcaagacattacagtagagcacagacccaacctggttgggtacttagtagggagaaatagaggctagaaattaataattatgcccaataccagtgaacagctgttttcgcactgtgaccagtttagtacaaataaaaatgtttatagactgcatcttttctccatgcacaatttattgaggtatttcatcactttaacagatgataattgaacatttagaattcctagccttgaagatccagcgaggtacaaaccagaaatggccctggcccctaggtagctaaatatctagaggggagaagataaaaaacacacatggggctggcaataaatt

SEQ ID NO: 59935 - DNA, 1048 bp, Homo sapiens
caggaaccgcttctgagctgaaatccagagatcctactcaccagaagcttctgtccttcagctcagctgacagattacaataagaacatcagatttttcccattccaggtccctttccaacccctctgctcctgctggactttgcctctgcttttgaattccaacatttcagcgatgcgcttgtcaacgcactggaatcccttacttcactctcctgggggattgggcggcccacccatgcctgtccctggacttctgagttctgccagagaaagttacacagttgcctctctatgatcctgatctctgcctcaccagggcctcaacactgcctggaaatcaaattttcctcatcaaccctcttcctctccataatgacttttccaacctcctccacacttcttaaatctctaggttcatactgagcccatccctcctcctctcatttcactctcggcagattatctttccacagctcacgggacagtcgtgcgaaggccattctctgaccttcccactgcccctttgcaaatccgcctgctcttgggcctgtacttttctcatttttctgtttatagtgaaagaggaatcttatttattctctagaaatccatttctgcaccaccattctctcccacctccaatttatttatttttatttatttatttatttaatttgagacagagtctcgctctgtcacccaggctggagtgcagtggcacgatcttggctcactgcaagctccgcctcctgggttcacaccattctcctgcctcagcctccaaagtagctgggactacaggcgtccgccaccatgcctggctaatttttttgtattttttagtggatacggggttttactgtgttagccaggatggtctccatctcctgaccttgtgttttgcccgcctcggcctcccaaagtgctgggattacaggcgtgagccaccgcgcccggccccacctccgatgtaaacctctctcctggtatttccttctcatgagcatttacaagtgctcaggtctctcctatcttacgacaaaaac

SEQ ID NO: 59936 - DNA, 1061 bp, Homo sapiens
taaaatttgatcgtcattgtttgttcccaacaatgatttgccaggaatggtatgcatacttctcttctgccccattcttccttgttctaatctcttcttaaatagttctgtttttcttttgctgaacaggaattcccaagtaaataattctttcttgtgaccgagggtgcagttggtgaggtcttcttgccttctgaatggccagtagctgcttccggactccggaaaatatgtcgcaaatgaagactgctatcactcactctataaacaggaccagaaagtgagcaatttggcaaggtcccctctctcggcaagtctgatggatctcttttttttccccagtgaaggcttgtcatatttataagccagtagtgttatttcagaatctccgaaggaaatgtgcctccgtgatagggaagcaacttgtttattctagacttttcttcactatatttctaacgttgaggaaattactcaaagaggtttggcagagtgaagacagatgagtgagactggattgagtttatggaatgtattaattcaactgatgtttgttcaactccaaatgaaggatccagcatccagggcacagataagtgcaggatattcgccctcagggaacttcctgtcattagggaggctggcacctgcttgcagttaacagaaatgttagcgtagttgctcattctgcttggaagcggagttcgttaccatttcatttaatgaacttttccaaatggaaagaaagctttgtacccgcacgccctggctctggatgtggaggttgagagccctgtgaagctcttatttaaacatgaaaatgggtgtcagctttaggactaagttccactgggaagaactgggggaagggagccatttttaggtggcattagccataccacctttaataaaaaacttcgtgtaactcaatgtatttcctggctggctgcagttacagaaatattaactgtcctaaaatgtttatcttaaagagaaacgacttcagtattagagaatgcacagaaaactagattataagtaaatacttttgttcacattgg

SEQ ID NO: 59937 - DNA, 1196 bp, Homo sapiens
ccgattgcagatatgtgcgtgctcatttgcaaattgcctgtcctcctcctcccctggcccggccgctagaacctacatttcatagactttgggttttgtatctgctgtttccagcagcagagacttgctttagttcttgctctgatttgctgtaacttcaggtgcattcagccaggtgagattgcttattgaacttaccaaagcaacagagtaagagttctggaggttttaatcactgtgctctcaataagccaacagaaggaaatgatctctgggaagaacgttctgcagaatacattacgttccatcttggtatgaagttaggatcctgggaggccaagtgtgaggatcctgctagcattttctttcagtgaattaaaatgatttaaagagcagtgaattaaaggctaggcataatcctatgtctttggcctttaacagttttttttttttaataaaacacagctatgtgttcagtatgcttttatttggcatgaatgaataaaggcttttgtccatgctgtagtgcgctgttccttgtgtaacattccatgtggaaaacttcttttagacaatcataccatgatattttttcttttccttgagaagatggatacttatttttttttctaagaatgtatagtatgtacctttttatttttggtcctggcccccaggaaactcaaaaccacacttaatacagagatctggaaattatattagcccttgtgtgtaccacttgctgtttcttttgtagggtggccttgacttacttacttttttttttggcacggagtcttgctctgtcgtgcaggctggagtgcagtggcatgatctcggctcactgcaagctccacctcctgggttcacgccattctcctgtctcagcctcccaagtagctggggctacaggcacccaccaccatgcccagctaatttttttggatttttagtagagacagggtttcaccatattagccaggatggtcttgatctcctgacctcatgatccacccacctgggcctcccaaagtgctgggattacaggcttgagccaccgcacccagcctggctttctaatgttattttatttacctagttgaatgtatgactttttttttttttttgaaatgaagtcttgctgtaacacatgctggagtgtaatggcatgatctcagctcactgcaacttctgct

SEQ ID NO: 59938 - DNA, 1116 bp, Homo sapiens
tgaggctgaaggtcaggaattgaactagcacatgaggaattcgggtcaggaggtcaccagtaaccaggagttgacagtgatgcggactcagtgcccttgcccaggtattttgttgcttgctgggttcctgtttatgcaggagctgattgctggctgggagcacccctgcacgcccaagcaagagggatccagggtcagcagttagtggcaggagaaccccctgagggtgccttgtatgcagggagagtgcatttcctgtttggtttgggacgagcctggtccaggtgtaattagtaacagaggcttcctccttactcagcaatgactgctgtggtcgacaattaatatggtcaccctactcacgagtacttggttgcagagaagtatttgttatgtgtatgagtgaagatcctgaccaaagatttgaccacacaaggttctgtggtgagtccatggtttacctgtctcatgggcggagcttggctgcctctctttgtgtacttgttatttgaattccaaagaacgttctgcgccacacttttcagagctcttttctcccagtgtgtgttttagatggccgtctgttttgtcattgataagctaattctgtaaacctcagggcagctgcacatgcagcatctgtaattgcacctctgtaattggctggagtgctcgagagactgtacttgcttttcctggcgccccccagggtccgtggcttcacctaaaggcttggtggcagggactggtgagagagggaagaggaagagaggagggagaggattcttggtcttctactcatcagcctggttgacaggggctgggaaagtctgattcttagttgactgccgggaagatggggcttgcgagagtggagggggctgaggtggggtccaggtgttactagtggagggtgtccaggttcttggcattttgaacaaagaattggacaaaacgcacaaacaaagcaaggaaagaatgaagcaacaaaagcagaaatttattgaaaacaaaagtacactctacagggtgggagcgggctgggcataggggctcaagagcccggttacagaattttcttgggtttaaataccctctagaggtgtccctttggtt

SEQ ID NO: 59939 - DNA, 1046 bp, Homo sapiens
tttacaaaaattgtacagtcttatgaaatcttgcagtataaataatcacaggtggtttgtgagtgtttaatgtagatgtatcaaaattcccatgtcctggaggaagttgagaatgccatttgtgcatatgcgtatgtagagggggcttcataatattctttcccttgtaacttgattctatttgaaacacataaaactggtcagggttctttttcattttttctttttttagtggatgtgcagggtaaagtagtgtatcggaaagagagaggcctagacttgaaagattttcagacttttaagcctaagcttgccatgaatgagtatatgacttttgagcatgtcattatttctgtttcccagcgtcgtcttctataaaatggaaatagtcacactcacctacttcttagagttgtcttagggtgagatagaagcctgcattctttatgcctgcttgtccttctagggaatgctctggaattggaacagcatgtgggccaccccttaggataggtgactcttagaaggtgagaggaggcagggcgtcgggtgtgcaagagaatcagctacatcatctttcaggttcctgctgcggtgggtgaattctgttattctgtgcccatggaatgggaggtgtcatagaagtcatagacatcagacgtagagtttgacctgagtgagtcagttgccctcttggggtttgcatattcttacctgtgaaatgcagtaataatactggtaatattattattatcatcaatgaacagtttttaatcatcttatatgtgaccaggcatggtgtcaagttctttatgacatttcttcattcattcagcaactatttaatgaatgctgccatatgccagtcatcgttccaggctctggggatcagtgggatcacgggctagcatggtggctgggacagacagactccctgcctgcatggagtttatatgctagtgcatgacagaaggtaaacagatacatggatgaggtgattcccatggtcagtgctgtaaagacaactaagtcagttcagggggctg

SEQ ID NO: 59940 - DNA, 1044 bp, Homo sapiens
cagctctctagagcttattcctcttgctgaactgaaaccttgggcccattgattggtaactccccattttcccccactgcagtccctgacaaccaccattccactcttcaagtctatgagtttagctacttagatgcttcatctaagaggagtcacatggtatttgtccttctgtgcctggcttctttcacttggtcctccaggttcatgcatgctcgtgcttgtggcggaactgcttcttttctaaggctgcctggtattccactgtatgtatattaccacatgtgtttacccattcatctgtccttgatggttaagctggttccacaaaactcctagaagaaaacataggggaagaggttcaggacactggtcttggcagtaattacgcggctgccacgctaaaagcacagtcaacaaacccaaaactaaaccagattgcatcgaactaaaaagcttctgcacagcaaaggaaacagtcaacggagtgaaaaggcaacctgtggaatggggaaaaatgttggcaaactacatatccaataaggggttaatatctgagaagtttaagggatttccgcaaatcaacagtaaaaaaatgaagaacccaactaaaaaatgggctaaggacttagacatttcaactcggagtttttttttattattttgtctttttgagacagagtctcactctgtcacccaggctggagtgcagtggtgccatctcggctcactgcaacctccacctcctgggttcaagcgattctcctgcctcagcctcctgagtagctgggattacaggcatgtgccaccacgcctggctcacttttgtatttttagtagaaatggggtttcaccatattggccaggctggtcttgaactcctgacctcaaatgatccgcctgccaatcctctcccaaagtgctgggattacaggtgtgagccaccgtgcctggcctcaactcagagtgttagtaatgcagccggcagtgatgtcaagatgcggacacagggacacttggaggatgggagctttgtcccttgtc

SEQ ID NO: 59941 - DNA, 1045 bp, Homo sapiens
ctttgactgttaattgtttaaaatctcacaagtaaaggtggaaaagagttttactgattttctttgggaatggtggaggggtagaagacttctctcctgatggaaagaggaaagatgaggaatatggcttaatgttattcctaacttaccttctgccccttccctccagaattctgtgtgcaagtgttttaaggaaatgagttgggagtttgggtaagtgagatctagattttgggcatttgtagaagtccccggctatctgggggagttgtcactcttctttcagcctagagaaggtgactatgggtgctagtgtgctgtggggcacactcgggggtgggaaagctgctgtggagtgggatgtcctctgtgtgcatcatggggtcgagtgtggccttgggatgacctcatgagaccttgctgcatttccttgtatagttcccttgtctaatcatggcctatttttgcttttccttcttgaaacaaaccatttttctccccttttcctttctagttcaagaagggctgggcctgacccatctgaagtttccctcaccctaagtacttaggaaacgtgctgaagaggaatggacagtcttacccatctcatatccctaattccggtaccccatcagtgaaagaaagaaagattatttggcaagctggattagattgccatttagttatggtgcatggacaaggggctattttaaggttgatgggggaggctttgcttgtcatttactctccattcaccagacattcagtgcccgtcatgtgccaggcactgggtttactgctgttaacaagactataaggcaggtgaggaggatatttaaagaactgggctgggtacagtggcttgtgcctgtaatcccagtgctttgggaggctgaagcaggaggactgcttgaggccaggagtgtgagaccagcctgggcaacatagtgaccctcatctctacgaaaaattagctgggtgtggcagcgcgctcctgtggttgaagctactcaggaggctgaggcaggtggaatgcttgtgacca

SEQ ID NO: 59942 - DNA, 1037 bp, Homo sapiens
atatatatatatattattttttttttcagattgttggattggcagcaaaacaaagtagaataagaaatatttcaaatacagtaatgaaagtaaagcagatcctgggcagaaggtatggaatcaaatgatacttttaaatatggtaataggaacatgttcataaattctaagcataatgtgaaaagaaattagaaacagcatagtttgtttcttcattgctttttatgactgagtcattacagagagtacccccagtaggcagtgtcttttgattcttagtgttggatcttctctgatatgggattcactcagatgttagtttcttgctgacaggtcaatttggtaatttgcgtcagaggtggtaatttggattgttcacatttttagattttttttaactgagaggatttcaaagattttgtgggaatttgaagacttattgacaatgtggttgaattttgctgaatctattacaatttttcgtaatttatgtagacactattgattttcttcctcaggatcttttgtgacactttctgggaacgaacttttccacttgacttacaaatttaatcattagagtaacagctaaattaacgtcttatgtaagaatcagattaatcatctgttgtaagtttaattagaagattaaaacaggcttgcttccccagacttctgtctcctcaaattatagattgctataataattaggggttttcattttcactactgtagtaatacttgatagagtgtttttaaattttcaaagtgctttcacatctattattttatttaattctctcaacatccttgtaaaattggcaacgcaaatactatcattccccatttatagatgagaaaatcaaggtacaaagaaattgtggcattatcctagggggtaaactgggtaagactgcagatcaggtctcctcaccctcggccccaggttcttttctttcaactttgtttagtgagaatttaagtaaaaatgtcctggtgttgatttagaattggatattatagattaaatttatgca

SEQ ID NO: 59943 - DNA, 1029 bp, Homo sapiens
taccgtggtcatgcttggactcctttagcgttagctgcctcatggtccaggtgattttccctcccagcccatctactcaccagacaagggtgatttttacagatccattgttgtaccaactctcagccatgaaagcatttggcctttttgttaccaagccattaggttcttggtgccgtgtctaccctgggtgaactcccaaagttgggctatctcagtcttggcctcatgcctgtttatgacctactcacaggtagcaccacttaacttgctgccaaaattatccttacacccttcctgtaactctcattcccctgtggccttccagccagaaatgcggtccttggacctggcttctcagcaattatccctgagagggaagatcctggagatatcctgagagcacacagagcttccccacaccttcagacttgcaccttgctgtccagaagctgcctagccctcctttccaacccacaatggccagtgccaatagcagtgcgggcatccggtggtccagacaggagacacgaactcttctctccatactaggcgaggcagagtatattcagcgcctccagactgtgcatcacaatgcagatgtctatcaggctgtgtctaagcgaatgcagcaggagggcttccgccgcaccgaacgtcagtgccgctccaagtttaaagttctgaaggcattatatttaaaggcctatgttgcccatgccacaagtatgggtgagccaccacactgtccattttatgatacgttggatcagcttctccgaaatcagatagtgactgacccagacaacttaatggaggatgctgcttgggccaagcactgtgatcagaacttagtggcctctgacgccccaggggaagagggaaccggcattctaaaatcaaaaaggactcaggcagctgatcatcagcctatcttgaaaacagttaaggcatcagatgaggattgtcagctaagaatcagtgaccggatacgagaaaccagtgaccttgaggactcctgggatgaat

SEQ ID NO: 59944 - DNA, 2756 bp, Homo sapiens
ccctggctccttttctgtgtcctcagaaaaaaacatggatgaaccatttatatccagatagtatgaaaataattgctagttcattttcccaagattctccaccaaatggaagacctttcagaaatgccaggggtgacctaatagaaaacgatggagccacgttctagacagctggttcatcctagctttgtcacagatgtgaagcagtttacctccctccagtggtttcctcatccgtaaaatggggatcaataataactcctgccctgcctacctcacagggttgttgtgaggatcacgtagttcatagatgtgaaagggtttaaaagtttaaaagcactgtacacatttaagttattaattcatatggccttggctgaggtaaggcagattggtttacaagatacagaagtatggatatatactgtgacttcattgcttgaatctttcctttgctggtctaacttgactgcttcatggagtttgaaatcttaatttttaaaatccctgtgtggctcattagacgactataagcacaacctgtatttgtaccttaatctcttacatttccactgctgtgtatctgacatatctactagtaagcactgttttgtcaaaccgtctttctctccttcattttactggttcttagtctcctatcaatataaggaaataagaagtgccagggagccgccattgtgtgttacggtttatatcgataatcttcaatataaaatactggccattttataaaatattaaatatatgtaaattctttgcatttcatattatttgggtccctttatatgcctaaattacatctttaagtttcggttgccattggaacattgtggaaacaattcagattatatcagtttcccatccgctttttagctgatttcattcttttctgttatttttttgtctagtatgttatacagggcaagccctagaaacgtttccttttgaggagctttccaagattccttttcctcagatgttgtagacagaagtttatgtagttaatggcatctggtggaagagaacagctttgtttcctctttaactttgggaacactagaggatggtgtggataaagattgcctgcaatagatgactccttttaagcactagccgtgaacagatgagcctcctccacaccccagacacacactggggagagatgaaggtgataagccacacttccgatttactctagaagggaagacattactctctgtcattaaactaacttaaagcttttagtgatttacttagtacttttaggaatacaaataggaatctttaggatttaaaaagttttccaataatctagaagttggaaaaataacaaagagtgggcatgttgggggaggttttattttctatcttgcaggctcgagtgcttagctaaatgctggaaatggacataggtggagaaatggtcagagcagcagtgggagcgtacccagaaccatgagtagacggcaagcgagctgctctgccaagccagggatggaggtgtgaggcggctggtgtggtagaatatgttggaatctagttagaattcctggattggaatcctgtcacagtttgtttcatcagacaaatcacttgcccttttctattattattatttttttttttttgagaaaaagtctcactgttttgcccaggctggggtgcagtggtgcaatcttggctcactgcaacctcagcctcccgagtagccgggattacaggtgcatgccaacatgcccaactcatttttgtatttttagtagagacggggtttcaccatgttggccaggctagtcttgaactcctgacctcaggtgatccacctgcctcggcctcccaaagtgctgagattacaggcgtgagccaccgtgcccagccaattcatgcctcaatttctttatctccggattgagggatttgtattagattttttttttcctagtaccttccagctctaaaaaaatttgaaatagcataataaaagacaaaatgaaaacgaaattttaattgtaatattttctgtcacagcagcatatgtatatttgaaatactggtaacaattttaaggtagcattctgtggtattaatatttattaatatgctcatgaacttctaagtgccacaccagacatatagactctttactttaaaagagcatatatttaaggcattgaaatggatacagctatattcattctcaattgtcttaggctattatatggaaagatatgtgtcaattataggtaggtaggtaggtaggtagattttctggaaacacagaagtacttgacggagagttaggcctgtattctataaatctattaatggtagcaaagtgcataagacagggatttctttgagatgaaaggagtgctgaagaagagcattggaattaatatttggatgtggtattgtgaaattcaatgggtaaagtaaccctaatgtgggaataaaagtcaagggaaaggtcttgaataagtacacagaaaaataggctaaaaatattaaggggagggaaattggaatacagggagacagtgtgcaagaaagcaagccaggaatctgcctatgtggtagacccaaccattactacttgaacccccttagaaaagcttttccagcattccataactcaggttcctcatttataaagtgggaaactcataattgtcctacctacctcacaggggtgttgtgaggatcaaaggaacagatgaatgtatgagcactttcag

SEQ ID NO: 59945 - DNA, 1064 bp, Homo sapiens
gcaggctttaaatgtagagaactaacattatgacgttgtgtcttcacatggatgcgttaggagcttattctccatggagtcagtctaattcagaagatggttgatactgaagcctaagagccaggctgtttggaaagctaattctgtgtccaaatatatcaccaaaaccacaagaagtgctgcatgatttcagagcgcagagaagaaaattgacacgggggcggggtgggcaagcaagtgtattgggaaatatgttaagtgagatctttgtcataaattaataaacctcagaaagtatcacttgtcattttcttctgtcatcagaattttatattttttaatatgcagaaacggcacattctgtattgggctcagatgcaaatgatgtagttattactgtcccgtttgattttggagaaaagcaaaaaaatgctcttgggtaagtatatggggtttatcttactggcttaattaaaggaagtacaaagtcactatatagtaaaaggtaacattgtattttaaagtaccttaggcgataaaattgtatttgtaaataatttagtaaggtaatgatcatttttatatgtatatatttgatgaaatgccaagaggccaggtgtggtggttcacgcctgtaatcccaacactttgggacactgacgggggggcggcgggtggaccacctgaggtcaggagttcgagacctgcctagccaatatggccaaaccctgtctctattaaaatacaaaaattagctggacatggtgttggtgcctataatctcagctattcgggaggctgaggcataagaatcgcctgaacccaggaagtggaggttgcagtgagccaaagtcgcgccactccactccagattgtgtgacagcgagacttcgtctcaaaaaaaaaaaaaagccaagagaacataaaattaaatatggtgtaccttcagctgtttcgatcggaaacattttaaattaccaggttaaattgacatttatgaatctctttgccttaattttgtgtaattaaggtttatgtaggaattacatgtgcagttttagaaa

SEQ ID NO: 59946 - DNA, 1139 bp, Homo sapiens
ggtttattgttgggaatgctatatgggtatgtgtttttagatttgttattttttggaagcttataagtagaccataagcaagatgggctttcacttgaatttgatattatcttcatatatatgtaggtgaatgacctagactctcctgtctccatgatattgcatcactcttacttaataccttattcttatggtaaacctgtcattcagagaactatcatattaagttttggcattactcttcacaagaaaaagaaaagtgatatttgtttgattgtactgagccccgttttatctttctcttgtccctgtgtctgtgtgtttctgtgtgtgtgtatgtgtgtacagagcaagatttgaacttctttgttctccactttttaataagtgtatagaagcaatcagaggactcttagatcaaaatggatttacagcagatgatatcaacaaggtaatgcttttacatttttcttaactattttaggtgtagtttcagacttggaatttaggaaatagctctgggtactgaaagaatattttaatgcatttaagaattttcttagattgtgttaatgaataaggaaaaattgatgaaattttgattaatggctctggtgaactcatttgtatatattcagtttcctagcaaaacagaataattcctttccagtatattttttatctgtaagcatagacagaaagatatttgaatacttgctatgtgccaggcactttttccaagagttttacacatattaacttgttgaatactcacaataactctgaggtaggcactactatttatccccaaggtaagcactattatttatcctagttttgtacgtgaaggcaccaaggtacagagattaagtagcttcctcaagatcacacggtaagtagtagagccaagatttaacccagtattgttcctgtgtctcctcataactagtataccaggctgcttcccgttccttgcttaggaacatatttttagactttcaaaaaaattcaaatgtttagtattttcttttttttccccaaaattatttctcttcattgaacatactctttttatacatttaaaatgagccaggtgcgatggctcaagcctgtaatgccaacactttgggaggtcaagg

SEQ ID NO: 59947 - DNA, 1082 bp, Homo sapiens
aaaagagtaatgaaaacacacacatgcataacatgcctgggctgcacctcagacttaccaacttggaatctattggtaaagttttaaaagcgcttccacatgaattggtttgtgtgtgtctaagaaccttcccatgcaccaggtttttgaactcagatggcagtcctagtatttccttagctcttctctcacagttctgttacctttttcttcacatcctctctgagactccatagctgctgccactatatcctaacttaaagatgccaggaggagcgttagccacgtaatactgaatttggaagagaatctttcagagttcccatctgttctaaccttattttacaaatgagtaaaacaaggtacttagtaacttacctaagttattaaactagagtttggcaaagcctaaagtcactgcagaactccaaatctggtttcttgatataccattctttaggaaactgaggaattttatagtaaattcattaccatctcttacttacaaatataatcttagttgtacaaaagagtttgccatgtttttaagtaggtgattttccaaatgtatttaaaatgcttgattttttttttttaagtatatatagaaagctagccaaattataatttgcgtgttactgggaatggcttacttaccaaaaaagaaaagtagcctttattttccaagattaatagtacatcttagaaacaatgattttaatctaggacatgacatttagaagggacaaatgcattagttatcttatatgccctccttctggaggaaacatttcaagttaacaaagcttcactcctattctctgaattctgattcagtggtaggagaattgaaaactgccctattttaaaaaggtttgtttcagtgataaataagctttggtcctttgcaataattgatacatcagttcatttatgtaaagatgctgaattctcttcatattgttcttgtataaacaggttgtactccaggatttagataaaaaagaaaatggattacgtgatatattagctgttcttactatgaaaaggtaaaaaattaaacttctgttgttaagaaaatt

SEQ ID NO: 59948 - DNA, 1005 bp, Homo sapiens
tagtctatgtagaatacaatgaaagtgaaaaacattatctctgttgacctgcatctgtatataatcttaaaaaagcttacagacatgaaacattttcaagtgacttaatggaaattaactgatgtcagttaaacgtagtggaatagaaatccatgagaaaatccaagaacaccaatttaacaaaatagttccttaatgtttaactttttcttgaagacatgtaactggtttcttgtcataggaatttttagtctaaaattgccagttgaaagatggggaatagaggttttaagtttctcttttttgttttaattgaatagctatttcattagtaaagaattctattttcttattgtagcttggtgtgtgccttgcctagtttcacttgatactcttcaggaattatgtagaaaagaaaagctcacatgtaaatcgattggaatcaccaaaaggaatctaaacaattatgaggtggaatacttgtgtgactacaaggtagtaaaggtaaggcaaatatctagccccttacaagagacctaatcagacttcagtatttcgtatttctgtaacataaaaagaacattaaaagaaaagctcttcttaatgtttaaaattctaaggcatgataaatttatatgtcctatcatctgtgttgccaaatagcattgagaggattttgaagcataaagtgttcttgcattagaatattttcaggtgctcatatccctctacatccaactcttgattatctccgtgtgggttaccagagcaaatgtttgatctccaattgtctttcgttttgttcgtggatcgtatttccccactatcacctgaaatgaacctaccgtttcaaaccaattttagtgttactgactctcaagaacatcaccatttgcatttcctgccatcttgtcacactccagatttagtcaggttctaggttataatagaatggcctggattgcaaagtcatttccagcttttgtttagtaccttaggacttaa

SEQ ID NO: 59949 - DNA, 1596 bp, Homo sapiens
tctagaacatctagagaatgtgtgcccatgatgttgagaaatgagttcccttgtgtctggtgtttgatattaagttatggacgttaagaatgcctgaatctattgctggccaagtaagccactaacctaggtcataaagagttagctttgggaccatttatttccatgatcaaaataaatacatctgggtttaacctgaatcaccatttagtaacatagtcatcagtttcagtacctttgtctttttccaggtaaaactctttagcctcttatcaaacatgttatgccacatctaaattccatattttatgtaatataaggaaaaatagttttatttgtatgatttatacttcatgtgttaggaacctgtgactacatgttctgaactgttagtaagaaaaatggtattggataccttactctttaagatttttaattatttttggtaaaactgggaaatagccgtctgatttgcattttattttcttttgtattttaaggatatggaatattatcttgtaaaatggaaaggatggccagattctacaaatacttgggaacctttgcaaaatctgaagtgcccgttactgcttcagcaattctctaatgacaagcataattatttatctcaggtaaagaaaggcaaagcaataactccaaaagacaataacaaaactttgaaacctgccattgctgagtacattgtgaagaaggctaaacaaaggatagctctgcagagatggcaagatgaactcaacagaagaaagaatcataaaggaatgatatttgttgaaaatactgttgatttagagggcccaccttcagacttctattacattaacgaatacaaaccagctcctggaatcagcttagtcaatgaagctacctttggttgttcatgcacagattgcttctttcaaaaatgttgtcctgctgaagctggagttcttttggcttataataaaaaccaacaaattaaaatcccacctggtactcccatctatgaatgcaactcaaggtgtcagtgtggtcctgattgtcccaataggattgtacaaaaaggcacacagtattcgctttgcatctttcgaactagcaatggacgtggctggggtgtaaagacccttgtgaagattaaaagaatgagttttgtcatggaatatgttggagaggtatgtttcatttgccacgtagtaaatgatggacatgcaaggtttatacttttggaaaattacctttttatctctttaagagatacttggtacattttgatattttcatttgcagatatgtagaaatttattcagatttaggagaagagttcactggcatatttagaaataaaaaacttttatatgaataaaaaatatacgttaaaacaaattgatatagtcatctttcaacaaatacacattcctactagtcaaacctaggatttgtaaaatttaaaatatgacaactgtttttacccaaaagtcctaagaagaaactcagatgtaacacatgctgctttgaaacttgaaagttttaatttacttcatctatttgaccaaatatgattaaatgtagttggcagaactctattttggatcaaca

SEQ ID NO: 59950 - DNA, 1027 bp, Homo sapiens
gaactcttctcctaaatctgaataaatttctacatatctgcaaatgaaaatatcaaaatgtaccaagtatctcttaaagagataaaaaggtaattttccaaaagtataaaccttgcatgtccatcatttactacgtggcaaatgaaacatacctctccaacatattccatgacaaaactcattcttttaatcttcacaagggtctttacaccccagccacgtccattgctagttcgaaagatgcaaagcgaatactgtgtgcctttttgtacaatcctattgggacaatcaggaccacactgacaccttgagttgcattcatagatgggagtaccaggtgggattttaatttgttggtttttattataagccaaaagaactccagcttcagcaggacaacatttttgaaagaagcaatctgtgcatgaacaaccaaaggtagcttcattgactaagctgattccaggagctggtttgtattcgttaatgtaatagaagtctgaaggtgggccctctaaatcaacagtattttcaacaaatatcattcctttatgattctttcttctgttgagttcatcttgccatctctgcagagctatcctttgtttagccttcttcacaatgtactcagcaatggcaggtttcaaagttttgttattgtcttttggagttattgctttgcctttctttacctgagataaataattatgcttgtcattagagaattgctgaagcagtaacgggcacttcagattttgcaaaggttcccaagtatttgtagaatctggccatcctttccattttacaagataatattccatatccttaaaatacaaaagaaaataaaatgcaaatcagacggctatttcccagttttaccaaaaataattaaaaatcttaaagagtaaggtatccaataccatttttcttactaacagttcagaacatgtagtcacaggttcctaacacatgaagtataaatcatacaaataaaactatttttccttatattacataaaatatggaa

SEQ ID NO: 59951 - DNA, 1076 bp, Homo sapiens
catttttcctataacttatatatatgcagttacaaatggaaaattgttaaaaatacaggggagaagctatgttaactttggaatggaaggttttgtttttgtagaatatgttattttcatgcaattctgtaagtctaagatcgtcatctacagttctgctcttaagaacacaagttttatgacacgctcggcttaagaaaccaaaagtgtctaaagtactttatgttaccaaccaaatttggctgctgcactcattaagaatgcaacttaaaaaattttggttaacaaaaagagtaatttgattatacaagatcttgtatactgaataatttataataatctaccactgtctaaaagtgtaagaatcaaaacagccatctaatttagtttcagaattatagatgaatacagataattataggtgacccaattccaactaaaaaatccagagttgacaactccagatatgtagccatgcttgtgtctttctagtcacagctcaacctacccttcagtttgaagcagtgtggtgccatggtgaagactactgattttagagctttgaatctcggttcttattactatgtgacctgtgtgaccttgggcaaggtactcaatttctctacaataatggacataacagtactacttctcaaaaaaaaaaaaaaaaaaaaaaaaaaaagaaacagtactacctcactgagttttggagaggattagtgaattaatacatcaagtgcttagaatagtatgtgacacacggcaaatactttttacatttatatatatatatacatatatatgatttgtatacaaataaatttgctagtatttgtatggtagttttgagaatggtcttcacagttcaaaagtaagttacagattatggatgcaataaatgcttgtgtatattttacaaaactcataaatatagtatctttcatgttgatccaaaatagagttctgccaactacatttaatcatatttggtcaaatagatgaagtaaattaaaactttcaagtttcaaagcagcatgtgttacatctgagtttcttcttaggacttttgggtaaaa

SEQ ID NO: 59952 - DNA, 1075 bp, Homo sapiens
caattcattatgatttgacgctgaatattaacatttatttgtaaatatttcaaagggaactaactacatttccttgggagttaacttactctaagggtcttgaccatgtaagtaccctctatcactgataataaagctaatataatagaaaatttgaaatttattctaaattgtcttaactctctttctcctatatttctttttctgtgtcttcaggttctggagatatatcttcagattctattgaccacagcccagccaaaaagagggtcagaacagtatgtaaatgtggagctgtgacttgcagaggttacctcaactgaactttttcaggaaatagagctgatgattataatatttttttcctaatgttaacatttttaaaaatacatatttgggactcttattatcaaggttctacctatgttaatttacaattcatgtttcaagacatttgccaaatgtattaccgatgcctctgaaaagggggtcactgggtctcatagactgatatgaagtcgacatatttatagtgcttagagaccaaactaatggaaggcagactatttacagcttagtatatgtgtacttaagtctatgtgaacagagaaatgcctcccgtagtgtttgaaagcgttaagctgataatgtaattaacaactgctgagagatcaaagattcaacttgccatacacctcaaattcggagaaacagttaatttgggcaaatctacagttctgtttttgctactctattgtcattcctgtttaatactcactgtacttgtatttgagacaaataggtgatactgaattttatactgttttctacttttccattaaaacattggcacctcaatgataaagaaatttaaggtataaaattaaatgtaaaaattaatttcagcttcatttcgtatttcgaagcaatctagactgttgtgatgagtgtatgtctgaacctgtaattcttaaaagacttcttaatcttctagaagaaaaatctccgaagagctctctctagaagtccaaaatggctagccattatgcttctttgaaaggacatgataatggga

SEQ ID NO: 59953 - DNA, 1032 bp, Homo sapiens
tatacacataactatacacatttgtatatattcactgttaactaaaacttagttttaacagtgtaccttatgatcgaaagtggttgttcaaaaaatgcctgtaaacattcctctgaatatattcctgttattttataatcacattaatattacatactgttacgtttgttttatatgtgagtctggcattataaatgctggctgaatgaattgggctaagacaactacaacagatgtgatcaagaaaccgatagtgattaccagaaattatatttggtgcttactctgatgatgctcttaagttttttacagactatatgaactcctttaattttcacaaccaccctttgaggtagatacatttctaatccccatgtacaaatgagacaaaggcacagaggttagttcacatagctatgaggcacaggcagaattcaaacacaggcagtttggcttcagagaccatgatcttaactgctatgctctgatgtctctccaaaaaagtataaacatgagcagggttaattgtagcagctacttggtttttacgtcaagaatcataaaccacaagaggaaacatgaagtttttgttttttacttttcaagatggagtctcgctctgtcactcaggctggaatgcagtggccctatctcagctcactgcaacctcagcctccagggttcaagtgattttcctgcctcagcctcccaagtagctgggattacaggtgtgtgccacacctggctaatttttgtatttttagtagagacagggtttcaccatattggtcagactggtcttgaactcctgacctctggtgatccactcgcctcggcctcccaaagtgctgggattacaggcgtcagctaccgtgtccagccgaaacatgaagtttcaaaatgccaagatgtatcacagaagacactcagcagtcagccacatttatcttggagaagagttccaggacttaaatgtttgaatagtataaactagttttttaaaaagtctgcctgaagccgaagattaaatac

SEQ ID NO: 59954 - DNA, 1039 bp, Homo sapiens
cttgaacctgggaggtggtggttgcagtgagctgagattgtgtcattgcactccagcctgggcaacaagagcaaaactctgtctcaaaaaaaaaaaaaaaaaaaaagaaaaaaaaatggtagaactaaacccatacgtatcaatgattacattaaatgtaaatggtctaagtgcatcaatgacaagagacacggaaaaaaccaacataacccagtgatctgctgtctataaagaaagtcaattcaagtgattgataggttaaaaggatggaaaaaccatgtaaacaattaaaaatggagtggttatatggacagtttcctaatgataaaaggtctagttcaccaagaagacaaaataatcctaaacgtatatgcacctaacagctccaaaaatttatgaagctagaacagctgaaaagagacaaactaatgcacaattacagctagggattaatttaacatccctccttagtaacagaactagtatatacacattaatcagtaagaatatagaactgaaaatcataagccgactggattaaattgacatttatagaacacaccaccccaaactagcagaatgtatctcctgaagtacacatggaacattcagcatgatcatatctttgctcataaacacacctgatttaaattgacaaacttggatctagtatgataaactgatggctatagacaaaatcagcaccttatttatccccaaagatgttaagtcacttaaccttgatgtgaatacggtggccaaattagaagcggacaattagaatataaaagaaaatgctcaagaattaaatggtggccaggcacagtaactcctgcctgcaatcccagtactttgggaggctcgcttgagctcagggttttgagtccagcctgggcaacacacagggagaccctgtctccacaaaatgttagccagacatggtggtgtgcacctgtagtcctcgctacttggaaggcttaggtggcaggatggattgagcccaggaggttgaaactgcagtgagctgattgtgcccagc

SEQ ID NO: 59955 - DNA, 1660 bp, Homo sapiens
ttttttttttgtaagtagagacacatttcactgtgttggccaggctggtgtcgaactcctgggctcaagccattgcccacctcaaagtgctgggattacaagtgtgagccaccacacccaaccaggttatttgaacatttttaagtactgtattttctctattgtaatattgactgtcatctctgtgcaggttttttagtggttgctctaggttgaaacgctttgaattcttaggtatctaagagtgagcattttctttttttgactgctatactctcaccagttgccagcttctcatataaatattgtaaatgctctcgtttaggtaactcagcttctggagttgagggaacttcaaaatcagaagagctctgggaatctgcatttgtgctaagatttagcaaacttttttcctcgggtatatgtgtctcactgcttagagtagttggttctccagtactaggaactattgtcacatctttatctctgcttttcaaatcagagtaagtatcctttgggcaaattacattttgttccatgagagaggcaggaatattctctttgattgttggtctgtagtcagctttgtccaaggaagtaatatccccactgtttctctcttgggaagataacaaaacagtatcagattggctgtcccagccttgacttccttgttctgttatgtgtgttgactgggaagaattctgggaggagatgtgagttgattctccatcagagtcactgaaaagctttggtgactgagatccccctgccactgtggaggaagggaagttttccaaactctcatctgtgatttcatcatttcttttaaagaatacttcccactggggtacatccccatcagccttttgcaggtgaagtacagagcccagatctccttgcagtgaagctgggattcctacttcttcttcactttcactgttggattcttcacaatctacaaagtttgtgaaacgagagctctgcatacactctgctctgcagcatcctggggtttgtctcagtttttcaggctgcttttctgatactgcagtcattgaaaatacctcagggtgaaaagtttccgggtatggaactttgtgccttaaaggtattggcagaggatcatcaaagagatagtcatcttcctcctctgtgggacaaacaaaacaggtttataggaaacaaggcaaagggagccaatttgtagtatttatctgtacttttaattcttggaattgcaaagaatagggaggccactcttcttcaaagggaaaagatattcttgggatatgctgaacaatttaactgccatccttcaactttttataataaatgccagagtatcagtggagaatatagagcagtcactctgctctatatgtaagcctggctgatcattacgatcatatgcaaaacttcaaaaaaagaaaaaaaaaaaaaacaggtttctgtatctcattccagacctactgaatccctgaggaagataggaccaaataatttgatttttaagttctacagctgatatctgttcagccaggtttgcaaagcctgtgtgctctgcaaatagtagatgctcagtgggttggctgacttaggaaaattaaattgctttttattaaggtttttcttctgtgagcatcttattgacatgttt

SEQ ID NO: 59956 - DNA, 1041 bp, Homo sapiens
aaacactgctttccagggagcttgggtctgggagaagtggccttgggcagagtggacctgggacccaccacaggtcagacttgacacatggtctcaggaagtactttgccttcctgtcttcagcctgtaaaatcaggagtctgctctccttctctgggttaaaacaagtggtgaaaacggtgccatcgtgtgtggtgttctcagctttctggaaatacaccctaagatcagtagaggccataaagagaggctggtttgttatccttgaacattttcttaggacatagagaggctggtttgttatccttgaacattttcttaagatactagtaaatgctgataatagacttttctcatcatcatttctgatcaagttgatcagtagtgtttatacagaaggatttttctctatactttgtaccttctttcattgctactttgatttttctagtgaaggacagaggcaagctctgcagtagtaatcagaacgttagattctgagcaaagctctggggctttccagcagccctatttcgtggttaggattcttgattttcattcctttggtggaaagtcagttactctgccatgcagtaaatacttgaccaaaacacacgagataatgatgatactattttttgaacacctattaatggcaggtattgtgctaggtcccttacatatgttatagataagcctctaaacaaacttacaaggggtaccatcccaattataatgatgaggaaactgaagtttagagacttaagtccctaaggactagcaagaagtaagtgatgggcctgggattctaatctaggcctgtctcatctctgcttctgcatttctgctcatggagaatctaattttaaaacatttagatgacaattccaagactgatatagtaagcctataactggtgcccaaaaaaaaccacatttgtttttgtttcaataattaaaaggttttagaaaaacagttccattaatttcagatgttaactctattatgtaatgcatcctctaatccttacaaatttactaa

SEQ ID NO: 59957 - DNA, 1089 bp, Homo sapiens
tatattatagttaatgcccagctaaattctaacttatttgaaaagggatttgttaaacataagcaactgaccttcttggacaaggaaagcaatatattaaaaaagagaaaaaaaaaagaatctttgagtcccattggtgattctcagctcttactgtggatcagaatcacctggggaatatttaaatgtactgatttctaggcccactagtactcagtgttcaggagatctttgggagtgaggcccaggcattggatatttttttcccaagaggtccctggtgatccccacgtgcagccagcattgagaaccacagccataagagagttctgcttctctttccccagcctccctttatctcccctaacaacctgtttcatcgtagagattgttgatccatgtgattttcctttttctagattaaagatttcttgagctacctctgtcctgtgaacgcatatccaaatgtcattccagttggcacaactatggataaagttgtcgaaatgtgagtagtcactggttgtgggacttggtgtcccccttggtggctcttggctaggacacaaaggagagtttgcctgaatgtttacaagtctagaatctgtttgttttgggacatttctgaactgatactcatttccattttttcctggagtgtttcctttagttccacagtgtggcagaaggtataggtagtgttgtcagcttctcctgggttgcaacccagctccgccacttactaacagtgcagtgtgagcttggccagatcacttctctgagctagtcattctgaatcagcaaaataggaatattgatgcctacttgttggtcttcttaaaaaagaaagagatgatacagggagatagtgtaagaaaagcacctagcaccatgccaagtaggttgtcaagtgtctactgaatggataactgaagccaaaggagaggtgcaatcgtattcatggatgtcttttactacagtattaccattttcttacctcttctttgggtttcatttatgcattcatgaatgattttttttttttttttagacagggtctcactctgtcacccaggctggagtacagtg

SEQ ID NO: 59958 - DNA, 1041 bp, Homo sapiens
catatgagtggaatcatacaacatgtgttcatttcttatccggcttctttcactgaggatgttttcaaggatcatccatgttgcagcacgtgtcggttctttttatggccaaataatatttcattgtatggctagaccacattttcctgattgatgcatcagctgatagacatttgaactggttccaccttttggctagtatgaagaatgctgctgtgaacagtcaggcacacatttttgtgtggccatcggttttcgcttatcttggttctataactagtggtgaaattgctcagtcccatgggaattctgtttgttgagtggacaaggattccacttgtttctaggatttggagtgtgaggaaattgggagaaaaggcacattgttaaaaggtacataaatgtgttctgtgaaggagggctttgttgagctaggtcctaatgataactgctttccattactattttttctttattttctttttagaaggaagagattgttgtgactctcttaccagctggtcactgtccgggatcagttatgtaagggggtcatttattttgtcattttattatatgtagacacatattgtatttgtagaaataaatttttagggtctaaaattaatagggggctgggtgcagtggcacatgtctgtaatcccagtgctttgggaggctgacgcgggaggattgcttgagcttgggagttggaggctgcagtgagttttttttttaaaaaaaaaaaaaaaaagaaagaaagaatacatagagggagatttgattttttttctagtcatttaaaacacatttgttcccaaattgaactagggggactgaggtgaagatcagatttgaaacgtttcttataaaatggaagtcttcatggccaggtgtggtggctcacacctgtaatcccggcactttgggaggccaaggcaggtgcatcacttgaggccaggaattcaagaccagcctggccaacatggtgaaaccttgactttacaaaaagtataaacattagccgggtgtggtggcaca

SEQ ID NO: 59959 - DNA, 1074 bp, Homo sapiens
ggacacgaacatttagtccttaacagtgatgtatttatttcccatgttgtaaaggattgggcatggcttattttttgtcacatttgttccttattacatgctaatgatgggaaccctggtgttgatattactacatgatgttattgtcacatttactgagttttataatgctcagaatttaaaatggtgattaatatttttgcaggtaattcatgaatattgtactttttttctgaacccttattcagaaaaggggctctgccaagtggaaaaaaattatttttcatcattaaattttgaggtagtacttttgtgaatgtatggttttaataagtaggactatagacatacagcccccctttttttaacctttacagctggtaggtattttcctattttggttaatattggctttgttgcttgattatagcacactgctttgccgtgtttaactttgagggtgtgttgtgttgttgaacagaaactgaccttttcagatatttcttctttggtgaagatcagacagttgaagttgaagtattcttcccatcaaattatcctgagggaggactacagagccagtttagtgaggattaaaaaggaaaaaaaaaataggtgaacctttgtaaatgccatcctggactctgccaactgcttttccggggaatactgtggtggtctgtggccttgtcacaatcagggatattggtgaaaggcattccctgaactgggggccgacagcaggctgacttttgagcagtcctgccaccactttgattttttatgtttcttcctgtgtgccatgacttttatgcattgtttatccagctccaaccagggggagacccactcgaaagggtcctccagaatgaatggagacttccatgaggagtccctgtcactgagcagtgacctggtgtgtgcagagctctccccacttactgatggctggagaggcagtagtgcctgcaggtcttgcccttgccgaacagtatgatgtgcagtgtgaatcgggaccaggcctcatccaggctttaatcttttttttttttttttttttttttgagactgagc

SEQ ID NO: 59960 - DNA, 1070 bp, Homo sapiens
agcctgggtgacagagcgagaatgcatctgagaaaaaaaaaaaaaataaaagaaccgtgtatgaagcatccatgtcacagacccatccagactgtgttctgaggcacaaaagttaggacacaggaccacgtttttacaaagactcagaattcagagagagaggggaatgggagtggtagggatggggagatgaaggaggaaaaatgaattcatggaaacagaattgtgtcagaggattatatgcatttacaaggcgtttactccgtattaccaaatctgcctcaagacaggtattattttctttacaattttttctaactgttaaaatatttattacaatgtaatcggaattgtttatatagagagtctgaaacttctctttgccccatttctgtgtttcagacagcaaaggcatataaagccatgaaaaactgctatatacatggtctcttattttatttttatagatatctattgaaatcgagactcctacccagatatctttagtggatgaagcatcaggagaggtaactaaatattaaatattgatttttttaaaaaaatgtggtgctaaaatgattgtttatatttctctttgattttgcagtcagatgctccacccctcagctataccctcaatctttctctttgattttgaatgctcatttaaccataaataaaaatctagtcattgagtggggttttaggggcaaaaaaatccctttgtgattgtgtaagtccatttgggctggactcacaaaactaccgtagactgagtggcttatacaatagacacttgttgcttagggttctagagactggaaatccaagatccagtctccagcagatttcgtgtctggtgagggcccacttcctggttcttttttttttttgagacagagtctcactccgtcacccaggctggagtgcagtggtgtgatcttggctcactgcaacctccacctcctgggttcaagcgattctcctgcctcagcctctctagtagctgggattacaggcgcctgccaccacgaccagagcccagctaattattgtatttttagtagaga

SEQ ID NO: 59961 - DNA, 1054 bp, Homo sapiens
agagccctggaaaggagggaactgctgttagttctggtgtgtaaatcagtcaagcctgccatgatcacctcacacttgattcagttaagcctaagcagaagtgtccctgcctgtcaggtcccccggctcagtgagagaatcgcccccgtcattggcttaaaatgtgttctagccttggcgttcaaaaagaacaccactgactttgtggacgaagtaagagccatcatccccagagtccccagtttaagtgtaccatggcttcaagacagaattgaagattctggggaaaatttagagactgaacctctggaaagccaagacagagagcttttggacacttcatttgaagatctgtcaaaacctaagagaaagcttgctgacggtcggcaggcttctgtaacattacaaccccttaaaataaagaaactgattccaaaccctaataagataaggaaaccacccaaaagtaaaaaagctactccaaagtaatcttgcataaacttgtcatgtcatacagtttgtgaaaggacaccttgtaaagaagccttgaaactaataaaatgagttatacttacatagattcatagggtcctgtttggtaatattcaaatgtgtaagactctttgtaactatggcacagatatactaagtgcaggaaatattcaaaattaggaatagccaaacagacatttattgaaactagtgttcatgcgtgtgtaaattgactttttctttttcttttttttttttttgagacagtttcactcttgttgtccaggctggagtgcaatggtgcggtctcagctcactgcaacctcctcctcacgggttcaagcaattctcctgcctcagcttcccaagtatctgggactacaggtgcgcaccaccatgcctagctaagttttgtatttttagtagacacggggttttaccatgttggccaggatggtttccgtctcttgacctcgtgatttgcccacgtcagcctcccaaagtgctaggattacagctgcgagccaccgtgcctggcctttttttttttttttttgagaca

SEQ ID NO: 59962 - DNA, 1366 bp, Homo sapiens
ctatctctactaaaattacaaaaactagccggacatgggggtgtgcacctgtaatcccagctattcaggaggctgaggcaggagaatcgcttgaacccaggaggcggggttgcagtgagccgggatcacaccactgcactccagcctgggcaacagagtgagactctatctcgaaagtaaaataaataactgcagcattgccagttggaaactttgtcatgagcttacctcacggtgacagttacactgctcctttaaagagtcatttacataatttgttatcaaattattaaccacttttaaatagaataataactacatttgcctccataattgaagcagattactaattaacattttcgagaattaaactgcttgcttatgaagtagctattaaaactaaattgaaatgcaatggatagtttcttgtagatttaaaactgcattgtactgtactttgtctataatgaaaatgttctattcaataaggtatctttttttcttctttttggccaagatggcactaagtaaaatttaaatcgagagatggcataatccatgagtcagccagactttcagctggaaaaatctttagtaaataccttccttctaaattacagaaagtaacttttccatacacactgtaaacagcagacactctaacagagcatcggttatgctccatctcctaacctgaaggactcttgtcacacacccacctctgagaacccaagctcctcagtttttttaatcttttggccacatttcatccaattaccatcataccttttatacgttagatttccaaggaggtaagtgaatcacgtaatgggggtgaactgtacccagtcaaaataaccttatctgactttttctatatttttgatattttttctctaaatattaagtctttctcccaagctcatgtctattccttcctaaaagtcaaattgacatgaagtgaaaaatgatgtgttgcttctgaagacaatggattgcttggcatttgggatctttcctttaaaactgataatgcttccccaattcagttccatctacctgactgactagaacatttactgtggtacattttccaggtttgataggaaaatgctaagcgttgtatgacacagatattcttgctcacaggcactctaccagcctttgaaaaagtcaatttaggctggacgcggctgctcacgtctgtcatctcagcactttgggaggacaaggcaggtggatcacgaggtcagttcgagaccagcctgaccaacatggtgaaaccccatctctactaaaaatacaaaaaaatgagctgggtgtggtggtgggcacctgcaatcccagctactcaggcggctgagac

SEQ ID NO: 59963 - DNA, 1059 bp, Homo sapiens
aaataagatgctaaccgaggccacgtagcctggcctcaactcagataccacaaagtagatgccttggctgggtgtggtggctcacgcctgtaatcccagcactttgggaggccaaggcgggcgaaacatttgaggtcaggggttcgagaccagcctggccaacatggtgaaaccccatctctactaaaaattcaaaaagaactagctgggtgtggtggcgggtgcctgtaatcccagctgctaggaggctgaggcaggagaatcacttgaacccaggaggcggaagttgcagtgagccaagatcgtgccactgcactccagcctgggtgacagtgcaagactccgtctcaaaaaacaaaagtagatacttttccctgcttttactgggccagtgcctaggaagttcagtgcagaagttaattgttttagacatgatggcatttccttcaagttatgagtccagtgaaaccaatcatatcttatcccaggcaggggccaccaaactatggcctgtgggctaaatccagcccattgcttatttttgtgtagcccacaggctaagaatgtttttattttctggaatggttgaggagaaaaagccaaaaaatgacatcattttgtgacatgtgcaaattacacaaaattcaaattccggtgtccctcaataaggttttattggaacatagccatactttttttttttttttttttaggacagggtctcactctattgtccaggctagaatacagtggcacagtcaacagctcactgcagccccaaactcctgggttaaaatgatcctcctgcttcagcgtctttttgaagaaaaagaactagctgggcgtgcataccaccacgcctggctaagtttttcattttttgtagagacaaggtcttgctatgtttcccgtgctggtctttaactcctggcctcaagtgatccttctgccttggcctcccaaagtactgggattatagacatgagccaccactcttggccacagccactttcatttacatattgcctatggctgcttcacactacaaagctgagttga

SEQ ID NO: 59964 - DNA, 1290 bp, Homo sapiens
ctcagctcactgcaacctccgcctcccaggttcaagtgattctcctgcctcagcctcccgagtagctgggattacatccaccaccatgcctggctaattttttcatttttagtagagatggggtttgaccatgttggccaggctggtctcaaactcctgacctcaggtgatccgcctgccttggcctcccaaagtgccgggattacaggtgtgagctgagccttaagacagcttttagaaagacagatctattgtactacattgcaatctaatttttcttactattccatttcttccctcccttcaggttggactagtactacaatagatggatatttttatttctagaactctgacatcatcatttgttaatatttaatgatttctggaactgccattccaaagaagaataaaagcacaactcaagtgaaattgaagtagtcgataatcagaaaagatgacaaaagtccacatgtgacatttgtacgtttctagctagaatgttaaacttcatcctttttttactgttgacctatttgtgggagggatgaaaggctacaaagagcacattcttgtaattttcaaatttttgcctgtctcttgaagaggtattttttcacccttagaaaagggactgtttttctatggactaagtagaagttacagagtcatgtaagaaaatctttgctattgtgtggagagaaattgctgcatttctgtttcttaagtgatggtacatttgtccatgtaacagaacaaaagatccatttggaaattttttttactggtatcaccttacatggtatcactgggaacatttatggaatcaacacttctgtagctcagtgacaggtggtggttgtttaagtgcagagcaatattaaaatgtactggtgactagtacatgtatttctccataagcagagttgccgaatcaataaacatgcaagtttgtactttgatctttaccaggtcagtggattgcttcaaaagcagagttttgtgcaagcactcactgtgctctctgaaagagcctgaggccgggcgtggtggctcacgcctgtaatcccagcactttgggaggccaaggtgggcagatcatgaggtcaggagatcgagaccattctggccaacatagtgaaaccccatctctactaaaaatacaaaaattagccgggcgtggtggcgtgtgcctgtagtcccagctgcttgggaggctgaggcaggagaatcgcttgaacctgagaggtgaggttgcagtgagccgagatcgagccactgcactccagc

SEQ ID NO: 59965 - DNA, 1151 bp, Homo sapiens
gtctcaaaaaaaaaaaaaaaaaaaaagaaagaaagaagaaaatagaatggcctttatgttcttttttttctttttctttcttttcttttttttttttttttttttttttgagacagggccttgctctgttgtccaggctggagggcagtgatgcaatcatggctcactgcaccctctgcctctcaggctcaagtgatccttccacctcagcctcccaagtagctgggaccacatgcatgcggcaacatgactggctggtgtttgttttttgtagagatgagagtctcagtgttgcccaggctggtctggaactcctggtctcaagcaatccacctgccttggcctcccaaagtgctgagattacaggcgacagccagtgttcccagcctgcattcttattcttggatatttcctgggtatcatcttattttttaaaatgtgttgactcttcattttgaatctcgttttgactcttaatcttcaccatctttatttcttagtgtgaagaagatggtagaaatcaactttctttgtgttcataagaagttgagatcgaaacgggtagccccagtgctaatccgagagatcactagaagagtgaacctggaagggatcttccaggctgtgtacaccgcgggagtggttcttcctaagcccatagccacatgcaggtaccagtaccatatttctacctcaggtcctccctttatcaaaaatgttgagcctcaccactgttctgctagatgtagtttttgctggtagcagagatggagactagaacctagaatcaccaagtccagtattctttctggtatatcatttgccacttggtgattaaaaaaaagtttttgacattttcctactaatgatgctggatctatacttttttttttttttttttttttgaggcagactcttactctgttgcccaggctggaatgcagtggcgtgatattggctcaccgcaaactcgcctcctgggttcaagtgattctcctgcctcagcttcccgagtagctgggattacaggcatgtgccaccacacacagctaatttttgtatttttagtagagacagggtttcaccatgttggtcaggctggtcttgaactcctgacctcgtgtggatctatacttctaagtctattccat

SEQ ID NO: 59966 - DNA, 1017 bp, Homo sapiens
ctccagccttggcgacagagtgagaccccgtctcaaaagaaaaaagaaaagaaaaataattggtgaaacagcaatgatttcacaccactgcctagctttcctgtttcagtccagaggcgcttgatataacagcatctttttaaagattatctgaaacccgagggccctaagtcagattttgcttatgtcactgaccactttggatggttagaatactttgtcatttaatattctcgctttttgcctttcttttttctctttctctccctgttcagatgaagtcataacatctcatggtgcaattgaaccagataaagacaacgtacgccaagaaccgtattctttgccacagggttttatgtgggacactttagacttgagtgatgccgaagtggtgagtgagtaaaaacctcttaaattcaactcctgcattcacacattgcttctaagttgattctgagcaccatggataggacacttgttttatcttatagctcaaggagttatacacgttgttaaatgagaattacgtagaagatgatgacaatatgttccgatttgactattcacccgagttcctgttgtggtaagtctcatcgatcacagatgtcgtggataggcgctgctgacttggggactcctgcgtctgttcctgtgttcttggacaataactggtgcctgttttcttgtctaccgtgacctcagggctctgcgtccaccaggctggctcctgcagtggcactgtggggtcagagtgtcttcaaataaaaaactggtcgggttcataagtgccatcccagcaaacattcggatttatgacaggtacatgtttaagctcgtccatgcggtttttatatgtttattttctaagaattacaattagattaggcctttaaaagttactgaatgcaggccaagcgcagtggctcacacctctaatcccagcactttgggaggctgaggcagatagatcacctgagctcaggagtttaagaccagcctggtcaacatgggtga

SEQ ID NO: 59967 - DNA, 1046 bp, Homo sapiens
agggtctcactctatcacccaggctggagtgcagtggcatgatcatagctcactgcagcctccacctcctgggctcaagtgatccatcctcccatgtcagcctcccatgtatctgggaccacaagtgcacaccaccacacctggctaatttttgtatttttttgtaaagacgctgtttcagtatgttgcttgggctggtctcgaactcctgggctcaagtgatccacctgccttggcctcccaaagtgctgggttacaggtgtgagccaccgcacctagcccattagagtattaaaaatgtatataaggttctgtgatggaaggaccaggccctgaaggtccctcatggagcaggtgtctgttgagtgtctgttattaaatgccaggcatagtccagggcacacacctggaaacagtggtggaaaagtaggacaaaaggtggccaggctggggaggagcggccacactgaggtagagaaaggctttagttaagcaacagatgctgggagaaagtgacgtgtgatgcgtaagcttctgtcgggaattccaaggggcccgtcccttgaggaccagagggcctcaagcctaaggaaggcaccaggaaggccctgagctgaggcctgccccggtcatcatggccagagcactgggagcagggggcagggagggtgtggagaggggccgaggcaggcagcagccatggggaagagcctgggttttagtcctaccatgttgggaagctctgcagagaaggacttggaaaactcttcttggtggaaatcactagaaattgtgatggcctgaactacgctgctagcagtttagatggggagaagtaaccagccttgaaattatttttaggttttgctgggaggggcagaggtcaccgcagccctttcctctcccagtttgtggaaatgcagtaaaaagaacacacctcccaaggctgttgaatgaaacctacattgcttatgacagtgtgtaagataaggctgcattgtaggccttgagactcggaatcactgttgttttgtaatgtcatcttt

SEQ ID NO: 59968 - DNA, 1041 bp, Homo sapiens
ctccctctccctctctgtctctcccccctaccttccttccttccttcctccctcgctccctccctccttttttcttttcttttctttctctctgtctctctccctttctctttctctctccttctctctctctccctcctttcccttcccttcccttccctttcccttcccttcccttcctttccctttccctttccctttcctgacagagtcttgctcttgtcacccaggctggagtgcaatggcgcgatctcagctcactgcaacctccacctcccaggttcaagcgattctccctcctcagcctcccgagtagctgggattacctgccatcatgcctggctaatttttgtattgttgtaaagacaaggtttcaccgtgttggccaggctggtctcttaactcctgacctcacgtgatctgcccacctcggcctcccaaagtgctgggattataggcgtgagacaccactgccgatcctctctctttctttctctctctctttctctttctttgttttctctctctctcttctttccctcccctccccttcccttcccttctctgctgtgtttccattctagaagttctttccttcatcccctcgttgctcctgcagagcatttactctgacagtgccccccacccaaggctcgtggctgcctggctgttggatgacagtaatgcatgcactgcacgtctcccccagaggagtaatgccggggaccatttgtagatggatgggaaactgaagcaaagcgtgcttcaatttagattccccaaactgccagagccccaataaaactagacaactgttgttacctttaacagagggtttgcttctattttcatgtgtaacacacaagcccatggccttgactgggcttggaggaggattgttagtgtttaggtattgtagtctctgaggcagatgcacgtgcgtctgctcaagtttaacatcagcagccgctctctcatattctgtgtctgtctttgctgtcgtagaatcccagtgttccaatgcagaagttgcaggatatc

SEQ ID NO: 59969 - DNA, 1060 bp, Homo sapiens
aaagtgctgggattacaggcgtgagccactgcacctggcctggctttttctttttgattataattatcctcatgggtatcaagcggtgcactggtcagctcttattctcaaagtctcgtttccttcatggcctcaggaaatggaaaagtagctcttcctcactgaagggctgggaagctctgcctctcatcattgtataaatgctatcagatatgtctgggagtttggaggctgggatgaccaacttagtgcccatttctgtagctccctgtcaatttaaagttgagatgaaagagagaaaaagaaaaactcttgctgaactagagtaaacaaaaatggtgacgctttctccattatgccaaaataagaatataaattttagcaacaccgtttggaagaaaaaaaagttttgatgtgtagcatcaattaactcccaaaatggagttttggaaacctcattgaacaggcattgtaagttatagaataagtgatataaacttacttaaggattttttggtgaaatagtctggtattttaattttttaaaatgtctccagatcccctcaagtttccatgagtttatctgttttagagactattattattgttgttgtgttgttgttgtagttgtttttgagacagggtctcactctgttgcccaggctggagtgcagtggcatgatcatggctcactgcagcctcccaggctcaagtgatcctcccaccttagcctcccaagtagctggcaccacaggtgcacaccaccatgcccagctaattttttactttttatggggacagggtctcactatattgctcaggctggtctcaagagatccttctaggctcaagcgatcttcccgccttggacccccaaagtgctgggattataggcgtgagccaccatgcctggctgagcaaattactaactgacactcaggacaaatatattttcatccagttggataggcatctacttcaaagcgtccttcccagtcactgccttttattctgtatctctctgtaaccaagcttcttggaaatttggagatattttaaa

SEQ ID NO: 59970 - DNA, 1153 bp, Homo sapiens
agcaatcctccctctttggcctcccaaagtgctgggattacaggcgtgagccgctgcacccagcccgatgtcactcttaagattgatgtgttagttgtatgagactgggctgctgtaatcaacagaccctaacatgggattgaacaacacagtggaagttcccttctcattcatggaccagccctaggcacatgttctgacgatggtgagggagttctccttcattctgtcatccagggtcgagactgcgccatcgtgtggctctgccatccttggggctctcacctatgtctgcatccagacagcacaaaggacaggaaggacatggagaagccacccataggggtttctgggcagcaggaagtgacacacatcacttccgctggctggaactcagtcagtggccacacctggctacaaggcagctggcaagtgctgtccagctgtgagtccagagagagaaacgatgggttttgtggatgtcatcctggaccacctgtaaagcgtttacatggctctgttacattggccctcccattaagtcttgtctgtagtttccatgaatacttctttgaagagatttgctggatgtgctcattaaatttttgccatttccatggctgagaaggaatgtgttcgtttctacttgaggtctgaatgtgccactgattctctctggatggaagctgaagtgtgcgggctttcagaggtggcaaaactgagagccttttctttgtggacctttcaagtgaaaccctggggaagagggaggtgggacttgagttcttgaagaccgaggaatctttttaaagggccacatgatatgcagggctgaatttccatgacttggtaatcagccttgagtactgggagtctgaattagtctttcttcattggatttccagggagagtcttctcttgggcctggatttgccttcagtatctggaagcccgcttagcacctctcccacccaggcacgggggcatctctttctgtcatgcgtctccctccagagtacctggagtcctgtgggacgcagacccctggctaagcagccacagctgactcctgatctgctctggccataacatcatcctgtcacccccagggacaggagtgtcacctgtcaacacttctgtttcatttgatata

SEQ ID NO: 59971 - DNA, 1766 bp, Homo sapiens
aaaaaaaaaaaaggaggaagctaatgagatagaatatacattcccacatttcaaatatggtacaggtttaggagaaccaaaaacttggagcaacccaatatgtaagaagagggactagttagtaaactagaccagaagctagcgaagagggactagttaacaaactggactagaagctagcaagggggatcatcaagattcctctcttccagccacgcttgtattgattcccgggcgtattgttcagccattgtctagagctaggcatcctctgctgctaacagccgtgtaaatatttaaattattggctagtctcagtcacctttgtccaaagctgtagcctcaatagctgtagccacctgcctgcttgatggatctttgatgatgatctttgtccctcactggccatacacttttgggacggctctgagctctgagccttctagggcttgtccatgacttactgctttgcacagagacgatgttgctttgtagatacttcctacaccaatcccaagaggagaaggggcacactaagtatgggttgaagctaccagacccatgatggagctgaaatcctactttagatgaggccgtagtgcagccagatgatgacagctagaagggtgtcttcctgctctggactctgcattacacttgggaaaaaaagagtgaagaaactcatactggaattacacaaatgaaccactgacaaaaactcatttgtgtgacttcttcaaaccctgaactgcaggtgaaatccattatcgaatttgatggtcacatgatcaacttaggtaagatgggtgcccctgatccaggatgaggaccaactttggccagtacaccctgataacctgagttaaccttagctaacttccccaacggtgggtgtgaattctcttccagcagcaggtagtgtgatgaacctctgggttacctttgttttttatcaactgtaccaaaacctcatatttttttcctagtagtgttattccttctagtgaagtgttttgggattccaaccagaacaccagggcatgtgcacacacgtagcacaaagatctattacaattccataaaataggtgaataaaaaatgtccaaagatcgcaattaggcagtttacaaaagacctaaaaattgctggtaattatctgaaaagatggtcaacccaaggaagtacataaatgagagacaacgtagggtagtaattatgtggattttggagccaggctgtctggattcaagtcctgattctgccattattaaccatgtgaccttcagcaaattacttaagctctctctatttcagtttcctcatctataaaacgggaataataataataataatagcacttacctccgagtgtgacagtttacaaagttgatatctgtagggtgcttggtacagtgcctgacacatagtaagtgttgcgaagtgttgcctgctgtggtgatgattatgatggtgatggtgatgatggtggtgatgatggtggtgatgatgttggtgatgatggtggtgatggtggtgatgatggtgatgatggtggtgataatgatggtggtgatgatggtgatgatgatggtggtgatgatggtgatgatgatggtgatgatggcggtggtgatgatggtgatggtgatgatggtggcagtgatggtggtgatggcaatggtagtggcaatggtggtgatgatggtgatgataatggtgatgatggtggtgatgatgatgtgatggtggtgatgatggtgatggtg

SEQ ID NO: 59972 - DNA, 1030 bp, Homo sapiens
ctcctgcctcagcctcccaagtaggcaggattatagacgcacactaccatgcctagctaatttttgtatttttagtagagacggggtttcaccacgttggccggctggtctcgaactcctgacctcaaggaatctccccacctcagcctcccaaagtgctgggattacaggtgtgagccactgcacctggcacctttcctttactatctaaacaaaatggcctgagctgatacatgttcatgggggtttcttggggtcttaagttttcatggtcctcaggcacacccacactgcagccaacttgccccatcaccgggctccttgtgcctgtgtgtccttagggtgctctttttcttcaacatttgaccttgggtggaacacggttatcttcagttctgtgtctctcaccaccctcctcccaggaatcactaaaatccagctattgtgcacagcatttgctgaagcgtttgtggctaatggggagggagggaggtctgattacagagtagcgcagaaaacaactttgaattcagtgtcagacatcattgttcaccaagaggaatttgttactgctcacgcctttctgtgggtcatggcttcctctgcttctgagagtgtctcctgatctttcttctcctcttctctaagttcaaggtcagcccaaatgtcctttctttcatgaagccttccgcagccactatgaccaaaggcgctgacccctgccggaagccctgtagctcttagtgagtgtatctttcccgtgacatctttcccagttgctctcacctcatctccccagccctctgctcgggaagaccctcattctcctgccccaagctgtggctcctagaggtgagttccttgtccacaatcacaaatgggagatgtgggtctttgcgtctgttgcttaatgtgtgtgtagcatctaccaaccagctagagtaaaaggttttattttgctgggcgcagtggctcacgcctgtaatcccagcactttgggaggccgaggcgggtggatcacctgaggtca

SEQ ID NO: 59973 - DNA, 1167 bp, Homo sapiens
agacatgaaatagggttaagaccttttttttttttttttttttttttgagaccaattctcgctctgtcccccaggctgaagtgcagtggcgcgatctcggctcactgcaagctctgcctcccaggttcacgccattctcttgcctcagcttccggagtagctgggactacagtaggcgcccgccaccacgcctggctaatttttttgtatttttagtagagacggggtttcaccatgttagccaggatggtctccatctcctgaccttgtgatccgcccgcctcggcctcccaaagtgctgggattacaggcgtgagccaccgtccccggcctaagacgtttttaagagttctttttcttagaaagattgaagatctggtattggacaaagatgaaaactttggaattcttttaacaaagaacataatctgtcttctaccatccccaatttagggggtaaaaaaaggaagttcttctttgggcactatgttgttgtatctgacttcatatgtctgttgttgaaattgagttgggaacttcccctttgtcagctgtgtggtatcagtgggaaaatgcagaaacattatgacttgcaataagtttttcttatggaaaatttagggataactcaaagctgccctttctgaaatttgatctgttatcaactgtataaatctaaatggaaaaatagattaacgacagtctttgcctgagggacctcctcaaatcaagaactactgtttgaaatgatcaagtgtctgctaagacttgcatctgaatgggtgatgtcaccctttggcccagaacaaattttttccagggttgtctaaatataggacacatactttgccatctttgtttgttagtgcaaatgtacgttatacatctatactagttaaaatcactttattttaacagaaccaagttctactccaagttcaagaaattgattgttgttttctttgaaaacatgttaatgacgttttaaaaatacgcttattcaaaaatcaaacaatagggccaggtgtggtggctcatgcctgtcatcccagtgctttgggaagccaaggtggaggatcgcttgaggccaagaattcaagatcaacctggggaacatagcaagaccctatctcgatgaaataaaaaatgagctagacatggtggtgc

SEQ ID NO: 59974 - DNA, 1098 bp, Homo sapiens
tggtttactcagttcgtagagagattcttgaaatgattgatcattgaaagtgtaaatcatttgcattctacttgtctactttaagatttattatagaaagggacttttgactgacctctaattcattataaaatattaacaaatgaagaaaaagaaaagctgactatgtgcatctcccatttgcaagttgtttttatctttgccgtgaatacttcagtggcggctgcaagtatcgaatgttcgagtctagaatatttttttttttaaagagaggaaaggaaattgcataggaatctgaacctgagccctgtttatgcagggatagaaacgtgtttgtgatagatagctaaatacaaatatgtttttgaaacggtagttctattgccagaaatgggcccaggtgcagatgcaagctgatggattagcttcagtacctgtgttttctttctggagagaccctggacttttatcttctctgctgtaatttctgtttattgttcctcctttgattgatattctaggttgggggcttgattaggacttctttgcttacactgttgagaatgcccctggtacaaagaattcctcatctgtgtgcgcattgatctgagcctgtcccccgacacctttcaagaagctaaagttcccagagtagcacccagaggcatctgtgctgccttcggaagttttcagttttgtatatcagcacattttatatattagaaaggttaatcaaaatttagagatgccccatggactgaaatgttttcaccaagagcagataccatgttaatagcttctagtgggaaaagattaacataatggatgtattgtactctatttaaatgtaaggagattaggaaaactccaaatgactgctctccttggattgcctgtttggatttgaatttagacaatgtgtgccaaatttgggggagtaaatgtgttttatttggctcatgtactgatgatatcgcagtagaaacctaggttttctttaagtagctcaagtttgtaaatgttaaaatttgaaagactctttttctatactcggcctcttcattcccatcagtttaaataaataacaaataatgagcc

SEQ ID NO: 59975 - DNA, 1046 bp, Homo sapiens
gcggggaggggcggggccatctgggaggggctgcggcggtgggcggggttagagggcgggtttgaagccggcagggtggggaaaggcggggctggaggggaggggtctcagaggcgggcggggttagagagctggattgaagccggcgggacggggagaggcggggcttggtggggagggacgaagaggtgggcggggttcaagcccgtggggcagggcggggccggcgggcagggcggggccggcgggctgggcgcggacggtgaggggcggggatggagggcggggcgggacggagggcggggagggggcgggacggagggcgggacggggcgcgggcggggcggggcggggcgtagcgcccgggctccgactccaagcagtacggcgggaggcactagagggagctgcggccgctccggcccggccccgagcaccgcctccccagccagcgccgccgcgatggcggaggacagcgagtctgcggccagccagcagagcctggaactggacgaccaggacacgtgcgggatagacggggacaatgaggaggagacggagcacgccaaagggtaggggcggcgcgctggcgcaccgggcgcgacagggcggggaccgcgcgcgccacggtctcccgttcgggggtggctcccaggactgggggttcttcggccgctccgccccgcgatggcttctccgtggcgcggagcccatggtgaggtccggggcgcgcggctcgcgggagagtgcagtgcgcggggaggcgaggcccggggtgggcggggaggctggggcccgggcggggagacgctactgtcacttgccgcgcgcccccggccagcctcgcccatccccgccggcggcctggcccaggaggcgcctgttgccctcgcccgcgggtggctccggtgggcgccgaggagaggcgctacgcccttccctttgtggcggccgcagcctggggtaggaggtcgccctcctctgctccctgccatccttgttaagtcccttcagactccctctccgcagccgccacccgaaaagaa

SEQ ID NO: 59976 - DNA, 1024 bp, Homo sapiens
aagaggaagacgatgatgatgatgaccaaggagaagacaagaaaagcccctggcagaaacgggaggagaggcccctgatggcgtttaacattaaatgagctatcgcagacccacctgactgtggaatataaaattgccaaatatcctttctcatggaagcgcgtacccgttcgtggaggaaacggaacggcagcccagccgtgggacggacgtggacgtttactgcattcctgtttgccgtgtaaatgttagaaaggaattaaagttattactcggaataaaggatgactttggcggatgtcgcccctgcaaggaggtggctgaaagtggtgtccagatgtccttccgaggactcggcgtatccgccaccagggacattaagaaaccgcacgtgatgtcgctatgctctaacgatcacctcagttctccctcggattctgggaacagatgaaactttttgcatcgcttgagtcatttttatcacaataatcctactgtgaagctgtcgttgagaacttaggttggcacgtagcgtctcaaggtatgcgttctctcaaaggaaagctatgcatcgctgcttcgttgtctgattttgcttagattttgctttggttaggttgcgttttggggtttgcctttttttgttgtcgcttaaatgcaatttggttgtaaagatttgattcctttgtgttcatctgttccgcttctcagcggtccatctcagcgtctcccttcaggaaccgctgagtgtcctctcttaacatccaagccttttaatgaaatcgtactgaaatctgtatcagctaagagtcctccaatcctggtcccattaactccaagtgcctttttgacagtgacaacagacagtccctcgctttttgttgttgttggttttcttaacccctttaatggaactgcctggattttatacagttattaaaggatgtctcttttgctttaaactgcatgctgccaagtgccatttggggtcagcatcctcgtttcaacacagtgtgctctctag

SEQ ID NO: 59977 - DNA, 1066 bp, Homo sapiens
cttacaaaggagcgtggtgtgcttgtagctaacatctctttctcaattccacaggaacgtggctgaagagcggtctgggtcttgtgcaccaggaaggcagccagctgacgtggacatacattgccccccagttggggtactgggtggccgccatgtcccctcccatcccaggtaacacggagccaacacttgcgatgatgcggatcagttgctttggtctttgagggttcaggctaagtatgctcttgaaaataacttcagcagggcgatcacatcttattcaaaaatggttaaaagtctgaaaatgagatgatgtaaagaaggtattttgcgggggtgggggacttctggttggaaatcttccatctagggtaagaataatgcatagaaaatagtcttgagtggctgttttgttcagacagctgccatagggaattcttcatcaaaagcccacagagaccagcaagacctcctccctaattcctgaaacagctgtggcctggtataggcacacatgtagggaaaagcactccacagagatgctagtgggaagtcaccactgggggcaaaaagcctggtggggcatttccaaaatggcttaaacgtaaaccagttgctttgtatctacgagaatcttcccctccatttaggatatgtgcattaatgcatatctttcagaacgtgaccaatagtttattttttttaacctatgttacccccaaaaatattctagaattgttgagttttgttttgttttgttttgttttcaaaatggtcatctcaggagaattatttccagtgatagcttctgttgctcaagctgcctttagaatctatattacttggactgccttctgccttcattagtaaatctctttcttggtggcaaatctttatgctcaaatggcaaatctttatgatttttctttttaaagacatctaaaagtcatgcacattcaagactggtgaataaagtaggtgacttagctaggtcgaaatgtgctgtgattaaaaggtgtctcttgtaaatgaaccatgaaggcagttctaaaatgcaagttcaaat

SEQ ID NO: 59978 - DNA, 1031 bp, Homo sapiens
aagaaaatgacagttcagacaaaaactgacctgagagtgtggtgtggaagaaaacaatactgaacttggatttcaaatatcactgttccggccgggtgcagtggctcacacctataatccctacactttgggaggccaagggggatggatcacttgaggtaaggagttcgagaccagcctggccaacatggtgaaactccatttccattaaaaatacaaaaaattagctggttgtggtggcaggtgcctgtaatcccagctactcaggaggctgaggcaggagaatcacttgaacccaggaggcagaggttgcagtgagctgagattgcaccactgcactccagcctgggcaaaagaatgagactctgtctaaaaagaaatatatgtatcactgttccgtatctgattttgtcctcctgtccctcacactgcctgtgtatcttatttcagacagaactgtaataaggttgtgtgtttcccaatagcatacagctccaggtgggaagctggggggtggttgtggtgggggagcagagttgataacagaacactgataacacgttataaggaagaaagaaaagggaaataaacatgagggtaggggggagtattcagcgcaagagcaaacaacttataatccccacctctgtattcttaaggacattcatatgtcagaacctagcattgtagttgatcataattatgaccctgagggatgaagaaaagtcaaaattgtattcacattcacagagcaggaggaaatgatgctttttagaatttttataaatggccttttcaagttttggcaaagagtcaggttacgtagaagagtagctcccagatggttcaggaggtgtcctggggatggctgtggtggggattggggggacgtctctttgccctcatgcagggaagcttaccttttatctgtttcatgtattagtttctgcctaagaatccattaaagagggggttcaaatgctttaaaaactatgtaacaatcaatgatgtagaaatttcagtaacgcaga

SEQ ID NO: 59979 - DNA, 1052 bp, Homo sapiens
tatgtgggatatctgcaccttcctttcagttttgccgcgaacctaaatctgctctttaaaaaatagtcttcagtgaaatcattattacaatattagcttatctttgtctctatatatcacaagccacatgactaggtgaagtaacccagattggaatactgaggtgggtgattggattatagggataaacagtactacactgtgcccccaaacattagaatgaaagaagggagttcatttctttaccaagtctgtgcgtagatgtgtgacgtgattttagaaccttgggcatcatcttttattttttgaaaaagaatagatgccgtagttcagggcattcagcaaaggaggaattcaacttacctaaggtaatatcaacatatccctaagaaagctgttattggaaataggcctttttacagtggaaatattcagagtcaaggctatggcttagaaataaagaaataactctcaggaaaagtgtctgtactttcccagatgtcaaaatcactcttaggggtgaatggggctttaatgagaccggtaggggaaaagggggtaatgtacctgcaaaaaaaaaaagcgattgaagtgatcacagatagcaaagaacccggagagcatgggacttgtttgggtgtgatgacagttcagtgaaaactttgtctcaccaaagatcttggcagccaggcggtcagttgtgacttttcatggagatgccagttggtgtctgttgccactgtggactcagcatcgcagtggctctgtaccactcctgttctccaatggagtgcaggaaggccgggtagcactggtcctgcccatgggagaacaaccaagctgtgatctcagaacatcgacatttgtttttcagtgttgcctagcaactcaaaaaacaatcttgtattatcaatccattcctaggaatcattaagccttttgtgtttgtctccccccaaaatgagaactttcataaaataatagcatcacatttgttctagtatgatcgggttcagggggcacttttgtttaaaaaccccattcttagggac

SEQ ID NO: 59980 - DNA, 1016 bp, Homo sapiens
caaagagctgggattataggcgtgagccaacgcgcccggccgaaatggtctttttaacttcacatttactatgaaaaatgtaactgccaaattcctggttgtaacagattgcatgtatgcagaaaaaagccaacgtttgtggatagtcattcaaaaataaccaaatgaattaaaatgttttctgaaaactttaagatggacatttcaaagaaaccatatgttttttcacttattatactcaatagaagcctgcatatttcataagacttttgttgctattacattaattgtaatattatctaagtagaaattaaaatattttagttaaataaaaaatctaaagacggtattagatcaggaaaaaaatggggaatgggccaacacatcttaagcacataaaacaatttaataattagctgctatttatgattacagtaatcgatcatctcaaatagtttaatactttaaattatctatttttgaggtaaatcaaaataactgccaattccaaattgtttaacagccagaaatggcacagatagcaacttgtgaatctattaataatttttcatctaaattgggtttggccaactgtggcctgaaagctaagaatcatttttacatttttaaatgattaaagaaaaaaatcaaatgggggaatgttgatcaaggggtacaaagttttagttcttcaggatgattaagctccagagacttaatgcaaagcctgctaactgttgttaataggactgtactgtatacttaaaatttactaagagggtggattcaaagtgttctcaccaccaagagaaagaagatgaaaaaacaatggtaactgtaaagtgatggatatgttaattagcttgatgtatatatcaaaacatcaggtcagacatcttaagtacataaaatttttgtttttcaactgtacgtcaataaatatgggggaaatgaatcaaaaggagaatatctcatgggtcgaaaattacatgaaatttatacgtaagcatccctaa

SEQ ID NO: 59981 - DNA, 1007 bp, Homo sapiens
gggccctggtggctggtttcacagggaaagcaggccgtcagggaagcacgccttcccgagtggtcttcctcctgccgcctttccgaagaggacatggcagtgtcctcctgcagcttctctgccccaccatgaaccccttcacattctcattggagcccatttgttatcacctcctctcacacctccctggatttatgctgagcctttcatctcttctagttctttctcagctctcaaaatcactgaaggctttgccattcaaagcaaaactcttcttaagccctatttctccttcaagtcacaatcttctcccgaaccttggagatacctccccttgccaggcacatgtctttaaactcccttttgtgctgcctcacacgattccttagaaatccctcttgctgagctcagcagagctacagttacgtgacctagtggccacttcttcctaacttccccgcagcttcaccaccctacccggttctgccttcctggatgtcttcatcctttctctggccctctctctgttcattgcttctcaatctccttcatgggttcttcctgctctgcctatctcttatttcaaaaatagctttccactccagctgccttttctgtgaggacccccagagctgctgtctttatttggaactttatcatttctcacttgaataatttcatagcagcctcctgcctgatcgctctgacatcagactctgcacccatggccatactccacctgctgtcagaattgggcaaaaacaaatcggaatctttcacttccctaccggtaactcccacacgctctcccctgcaggcccacacaaatccaaactcattgattgattgattcattggcagggtcttactctgttgcatggactggagtgcagtagtgcaatcataactcaccgtagcctcagactcccaggctcaaatgattctcttgcctgtgtctctggagtagctcagacttcaggcatgcgccaccacacccatctaatttt

SEQ ID NO: 59982 - DNA, 1028 bp, Homo sapiens
acatggactgagcaaatactgaaccactgctacaagggaaacgcagggctgagttcctgcaagcctctggtcacaacattttcatgaaccgatcaatagtacgtgcctttgttttgtgttgtctttgtttaaagaaatcttatttgatatatagattgttgattcattaacattgaactgacagcccatagcaccataactcatgcccgaacaaagctgatcgaacacacatgttttctccataaggcacagtcacaacctcctcctgcttaggaacattagacagcactacactaggggtcatttgaaacggtagaatcatgcctgtaatcccagcgactctggaggctgaggcaagaggagctggaacccaggatgtggaggctgcagtgagctgggatggagccactgcactccagccgggatgacacagcgagactccatctctaaaaataaataagtaaatagcaaaatcaccaacagaatgcttaaagacatgaaaagcttggccctgaatacatctaggggttacaaataagctttagcaagtagggaggtttacaaatacagaattggtgaataatgagcagctactacactttgatcacattcattttgactctgttaacatggtcatttgagaaaaaccattcccatcatatctgtttttttatttttttatttttggagacagtctcattctgtggccaaggctagaatgcagtggcgtgatcttggctcactgcaatctccacctcccaggttcaagcaattctcctgcttcagcctcctgagtagctgggattacaggagcacaccaccacacctggttaattttgtatttttaatggagatggggttttgccatgttggccaggctggtcttgagctcctgacctcaggtgatccacttgcctcggcctcccaaagttctgggattacaggcgtgagccactgtgcccggctgatatctgtactattacaaatgagtcaagtcataggaataatgaagtttaattgagttttgg

SEQ ID NO: 59983 - DNA, 1041 bp, Homo sapiens
cgccactgccctccagcctgggcgatagagccagactgtctctcaaaaacagaaacatccttaaagagatagctcagaacagacagcacagtcagtatcttgcccacaatatgtgcagaagtacttaagagacccatggagaattgtcttgccaatggcttctgctgttcctccagctctccatgtccttgggaattttccacagtgggtatgagagagagaaaaaaggaatcttccaagaaccatagccaggcatggtcagctccttccgtgaactttctcaggaggtcttttgtaaactttctgtagacgcttcgtgatcctcattcaagagtcaaatgttgggaaacaatcggctaattataaaaatggctagcagtgattaagctctcactgtgcacagctgcagtgtgtgggaagcactgtacccttgagatctcactagagctccatgagattattatgggcagggccactaccccatttcttacagatgagaaaactctgcttcagagcagtaagccagaaagggcaaagatgaccatcaactctaggttgtcagtccaaagcccggcactctgaatagcatactatctttttctagttttttttttgtttattttttttggggggtgggagggggttcttaactgagaagcttttagggggaaagggtgctttggagattttgtttcaccaaataaagttagtggaatgcttgcaggtggggaaagatcaggaatacttttgttgctagcaggcacctcacaaagtcaccaggcagtccacccaccaatcttacagtgttttcaagaagttggtatccatattttctggacacagaaatgacaggtcaaggaggctgtgaacttggccaagaccacgtgactggttaagtgaggagcctagaaaccagccccagaccatgtggtcgtgaaatgtgcattctgtgcccactcctcaggaggaatatttgtaatgtaaatgctaaagtgccctaaaatatttcagcttcatctgaaacagaaaagaaaactttaa

SEQ ID NO: 59984 - DNA, 1039 bp, Homo sapiens
aagcacatgtctttccccaccctaattcccatgctctcagctgggcatcagctagtccctgagaacaaagtctgtgaaagaaaaagcatagattttgcaatggccatcctgaagtctcttcaattttcaagaatgaatgaatctctgatggcttacctatgcgcactgtggcaggatgcaggtgagatactccattttgagggcaagcccttctctagcaatgataagcagagccatataggtagctgcctctcttttctaaggctgatgctgtttgagaattcagctgtaactttaccctcttaccacctattctgtctgctcctttgtggctgaaaataatatttcgtgaacaggaagacctgaagaaagtagtagtgtggcatttgggctggggcttcccagctgtgaacttaaacccattggctgggtaatggaatcagtttaatggctctagatccacattaaaaggaaattgaatggaaagtaacatataatataatataatataatataatataatataatataatatatattaatacagctcatgaaatattcctttcagtaagtataaatatgtgtagtaagatgtctagtgagatgtatgtattttttgtggtctgcagcttaaaaagtttgaaaatctctgatgtaaacaggacatgaaagccttctatatttatttataccttgcctggcatgttgaacccttgctctaactattaaatgaatatgaagtcagtatccacaatttgagtctcaaatactagtgtgcaagatggttaatttctaagtttatcttaatatcttgcaagaagtaccattagagtgtgataacttttagaataatgactccatgcaatggattaatttttaaatagctacttcaataaaaggcttaggattttttaaaaatatataaactctgtaagaatgtagcagattttaaaaatccacaacccatgtcacaaattattctcccaccccaaactttgtatagatttctagagaggaaggttttctcaacttacttgag

SEQ ID NO: 59985 - DNA, 1919 bp, Homo sapiens
gccatcctaaggattaaatgaattaaacacaaatgaccctgccttcatttgtttcatcataacttcccggccttactcagactcattaaaatgccatatcctttgtacagtatactatacaagaatgatagccacaggcccacaaaagtatctcacagggccaatactagacgtcaggtaggaggtctgtgaggcagcctgacccaggtgtttccgggagagatggctatgtcagcgcagatgcagctttcataaaccttaaaacatagcttaccctcacaagaatagctttaactccttttgtgaaaggcacacctggtaactgacccagaccgaagaggcaaactgaaaggagagaagttgcccctgaggaaggtggttgactagaaccacctgaaatccccaaacacaacactttgcatgttgtgtagtaaggtagatttaacttggcctttatagtttgagatagcaaggaaaataaaacttttctgaagactattttcatttttaaacccattaaactgcagtctgccttcttctgccttcttcttccttctttctagtcacacataacaccacctgtcaccagccttggtacacctgcattgtaagggctggtatgcactttaggctgctgctggaccaatacagtatatatcagtcactgtcattcatgacgcattagctctttgagaattaatgtagctctttaaccttcaaattacattgtctatgaattttaagctgctatctcatttagtttttaaaagtaagctttttaagagatgttttctattatctgatgtaccactgccttttgaccctgtattttaagcccaaggagaaaaagaaaaacattttgttagttaaatgcctcatttgttaaattcaggcatacctatgaagcaaagagaatttgcctttgggaagttacaagcttgagtttataaaccttggtttttaaattactttacctaataaggaacaatattccaaagtcatcacaatttaaattttaaatagtaacagattactctagtttaaaaataaccaagtttggcaaattagatgtcattcctgtgtatttgtcattaaggttctaaaaagaacagctcttagtgtttttggcagccgaatgtgttgtagtaccagtaatttaatcatgaaagaaaagcagcttttttttttcctctggtatccactgtttttcttctttctccccgtagtataaatctcatgaagaataaattagatccagaaggattaggaatcatattattgggcccatttcttcaagaattttttcctgatcaggtaacatagttgaggaaatatattcattgttattctgttgggatgattacctgtgattgtttgcagcattttctctttctgtacaatgtcctaatgcgcagatatgagactgagaaaacaccgttacatggaaaccttcccagacagagggaatgtgtgttcgaatacggtaacgcagtgccttgatggggagggcagcagaagatgacgcagacaccagtctatacacataatgatacggagagaacagttcggaagtttgaggagtaaaaagagaaagattctctttctccactcccacccccacttttcttctctcaggaagctgttaaatactgtgagaagaggtcaaggtggctgtgggtagtagaagcccctagctagtgaagctaagctcctggagaattaaaacctaagtgggtctgggccgtttcccattgggacatgtcttccactgggctttgataggagctcagttacctggaatagcagaggcatctgggccaacctgaatgtttttgagttgtatctgcatcattggcaagccagttctatatccaatacccatctttctgtctttgttctctaagtgaagcattttacca

SEQ ID NO: 59986 - DNA, 1036 bp, Homo sapiens
ttgaagtaacgcttcagttacatttctactacctttcccccaaaaagatttaacccagaaaaaagtaacctgatactcccttttcttctgtttagatcatagttttaaataatacttagaaattaccagcagtatcttaaaactcatttcagaacttttcctcattcattggtgaccgcaaaaaaaggttgagaatgtaacagatggcgaatagaaagaataactgtatcctgattttgtgcccctgtaagttcccctctgcataaaatttgaatctgtaaccatgtaccttctcagccagaatttcaaaggttatggtgttcatctataaatttcaacagtctaacggagacaattgaaaaagaaaaatgtgttagaaatagttaagggagctaaagcttatactagaataaatgtagaaatctgcaactaaggtttgggagtgataaagggaactgaggaataataataacccacatgtcagcaattgctccctaaatctgagagccaacactgcagtcctagctttggcataagagttaattatagagctaaggctgtattggtaatgtatcagaaaaaggaaagagggttttaagaaatactgttcaggttaaataaacctttctttgacccagccatcccactctggtgacctgctgtgcaaatataactgcacgtttatgatgttacatgttcaggtttatttgattcagcattttttgtaatagcagaagactagatacaattcaagggtccagcaataaaggactagatcataaaatcaaaaaggcattgaaagttaagccaaatgaaaacatgtcacttgggcgtatacattatcagcaaaataatgttggaaatgcagtgaagggtgagcctaagaagtttctagcaagggatggtaaatgagagacaactgtgcattacaaaattttacaaatgttaaaaaatgtcaagtggtttttaagttgctttaccttttactgtaatacatgaaaaacttgtaagggcttgcacaggttgccttgtttta

SEQ ID NO: 59987 - DNA, 1679 bp, Homo sapiens
aacattataaagtaaaattttgcttaaaggtaaattatacagcatttaccttttatttatttattggagggactttaaacactataatatgttgtctgcaagctaaaatgtcatttatatatgtgcagtcattcttgaagttagatgacgatgctcttggaggttctttgatgaatcgtgacagcagattgctcttcataacgatgaaaggcttaatgagaaaaactttaaagaccttttcagtaatgaattacttatccccagccaacccactgtacacaggccttatatttcagtaggtgtttagaaggatggctaatgttacaacattttaaaaggtttatggtgaatagtgaatagttacactgataatacagagctacgtgaaaaggagatatctgtttcatgattgtaggctattagatagtcccattaacagcttggtccacctacttccatcccccgcccccccgccaaccctctgcatttaagctgagtgaggctagataattttaaaagctatattgttttgcaatccctgttgaccagtaaattggttgaatataaattcctctgataaaatcatgtgattatatcagactaatgtaaagaactgcttttacaataaaaataattttgatggtaaatcagagcttaaattgctaactaaaacagtatgtaatcgttgagtctcatgtgtaggatctcttcctactgagggtacctaaaagagttccaaatgcagtacatgttgaaattttctcctaagtattacaactagggatgaagaaaagaaaatgcaagtgtatttgctgaccttggaatccctttacttaattatcattcgtggggttttttgtgtgtgtggtgggggagtgtaggattagtgtacatttgttagaacttcatcttggaagataattttcttaggataaatttaataagattcttggaagtaaagatagagtagcatgtttttctctgttctattagactgcgaccttaagtgcacagactgggtttttctctaccatctattaagcctgccaaatgtttaagaaattatggttttatgtatagttagatagagaaaatatactacatatggaacctaaaagctgttgctatattaaattttggaaatggaaaatctgagggtagaatcctcctcttcacatttataaagtcattacattccttctaactaaaccattttatgtacaataagaaaaatacggcagttatacctctgaagtgttttgtcttgattgtaaaactctctcaattgaatgtaattctatacttgctcttcaaacttgctatgcaaatatgcagtatattgatatattaatattaagtttgctacatggattagtctacagatctttatactaggaaccctgtttgcaagtgtttaagttaaataaatcggcaaaaattagtgtttataatttgaattaaaattacagagttaaaagaactgcaacatgaaacactttaatgggaatagaaggtggtttcataactttctgattacatctctgaacatttaaacattacataaatttaaacaaggtttaaataaaagatcattttctacagtgatccaaaaagcattgtaaacagtcaaaataagcaagccagtaatcactttagaagactatgtactggttttgatt

SEQ ID NO: 59988 - DNA, 1030 bp, Homo sapiens
ggaagagaggggaaagagcattctctacatgacaaatagagcaaattcatgcctgaagaaagaaggacagacagacagatgaacttgggtgagaacaaactgaaagacaagggctggagggagcactgagaattagggggacaaggtgtaagatgaagctggaagaatagcaggccatgttactctttgatactaagagttaggacaactagacttgttaaaaattggtagtgggagtagttttgggggaggtgggaaggaagggaacaggattaaattcacatttgtaaaagataactctagctaattgtggagaatggatatattgaaggataacccagggaataggtaaaaaagacttctctagttctatttcaggtaagcaaagagtacaatttggtccagagtagtgaggtagagaggaaaaaagtgcatggatttcagagatttactcctgaggtagaatgacaggactgggtgatggattggattggcagcggaggggtagaaatgtctaataagataggtgtggctaatgattagatcttagagctttagaaaatgtgtacttagcagctttgctgttgttgaatgtaactgcttgttattaaagcaatttgttcactgtatgcacatcacgtaataagtgggattggggaaataagaggtacctctcagacaggcatgtggagagctatgctgtagcttctctgacatgactttcttcttgtatttccctccaaagagcagtgatgggagacaatctgttatgtagactgatgcaccacgtagaaactgcttagtttttaaatttaaatttagcactagtgagagctgtcagaatcctttgacccacatctattctttatgccaaaggaaccagtccatagaggaattaaaaacttttctaatattgcatgggtaggaaggcagaaatgtgatagctaagatagagtaaaatatcagaagctgtattgaatttaaccttctgtatggggtaaaaagataatgtgttaagtgaattaataaa

SEQ ID NO: 59989 - DNA, 1018 bp, Homo sapiens
ttgattatttgggagcaaagatgttctttccctttgattattcataaatctactcatttgataaactataattattttccttataaagttattatcgtcaagtttatagttttagggtttgaggtttcatgctgaaattctaagaagtggtcattttatctaggaactttagcaaaacctgagaatgactcttagggctaaatagttatctccagctgtgttaaatctatattgttgttgttttaatgtcaaagcacaatataagctcagtactgacagtcttctaacactcatttttacattcagcatttgatctctatgggtgaagtgctcgggcacaatacattatttcagttaaatacaaattggacactttatgcttcagatatttatgggcaaataagaggcagtataaatttttaatttgtttatttgttttattttgctacatttgttctaggttggttcttacttgaaatctccaaaattccctatttggattgttggcagtgagactcacctcaccgtattttttgccaaggtatgcttatagcaggatttttttttaagttatgacatcaggcaaacaagtattataagttcatatttggtttggatctttgtgcaaacttcagtctattcccacaacaaatgaattgttcaaaaatctcaaaaactaatactgaagaacatactgttttcgtgctctaaatctggaatcttttaatcaaaatctatcatgatttagttataatttcttcttctttctttagagctttagcttttgatttttttcagaaatcacttgtgttatagagaaaacaattgaattttaaagttttagattgctttttttgtaagtaggataaaagatttatttaacttagatgatacatgatataaaatgttttaattacagcatctcctttgaaaaaattttaaaatctattaataattcaatggtattaaagtcaaatgctcttttaagatggaatacttcccacaattttaatatata

SEQ ID NO: 59990 - DNA, 1052 bp, Homo sapiens
gcaatgcaaccattaccccaatctaattccaaaatgttttccttacccacaaaaggagctctaaacccattagcagtcccatgctcctcccactcagcccctggaaaccactactcttgtttctgcctctgtggatttacctcttttgtacatttcataccaatggaatcatgtagtatatagcctttcgtttctggctcctttcacttagcatggtgttttcattgttcatctctgttttttacatgtgttagtatttcattcctttttatgagcaaataatattcttttgtatgttaaaccaattttatctgttcatcagttgggttgtttctactttagctgttatgactagggctgctgtaaacattgatgtacaaattttttgtgtacatgtttttatttctctttgtatatacccaggagtgaaattactggtcatacagtaattctatttttaactttctgaggaagtgtcaaactgttgtccaaagtgatgacacttatttatgcattcaatatatttttactattacaaaacatttcatgagtttagcattcatttattctttgatcttatcctttgtttgtttgttttttttttttacttctaccttaatttaaatacacactttttctgaaagaaaggttaatatctaatctcttcaccacacgaggcaccatgtgatgtgatggaaatccatcagagtagatagaagtcagaaaacttaagtcctaattctagctctgtactatttagttgcctgagatgagaccaggcacagatcctgtgtatttctctggttccttatgtataaattgaaggacttgcacagctcacctctaaaatcctcgtccactctggaactgtgattttatctttccctctttctttgttccttttcttttattcttctctgctgttcccaaaccatccttcctactttactggctcaacattgccacattagcacatctaactcatccctcccatcataggacaaaaatactagtttctctgtccatggatacaaaagagtacctattttcca

SEQ ID NO: 59991 - DNA, 1058 bp, Homo sapiens
ggggcaaatattttgttttaagataacagtggggaggtattttaacaaatccatttgtaatttttttaaatgagaaaatttattcattttgacttagaaataagtatatctttgtaagtgcttctctgcttgggagaaaaacattccccattttcctctcggaccaccctcctcaagctttttatggctatttttaccaaaactcaatgaaacagtgatagttaacctactctaatacgtgagtccttctttttagacctttctgcctgaaagatgaaagttcatgtatctttcatcaaagacaaaatattaataattatatattcatttttaaagattgtaaatattaagtaacttattagtctgtcattttttatccatttaaatatatcttagataaagttgttaaatgtatgtgaatatgtagaacaataaataccactgtgctgatatatttggtgatacatttagcaaggccgaatatataaaattgaaaatgtaaggttttccctaactttgtaaattcttacataatttaatgtgaaaagtcattactttatactttgctgtaggaattatttgatttggcaactatattcatatttaattgctttttaatatttattaatagccaaagtttaattaatctcctgctgacgggacatgctgtttctaatgtatgggatggtgatagagagtgctcaggaatgagtaagtatattccttgttatgttgctctctttgatgaataatatttcattggaatacagctgattattattcgtctatttaatggctctacattacctagaggttaagtgttttctaatagaagaatcctttacagttttcaaggcaccataatgttaagaccattaatcttggagccaggcaatcttgggttcaaatcccaaatgtatgactttagtgaagttacttctcaggcctttcattttctgtggtataaaactgggatttatgactcttaatatgtataaacacagtgcatatttattcagagatattactgcactctttgcttaaaatggagcattaca

SEQ ID NO: 59992 - DNA, 3143 bp, Homo sapiens
gtaatttctaggatttaaaaagtgaagttttctttgtgtttaccccctcttacaagaaggccactctattctttaaataactgtatattattgaagaatttactgatgccagacagttcacctaagagatgaagaggttccctgccaagtaggtgttctttcttaatgataaatatcatatatagtgatagttgtcagaaatagcttttggttttagtggctaaatttgtaatgaaaaatttagaaacgtcccaaaactttcctgtttgtatgtatatgttttaatgtataagaaaatttaaaaattttcccttttatgaatgtagttaatctcatcatgataccaatacttaattctttttttcccccagaaaaagatcgttcagaagtttaccagaattaaaagatgctgtcttggaccagtattcaatgtggggaaataaatttggagtattgctttttctgtattctgtattactgacaaaggtgtgttcaagaagatgatttttctgcctttgattaatgttgttcagtgctgtttttcctgcagtgatgagtaattttattcctgatggtgtttttaaattcttagaataaaaatcttttacgttgaaaatgagttaatttctgtttcctcagcactcactcgttgcttaagcagtttcacctctgctcttttggactacagagattatcaataatgttctggttgtgaaatgctgtcctttcttccaaattgtgtttcctttgatccttccgtgtagcacttgaccccttaaccccttctggaagctgtttttgaccttgattccatttcttgattttttttttgaaaaatcactgtgtgagttttctttctataatgtctcacgattcttattttgttttgttttctttgatagctttgtttccttctttatctgttacctcctgctcttttctctcctcctctaaatttttatagtccagaaattttcttccctggatccagtatgccttttatggatatttcatttgctcaggttacctttatatagctatttaatagttccaatatgtccccttctagtcctactctttttccccaaataccagtctcatagctctagtaacgtgttagtctcagttgactatgctattagatctatcatgtctgaaatcaaacttcttttatttgacaaatgttttttgagcgttgattgactctatgctagggactatgtctgtattaataatatgggatgcatttttaatggtatctatttagcattgtaaaaaaatggcacattaataattccattatggcagtgtgttttggcgtttggtcttctgtctgaacctattagatggaatcaagggcatactgtttctagtagggaccatctgacagagataggaccttgatgcatgagggcaagttttctatatgggaaagctggaggacattttttccagcagtgggcactgcaagtataaaagtgtaagggattgagggtataatgcaggtttggggagctctaagtagttgagccttactgtagcataagacaccagagaggcaactgtggaagatgagactgggcacatatgtaagaaaagacttagaatatgaagacctttctatgtacactgtacaaagagtaggtttcatctgctcagaattggaacacagtaaaaagtttgaacaagggagtgacaagatctttttgttgataaaagatatcttaaattgggataggagttgtgatggatggagttggtgtttgtaatataagactagagtcaggaaaactagaaaattgggtattgaaataagagcagcctaaactaggacaggtcatggaatggaaaacaaaaggagtatatttagaaatgtaaataaatacctatttggaatattaaatgtaaataaataagagaacccaaagtgcttagttgtgtagatgttcggagtagctgtgatggtggtatctaagatgactggtttcttataagctcttcttgactgttcagtattctccaactttcttatgctcaaaacgtttgatacctcctctgtttcttcttctttacagccaataaattatcatgcaagttgtccttccttgacctggtctttaaaatggtatccccttcctcagtagtgattgtgtcacttgttgatagtattcatcttgacattatcatagcctgatttgtattgtttaggaggatggcatatgcaagagctcatgcttctttgtttccccctgcgggatttagtcattctttaaaaatcttggttgttaattaatcatctatttaattcttagaaatgacctctaatatgatagaaacaatggctaaagttaagtgaatagaacaatgaatagcagtttatctttgtccttctggaattgatgaggttacaataagtaggtcttcttgtacttatccagtatgtagaacttttgggagttgagtgcccttctgaaggtttaaaaagtatcaggaaattggtttttaagaaaagaaggcacttcctgccctcctaatttgcattttgtcagtatacatttgaatgaccaacatttgtgagaaagtacaatcagaagtaaaccttccattttatgtaccagttaaataattaaaacgcaaattatttaatgttatatctctatcgatattcatgtgtgtatgtatttactgcaataagtttttacatgatctaaaaaaatcagttgccttaacaggctcatattcatttaacttttaaataattcatttaactattaaataatttctcctttctcctattaaaagttaattctctctccttgcccttttaaccaacggtacatatttcacccatgagtgttgtttatatagagcccatgaaagaaaataaaagatatttgaggaactattttttaaagttatctcaaatgcacccccatttcaaatctgagttacttgtggtagaaaagttacttaaataattgtattagtttatagtgtaaactagtcagtttttaaacagtcataattttcattttagttttttaaaataagtcaatgaattctgtttctttagggcattgaaaacataaaaaacgaaattgaagatgcaagtgaacccttgatagatcctgtatatggacatg

SEQ ID NO: 59993 - DNA, 1025 bp, Homo sapiens
aataaatgaggaaacaaacttaaagctgtcattgaacctgtgtagtttgaaagtgttatgcctttttatacatgtttgtttaataattaagccttaaacctaaagattttatattataaaaaggaaggttagctctgatgatattacttggatttatataatctgaaagattatttaaaagtgcaggacacattatgatatgtgaggcactgattatcagtaatttttcatactttataactgccgtagcatagctgaactgaaatgttatttaatcacccttctatattctcagtattatatcgattttagttatattcataataaagatgttgaaatataaattcatgttataatgaagttgaaaataaactgagaattttaagggagtaaggaaatagggaaagttttgattgcttgaaagtatttacagcctgctgtgtgtatcttgtgtcatttatttgccatgtgtagtgctgaaaagtgtcttttatgtatagctgccttggctgtcgaagagcttggctttgagcgatttcatgcattaattcagtaagtaacattggaacatttaaaatacttactctgtggacacattgccactttaagtctgttcatactgtggaaaggttcttagttttacatagaaatgcgctacttaaacataaattttaaatccattgcttcaggattaatttgcctttaaattaaaatagtttgtaaatgtataaactatgctgagtccttaattaactacccagatacgcttttcaaaaacattaaaaagctttttcatcattacaatgaaaaaaaatcattttagcttaatgtttctgtgacctaaacaaatatgaagatttctagtaggataaatattagaattatttatttgccagtatctgttttctataccttttattaagaataccgatatttttgttagagcatttaaactttttattacaaagtaaaaggtaaagatggctgttgatagaattatgggtggcatttggtttaaaatgtaa

SEQ ID NO: 59994 - DNA, 1050 bp, Homo sapiens
aggaataatcttgctagttgatggttttttataattggtagtcccaagtgcttatgttaaataagtgacttattctacccacagagcatcacattaactatcatctttgtggaaagttttcgtaaagagattacgtacctgaaagtacacttcaattgtatgggatacacattttgctttccatatagtattatctataaggtgctgttgcctccctggactaaaatgcctctgtgttgtcagtgtcttttttctcctacctctgcagttaaaatgccttaagcctggcaaattctaatagtagtaacatttgcaaggaataattttgaacatttgaacagctatatgatgcttccttttgaagcctttgaaatatggcctttcaaaaagaacttaacatattttagagtttataatgacatttgaagacaacaagtggaaaacagtcacaaggatgctagtccaaagtgtcactaagattggttttaacatattctccaggttttactgtgtgggtgttagcacacttaataggttcatttaggatattaaaattttgaaagaggaattgttgatcttttgaaaaggtattttaaagattttgtgcttaaagccagtctgtatattgatgtgagaaaatagtaagatctttttatataacattttccattagtatcttaacagtatactgagtgcatactatgaaatatgctatgcagttctgtggtgatacgtcacgttgctataggttaaagggccttataatgcattccctttggtacttcagtaactaatttagatgggcatattatattgaattaccctccagaaaacattttagtaatttttccagtttactttgtatctcattttaaaagttgccatgaagtaaaccatattttaaattttttaaataatgtatacatttgaaatactttgttaactgaaaatttgagaatttaccttagtgacaaatgaactgtatttatattacaatttttattccgtgtaacaatctattttacctgttctttcctttattcccagctt

SEQ ID NO: 59995 - DNA, 1012 bp, Homo sapiens
aggaaacctcttggcttaaatgctgcagttgctaaagttttaagaaagtgatgatcagtgtcacattatgatctttcataatgtttagttctgcatttttcagtattctttttctacttggtggtgttatttggatggctttatttaaagtggtgatattttaatccacaaacacattgtttttctaagacataatttaaaatctatttagagatttttcccccatttttaaaatgcttgattttcatcattaacccattcttactattgttattcatgacagaatttttttttttccagaggaaaccattataacttatgctttggttatttttagaggaagagcagaaggaactcctttgtcataccttgtgtgatattttagaaagtgcttgttgtgaccactctggatcatactgcttggtttcatggttaagaggaaagacaactgaggaaactgctagtatttctgggagtcctgcagagtctagttgccaagtggaacattcttgtaagatatatttttatttcctgaagtttttttcttgttcctttgttttaatgaatctattgaatattttgaagaaaaaattacttaaaattttcataacatgtattcttttccagcttaagcttaattactgagcctcactattttttatttccatatcatttattttaactacttagaagatactacatttttgcaaaaaaaaatgcatctcttaaacttttaaaaatgttctggttaacttctgcttgataataatctcttttgagctttagaactcttatttagaaataatgatatgcttcagtttcagatgccttaatgttttgctttggtattgcaaaaacggatttttttggacatcagaagatttcataaagttatctttacttgcttcccagagcaaagatggggacatttctcctcattgcaagctgtttcttttctttccgaattatttggatatttttatacatatagattattttaaggcaattttaa

SEQ ID NO: 59996 - DNA, 1032 bp, Homo sapiens
gtcaggtgactgggatatagctaccgttgaactacactttgagaagtagacacttcactgtgcagctttttatcaaataaccaatgtaacatcgttgactcgcttaaggggaagtttagaaatccatttgtcttttcttctgaatcttgtacctttttgagttaaacttgagctcctgataataaagtgatgactctaatagtgttaatcttgtgtcacagatgaagactaagggaacagaaccacttttatatttagatttcttttacctgaaggaatctaaatgaaatgtagacttgttcgtgttctacagggctttcactttgtgaatagagcagtaagtttgtgtgcttttcagttattctgttatgtgagttagttcttctacttgtcagaaaatatgtattgtggaagaagaagaattttatgaatctagaatcaagtttatagcagtatactctgaataaataactgcacagttcctgtcaaatgtgaggggaacccatttgacatctttacagaactagtcaaaagattagaaagggagtacacattattttttcccactttaaaattgaagaatgatatgatgtatggttataatgcatttcactaattattgctttaattgtgtaaaggcatttcttttgaagaagctcctgttttcttcggagaagtcttcttggcgggattgttcaggtatgatagctgtcttttaaaacttttgcttcctcctctgttttaatagagatgatctaaaattatctgagaaagtcaagtatcagtgggaattttttttcctgaggtttccttttaaaatgttttagaaagtttcatgaacagtgactccatatttccaaatttggctttctaaccaggggttataagacatgatggtataactaagggaaaaacgtttggcctcttggtaaaacacggtgcatttcctagaactgttaggtggcagcatgccataaagaacagtcttttttttttttttttttttgtagtcttatttagctgtgggcaaga

SEQ ID NO: 59997 - DNA, 1069 bp, Homo sapiens
tctcagctcagtgcaagctccgcctgctaggttcacgccattcttcggcctcagcctcccgagtagctgggactacagttgcccaccaccacacctggctaattttttgtatttttagtagagacggggtttcatcatgttagccaggatggtctcgatctcctgacctcgtgatccgcccgcctctgcctcccaaagtgctgggattacaggcgtgagccactgtgcccggccaatgccatgtaatgattagcttatagaatgtgacagaaagtttgaaatgatagaatgatatggtatttaaagagttctaaaaattgtttgaatttagtagactatctagtcctccttagatgaaaagtcagattcagtgtcattttactaaagtccatactttatcctcctagaggagttcctgggtgcaaaattgtgtgagtatatgtactcttacgtgcatttgggagtgggggtggataggttctatagatttttttttcaaaaggttccttgatccacacctcatgatttgaagatattttgctgttgtgataagtgatcattctcaaagcaaagtacatgaaagattcttttagctgctacttgaattatatttttaatctttcctacttgctttcatttttagggtttgtgtttagtgaatcagagggatctgcattagaacagtttgaaggtggcccctgtgctgttattgcacctgttcaggtaacatagactcctttaccaactccttagagggacattttgaaacgtttcatacttgtcgttttctaatgtctgtactccatatagtaattatgagacataatcaattaactcttaacttttgctcatgtaaattacaataaatatccaaaataaaaatgaattcaccatatcgatgagttgtgcaatagtagccttttgacaatctttattttcaaggaaaaataataggcgttccctgactttcagaaaattaggaagtttcttgacttctttaacacagagatcctattaagtaataacatgttatacactagataggtacaatcactgtaattgtactatt

SEQ ID NO: 59998 - DNA, 1723 bp, Homo sapiens
tgtattgtttagggaatgatatgaaaaagaaagtctgtacatgtttagtacagacccaaccatcgtttttttcccaccctcaaatattttccatttgtgtttggttgaatctgtggtcgccaaacctatggatatgaacggccaactgtagtttgcttttactatttctctttctaatccgaattacacttcaaccttttaaaatttggctactctccctagtgctgtaaatttatatttttagtattcccaatgacatgattaatctagtattttaatttatatctttattcagcagcatttgtaatagttgactactctttgcttctgatttttcctttctaggagctcagttaatgtgcttttctcttatccttctaatgtttatcagtctcctttgctgactcagcctctgctcactttttaaagttcccaacttcattatttttgttttacaagttctcattcactttaactgacatgtttaagatgattgaaattgctgcctctaatcctaagtcctgccctgaactacacacttacatctccgatttctaaaagttgccaaatggttatctcacatttttgagactgaacttggtattcctagaaacaaacactgccattatcttccatgccaaaacatcaacaagcattaattgagcaatagccacagtatgttgtaaacatactgtgggaaaacaatgaccagtaacacagatacaacaccggtcaggcaaggcagatgattaagaagtaaacaaacaataactacagattatggtaagtactggttgtgctaggggatgacaggagagactacttagataggtttgtaaggaaatatccctatgaggaattaacacctaaactgagacctgaaaaataaggatttatctatatggagagtagcggaaagagcatttttatgtagagagaacagtgagcattgaggctacaggtaaagtctctgggatgttctgaggacctaaggtcacagtagataatgattgtaagtgtaaacagagtcagctggattgatagatcatacagtgtcttctagaccacagaaaggagtttgggttttattttaattgcaatgagaagccactgaaatgttttaagcaggctgtgtcaaaatctgatttccatttctaaaatactttctggcaactgtgtggtgaatagttggggactggacaggagggaggaaggaatagggagacgtggttggaaactcaacagtatttaaggtcaaagattatagcggtttgaactatagggtggactggagatgggatggaaatggacacgttaaagatacgttttgaagccttgaagcaggcaggccttatcttagggtgaaacctataggtaagtttgagttttccagagaaatggttagcaggtgtatcaagcagaagaaacatttacaaggggtaagagacatagagaaaatgaaatatctcaggacctgaaagaaaatgtgcccagaatctaaaagggagaatggcaaagggtgaagagggagatgcaggcaggagccagataatacaggaccatgttaagggacttagactctgtctatgtctggagtcctaatctgggctatatttgggaattacatggttataacaaggaatggactgtctgggagtagatgagattactcaggaaaaatatatagaatgaaaggagcatagatcctaaaaccaagacctgg

SEQ ID NO: 59999 - DNA, 2215 bp, Homo sapiens
aattacaataagttgtttatttgatggctaatcattattctaaatagaactttataatgacttattagaacgctctgccacctttaatcatgcagaaattctttaacaggattagttccatcagtaccatttcaaaataaaggatttctttctttttttcgtttacagggtgcagttagttatattttggatatgtagctcttcaaggccttacactgattaagattttaaggcaaccaaacatatatttttgaagttatcgcctctgaatcagaggggtcctgttactggttttgatatgttaactgttgtattcatttgtttgttctttgaggccattgctaaatattgctgtggcagtcctttgggattgtgggaacaggcacaagacactgctttgctgcattactaatgtgacatcaactctggctttatttcatagtctgtgatcgtgtcttcagttgacaactgcagtctcattagttttctggaagcaagatacagatgtaagatgtttggcatgaatatttatacaattatgtctagagatatttcatctataaaattatattgattgatcaagttaaattcttttgatatggttgttaaaacaataagctgcaggagtggcacatagttgtttttaattggcttgacatttttagataattctcttctacaaatccctgttcgttttaaaaaatgcggggtgttttttttcttcttctttttttgggcagttttaattttaaaggcaataagccatgtaatttaagggcttaaagttggcagggttttattttaacgtgaaaatttattcttctctctgctttcctcctgctcaattgcctatagtactttttaaagaatagcatataattttcacttccttagctcattaacactatttatcctccccccttcccacaaactacaccagtattccaagctcttacagttgagagtcagtagggtgggagggaagacaaacagtaaatataacgtagcataaattacacatgtacaataaatagtttgaagatgaggaaatacagagttctgggtggggtgtcctggtcaggcctcattttaagatgagatttgagcaaacacttggagtcactcagctagtcatgcagaagtcggaagaaagagtgctccaggcagaacaaatggtagttataaaaaacttcacagaaaatacacttggtctgtttaaggaacaagaaggaagttagtgtggcaggagggggaataaaggaaaaggagagtaataaaagatgatataagaaatgaaatggcccaaatcatataaagctttctaggccattagaaggactttcactcatcttatacatgaaataggggtccttcgaaggtttgaagcaaaggagagatactacttgacaagtttttaaaggactgatctgcctgctgtgtttgaggatagactgtagtggattgggacagcaagatcagataagagacaatggcagcagtccaggggagaaaagatgctatcttggaccagagtagtggtagtggagatggtaagaagcggacagagtgaccacaaccaaacagaaccaaaataagaatcagctagacctaacagaagtagtatttcttgtataaataaaaacattttgacttatttggaatttattttcttttcaatattgattgcttagctcagtgtttggcaaacttctttaaagggtgagtggcctttttattgcctctcagctcattaatggtattgcagcaaaagcagccatggttagtatgggtgtggctgcattctaaaacatgaaagcagatgagggttgtagtttgctgacgcctgagggagagtgtaaactcttatagccatttttccttcttccaattattttccttcttccagttattttattgtttctcctaaagactagtcagagagagatttatttttgctatttgtagcagtacagtgggtgggttttttttttctttttccccaggggaagaggggcgtgtaggtgtagttgattgaaattagagctttgggctttcagtgtagcacaatttttgttacgtaatatgaaaaaaagatatttaacaaataacttaggaaaattgagggatccattaaaatataaatataaaatatattaggagttaatacagttgggttaatttaaggtttaaaggcgtgtttgggtatttattttaa

SEQ ID NO: 60000 - DNA, 1044 bp, Homo sapiens
gcctccagcttagcccagagcagtgcgtagaggaagaaggtattcctggagtttagaaacacgccgacgccccttcccaatacaaaaactaccaccccaccaaagggtcccagacagttcagaaaggtcagaagctacttccaccgctttccgtgcctgtttccgcctccaatttcacttccggggaggggacttccgggccctcagccttaaggggcgggagttaaagaggagtcggaagtggcaccagcacttccggtacggaaaactcgctgctgccccaacctggcttgacaggcttggtctctgcaagtggctctcagccccttcttctttcctgcctcaccttccaattcgtttgccgccgccgtcccgcagctgctgtttccggagttgccccttccccatgttccggggcaggagtccgcaaagcgaagatccgcccgccggttcctcatcatgtccgaactgactaaagagctgatggagctggtgtggggcaccaagagcagccccggtctctcggacaccattttctgccgctggacgcaaggtaccctggcggggctctcacacttgcagccgctgcttcttttgccctgcgagagtccgcctgtgacgcctctcgctccagcccctcgcgtgccccgctctctgccccagtcgccgtgctcagcgctgaagctggactttctagacacgccctgccttgccttggtggggagagtttgagtaggagaatggttacagctgccactaaatacccgcagcgctctttccatcctccgggctgcccttcggctggggaggaggagagggtggccccttgctgggttgcagggcgtgacacggaagatgcgccccgtgccccggtgtcactttctcaaggggtgctgtggccttccgcatctttaccccctaacagagctgtctattggtggtggttggtctatttttggtgagaaggagggacgtccaagggaaagtccaagtggctaattccaaaaagcagttttttgtttgtattgtcattatgtggttagg

SEQ ID NO: 60001 - DNA, 1033 bp, Homo sapiens
gaaaagatgattcttcccaaatgcagttatcagtggatacatttcagaaattattttgtcactgaaggacatttgaaatgaatcatccgtacttaccattgactaatacgttttttttcaggcagcttcaaagagtattttaaatatgatttcctggctatctgatttcggatctaagagtatcagacttaggttttgctgttaatgtcctaggggcagtgtgttcactcttttattctgagttaaacagaaggcaagccgggagcattgtgctttggacagagctgtgctgcattcttaggggacactggctataaatccagtctccctagaggttaacaatcaaagttctccccttattatagtcaggcgagtgatatgatgatgataaattgcttggacgtgactggcccaagcactagtgtgatgaattatgttgttcggggcatgaccgaagatcttctattgtcagctggcaatgctaagtattggcagtattcataaatagccttttgccaatggtggtctctgctttacatattaaattctctgttttcacaggttgtggttcttagtcatctgtgtcctccactgaattcacttacataatcagcctttttttttttcctgttccctacttattaaacgggtgggatgtgctcacttgtgtatggtaaacactgagttctttcttcacagaaactgttaaaagagtaattattagttctttttactaaatccagagtaatagcaacttatcttgcagtggcttaattgggtaattatttggtgtgtgaagagcactttgaagagaatattggtaaatattgttaatttcgtgctcttttatgtaactgaaagcccattgcgaccacaaaatccttggtgttactgtgtacccacaaaatttctttcctgatgtggcttactattttccaaattatttgtttgttgatttttaaaaacattttttaaattttcataaattctcaaagttatctcatgtttatgccttgacaattcgacatgtctc

SEQ ID NO: 60002 - DNA, 1043 bp, Homo sapiens
tgttcttttataagaaacaggtgatgcatattttcttttttttgttgttttttgagaccaagtctcgctcttatcacccaggctggagtgccatggcaggcgcgatcttggctaactgcaacctctgccttccgggttcaagcaattctcctgcctcagcctcccgattagccgggattacaggcgggtgccaccatgcccggctaatttttgtatttttagtagagacacggtttcaccgtgttggccaggctggtctcgaactcctgacctcaggtgatccgctcatctcggcttcccaaactgctgggattacaggcgtgagccaccatgcccggccaacgcatattttctttggcccacattttaggtgtttattaataagtgttggtcgacgcccaaaggagaaatctcagaggtcatggttgttatactatttttaaaggtctcccacaggatgcttaaggaacctatagcagtggattctgcctttagtgaaagtggaatacagctcatcatccttgtctcaataataaccccatttcctcattggtgaaatgggaacaataataataaaagtggatttcgtctcaaagtacatccgacggtccggtcttccactgtttttgatgactcaccttctgttgatcccttgcctacttcaccggtacattaggagatttaattaaagtgtgtagaggatctaagctcttcagagaaacacacagcattattatggcagataacacttctgatcttccataatctcttgaaggtaatgaaaccagcaatatagaaagctgagggtttaatatagtcagagttttatgaagacacatccatacaatactttattaatagtggtcatcattgtggccttgagagttcagaattcaattcctaggaactttctaattgttctcagcattttgatttaacttttttcctgtcaataaacacaatcgagagatcagttaagtattcaggtcatgctggttttactcaactttgaaggctttcctattttgttttcaaactatgat

SEQ ID NO: 60003 - DNA, 1042 bp, Homo sapiens
cagaaatttgtttgcttgggtagtggaggaacagtagaaagatcagttgtggccacgagtgatggttcacacctgtaatccaggcactttgggaggccgaggcaggcagatcacctgaggtcaggagttcaagaccagcctggccaacatagggaaaccccatctcctaaaaatgcaaaaattagccaggcttggtgacacatgcgtgtagtcccagctactcaggaggctggggcaggaaaatcccttgaacccaggaggcggaggcggaagttgcagtgagctgagatcgtaccactgcactctaacctgggcaacagagcaagactctccctcaaaaagaaaaaaaaggaggaaagatcagttgcttcaggatatttaatttagctaaaaagtgacaaatgaaacagtactgatacatggttagtttggatgtaagttattgattctgaatacttttttttaattacaattactgttgatttatccaagaatgcatagctatgattaagagatacaattaagttaaagaaaagtgaactgaatatcaaagaatatttccagtagataaggttaggactaactcaggcagaggactcccagtagaaggggtgggaggcaattaacaccacgcacgtcacttagatctgcagtggggatagattctgaagtcggcaggattgtgagatcgtatctctagttttattgatttgccttcttacatgggtatatgttcacagcctcccaccccttacggacaagagtttatgtgtgtgttaaatattctgattgtagttgtttgtttgtttgtttgtttttagaaaaaagaaatcctctttttagaacatctcttggtggtaccatcagaaatgtcttccttaagtggaaaagtccaaaccgttttgggccttgtagagccaagcaaactgggccgtaccctgacccatgaacacctggccatgacctttgactgctgttactgtccacctcccccgtgccaggaagctatttccaaagaacctatcgtgatgaaaaatttata

SEQ ID NO: 60004 - DNA, 1109 bp, Homo sapiens
aatgaatgacaaaataaataaattcattcacatactgtggtggatctattttgataaatttcacaacctataaaatatattccttctcactcttccttagcttaccgatgtccttatgaatgaaattctccatggagctgatggaaccagtatcaagtgtggcattattggagaaattggttgctcctggcctttgactgagagtgaaagaaaggttctccaggccacagctcatgcccaggctcagcttggttgtcctgttattatccatcctggacggagctccagggcaccatttcagattatccgaatattgcaagaagcaggcgcagacatctccaaaacagtcatgtcacacctggataggtaagtaggctgtcttacaaatggatgcaaactgccatataattaatgcatgatcaaattaagaatctacagtaatcagtcaatgcaatactaatcacgcagagaaaaccactaactatatggaaggtagtatttataaagtttcacaactgacatgaataaaagtcaatgctgccatttttgtgtccctcctctgtgtcagatagtgtcctaggtatttcacataagatatttcgcataagtcatttcctttaatttactcaatcctttataactcataacaggtgtcactgtctacttcatttctttgtctcatgggatgctatcaaagtagctgccaattccacttgctcaatgtttaccagtagttggagtaataaagttatcacacatataaagggagggaatgtcaatggtttcacccagagaagaaaaccgcaaatataaatgttcacatttgtgtcacttgtggtttgaatcatctgaattttggaaaatgcaattataaaaaataatagtaataagtatagcatgtgttgggtagtatcatgcattagtttcctattgctactgtaacaagttatcacaaactgggtgcccctaaacaacagaaatttagtctctcaaagttctggaggccagaagtctgaaatgaaactttgtcagggccccgcttcctccaaaggctgcagggagaatctttccttgcttcttccatagcctcagatccagctgttccatgg

SEQ ID NO: 60005 - DNA, 1082 bp, Homo sapiens
tcttgactgtaactccatgtctgtcctacttttcaataagcattcgctgactgcttccagtaggtttgccatggtgctgggcttaccgaaacaccctgcaaggaagacaaacgacatctctagcttacagataaagaaactgaggcacggagagggaggcaaacattgctgatcatttgcccagagtcatcagctaataaacgtcaaaagcaggatttgagcagcaagttcagggccactggctcccacctggccctttgtagtgacttgttctgcagccccaggatgttcagacacacacagtgggatctgaatataaaaaggcagagactgaaacagtggaacattccagttcgctccgaaaaaggagaagagccctgcagcttttgcaaccccttctgaaatcgcttgcctggatccccatcgtcagggccaagctgaacacccacctcagcccttcccgcattcaacacttgactcgaagcagggccttgtcaattcctctcaattcctactgctcctctccctctgctgacctcttatcattgccaagactctttccttacactcgggtattgctaggtttccatgggcatgaacagtggagtcatctttctgtcaacttttagaatccttacagtttggaggccaggtgcgtggctcacgcctgtaatcccagcctttccaaggtgggtggatcgtttgaggtcaggagtttgagaccagcatgtccaacgtggcgaaaccccctctctactaaaaatacaaaaattaggcaggcatggtggtacacacttgtaattccagctacttgggagactgaggcacgagaatcacttgaactcgggaggcagaagctgcagtgaactgagatactgccactgcactccagcctgggtgacagagcaagactccatctgaaaaaataataataataatccttaaagtttgaaactatctttgaataaaaatgtacatacgtatttttttgctctgtgcggataaggggtttgggaaacagaggaaagatctctgaggctggaaggaagctgtgtgtgtagctgaagctacctaggccgtag

SEQ ID NO: 60006 - DNA, 1036 bp, Homo sapiens
gctccgaaagtgctgagattataggcatgggccaccacacctggtctgctccataagtggaacgtcattcaccttccagaaaatccatgggcgatggaggaggggaaaataatacagtgctgtctaaaatctcatgatactggccgggtgtggtggctcacgcctgtaatcccggcactttgggaggccaaggcgggtggatggcttgagtccaagagttcaagactagcgtgggaaacaaggcaaaactccatctctacaagaaatgcaaaaatgagccgggtgtggtggtatgtgcctgtaatcccagctacttgggaggcagaggttgcagtgagctgataatgttccaatgcactccagctgggtgacagagcaagactctgtctcaaaaaaactcacgataattatagattatcatgccataatctaaccagagcacagaaggaatcttagaggtacaagccctgtagagtttcacgtaacatgatttggttaaggggtaaatatgttaatattaaagtgatttgctctacagggttcctgggcaaagcatgttaagttccattcagatgcccaaccctgaccaggctgaatcctttgcctggagtgctttatctttgtgaggtctggcacattccaacagagcacctgctcagtgtgtgatatctgccgtggatatgagatggggagtagcagtgctcaggccagatagttaccacccctgtttagatccacacacctcctttttctgtttggggaaatgcaaatcaccctgctagtggattaatcccaaagccttctgaattccaattcaccattctctgccctgcactctgacacctataggcctgaacttagattaaacgtgatgtccagctttccactgacatggtgtattagtccattctcacactgctataaagacatacctgagactgcgtaatttatatagaagaggtttaactggctcatggttctgcaggaggtacaggaagcatggcggcttatgcttctggggaggtctcaggaaact

SEQ ID NO: 60007 - DNA, 1033 bp, Homo sapiens
ctcagtacatggtcaatgggttcattagtaccccaaactcagcatcacacattttgtccaggtgacaaatctctacatggaccccctgaatctaaaatgaaagttgggggaaaaaaaaaagattagaatgtactttttcttgatttacacagtgtgttaattattacagtttttttcaagttgagttgtagtctcacatgcagctctctcctaatttcatacttagacattcagatcattgaattgtatctgcaaaattgcagttcttttaaattagcttgccagagcgctgtgggtcctgttcaggggccctgaggccaggcagtctgtgactctgcttgctccttgataaactttcatgagtagcatttattttaaatcatccaagaacacctcaagggcaaggatccttaaccttgatcctgggccgtggtgattcacaaaggcttatcctttgtagatttaggctcatctttcagggagctcagtttgatatgcttttctctcctcgaactctgccattcaacattttttttcccatatctattctcactgagtgctaattttagttcaggttgcacctgtgtgtatgtgtgtgtgtaaaccctctgtagccctagtttatagcctttttcaataaaatcacatatccagagaaattgtttttccacatgagcactttttcagagtgttttccagaactctgcctgctgttctaaagtcaacatcagttgccctctttagaacgcttccctaatgcaatggttctgaaatccctgaatatattgttacaagcacagttctcttcagaaaaagaaaccttggaaatggtggatctatgcttttgtttttcattttggagcttggagaagtttgttgacctcacgtcatcatcagcctccagttgaatctgttaaacagccaatgtgaatagtatctatataaaaacacaaagtaagcacagaaacactttttcaggggaggtattttgtcatattgaaacagcacctgtattggggttttaaaattttaa

SEQ ID NO: 60008 - DNA, 1803 bp, Homo sapiens
gctgcatcaggagaatttggtttggatattggcaaaagcagccaatattccattgcacatgtataccacaatttgtgtatttcatttgcctatattgggcatgattgttatttccagtaggaggctgttacgaatacagctgctgtgaacattcatttatggacgtccgttttcttcccagaagcagaatggctgggtcatagaataggtatataataacttggtaagaaactgccaaacaattttctgaagtagttgttctgtaaaagtaaccaggcaaatgtttcagccctgaagatagaaaatgagctataataaatgaaaagtagaaatttacaagttagaaatttagatagaatttctatcactatagaaagtcagcttctgtcgtttctacttagccacagctaagtcttagcaaatcttaggaacatcaccgaacatccatggactcaatttccttaggtaattgaggtaactgggtgacctgtaaggtcccttccagaccccacattctttgatttttggtggaattgtgccaaatggtaatggatagaaagacacctctgtgtacatttttatcccatgggagttgagcagcatttaatatactggacacagtaagaaaaaatctagaacataagatgcagaggcaaaaggatgaggctgctacaaagtatatacttttgtgtgaaaatcacatattctttcaaaaaaccattgtaaggtgatacaggactctactcgtgtgtaaaaagttatatacctatgaatagctccaattctgttttaattataacaaataccgggagatgcatttggatggtttgaggaaaaaaaggttgcgcatccactgtttggaatcttgtggcttgttttgaagccagcgtaacaaaacatttgcctctattacttttgcagtactgctgggcaagtgttttgtctgcctgggctctctctagccaggagagaagaaatttctgtttcctcccaccagacagagtcggtagccccagggccatctttgcgctagctctggtctgtaaatgtatctaaataagccttgctataaatctttctctgttaatcttctagctgttcccaaacttcagcactgcctggtgaaggtgtacttcgccaaagactgaggagtcatggttcacttggtggaagctgtctgataaatagaggatgctggaaaagacagattgaacgtcagtgtgagatcgtgcactgccgtaatctgtctttcaggttaatgagaattaggaattgggaggggaaaaccagttggagatagctccgaaccaggtggtgatcagtggtggaggtagatgtccaatcggtctcggtcacccttcggggtccaggggttgtgagatcctgacccacccagggcaggacaaatgccctctgcttgtcactgcctttttggaagggactctgaggagtgtgagcattgaaaagtacacagaagcccatggaatcgtggagttaagacagtggaggtcacttaggccaaactcttgacctgggtggagtccttttcacggcctccctgagctggttgtcgtctggcccctgcttgaatacccccagtgacctgggactcaccacctcaacatagtcactgtataggactcaggcattccagaacattccttgaggactcagtctcaccacaccagtgctgaataacctttcttccatgataagaagaaagactaaagctagcttggggtaacagctctggatgtttttttttcctctccccaggtggggatgggtgttggacacaataag

SEQ ID NO: 60009 - DNA, 1048 bp, Homo sapiens
aagcagcttcacacaggagagagctaggagacagatcagataggaggtctcctgcaccatttgaaggagtttggcctttgttcacaaggagacccgaaagcctgggtgggttttaagcaaaagagtgacaagatcagagtaattttttcaaaatgatcactgctacaaggaggtaaaaagggaagcgcagaaaacaggaggcaactgcaatcatccaggcaagagctgaaagtggcttggcccagagtgccaaccacagacaggatgagaagtcgtaaaatgctaggtatttattcgaagcgggagagggacagagtttggcaaagaattggatgtaggttgggagagaaggagaggagtcagggctcactttatattttagctgagcgacttgaagaatgatgttggcattactaagatgggggaatattgagagtgaacagatttgaaggagggggcagtttggggatagttaaaggtgagctgcctccagatatctaagtggagatattcagtaggcaggtggctctaggcatctggaggcaggattgagatcttggctggagatagagatgtgttgttggttgataatgatgagtctggaagagatcacttagcaagtgagtataaaaagaagagaagtacttcatacaccaagcctggaggcaccagcagcaagagaagagactagcacaggaaactgaggaggagcagccagtcatgaagaaaaccgagagggcgcagtgtcctggaaaccaagggagttgagtatctccagaagataaacgttgttcgctttgcccactgctgttgatgactggagtaacattaagagggagaggttgcctttggagttgaggatgtggaggtcctagcaaggccaggagctggctttggtgacgaaatggggctagaagcttacccgtgatgggtacaacatggataagcccttgaagagtttattccaagtgaaggcaaataaattgcaattgctggaagaggatgtagggttaaggaatggtgtttttaagaaaggcagtagcacaat

SEQ ID NO: 60010 - DNA, 1052 bp, Homo sapiens
aataggaaaaacctgaacaaattcttaggatgccaatattgtcacaaagtctccatgcagaatgaagttgtttgacaaagtgtttccctggtgatttggctgcagatgaaaatgtctttggcaataaaatttcatgcccgagtctcagctctgtgctctcatcagtcaacaaatgacatatcaaggatcccttttgctgtattagttaatatgttggcagaaatatgtgaaacattgttattcccctccagttctgtgcatagatttgtttctacctttaaacccgcattaattgtaccaaaatattttgccagctataatttaatactaatcaataggattgccttagaacagagataaaaggttctttattacaagggttctcttacttcaccagtattagaagatataatagtaagggctgctgttttgccatcgtttgaaaatggtttgagggaaatttaaggattggtaaggcaattagtagtgaagcatattttaattatagtaactggataagctgctttcagctttatggattaatacgttattgtttaataggccggagtcacgtgtgattttgatcacacttctcactgtagccacagttttattagcagtggtgttttataacttaataatttatacataatgagttcagaagttccatttacatgatatccaagaaataatttaccccatacattaccactcgtcaacaggaaagaagtccttcaggatcacaacgaaataactgtccgagattgttttgcattaaaggatacttttaataatgagatcattttacactgcattatgttatttctgttgatgccaagtctgggttttacaaagtcatttaaaacacaggaggaagatgaatcacaataatttcacacatatttaataagcatgaattatccactgaagtctacatccattctttaagttgtgaaaaccataaggtgtttgagttaatgctctgttgtagaattttctcgtctagcgcggccctcctccgtgcaccccaccattcccgccaggcctcctcg

SEQ ID NO: 60011 - DNA, 1917 bp, Homo sapiens
gatcacagagttaataaaggcagataggtaactctatgggctgttttgcatactgctcactttatgttatgtgagtgagagtgaatatgaaatacaaggtgtttgtcattttaattcttggaaggaggagaagtaaggcaataagagttccaatatacttgtttctaacctaattttgtatgtaatatataatttatatattttaagtcatgcattcattattataaataaagcttctgcccacaaagtactaagttaataatctagccaattttttaatgtatgagcattatttatgtactgaaaataacttttacatcttcaaagtatctactaggaatcattgaagcaaagggtagctatcatttttaaggcaatgatggtatttcatgtctcagtaacagatcacatcttccatgctcttctataaattgttatttatgtgtttgaagtcatccagacaaatccatatcacccccatagctgggcattactgagttcatatactgtattatgattattaaataaactagttctgtacagattcacaactgtccttcaaggtgatatctctacatagccgtgctgttttacaaatcccatcattatgaaaatattaattttttttgtctcctaagtaaagtaagcagtaaacacttgtacttatcaaaaaggacttgttaacatttcacctcttaaaattaacattttaattataagcattggtagttttttgttttgacttgttatttaaagaataagcatgaaattttactgtacataaattatacttcaataaacctggcttttagaaggcaaaggaatgcataactattggaaaggttgagactggcgaagaagtatgcataaattcaaaacggaatttacaaggattttgtttgatgcggtggttagtcttttggaaataggtttaagattagtgcttttacatacataatatatgatttcagggtccatttagagaatatttatctgtatgactagaagagaatgttacaaattgaattttaagaataatgctctaattttacataacgccaagcatgatgtttctttgtttacctaccatattaaaagacatgccatcctggatatcattaatggccaaaaaacttaagacgaaagtggctcttcccccagcatgcagcagacagtctatgaaaaatcactgataggaaaggttagagactcaaaaatctatcactggtaatagattcctattgctaaccagagtccaaggtgagaagctggcattggtgcagtttctgcctgcaagatgccctctgtgggtctccgcagagcagcacgttgtttttctacagcttctctggattatcctgtttggttttgcatacatttattaccatgtcccttgcctcttttcctcctccctacctgcctgccttagctcatctcactgtttttttcagtaacgttattacagagaaagtggatttcagtattcctctctatcaggtgatgcgtcaggtgacagagaaaatcagaatcagactgaaatcagactgctgcctgttatcaattccatctctgtttccatatcctaaaaaaatcaagagcagcaggatgtttttataaacctgtaataccaagtttatgaaagttagctgaatcttagattgtcagcgctaaaaggaatcctgtgggacacttttcacacttggagcagccagcttgtcagagggtcctgggccaggttccaggccctgctgcccgctctgctacatggatcaggtttctgatgccttaccctgctcagagccaaactgtacaacccagcccgtgccttcctgctctcctgcctggatgggaagtcggtctgctgtgaaagtgggcacgactgctactggatgtgaacctgggatgaatatccctggg

SEQ ID NO: 60012 - DNA, 1052 bp, Homo sapiens
aaagtcagagctgaaaaaattagcctaccaagaaaggaagcagatgggaaaatgtgtctgcttttgccattgctctacatcaaggaaaaatagtagtcatcatagtcatcttctctcctctcctaaccatttgtgactataagcttaatgttggatgggcatgcagtataagtatacgctacttgccaggtcatggaaactacatttaaaaaatgtagataatttgtttccaaattggtggaactctgtggcatttggtagagataagcataaatctggagcaaagcattaacaaaatcgtgtcctaaggattcctacagattcaactgatatgaagtcatcataaatacttacacacacacacacacacacacacacacacacacacacacacgcactctctacatatcacacatacactctcagggaagcaatgaaaaattaccaaacagggaataacataagccaaaatttgcaagactcagcagaaacaagaaacacagatctacatcccccatgccttataacattggggtgcagaatactgcatatagaaaaatacatgtgagctatatagagaaaaacgttgagcaaagagtcagcaaccatcaaaaacaaccagaaagatctgaaaaataatagaataacaagaaatgaaaaatataatcattgcaattaaaatttcagtagataggttaaaagggtattacacataaatgaagagagagtaagtgggccaggaacagtggctcacacctgtaatcccagcactttgggaggtttgcagtgggtggatcacttgaggccaggagttcgaggacagcctagccaacatggtgaaaccccatctctactaaaaatacaaaaattagctgggcgtagtggtacgtgcctgtaattccagctactaggaggctgaggtgggaggatcactttgagcccaggaagtggaagttgcagtgagcctagatggtgccattgcacttcagcctgagtgacagaacgagagccttcctcaaaaaaaaaaaaaaaaaaagagagttcaagaataa

SEQ ID NO: 60013 - DNA, 1094 bp, Homo sapiens
cagtgggaaaagtgtaaaccaccatcaaagacagaaaatgaggtcactgcagtgtgcctccttttatttacagatctaggaaagttaataatgagggagatcagaggaaggggagtagaaaggagacaaaataggaatgctcttgaaatttatatctgaggacctttgtgactgcactgagaaccagggaaagcagtaaaacttggggggaaaaaaaaccatgttcaattaaatcctatttcaaatgttttatgatgttcaaattttatagaattataaagttcaggaaaccatagaaatgatctcattttccttgttactttttagatgatgaaattgagttccaaaatgattaaatgaccaacccaagacgatctagctaggtaatatattttgctcacaggatcttctcaaccactggtccctctgcctgaaacgtgtcttctatacaatactcatcgtccttcattgcacagttaatttccactgttctgcagattttaggtcttttatcactttcctttgggagtctaccctgatcactgcccccacatctcatcaaggtcaaataatgataataacagaaaacaacctcatctaatgttcattgaatacttattaatcatgataactctatgaggtgaatactgcttatccccattttctcaaaggagaagctgaaatacagggggattaagtaacttgctcaaggttacagttttaatatgtagtagagccagaattgaaacccaagcatttctcactgcaaactccaagctcagtcctagtctaccagttattctattatcagaataccttgctcctcctttagcatttattgttctcatatatttatatttatttgtgtggttatttgattaatacgtttttttctactagaatgtaacttttaggctcagattacgtatctttttgattcaccaaattttgcttagagcctaagtacctgatatctggcaggctcattgaatatagttcatatgtaaagtagaggtgataatagcatattttggccaggcacagtgcctcatgcctgtaattgcagcaccttgggaagccaaggtgggcagatc

SEQ ID NO: 60014 - DNA, 1033 bp, Homo sapiens
cttgaattgtagcttccataatccccacatgttgtgggagggacccagtgggagataattgaatcataggggtgggtttttctcatgttgttcttgtgatagtgaataagtctcatgagatctgatggttttataaagggcagttcccctgcacacagtctcttgcctgccaccatgtaagatgtgcctttgctcatccttcatctgctgccatgattgtgaagcctccccagccatgcagaactgtgagtccattaagcctctttttcttcataagaagtttaatttataaactactcagtcgtgggtatttcttcatagcagtatgaaaatggactaatacagggatcaacctgtgttattttgtagtcgggcttcagtctgttaatgcatattaaagggtatgacctttctctagaatacttactagtatttgtctcttttggacttgaggatggactcctggcttttcttggctcatcatgtaccaactgactgtaatcagattggccaggacagtctttaccaagctttctgcgtgatcccttctttgtctttgttttattagctctagactcaggctctaattctgttgcccatccaagaatgagcccttctccagggagctcttatccactaagtggaaaatcatattagcatccaaatctgaggcccaggaaagttttagagcatggaagcagaggcagggtgatgtcaggtctgccagctatttgagtgacaaagcagaaaaattactttctactcaaaggagcacgcgttcatgttgatgttctccatttacttctatcttttttacatttattttgtccttactatattaccagaatttattaatccagtccccctttgccaagccatatgtactaaatgaaaccatgtgtttatgtgaatagtgatcccatatttccaaattttccttttcttgtctcttcctgacgctggtctctagtgttctggaattggctgccaagtgtgtaagctcaggaagttccccttgttactgtccacagag

SEQ ID NO: 60015 - DNA, 1088 bp, Homo sapiens
tttcaaggtgatatcacctcgtaaaatgagtcccgaatcttggaaagagacaatttgaaagacagcttgagagaaggtttctcgcttaatgcatggaccatcccaattcttggctgaagcattgtgaaatcttccactgtttataacacctgtcagataacattaggctttcctatgttcttggaagaatctgtggcagtctgtttttccttgagaatcaaatgagaaaagatggtcattcatgaagaccaacaaaagagaagaataaagaaaaagcaagaaaatggatttctacgttgggtttgttttgttttgttaggggtattttcccacctaagactttaagtgagagaaaagcttttctatttttgaaagggcatgagggtttgaaataaggaagaatggatcttgaaagaattgattgtgtcttaaaggatggaaatgcgcttcggattcctacagtgagacaaggattttttttttgtttcttttctccttaatttttttaagctgtcaactaagatgacgtgtgtgtttcagactgtttatgtgggattatgagcatgtttaatctgttcttgtgcattcccaatagaaactgcgtgagtggtgtgatcttttaatagaatgtgtcttgcaactaacaaatgtattttggtgctaaattctggataattcctaagaaatgtaaatgttgtcaataaaagtttttgttttgaaatacttataatcttggagctatattattttaagttttctgaagacagtctctgcttcatttttctaagtttagttgagacagggcaacaagaaaaaatactggccataaagtaaaaatattctctataaatttttggaacatggttagaagagaactgcaaatggggaaacagctccttgcaggccactgtacacatgcatgatacaagacgacttgggtttactctggtttcagtactaagagtattgagtggcttttactagaaaaattcaggacctgcattataaagtcagctactcccaacttcctacccccatttttattttcttcatgtagattagtgtgtgatacagtttgcctcaattac

SEQ ID NO: 60016 - DNA, 1003 bp, Homo sapiens
ttaaaggtgtaataagagaccagatttcttaaaaatccggtttttggctttgtgcgatgtctcacacctgtaatcccagcactttgggaggcgagggcaggcagatcacttgaggttaggagtttgaaaccagactggccaacatggtgaaaccccatctctactgaaaatacaaaaattagccaggcatggtggtgcacgtctgtaatcccaggtactccggaggctgaggctggagaatcgcttgaacctgggagggagagattgcggtgagccaagattgtgccactgcactccagcctgggcaacagagtgagactctgtctcataaaaaaaaaaaaaaaaaaaaaaaaaaaacttgagtctttattgtgccagatgaggggagtttttccatcaccgtatctttgccctgagtgttcctgcatcacagtatcctctagggcagaaggatggtgatggtgggccacgtgggagctgagctggcaatagagagccttcagacagagctgctgggaatggacccagaaagacaaggccgggttacatcccagcagagatacaacctgctttccacctcacgtccacgtgtgctgccttgtctgtctggaatgctctttcttcacatctttacctattaaatgcccagttattcttcaagtgtcaggttaaatatcgcttcctcagagatcttttcttggaaggtttccctactgcccatcaactctaagctccttttatcatctttctttagggcctctactttcattagtagtaattttaataataacagtggctatcacttctttcccaggtgtcagacattgtatgccttgtatgtactgtatgtaagtttctcactcaatatttattggtgtgaatactacctgtattttagtagttaagtatgtgtttttttctcctgtaagagactgaagtctttttgaaagcaagattccttcttgactgggctttgcacatgacatccccagtgtcttatata

SEQ ID NO: 60017 - DNA, 1034 bp, Homo sapiens
attgatttttattataaatttgaactttttaaaatcaaaataacatttttaaaaaacatacagcacatatatatggcatatacataggacttgttcttagattactcatcttagaggtggcttctagtgtcagttttctcatggcaaatgacctcatcccacccacctcagcttccccatctgcacagctcaagtttcaaactagatcatctctgagggtcgtcccagcaatgatttctaatcctcagttctttatttttctaggaaacatattttattgacatcaattcattatttttttaattcaatttaattcttaaatttgcctcccatctggatttgctttatcgatttttttaaggcaatagaagacaatgatgaccctgaatacaaattgttacgggaaaatggatccaagataaaattaccagatcaacctttttattccatattttatggaatatctaatggatgtttggcagtaacttattcttacacacgaattcctgacagtttcgattcttcagacttattaatcagtgtagtcagcaccagagcaattttatgagacttaacagtcatcaaaaatttattatcagataaatcagagaaacaacgagcatcttaataggttagagaaagtggcatgtaaaggatcatttaagatggtgctttttgtcagttgtgcgttatatttacaaccaatatctaagaacttactcataatttcatgcaaatagtcagcagggtgatagttgctgtcttaggtcaaccttttctctttgtttttctccagcagaatgttgtgtttggtgtaactataaggctaagactgctaaatagacacacaataggaagcatcatttcccaatgttaagcctatagcatttattttaatgcagtatctccattttcttctggattttattagagttgtcatccaaaattaagagttactgagctcagccctttcccttgggaacaaggtgctaaacttgagctctttgttttgttttgttgtttcattttttcct

SEQ ID NO: 60018 - DNA, 1023 bp, Homo sapiens
taagccgcatacttcccctttattaaaaagaatccttacttatatatttatcagtgtctgtgtgttgcggatgtgtatttgtctatctttaaactaccatgaaaacatacttttggttttggcacttaaaacgcctatgaacctcctcctccttcccccaccccaaccgcttttttctaaccagttaacccattacctaaatgagaggaataaagaactaaaaaacttaccggaatgttttcttttcattcatgtctatgatcggcgttcacagtgaccttcctcagagcacgtcctcaagttcttctgagtctagggcagagaggatggatgatctgatttataggctctaatggactccaagaggagacatggatacttgaaagaaaacaatgaattcagtgtgtcaacagaattaaaatacttggagatgacttagcttcatgaagatgggaacttgttccattaagcaggaggggtgtggctggtaggatggtgaggtatagttcttcagagattgctctttggagtaacattctgggcattaatcacggccccttcatcatgtctcaggtggaagctgctgtctcttcatctttcgtgccttccacaggggaacttgttggctgatgtcactgagttgccggttaacatgaaattatgagcttggttgggtcgttgaagcttacatcctacatgctccactgtgtttttaaactgtcgctgagttatacaattacctgttaactctttatttgatggtggttgtctcttcgacctcttttatttctttgaagcagaattatgatggaatactcatcacttaagtttccagaaggtagatttttttcccccaggagaggcagtcaagttgaagtcagcacccttgacaagattctttgtgaaagggggtaactcacactttgcacatttccatcaaggaacgtggataccaactgcaagccattttaaaagctgacaagttaactcttgtcaacaagttaacaaaagaggtttgacaaa

SEQ ID NO: 60019 - DNA, 1045 bp, Homo sapiens
ctgttatttatagtaatgcgttttttttgtgttaggactggtaagttgcctaagtagatccttgagaggcgggatagacattttttcccttgagtcatatagttaatttgctttcatttttcttgagtcctactgttaaatttttgaagtacaacagtttatgtccttggtctgtgcttgactgtggagtaatactagacaataaggcatcctttatttatattagctttggtatgttgtttttgcttttctcagatttctccagtcctaaagaaggttatgtacatttatctgtgtgtttacatacatggttatatggaaataattgctttcagatagttgtggttttcttttcattgtttcttctgaaatattcttgttaaacctgagaacaagtgaaaatgtttcatgaaaatgcattaaaatgcattgttaatatataacctaaaaactattggattggtttatttttagcatgaagaattttgaattcactggaatttaagttacagttgttgcagtttttatgtagacttggcagttatgtcacttatacttcttaattatctttgtacatattttatatgacataatatctgcacactcaccatctccagcctctgtagagaatgtaacacatagcaccaaagtaataaaaatataagccccagagcgggaagcaaagctgaaacaagccatttttacatataacttaagtttaggttctgtatagtaggttgatcccttacttaacctttaataaaattggattcaagggtatttatatgtaaataaaaaaataaagttaatttcgtttcatacttccctatgagcaagtgtctagtaatatattacaatgacatttaaacttcagtatttgtcctattggctgaaaaaattcccatacttttttagcaacagggtttgaggttagacattaaaaagggaaggttcttaagatgaatattaagattacgtgatcatatgcacagtgatgaaatcagtctgtatttgtttgacctcttgtctcctatgaaggtatcta

SEQ ID NO: 60020 - DNA, 1765 bp, Homo sapiens
acatttttgttttctttttccttactgaatgagagaagctggtaaggaaacggtgggatgtggccaggtgataggagcgcagacatagcagccattgatgcagacagagcttagagaaggcgtcatcaccacgcatcacactgagcaagtctgtgcggcccctgtgcccatgaggcttacagtgcagttggaaaagcagaccaaagggaataaacgtgaacaagataattgcaaaatatagtaagtactgtgaaacaaaccaatagattctgggagaaactaaaataagaaggagcaacttttagtggagacatccaggaggcgtctctgaagaggtgacagcaaataagttacgttttgggaagcagaggggagaagagggtattgggtaggtgaagaagcgcgacagcccatggtgtgtttgggtgatacaagtgagccaccattgtctgatggaaagggactggaaaagaaactggattgctgtaagaatgattttgaatgacattggggtttttctggtttgtttttgtttttgagatggagtttccctcagttgcgcaggctggagtgcagtggtgcggtcctagctcactgaagcctcaaattcctgggctgaagtgatcctcttgcctcagcctcctgagtagctgggactagaggcatgcgccaccacactcggcgaattttttatctttttgtagagataggttgtcactgtgttgccgaggcttgtcttcaactcctgccgtcaagcaatcctcctgccttcaagcaatcctcctgccttagcctctcaaagtgttgggattacaggcatgagccttacgcccagccaacataattttttttttttttttttgagatgaagtttcactctctgttgcccaggctggagtgcactggcatgatctcagctcacttcaacctccacctccagggatcaagcaattctcctgtcccagcctttcgagtagctgggattacatgtgtccgccaccatgcccggctaattattgtatttttagtagagacggggtttcaccatgttggccacgctggtcttgatctactaacctcaggtgatctgcccgcctcagcctcccaaagtgctgggaatacagatgtgagccaccatgccgggccaccactttttttgttgttactttattttacaatttttaaatacagttgtataaaatttgagccatgagtctgaccattctgagaaggcctacttttgtttctcctaagatgtgccatttaccgttttaaattgtcatcattggctaggggacctggctctccattagattagaggacaccatttgttcacatttgttgatgtcagactactaccaaacaaaaatttttgcccttgtgaccatctctttgactttccagatcaggataatcaaataaaatgataaatacaaataatgtataacatgtcacatatagtttatttactgcctaaggttgttattttgtgtttaaaatgattcttgctactgagtataaattctgtgtacccttttttgatgtcaatttttattatattaatgctaaggaatattagaatagtctggaatttgggaattgatagtagcaagctggaatttgggtatggaaaatgctgtgtaaaccagtagcaagaagtgccaatgcttggagtcaagccagggcccagatattcaagctctatttctttttcttttctttctttctttcttttttttttttttttaaataaattgagctttgg

SEQ ID NO: 60021 - DNA, 1044 bp, Homo sapiens
tctgggtatgatgaagggtgtaggtgtatatgtgactgatttttattcttcatattggggagaaatgaagtttattttgctctcctccctcattctatatattgatattatgattaatagcttttgacaccaaactattttgaaatatgagtcttttatgacgtattttgacagcagcaatggcatgcttttcgctgttgtaacaggagtaaatgacaggggccactcgctcattattttatacccaagtaatcaaccaaagatgtcatgtccagaaataacactaaaatgtcaaccacccaaatctcttgcaaatagtctcattcagagggttggaatctgccttactggcagttttgaaagatacaatttgttgaagacagggagccctaagtgatttctttctctctccgagatgccagatgggtgttgaatgaagtccagtttttagtttttctgtagataatttttttaagtttgtggtggtgtttcggatcttcatccgtgtgttctccctcctctagccccccacggctacccacagcctggcagcggtatggttgccttggtacctgttcctgaaggctgtctgcaatgaaatttggttgtctaaatagcacgacttgtcatctaaaagtagaagtcattagcacgatgccgtttggctagtggtatcttgaatgctgttttaaaaattttcttattttatcactttactgttactgtttactcatgtcatcactggagatttcagggcctgcttcacactatggatccggagtgaaaaatacgaaatgttctccctaagagtttcccagaacttgcgccaaaaacagtggcccgagttggacattttgtatatttttagagacacagattttgaaattccagccgttgttacctcgcgtgatcagtaatacttgcatattggtagcggcaatccatgattgaacagccttctgctgtttctgagggaaatgaaatttctgccagcttctgtttgaactttaattggccttcactgtggtcgtgaatttgccagaa

SEQ ID NO: 60022 - DNA, 1029 bp, Homo sapiens
tgagacaaatcatgattcactacaacagtgttgcagtcagttatataaattgccaatgaaacactaaatctgtcactttgtgtgttccgacagtttagcaattggagtcgtgttggaagagggctgactgggaacaaaagaagctgatatagtggcagatgcaattagcaagatcaatggttagtgttaaaggttcattgtttggtcattttggttgactgaattgaaagcaattgctatctaaaagactttgccagctgtaatttgctataagagaatgcagaaaagttagttgcccaactttataacatcttggagactgttatttctcaacttgctgtgttcctaggacagtgaccaaaagattcagcttgttcttctcattcaagctcattcaagcttttaatagatactctagaatttctgcatgttcagtatatatacgttttttactttagctgttcacctacttctttcacaaaaatttttgggtccgtgttatagcctttataacagttctttgaaccctaatttattacagctttctgttgcttcagactatgagagttttcgctgatcactacttgaactatagcaaacaccactttgaataacattgggttttctgtttttgtttgtttgtttgttttgcgacagagtctcactctgtcacccaagctggagtgcagtggtgtgatgtcacttcactgcaccctctgcctcctgggttcaggcaacactcctgcctcagcctcttgagtagctgggattacaggcacctgccaccacgcttggctcatttttttttttttttttttttttttattgtcgtagagatggggtttcaccatgttggccagactggtattgaactcctgacctcaggtgatccgtccatctcggcctcccaaagtgctgggattacaggcatgagccaccatgcccagccgggttttctattttaataagatttatataactttgcatttcagtgccttaaattgaccagtttttagaaatgaatatagg

SEQ ID NO: 60023 - DNA, 1117 bp, Homo sapiens
ctgccgctacgtgaagaaggacatgtttgcttcccctctgccatgattgtaagtttcctgaggcctccccagccatgctgaactgtgactcaattaaacctcttccctttataaattatgtagtcttgggtatgtctttattagcagtgtgagaatggactaatacattgcccaatatctagaagcatttctattatacattttgtccagttacttcagaatgccagaagcaaaagtctggattaatttttgataactgccaatgtggaaaggtataattatttttctgctcttttcttacccatttacacaaccgccagaggttatttttgctcaggtcattccctcaaccctgcattcactggctggattccatagcagacatagcggtattaggatgcatatcagacttcatgttatgtacacatgttctttaagaccattttcatctttattcttggtattaacaagtttttaacccctagaataatttcttggtctttattgctttttaacttatctgttaatgcactattatagccgagaccaactgtattagtttgctgggtctgccataacaaagtgccaaagactgggtgacttaagcaacagaaataaattttcttgtgttcgtggagattagaagtctaatgtcaaaataacagaattggtttcttctgagggtttaagggaatgattttttctagacctcactccttggcttgtgggtggcccttttctccctgtgtcttcactgtgccttccctcagtacctgtctgtgttcagctttgcccttcttgtaaggacaacagtcatattggattaagatccactcatatgacctcattttaactaaatcatctctgtgaagtcaccatttccaaatagtcacattctgagatattgagggttaggatggaattcagcccataacaccaaccatttctcatgtttcttactttttgctgctgagccttggtgtaaaacttgatatcctgtgatactgttgcattgttcacctgcttattcatgtcatcattctttttcattattgcaacaataagtcaagttaccttaagccattatttttcatcttttcagaaatctttgagaaac

SEQ ID NO: 60024 - DNA, 1033 bp, Homo sapiens
gaactcctgagctgaggccgtccttccaccttgtcctcccaaaatgttaggattacaggaatcagccacccacctggctaaatcttttaactatttccttaagaaaagatgtagtgcgattattaactatgtctagaataagcagactccaaatacataataaaaaagttaatttttttagactagatttttgtttcggggtaattaccttccccaacccaaggcagctttatgttgttaacagaattggttttcttgcctaaatcctattactatgaaaagaaggtctagcttaatagatagagcagtaagtgacaaggatgttctttatggaattgtaaactgtgccactttcgcatgaataagattgactttgtcaattgatcactaacatttttcagattagttttaagctagatataattacagacatatcttagtttttgtgcagaatatcgtaatttgcagaagagtttcatgcacttaatctcagttgtataatgtaggcaaggagagctctctggcctctttttaaagatgatgggaccaagggagattgtgacttgcctaaggccacgttattgacatggcttattatagacagaatccagtttttagttcagatcttcctaattcaaaaataagcattcctcccaatggtatacccatcaatgtgtcaaaactgagccaataaaaaggcctaatttattattaggtgacagattgctgtggttccaaatatatgccttaattttatttgaaaaagaaaatgttgggaatagaatatttgtacccaactttgaattttgacttggattttattgcatgctcctacgttttaattctgcattaatatttcttttgccatacttcacaaaaaatcataccatatcctttgattcccctggccttcactgataatcaaaaatgactcccgtcaagtctcctacatgatattttttaacaagttccattttatatattctatttcagtgaaatctttagccccagaaaatgttttcagcatggattt

SEQ ID NO: 60025 - DNA, 1018 bp, Homo sapiens
tagaagagaggacatagaggatgagagtttctgtggagcaccttttaatgtgtaaatatgttgacaacttgttttcttctgtttagctcagccttagggataacgacctgatctcgctgcctaaggaaatcggggagcttacccagcttaaagagctccacattcaggggaaccgcctcaccgttctgcccccagaactaggtaaggttgctgatgaatgaacttagttctgggtttcatgaataacaattatcctaatgtagcaattctgaacaacctctgtcctcttcttggcaactactctccacctaggcacacgatgctgatcatttgagaaccatttgtcattgaccagagttagctgttacaggtttgaccttcccggatcctgtgttctgcagctgtagtgtcccctgtcttagaaactgctgatgaaagatgaccccgctcagctccctgcgtgatgtagtgggaaaagcatgggattagtagtaagagccttatccctggctcctcattgactagctgggtaagctttctgggtcttggttggttattaataactttaagtatcactcttactttttaaccccttaaatttttattgacctggaaaaacttttaccaaatagttaaagtagttgttatggctacttgaacatgttgatacctctgcgggtcgtgaatttgcctctctcctgatcccatctctagtaggaattgttaaatatgttcttgctgggaatggatcctactcctggccgctgaatcctaatcctgtttctctgccaggtcgttcctatttccagggtgggtttatgtcccccgccagaaataacctccaagccagtaattctgttactgcttcgttccactgcaaaaggttcacgagttcccttatcttttcttgtgcagaccctccatagcctctcatttcttcagtcctttgaaccacattgttttctcaaactgcgattatttgcttttctactccaaaataccatcatttttaagaaac

SEQ ID NO: 60026 - DNA, 1050 bp, Homo sapiens
tctttgtcattgtaaatattaaataaatgctttttttaattaaaaaaaaaaaaggatgggcatgggggctcacgcctgtaatcccagcattctgggaggcctaggtgagaggattgcttgagcttaggagtttgagaccagcctgagcaacatggcaaaaccccatctctgcaaaaaatacaaacattagcagggcgtggtggcgtgcatctgtggtcccagttacttgggaggctgaagtggaaggatcgcttgagcctggggaggttgaggctgcagtgagctgagatcatgcctctgcactaaaacctaggcaacagagtaagaccctgtctcaaaaaaataaaaaataaaaataaagtataaagtgactctaggatcatggcactgtcttacactttcagcgtctgaaacagaggtgcccttgatagtctgtatgaatgtgtctttggtgtcatgacatagatttttgtccccctgcaacagcatgaacaggctgaacactttgccacgaggcttcggctccctgccagctcttgaggttctggacttgacgtacaacaacttgagcgaaaattctcttcctggaaacttcttctacctgagtaagaaactttcaattctataaatctcctcaaccttgtactttgcgttctgagagggaaatttatttgccaggacccaaactccaagagaaattattggacagagataattttttctttagagactccttttgaatattccttcgtagctcagcagtatgtgcatttgatagatcgttatgtgacaccattgggctgaagtggacttagtaatgtcatattaacattctgagagagattatatacctaaatgagatcaagcctcacatttagctaagagacttgactttctttttaaatagcatgccaaaaaaaaaaaaaaaagtatcttcctatgttgctattaattctttgtaggatatttgcccaggatattccaaccaattatttattaaaaatatttattaataaaccagtaacacaattttaaaattttccagccagt

SEQ ID NO: 60027 - DNA, 1050 bp, Homo sapiens
ggtaggtgaattcgatggcccttttgaagttatgtctttctttgctttgaaagaaaaacaaaatgtgccgctgccatcccttgctaggagttccattcccagattcacactcagcatttttgtttccatagtggtgccaccgaacatcgcagaactgaagaatttggaggtgctcaacttttttaataaccaaatcgaggagctgcccacacagatcagtagccttcagaaactcaaacacctgaaccttgggtgagtatcagtggagcggaaaggatggagaggaagagagtggaaggggcatgccgggtaaggccaggggagggattccttttatattattgcacagaaatggatttctaatttctttttatgttttgggtcttaaaaaaattttattgttttaatatattctttcagtggcctacattagtgcatatttgagagctaattgagaggctaattgttggcgcaataaggaagttaaatttttattgtattttctgtccagtaaaattttatctcagttctgctgaccgagaagggacttatttgcatagcatgaactggcggacaagtggtaatatggctgatttctttttcctctctgtgttaaattggaatagtttacaaagcaccttcgtgccgtggagggaagaatattttccctaatgatgcttcattcatttatgcaattcttctctttagctgagaggtgacagtcctgtctttctttatgcaaaggtgaagagaggagttttgattcagctgaggttgcagaaccagggagcagtaaataataataatgataatctatttttgtgtattgctttgcagcacttgaccctctcaacatttgtgaggtacggagggcaggttttagtgctttcattgtatacagaggaagccaagccttttcaaaggggctaagggcctggctcctggtcacccctgaggttagcggccaagctgggaagatggttctgggtctgaaggctccttcagaccccattgttatggtctgggtctgtgtccccagcaaatctcatg

SEQ ID NO: 60028 - DNA, 1078 bp, Homo sapiens
tggtgattttcttggtaatcccttacacacagtgaataccattcatttacacagaagtgttccatggactgtgcacctaagaaagaatgtacatttgcagccacactgtacaggtagggttcatttgcattcctgcaggtatcccagagggagggttctggaggaactttgagctgtctagattacccgatgaaaacttgttcttttatcaacggccacttccggagctcgcgcaggggccgctcactagaccactgctccctgcccgtgtgccccagttcagagtaatctgtattcttcacagtcccttcttccagtgaaagcatctcttttacctttcaccaagccttacctctaaaaggccagtgataccttagacatttcagaaagctcaaaatgatgactcaaaactataataagcaacgtgcctgtccctttacttttgttcccctgggagttatcaattggtcgtcttgaaatggctagctgcttaaatattttagatgtatgtttggcattttacacacacctttgtggtggttctaatcacaggtgctcccgggtctgagtttaggtctgactgcaggaagcaggttggtctcccagcctcctggggcacccctggaggaagcagatgggatgggaagtaaacctgactgataagagacatcacactttctcaggctgagttccacgcccctgttcatgttcttagttatctggatagtcttggtatcagagtttacgtgaaccatggccaagcttatcacccacagaaatgtttgtagaaagactgaatagcaagtgggatagatgaattacagtctatggaaactcctgctgctgccaatttacagtttgtgcttttaagataaagatgcctttggcttttacatttgtattttcaaatgtatatattctagggaaggaggaacctttcaggtccccagtggctgattttcacctttgatctgaatactagtattcatagcatgctactgagttgactttttgtatttctatataataacagtgtatcgatctcttgctaatctgatgtaacctttgtgtgtgtata

SEQ ID NO: 60029 - DNA, 1012 bp, Homo sapiens
gtaaaacttttcaaaagtgtgggtctctgaatgtaattgtttagttttatacttttaactgccatgtaaaaccttttcctgaggtattggcagttttgcctacaatttcaggtcttcactgtgaccatatctcatcatttaatgcatcggaaatggccaggcaggtagtaaacctaagttttatggcaaaatgtgggttttttttttttaatatacactatttcctattagttacagcttatgtatgaatttagaattataacaaacaagaaatactaagataccttctttggtggtttcaataatttatttatcaaagataatattctaagtacatagaatttaatacttttaaattttatgcagatgtatacattgattatctaccataagtcatattataaacaaattaagcagcatatttcacatgaaaatactgcattcttaaaatttgtagatccaattataatgaagaaaatttagcagtttttaaaaagcataatacattgaaacctttttatgcagacataatagattgctgggatgattgagaagaattaactgtctgaattcctgaggacgaccttcaccactcttctcagaccttgctgttcttaagtctgtagttattccctccttcatagattatttgtcatgctttatgcaaaagttcttgtgcatggcttgtatgaaattaaaccatgaggggggaatatgtaaaataaatggtctctgtgtcatgaatttatcttgtgacaatatcaaaacaacttgctgttcgcattttaacagagtgtaaatgtgtttataatacagaggctttgatcaataacttatttttttaaattactgcacatttatcagtttgcttctctgccatcattaaaagatgagagttaaaaaaatatgcatagtatctttgagtctaacagctattaattaaacaatatctatctgatggtaccggtagtcaggttaccataaaaaagcactggcagttgggcatgtgttg

SEQ ID NO: 60030 - DNA, 1040 bp, Homo sapiens
ttaaaaacatctttcagatcactgtagtttatttctttttacatcttcacaaagatagaaatctcaggagtcaatggatcagtttcttcctccaggcattataatattaggttaatttagaggagcatatttatatgtggagttacattgtgttggccattcaggagactgactgtgaaagaatccaaactttatatttctgccttgccagtttttttttccttttcttcactccatttgagacactcttgacctaatccagtaaactctaattaatagtcttggtaaattctgtttcaagccatcctgagtagcgtcactgacacccgatctgtttcagtaaggtcaaattagcatcctttactatttttctggcatttaaatgaatgactttgctatggtttttcaagtgtttatagtaaatatgtccatttgatggaaatataaatatgcattaagtgtaagtggctaggcacaccctgctgtcactttttatggtaatcagtgtctttcactttctgttgtttttaatagggaccagctgacaacgccacattaaaaccacagggactcaaaagataactcccccaccccctcacccggcactgcttttatcttgcaaaagtattcatgtttttctcttagtatgccaattacaccgttctctgacatttccacttatgtactcatggaaggaatgaatggtttactcaaactgggacattgatttggggacactgttgactccactgacttaagatctacagggttattgaaacagtgtggcacgtggttgacttgccttttcttgccagtggttttggccttgacatgtctacccagggcagtaaaagtgaggcgacaaggaagctgaaagtgggatctgtgattctgaaattcctcaagaatctgggagcagaaattcctgaacttttaaatactgcagttcataaaaatattaatgtattgtcaagctaattgctgttaatgctccaagactattatggtgcccctatttgaatttaaacctgggagcttgg

SEQ ID NO: 60031 - DNA, 1060 bp, Homo sapiens
tctcaggtgtttctttatagcaatgccagaatggactaataccgatgaatgaatcaagaatcaacaaatgacaaatctccagcctgggcaacagaatgagaacccatttctaaaaacaaaacaaaataaaacaaaaaaacatttaaatcaagcaagaatggtgctgtgagcctgtggtctcagttgcttgggagtctgaggtggggggattgcttgagcctgggatgctgaggctgcaatgagctgtaattgcactactgcaccccagcctgggcaacagagcaaggtcatgttaaaaaaaaaaaaaattgtacatagagggacataatacaaaacaattgcccctgcaatcttcacaattgccaaggtcacgaaagtcaaggaaagagaaattctcagcttagaggagacgacaaagacctgacagctacctgcagcgtgaattctcaaccagatcctatttcttccctaaaataaatgattgggacatttggagaaacttgaatgggggctaggattagatggtcctcatgtactgggttaactgttttaatggttgtattgtggttatgtccatttttgcttgtaggagatataccatagactttatggggcatcaggccagcagcttaatctcagtggttcaagctgggaaaacaggtttttgtattgcattttgaacttctctataagtttgcaatggtttgaaaaaacaaaaaacaaaacaaaaaaaaaaacatgcggccggactcggtggcccacgcctgtaatcctagcactttgggaggccaaggtgggaggatcatgaagtcaagagatggataccatcctggctaacatggtgaaaccccatctgtactaaaaatacacaaattagctgggcgtggtggcacgcacctgtagtcctagctactgtggaggctgaggcaggagaatcgcttgaacttgggaggcggaaattgcagtgagctgagattgcgtggctgtattccaaactggtgacagagtgagactcagtctcaaaaaaaaaagcaaaagttgtggtcagtagaagtgatgc

SEQ ID NO: 60032 - DNA, 1035 bp, Homo sapiens
tttttcaggacacagtgcagaccggagaacggtaatgtggtttgcaatctcagtgtttgaatggtggtctatgtaacttggtgttcttaacagctgtaagtgaggctgggcgcagtggctcatgcctgctgtaatcccagcctgactcatgcctgctgtaatcccagcgcttccggaggccaacgtgggtgggtcacctgagtgaggtcaggagtttgagaccaccctggccaacatggtgaaaccccctctctactaacaatacaagaattagctgggtgtggtggtacatgcctgtaatcccagctacttgggaggctgaggcaggagaatcacttgaacctgggaggtagaggctccagtgggctaagatcacgccattgtactccagcctgggcgacaagagtgagactctttcaaaataaataaataatgaaacagctgtaaatgcttaagtctttagggcgtgtcaaagatgcctatgtaatttattatatgtttgtattctacaacgttgtgcactctttgttaggaggatgaaaataatagataatatgattgaaataccatgccatctatgcatggagtgtattaatataatacacgcacacatttaccacataccaggcattgtgctaagccctctgtatggattaatctttcaaacctcacaatgtattgtcattatatagttaataggtaaggaaacagatttaaggagcatcattaacttgctcaaagtcacccaggcaataagtggtagagcccagatttgaagccacacctgcagacgtcggaagcagtgttctcagcttctcctgttttgccttactggtttctgacagtcatatgcacataccctgtggaggagatgaagataacggctaattcagcgagcatgctgagtgcctgtggccacccggtcatgttctagaagccatggtagctgtcctgtctgggctaatgattctgtaacaatttaggaatgcattcagggacactacctatgtttatcccatttgaaccagggaaaca

SEQ ID NO: 60033 - DNA, 1052 bp, Homo sapiens
accccacggtttgggacgctgattgggccgaagttggcgcgtgcgcagtagacttggcgcaagctcagttgatgggtcgaagcccagagggctgtgggcggaagtggggaagtttgtggcgtgactgtgtaagggagggtggtggctcagggtgggtgttgcgaaagctggaagtaaattgcttccgaatgtttcgcttgtgtaatagccgctccactcgccagaagttgctaccctgagcccgtctccacaatgtgcctctgagggaccttgtggggcacgcagtttcccgccctattaagagcttctccaggcggggattccggcgcggtctgcgtttccccagcgccctgctggaaatcttttttgacaggtttctaaggctggcttttagcctttttacttgtagctagaacctacaagtaaaaccctactattttaaaagtcatttgaaaacaccactaaagcgatgtgtctttcccaactaggacttttacatttgtgaaacatgacgttctggcttccaggaatctcttgctttctcttccaaaagcaaccaaattttaaattctagagaaactgttgccctctgcctccctatttcctgacccagtctcagtcacccagcaacatcctgtgcttctctcaccaaaaaccctgtcctgagagactattttatactatggaataaaaattggcaccaggcacttttcttctactggtcacctaaattgatgataagacggatgccacacatatgcatttatatattgtagattgtagcagggatcaaagccttaaggagatgtggtaaaataatgtaattatatctccgaaccaattggataaaaaaaggatctgcactcttaaattcgaaagcaggtatttcttgcttaaaaaacattccagatgaaagagttattcctccattagtcttctttgatctggaaccgtccttggcttttatgtttattgaactagacattatttaagaatacagaccaggtattgtgtggaatatccttcaaagtaagtttgatgttccctttcag

SEQ ID NO: 60034 - DNA, 1080 bp, Homo sapiens
atgagaaaggtgtaatagttgactggaagcagagcaggcaacattgcccccgcccatctccaccttttaaaaattcactttacctacattctccagaatgtttccccaaaagcaaaggctgcaggatcacagcacaaactacggtataaaaaagctgcctggtgttttaattgctgtaggttaacaggtatttctgaatccaaatgcaaatgttttttgatctacacgtggaacatttttcccctttgcaagtgaaggtgacttctgcatgtattttcagaaaacgcttcattcttaactgtataaaaagacaaagcttttccgaccaatgtcatcattcaaattgtctccattttaatgtatataccttagagaagaaagtgtaagtttaataatgaatgactccttcctaaaggtgagaaatggaagtaacagcaattcaccattactgggcaagtactgtggaactctgctgccaaaccctgtcttctctcaaaataatgaactatacctacgatttaagagtgatagtgtaacttctgatcgtggatatgaaatcatctggacttcatcaccctctggtaagacatttgcactttgtacaggaaagcactgtgagaaaaacatgaggtgtctaatagtaaaaggcaaagtaactttatatttttagctacctgtgtacctgattagtttatgttaagaatagagattttaacattgaaagtacagattacttttttttttttgaaatggaatctcgctgtgtcatccagcctggagtgtagtggcgtgatcttagctcactgcaacctccacctcccaggttcaagtgattctcctacctcagcttcccaagtagctgagattacaggcatgcgccaccatgcccagccgatttttgtatttttagtagacagagcgtttccccatattggccaggctggtctcaaactcctgaactcaggtgatccaacctcccaaagtgctgggattacaggcatgagccaccgcgcccggccagattactttaaattttacatttattcattatttctgtttataaaagaatatatattcata

SEQ ID NO: 60035 - DNA, 1061 bp, Homo sapiens
atatgatactaatattgctccctttccatagtagccaattccaatgtaaagttaatataccttacacattgtattaagttaacagtaactttatacattgacttcaaggacttcatcattaaaaattcctggaatggttttccttttacaaaataggactttatacatggttgtatgttttgcagaaacaagtttttcccataggactcatgagtagaaataacctttcacagtgaaaaccgcttttctttttttaattgctagttttcctttagatcatagctatgttttggtttttcctttttaatgaaggagtatggcaaaacttgattcaaaacatgttttctggaaatgttagtgttgctttctaaacttcttttccaaataagatacaaatatgatttatctatattcagtatatactttctgttagtttattgaatgtttttattaataaatactgtaaacactaatccatgaaataaatcatctgcagcctgatgacaatatagctatatgattaataacgtgtaataacttgtacaaatacaagtaaaccacaatttctatcttttaatggcaaccccataaaggctaatgaggttgttttcgtaatgttgactggacattgttaatttctcttatttttaatgcaacttttgacaatttgtgtatttttatgtaatgccaggtactgatggagttccccaaaattgaatctgtacatccacaaaaatatgcaatggatgtagaaaataaaattcaagaaaagaacgttgaaccaaatattagctttgatggcagcatacagtgttctggaaaagatgccattctttttaagcttgaaactgcagaagaaattcacaggaaaaatcaacaagatagtgatctctctgtgaaaatgctaaaagattttcttgaagatgacactgacgtgaaccagtatcttttaccaccaaagtcattgctgcgatatgctcttctgttagacattgttcagcccacttgtagaaggtccgtgtgctttaccaaagggtaggttttaaagatctattgatcct

SEQ ID NO: 60036 - DNA, 1083 bp, Homo sapiens
tattatcctcttaataggtgaagatactgaggcttaaagacacaaagaaacttgcctaaatcacgcaactggaaatagccaagctaggatttaaatgcagaattctagcagagaaagagagaaagaaatacacaaacagatatccatattctaaatcttcatcaggacgtatgaacacacacacaaaataaaaaattccataagactgtccctaagatagctttgataaaaaataaaataagaatgcctaatgctgaatactgtgtggcttagtggaaaaagatttgtagagaatgatatagttaggaggagacttggaaaggggaaatgagtgaggcagttgaagtgcataggtcttatgacaagcctatactttctggcctagtgcaaaattgtaaaacttaactctccttttagaggtatctgtagcagaaattatactgctagtgttttgcaggataggatttgaaattttattgagtcaataatgatgaaaattagaagctttcaaggagggctaactataaagcaaaggaggctcagaatgggaagacaaatttagagaggattttcttaggctaattttagggatctttgtgagttaattattatatatattatactatatgttataaaatattaaaataattatatttttacaagtctttaaaaaattcagttaactagatatagagtactaatgtttatgtcacttctcattttttcattgacttttccataaatatgtcagaaatgatcacctcataagttatgagaaagcatcagtaaagaggaccgtaaacattttatagtaaggaaccattcatgagtggtcattcactcaaaacaaatgtatgtaaaacaaaatcaaagtctttgttgttcacacctgtaattgactgcatcacatgtgtttctattatttcttgactttttaagtagtttatatcttttgacttctataagcatgtgaataggttactttcagctctacattttttgggcgtatgctagctacttgatgatctttagaagactttcataaggtagtttaatttttagtttttcttttgattattgttg

SEQ ID NO: 60037 - DNA, 1015 bp, Homo sapiens
taaactagttagcggtagaactggtattttaacctaggtctacctacctgaccttttaactatgctatgttgccgttgttctggttagaactactaacttccttggatctatacattaaataatataataagcagcacaaaaggaataatattgaacttcatttttgactgatttctagataaggttcataatggaatttttttattgtggtaaaacacaacatgaaatgtatcatttaaactatttttaaatgtatagttcaatggcattaagtacattcacaatgttgtgcaaccatcacccttgttcatttctaaaactttttaatcatctcaaacagagctctgtacctgttaaacaataactccaaattccctttccccccagtccctggtaaccttgattctgctttgtctttatgaacttgtctactctgcgtaccacacataagtagaataatacatttgtccttttgtgtctggcttatttcacttagaataatgtcttcaaagttcatttattttgtagcctgtatcaatatctcagttctttttgtggttgaataatattccattgtatagctgtacaattttgtgtatccattcatctgttgatagacacttgagttgtatcaattacctgctgaccattgtgagtagtgctgctttggatattggtatataagtattgtttgagtccttacttttaagttttggggtatagacctagcagtggaattgctggatcatatgataatactgtgtaactcttgaggaaccaccagcctgttttccgcagcagcggcacaattttccattgcatgagcactccgtttcctctacctccatattctccacttgttattccattttttaaaaataatagccattctgatggatatgaaatcatatcctattgtggttttgatttgcattttcttaataactaaagatgttgagcatcttttctttttctttctttttttttttgagatggagtttcgctcttcttgcc

SEQ ID NO: 60038 - DNA, 1001 bp, Homo sapiens
ttataaaaacagcgccctcggcggggtccagtcctctgccactctcgctccgaggtccccgcgccagagacgcagccgcgctcccaccacccacacccaccgcgccctcgttcgcctcttctccgggagccagtccgcgccaccgccgccgcccaggccatcgccaccctccgcagccatgtccaccaggtccgtgtcctcgtcctcctaccgcaggatgttcggcggcccgggcaccgcgagccggccgagctccagccggagctacgtgactacgtccacccgcacctacagcctgggcagcgcgctgcgccccagcaccagccgcagcctctacgcctcgtccccgggcggcgtgtatgccacgcgctcctctgccgtgcgcctgcggagcagcgtgcccggggtgcggctcctgcaggactcggtggacttctcgctggccgacgccatcaacaccgagttcaagaacacccgcaccaacgagaaggtggagctgcaggagctgaatgaccgcttcgccaactacatcgacaaggtgcgcttcctggagcagcagaataagatcctgctggccgagctcgagcagctcaagggccaaggcaagtcgcgcctgggggacctctacgaggaggagatgcgggagctgcgccggcaggtggaccagctaaccaacgacaaagcccgcgtcgaggtggagcgcgacaacctggccgaggacatcatgcgcctccgggagaagtaaggctgcgcccatgcaagtagctgggcctcgggagggggctggagggagaggggaacgcccccccggcccccgcgagagctgccacgcccttggggatgtggccggggggaggcctgccagggagacagcggagagcggggctgtggctgtggtggcgcagccccgcccagaacccagaccttgcagttcgcatttcctcctctgtccccacacattgcccaaggacgctccgtttcaagttacagatttcttaaaa

SEQ ID NO: 60039 - DNA, 1060 bp, Homo sapiens
tttgtagactctcttcccactcgcagccgcctgaccccacccaacacaacccacgagcaattctaaaagttgcttaactcacgtctaaaaagtgcaaaacttcagggctgcgcgtaaagccctctagtggcgggaagaccacaggttggagcttctcatgattagaaaaatattaataaaaccccttgagcgattttttttttttttttgagacggagtcttactctgtcgcccaggctggagtgcagtggcgagatcttggctcactgcatcctccgcctcccgggttcaagcgatccttgaatgatttctaagcagttccttgggacataaagaaaaatcttttaactttttactttgtttcccaaatgttgcacagttttgcaacacattgaccttctggtttcgaacggttacaattttagattgtggtttgccaaagtcaagttgcttaatttttacaaggccacaaaaagcgcaattatgccctgcagtttaaaatggaaaacgtgttggaagataagaaaacttagtttccaactggaatggagccagcaagtttcttttcttctttgcaaattctattgtgtcattaaagttcgatggaagtatcactatgcacaactattttgtgatctaataagggtgaaaaggagccatctgtccccttggctaaggggtattaatggtttctatgggcttcactatggaatgtagatacagacattctggcaaatgtggtggctctggacagaaataataggagtctttgtattcccagggaagctttgcaacaggctacattcttactgaatatgtaatgatgtaagcacggttctaattggacacaagtatttgctaacatccgttatctaatatctggcccagacttgagaagtaggtaatgtaaaaagtttttaaagctacaagcatacctcacattttaaaagtcctttcttgattgggttcttgtgttctttagcactcttgccataaaaaataataacagtaataaacccaaggctgaaaaactgaattttaactaaagggtttttgtgcg

SEQ ID NO: 60040 - DNA, 1287 bp, Homo sapiens
cccagctaatttttgtatttttggtagagacggggtttcgccatgttggctaggctggtctcgaactcctgacctcaagtgatccacccgtctcagcctcccaaagtgctgggattacaggcataagccaccatgaccagccttaaaaagtaattttaaaatatcactggtaaaatgtggattcagtcatgattgagtgcagtttaccatgtgtgtggacatttatttattttaaaattgtctgatcaccaccttgagtaaaacacaagcagtcacaattaaaatatattagtgagcaggagaaagcacagcatattatagcactgaatgatttataaacctattccagggtcataaaatgtgtcaacggcttttctatagtaaggagactaggttcagatggttaatctaagacaaataaatgagataagccatacacttttacatcctccatgtcctgtcttttctctgttcaaaataggatgttgacaatgcgtctctggcacgtcttgaccttgaacgcaaagtggaatctttgcaagaagagattgcctttttgaagaaactccacgaagaggttagtggagtgactttcggggaatgaatgagggtaaggcagcccccacggttggcagagctgaccgtctgtctgttctttttgcaggaaatccaggagctgcaggctcagattcaggaacagcatgtccaaatcgatgtggatgtttccaagcctgacctcacggctgccctgcgtgacgtacgtcagcaatatgaaagtgtggctgccaagaacctgcaggaggcagaagaatggtacaaatccaaggtaggaaacaaatcagtgcggcttcaaccaaagaaaagcattgtgttctcaaaaccccatacctgtgtgtgattcctaaatatcctctagctccaatgcaaagctggctttgacttcttgctcatattgtgtttgccaccacagcctccccaccactcacatcacctcctttatttatttatttattttcttatttatttatgagacagagtcttgctctactgcccaggctggagtgcagtggcaacatcttggcacactgcaacctccgcctcccaggttcaagtgattctcctgcctcagccccctaagagctggaaccacaggcaagcaccaccatgcccggctaatttttgtatttttagtagagatggggtttcaccatgttgaccaggcttctctcaaactcctgacctcaggtgatccaccctcctcagcctcccaaaatgttgggattacag

SEQ ID NO: 60041 - DNA, 1034 bp, Homo sapiens
cgccaggcaaagcaggagtccactgagtaccggagacaggtgcagtccctcacctgtgaagtggatgcccttaaaggaaccgtgagtaccaaccctgcagtaaaagagggaaaataatgacccattctgctgactaggctcatgatgatacctgaacaaaatgttgagtgagtaaaaatgtatatcataatgcaaagaaaatgagttatcaagacagactcaaaagggacttcatggaactcttgaaggttttagcttgcctatatcattgcttctaatatgaaggacttggtactcgcattctccacctaaaattagagtggtcgccatttgccgctaatggaaattattgcagaaggtctgtaaatggttctgggaacagctgggtttttctgagaaataacaccagacatctttctcaccccctgcagaatgagtccctggaacgccagatgcgtgaaatggaagagaactttgccgttgaagctgctaactaccaagacactattggccgcctgcaggatgagattcagaatatgaaggaggaaatggctcgtcaccttcgtgaataccaagacctgctcaatgttaagatggcccttgacattgagattgccacctacaggaagctgctggaaggcgaggagagcaggtagggaactcagacttggatgcgtgaactaatggtgaccatttgttaggccctgtgccactgggctctaagcagtgtcacatttaatctttagaaagtttctttgaggtaactgctttccactttttgtagaggaggaatttgaattgagagagagtaagtgacttgctgaaaaagggttaatcaacagcagagctgggatttgaacccataactctgtcaaagcctccactcctaactcctgttcatgctcctgtggagaaaatgcttgtagtaacatattttaaatgtactaacaagaccagtcatgggaaaatgtttctgagacaaatctctagtttatgatttaaaacagtacgttttcttacgtgacgaaaacaaa

SEQ ID NO: 60042 - DNA, 2122 bp, Homo sapiens
catctgtttataggatttctctgcctcttccaaacttttcctccctgaacctgaggggtaagcattttatttccctttaggaaaaacgtcagctgcttgtaaccactgtgtttatgtcaaagcattcattttttttaggatatctgaaaaaatgccatataagagaaaactctataaaacatctataattttcgaacccaagtacactcttgcattctatgctttaagttaaatgcaaactcctttttccttcttcctgctgcaagtactatctcatcctgatgctcaagagtgtcagggcctgggtttccaaacagagactaccctaaaattatttggcgagtagtactttacacaattgcctctcccccacaaatcataattgtttcagtaaaatggttacttggtttttccaagaaaaaactcgtttttactcatttttggcctgtttgtttatttagaaactaatctggattcactccctctggttgatacccactcaaaaaggacacttctgattaagacggttgaaactagagatggacaggttggtatcttttaaggaaaaaatagggtaatctcagacaggagttgatatattttaaaatcagtgaatctgaatctcagatacagctggctaatttgagaggttcaggtttcattcatgcctactaaaaaaagaataggcttcttcttccagcagtacacacagccaactaattatttggctcctggatgtgaagttgagatagcagtcttcctgtgctccagaattagtgatttgctttggtgcttaatttgaagtgggagtaagcttccttaaaccacttcctaaagcagctacatgaaacagcttcactagactacctcaatatgaggaatgttttgatcctggacatatggtgtcttcctacctccatactttatagattcctaaacccatctatataatacaagcatgtgccatacgatcatttagtttcttattacctccctatgccaggaaagaaatagttgcaatttattgtagtcatcatgaaatcttcccttgcacataaatttaaaatgtacctgctgcacattttaatatgtcttaattgcttttaaacttggctgtattgtgtacaactattataccatcttttataaacacagttttttaagaaatttctttttgtaagttacaacattccactggatccttatattgcctgtagtggaagagggtcttgtgtgtctgccccttctagttttcactcatgcagaagcaacataaccttctgatttgcacaataaattacatatatttagcaggatttttatttgccgtgatatataggataatttagtctttggcatgtggcattatatttattttggtttttttttttaaacaggttatcaacgaaacttctcagcatcacgatgaccttgaataaaaattgcacacactcagtgcagcaatatattaccagcaagaataaaaaagaaatccatatcttaaagaaacagctttcaagtgcctttctgcagtttttcaggagcgcaagatagatttggaataggaataagctctagttcttaacaaccgacactcctacaagatttagaaaaaagtttacaacataatctagtttacagaaaaatcttgtgctagaatactttttaaaaggtattttgaataccattaaaactgcttttttttttccagcaagtatccaaccaacttggttctgcttcaataaatctttggaaaaactcttttgttgtgttatttattggataatatctaaacaattctctacttggtcctattagttaatttgtcattacaatcatgtaagttgataaattcaggttatttatgcttgagatgtagttcttaattttgtcatttttgatagacctcacttctttttattattacttaaaaacatttacaaataggtggtgtcgaataaaataacttgtaccaaaatgaagataggtctctctaaaatgagctcaggtctgtgattttaatcataacaaacagacttcctaaaattaaaaaataaaaactttttttagtacatatagcatatgagtaacacaaattccactttgggagttaaagcatagg

SEQ ID NO: 60043 - DNA, 1466 bp, Homo sapiens
taatataatgcagtaggtgattaacaatgtctccaaacaccaaaggaggtggctaaagagtattttgagatgagccccaaaatttggtttgaccaaagcttccccactcattttgcaatgatggcaagtcattcaatccttctcatcttcattttttctccttataacatggacaccatatctgactcatacaaatttttataatttatgaaaattattggcatggcctttggtgtgaggtagggactcaaagaatatttctttcttactatttataccagccatctccaccttcaccagaccgataataaaagcatgctttcttggagatctcttctaaagagaatagctgcattaccagtatccattggatttctttctgtggcaggtctctatcaataatatccttcccatttttctgtctcaaagactgcatgcaagaaaattatatacttaagcaaaaagttcttgatcattcgggaatgaaattcttctctgagtatggcagtatgcctgcttctgattaaattcacttttaatagtagctgtgatgatattttggttgaatttaagccatttattttcctcttatgtctacatttcttcatcacttaataattttattttaacttcctgcctcattcttacacttttttctctctcacttatacgatatacttcaaggacgtgaacagttacaatacccagtctttcttacctgttgtcttgcctgtggggtcactcactcaattttattttaaaattactgaataactacttcatgccaggccctgcaccaggctctgtgagaggacaagaaggattattgcctcttgtaggagaaaacagatgtgcatatcattaattatgatggggtatgataagtattacaatgacaaaagctatgaataaagtgctacaaggaacagaagcagggataattaaatccatttcagtggaatctatttcaatgtacaatagtctcccctaatctgcagatatgggaagaccccctgtggatgcctgaaaccattgatgatattagaaatatgtaattgattagtaaaagtaacaaaatatactgaaataattaaatatacaatgtggggactttatatgctattttaataaaacttacatatagttaggacatttagagcttacttttttttcccatataatatcctatcttaaaaatttttctttagaacatcaaaacagaatctctagtatcactgatatggatttcagaaatattccaaatggtgtgagatcaaacagcatagtgatacccatgttccagtaaaagcttaggagaaaaagaatgtttgcgggttttcttttgtggagaaaattgtagacatttccaagttaacacatctgaagtttctggttcgacatctgtgttgccatcctaaaagcacgtgtgaaattttacaacaatcctacctagattcacgttagcc

SEQ ID NO: 60044 - DNA, 1080 bp, Homo sapiens
gaccctgagtagtagtcagaggtcaaaggacaagaagagaggactgtggtggaagccaggtactaagtgagttgtcagtggttcaaataccctcaggggtcaaatggcaaatgttgaaatagctcttggacttggtgatgctttccaagaatggtttagtggattttcaggtaaagaaaaaggacaagagttggttgcactttgaatgaaaggtaaggcaatagatggaggaacacagcagaatgggtgatttcgtttgtttttgattttgagatggaattgagctgggaaaggactgtggtagggaaaggggaaatattcaggagagagaaaaatcaagggatgggctggatctcagaggagatagagagggatgtgatggcaggtggattattcttttgtgagaggggaggcatttctttctctgagaaggaaagtcagggtggcttgtatttacaggccaatgctcacccagctgcaccatgtttctctgaaaaaggagcacagttaaatgagaagttaggagtccagagaataggcaaagacaataagaaacagtggatgcctagtgtagccatggagggaactgggcatgtaatagaattgccaaggtatataaaaggccctacaaattggacactatgaatttaccaaggcaccaaaccacccgcatgattttttttccagcactcctcatgagtcaggtataggaatataggatgccaggggctgtattgctacattatggcagatttgccaggtgacaagatgtcagtggatcagggaattgagagggctgtcaagatgtgacaaatgctacaagtgggcagaaaaataatcttgcacagtgacatgtgaacagagattgtgatcttctaatgaagcaattagagaagtattggcagaacagttagagccatctccactcatgggtcggaggcttctcatgctaacccgactacagagctctagcagaacaccatgagggtcgccatggtctctcccataacttatctctttgggggcgctctcaactgtatagtttggcagttctgatgtgaacaggtcattttttctatt

SEQ ID NO: 60045 - DNA, 1438 bp, Homo sapiens
agggatgcctcattgtcagagtgaatttatagacaaataaataaataaataaataaggaagtgacacatagaaattggcagtgaggtacagaaacagctgggttggttacaggttggcgtttgtcttatttgaacacagtttgaacacttagcagtctatgagtcgttgaagtatggccgctgggattggccaaaactcagctattgttataggcacatacttctaagttagcttttcaatcttgtctgactattaagctaggttacagttcgtccacaaggacccaaatatagaagtacggagtcctcaggccatatttagtttgctttaacaggtctcactcatctgtttccttgagccattaagcaggatctaaatcagacaccaatttggtgtcaactctttgaaaagctgaaaagtgtgtttatcattgtctgtgaactcatatgcaactgcatttgttggctatattttttcctgctagcatgtttttagcataaaggtcataaactggcaataataatgtatcataaacgcaggtagtctcttgaaattcacattcgtacgcattacatcacggcaaatgcgtggggtggaaaaggaccttctcctcctgtctgcccggattgttgtaattgcctcagaactagtgtccccttccagaatctattctcaaaacagcacactaagtggtccttttaaatacaaactccatcctgtcctctcctccagtgactcctcagttcactcagtgaaagctgaagtcctttccgaggctggtgagtcattaaaaaatctggtccccactgcttctctgacttcatctctttcaattctacttgctcactgtgttccagctgcatggaacttccagttatttctagaacatagtatgctctggcgccttgtctccaacagtgttctcttcctggactaagggtctttcatgagcatcccccagatacccacctagtctacttcttgcttccggttttcggcttccggcttccggctgtctctcccttcagcctccactcctatccctactttccgcttcctctttctttgccctattttttcctgtaccacttttcaccatatgacaccacatatatttcacagtacttgttcttatctatctcctcctactaggcagcgagctccatgtggacagagatgtttgtctgtttcatttactgttgtgcctggaataataatggcatatagtagaaactgactatttgttgggcaaattcctttttttttttttttttccaaacgaagaccatgaggcacagagaaattgcagtgatttgcctaaggtcacacagttagtaagtatacaacttgggacttgaacccaggacgccttcccgcagggttgtttttaggacagagaggatctcacgctggctttctgaattctttccttgtttt

SEQ ID NO: 60046 - DNA, 2762 bp, Homo sapiens
aaatgtaaaatacagcttgttattttatcagcctatcacacactttcattttctttttatctttcatatgaatatttgacctcttccaagtttttttgtttttgtttttgtttttttttttttgagacggagtcttgctctatcacccagctggagtgcagtggggagatctcggctcactgcaagttccgcctcccggattctcgccattctcctgcctcagtctcctgagtagctgggactactggcgcccgccaccacgcccggctaattttttttggatttttagtagatacgggatttcaccgtgttggccaggttggtcttgatctcctgacatcgtgatccgcccgcctcgccctcccaaagtgctgggattacaggcatgagccaccgcgcccggccccctcttccaagtttttactcaaaacttcattctcaaggaggccttacctggtcatcttaatttgaatagtgaaacacatactccttatctcccttgcctgtttatttttctccatcccactttctttcatatgattgtacaatatattttacttattcgcaatgcttattgtctgtcatctccattagagtgtaaactccaagaagtactcaataaatatttgaatgaatgaatgagtgaatgtattacagcattgctgttataatatctgctgtattgtatatttttccattttcacttaatagtctgtcaggttttcatctgtttttcataattatactttttgacagttacatttgagtgtatagaattaattatacaataatggattaaatcatgcgcctaacgacattttgcttttatttgtttctgttcaattcgtggcttagtgtaataaattcctggaagaagaattacacctttaaaggatgtaaggattttttagggtttttttttttttttttttttttttgagatggagtttagctttgttgcctaggctggcgtcaaactcctgggctcaagtgacttcctgcattagcctcatgagtagctgggattacaggtgagtgctaccatgcctggcagatgtaaggatttttttttttttcaagacagagtctcgctctgtcacccaggctggagtgcagtggtgcgatctcagctcactgcaagctccgcctcccgggttcatgccattctcctgcctcagcctcccgagtagctgggactacaggcaccccccaccacgcctggctaatttttttgtatttttagtagagacggggtttcaccgtgttagccaggatggtctcgatctcctaacctcgtgatctgcctgcctcggcctcccaaagtgctgggattataggcgtgagccaccacacctggccagatgtaaggatttttatggcacttgctcataatagggaagtgagcatttctctccctccctctctctttctttctgacaaatacttttgtgcccgtatatataaatgcattgtccttcaaatactttaggccctgtccttgaagcagggtaacctggggcattaatatataaacaacaattgcaataaaataatgagataagtgctaagcagatgtgtcagaggacagacaggtagggagaattagagaaagttttctgtgagagatcacagcatttaaactgagcggtgaaggacttaagtaggcataagtggggaaacagcatgagttagaggacagagatctgaaattgcaagacatctgttgaggcatcaagaagagggcttgggccgggcgcggtggctcatgcctgtaatcccagcacttgaggctgaagcaggcggatcacgaggtcaggagatcgagaccatcctggctaacacagtgaaaccctgtctctactaaaaatacaaaaaattagctgggtgtggtggcgtgcacctgtagtcccagctactcgggagactgaggcaggagaatctcttgaacccgggaggcagaggttgcagtgatccgagaccatgccactgcactccagcctgggcaacagagcgagactgtctcaaaaaaaaaaaaaaaaaaaaagaagaggacctgaagtgtagagtgggaaatgaaggcggacaggtagcttggggcattgcactgggcctcagatgctttgctaacatgtttggattttagtctgtacacaatacacaaaggtgttgtttaaaggttgtgtctcattcctttgtagctgggtaacctcagataagctacttaacctctctgactcttagttttctcatctgtaaagttggaacagcacaactacttagctagattataaaggaataaagagataatggatatgaagttcttagcaggatgcctgatgcacagtggatgtttacaaatgttcatttttattcctagtggtttatttaaaattgtacttttttttttttttgagacagagtctggctctggagtgcagtagcaccagctcagctcactgctcagcctcccaggctcaagtgatcctcccacctcagcctcccgagtagctgggactacagtcacgtgccaccacacctggctaatttttaaattttttgtagaaacaaggtcttgccatgttgcccaggctggtcttgaactcctgggcccaagcaatccacccaccttggcctcccaaaatcctgggattacaggtgtgagccactgcgcctggcctaaaattgcacttcttgcagaaagagaaagtaagatattttcacagtatacttagtatgatttaatagaacaagaaacccaaggt

SEQ ID NO: 60047 - DNA, 1087 bp, Homo sapiens
accaatcagcaggacatgggcggggacaaataagagaataaaagctgggcaccctagccagcagcagcaaccggctcgggtccccttccatgctgtggaagctttgttctttcactctgcacaataaatcttggtgctgctcactctttgggtccgtgctacctttaagagctgtaacactcaccacaaaggtccgtggcttcattcttgacgtcagcgagaccacaaacccaccagagggaacaaactccggacacatcatcacctttttctgtctcaccattcttaccttacttcagtcattgttatctcttatagtcagtggcaagagccttctggtaggtttctttgttaccactcttgcctctacaatcagttctcatttacaaaggtcagtgatcttttaaaaatgttagataatgtcagttacctgctcagagttctctggtagcttcctatcctacttaaagggaaatgcaagtttttttattgtggctcacaatatggcttcttcctgtgtgtctgatatgattatgatctccagactcactctcttgaattccaggcttcttaaatctgaacgctccaagctcattcctgcctctgtagctatatggtactctttgcctgggatactcctcacccaggtatttgaaggtctggatattcatcacacccattcaggactctgttcaaacgtcattttctgagacgctttacctaataatcttctgtaaaaaatatccttcttgggctgaatgcagtggctcacgccagtaacccctacactttgggaggctgaggcaggaggattccttgaggccaggaattggagaccagtctgggcaacataatgagaccctgtctctacaaacaataaaaaagttagctggcatggtggtatgcctgtagtcccatttactcgggatgctgaatccagaggattggttgagcctgggaggtcaaggctgcagtgagctatgactgcactcttgcctgggcaagagagtgagaccctgtctttaaaaaaaaaaaaaaaagaattaaaaaaaatgcatctttaccctctcactctgtttctttgttc

SEQ ID NO: 60048 - DNA, 1052 bp, Homo sapiens
acatgcagtgtacctcaaactaggccccagataattaagcatcatggaaaaaatgcatagtcatgaacattaagaagtcaggaatttggaataaaggaactgtatcatttattctctccttcccacttttttattgctttgcaaaaagcagacacttttccttgtcttactgatgtacaaaccttgcttcgttgcaaaatattctgaaaagtcctttcagatctccaaaatcttattacctatttaatgctttaatttgaagtgagatatatatgatgggttttttcatagtgtgaacattagttttatttcgaataactatattttcttgtctatagctatgcataacttgtgattcaaaaaacatcacttaataactttactatttaaaatgtctgtattaaatcattggctaggaaattggtgctcttttatttctttttctattttacagggtcatcctaaagtatgtgaaaaattaaaggctcttatggttgaatggacagatgaatttaagaatgatccacagcttagtctaatatcagcaatgattaagaaccttaaggaacaaggagttacgttcccagctattggctctcaggtattttgggaatgaagttgtgtgtgtgctacagtttgtttctcttaaatagctatatttatttgaatttttttcttcattcccaggtaatttttactacttcagaggaattttcgttagctaattgtgttagtaactagttgtattgctagttagtaatactagttttctggcattcagaggtgccagaaaagtattataatggaatattaatgtgctctaacctctctacttctttataaacgaattggtttaacattttgcagtttttgaaattttttggtatagtttttgtttgtttgtttttgagacggagtctttgtttgtcgccctgggtagagtgcagtagcgtgatctcggctcactgccacctctgcctcctgggttcaggtgattctcctgccgcagcctcctgagtagctgggactacatgcacgtgcagccagacctg

SEQ ID NO: 60049 - DNA, 1024 bp, Homo sapiens
aataaatcatctaagttcaactgcagaactccctgtagattttaaagccacttagttacttaagttattactgtgttttcatcagactagatttttgttagggcatacttaacaaaaacctctgaagatatatttttctaagtatatttttttcatctgagtacagaagaaaataatgtaaaaatattaagaaaagtgataaagtcacctgactcatactgatgcagttctgttagcactaacttttgatgtaaagatagaagtaggctagcagcaccgctaccgtagttggctgcttaataagacaagtgttattgttacatttagaacctgatgatagaaaggaactttgaataaaaagtgcagttcagaaacatgcggcttcacatagcttatttctgcgcttctctactggtagagatttcttcacacaccataaaagttcaaatctgtctaattgtgaagtttgccaaattgtgaacaaaaatttatgtaaaccgtaaaacttatttctgaccaggcatacctgtagttttcagaagtgtctgataattaaaacattatctaaagaaaattgcaactagagataggtcagaattgagagtgtttaaagttgtattctgtgaacaccaaaaagtttttttcttctcagctcttctaaaaataaatgcctggccgggcgcggtggctcacgcctgtaatcctagcactttgggaggccgaggcgggtgggtcacgaggtcaggagatcgagaccatcctggctaacatggtgaaaacctgtctctactaaaaatacaaaaaattagccaggcgtagtggcaggtgcctgtagtcccagctactcaggaggctgaggcaggagaatggtgtgaacccgggaggcggagcttgcagtgagccaagatctcgccactgtactccagcctgggcgacagagcgagactcaaataaataaataaataaataaatgcctgtgcatttgtttgacaacacgaaatccagttaagtgaggaatgtagaa

SEQ ID NO: 60050 - DNA, 1124 bp, Homo sapiens
ctgctagcagtttctggtaactggcagaatggttggaaatgaggttggtaagataggctaaattctgatttgccttgaatgctatgcaaaaactgagaggccacagagcccataggcttagaagcttgtaattccagaagtgtgaattgaattatatgtttgttgtgtattcccttatttacacaatttaatagaggcagtgatatactgtcagaattaactacttgtaatttggtttacaaaataggatttttgagcatttatatcgttttatatatatatctgagttcctgaagataacatcctgacacttgatccaaaaggaaatgataactctaactattaatagatactacagttttttttttaactatttatgtttaaagtagtcatctctttctgtctcccagcctcttttctggttttggagtttttttaaacacgttgaaatcttctctagtctgtcttctctgacttgtgtaccatatgcttttagttgaacctcttcacacaaacctgggagggtgtgcctaggctgcctcctctaagtgtctagttgctctctgtgttctccaattctgattcatttccctctcccttttaaggtggaagctgctgcagtttggatttcttctttcagaaatctgtgctagattgatgagaaaggttttgcaaattcttagggtgggtgagaggaggagaatttgataacaaccctcaaatactgtgttcctcttttttgttaggctgcagaacaagcaaaagcaagcccagctcttgtagccaaggatcctggtactgtggctaacaaaaaagaagaagaagatttagcaaaaggtgcgtttttaagtccctgatggtgggaataacataagcctttattttttctctgagatatttaaaggtaaaataaatagaactttatagcaaaaagctgaaatctgctttgttgccctcctcagtattctttgctttactcttgagaggcaattactgtcacatgtatcctttcagtctatgtttttatgacagttttttactataccgtgtatccaaaaacaatatcaagtgcttttttgtgtctaacaaatttgttttttgtagatagtacacgggaaatgcca

SEQ ID NO: 60051 - DNA, 2638 bp, Homo sapiens
gtggtgcgagctcggatcattgcaacctccgcctcctgggttcaggtgattctcctgcctcagcctcctgagtagctgggattacaggcacccgccgccatgtccagctgtttttgtgtgtgtatgtatttttagtagagacagggtttcaccatgttggccaggctggtcttgaactcctgacctcaggtgatccacccgcctcagtctcccaaagtggtgggattacaggcgtgagccatcgcacctggcctaacttttctttttcatatgtatctatgtagaggtcattgtaaaaatgcaaattcattaagaagtcttacagaatttatacattatatatttttcttaccagttgattacagtgtgacaagtacagtataacctcagggaggatttttcttgttcaaaggttgggaccgtttctctagtgtgtagtcccagacttgaaagcagtgttctccaagcaacatgtcagatattcagaaggagccatttttactaatcatataaaagttttttgtttgatttacaaaccctgctgagtaggataataaactagaaagtggggccgtggagaaaaagtgatactagtggcaggcttaacagtttcaggagacatagctacatagtcggtcaaagtagtgagagacagtttactatatttctacataatattgtgctttaatgaatcttcataatgatgagtttagtcatcaagcaaagtttaagtcataatctcccctctaggaaaacagaaaaatatgttcaaatctagaaagatttgtatttgtaataaaatatttaaaatttttaaagagcttatatgtataggttgatatgctacagttatttggcaaaatatctcattatcgttttttaatgctagatagaagggatcaaagaaaattacaaaccacaagatgcttaggtgttttttagtttataagaattttaagaaaaaaaatctttgtcctggtcatctttttatttccagcagctcctaatagtgagtcttataatacatactacatatttatagaataaatgatacagaaatatatatgttaacaataaagagatacttcacttctctttcaagagaaggcttgaacagcaaaccagaaattacagatctttaagaaaatggtgcgctctcatagttattgccagggtgtctggtgtcatttttatagagacagattggtgagacccagtctttcaatgatgttttctatgtctgtgagaattcaaaaacatgtcaaccttgtttaaatggcattgcgtagtgtgctgactttttaataacctgggctggtaatgatgttttgtttgtttttggactatttttttgtcctgaatcagttcctggagaggatagaattgcttggagttctgttcaagataaggtcaaggatctcatgtagatcctggagccatttcatctttttttttttttaagtcatatagcaatgcagcttcaatatgagttttctagtttttctcatgtttttcactctggacgatctaaaagagaaactgaagcatcagagcctatgtagtggggttgtagttctcaagcgtggagaacaggtgcaggtgctagcatgatccccagagcatcattcttttgaggaaatagaagtctatttcacttagcctgtcaaagagaaatagctgccctatttagcttgcttttggtttggagatacagtaaaatattgtgaaatccctttgttatatattgtatataaataatatatttttttacacacacatagtattagttcctgtgagaaaaggggttgcaaacttgcgcgtcaagagctgttagaatatgaagtctgccatgtttttcttatgggtaatggccaatgcagtgctatcccagctttctacttgtaatagctcaagatataaaaagcaaaatgtctgcagcagatgtttcttttcctttataggaaaatgaatcagctgtagaattttgcttttggtgacttgaatggaatgattatatttcttaggttggaaattaagctatttctgtgttatacagaagcacacaacacggagtacccaagtgattggacttcatgttctcggggtaaaatcactggcacaggccagatttcagtagtatgggctagtagagcaagatagattggcattcaaatccaggctttgtcatttattagctttctcttttacaaaagtttttaatctttccaaactaccttatttataaaaagggcatatctcataagattgggagattcattggaggaaatgtaatattccatcaagcatattcaatagtttaataaacattatttcccttccttaaattgccccctcctgtcttcctttccatcatgattcttaatatttttatgaattgattgaccacattgatgcaaggattaaaaatatagaaaggaagtttgtttagtagagttgtatatgcctttcagtagtatttggaggttgttatatagctactgttatgttaaattgtttttaaagattgctttggtgagtaggagaaatctgtgcttctggccaatgaattgttgatccctcaatgaccactttttaatgtcaaatgataatattatataactagaaaatacaggctgat

SEQ ID NO: 60052 - DNA, 1074 bp, Homo sapiens
aagctattttccttttacacagaacatagtttttaaattttaaataattactttgcttaggattagtagtctttatttgccctgcgtacctatatatagtagcataaccatgtaaaaaccatgcatggagaaaggtttgtaattattttagtagtggtcatggtaaagtagatctgtttggattttttaaaaaacataaatacatatatacttatatatcgtatagatgtgtgtatgtaataatggtttcattcattccattggtctgtacaacaaaagattctgaaatagatctgtgtcactggtttgaggtaccttccagcctctcccaaataggaaaatagagaaaccactagtcttcctccttccttttatgaccaactgaaacactggtagaaagaaaatgtggaataaaccctaagagtcccacttagaagagcagctgtgatacagctgagctctgccttactgaaacagctgctgtattcaccatgggcaagtaggaatgacaagttgttagtcataagcaatgccatcttgagatggatagtacacttgttggcatggctaagctaaagctgctccgaaacaaagcaaaatcctctggcatgacataagaggtggaagaactcacgcattgtaagtttaaatgtggcttgatttcttctcgcttaagagaatctctgttagcagttggttggttggtttatttatttatttaaacagggtcttgcactgttgtccagactgaagtgcagtggcgagatcatagctcactgcagccttgacctcctgggctcaagtgattctcccacctcagcctcctgagcagtttcaaaaatatataggaagtactttcaaggctctgacttcatgcagtactagagagaataaatacatgggacactgacaacataaaagcaaaattggagtctccataactatgaatttcaaaagtttgtctagttgataataaagtgaaaacataaagttgcctaaaggttggtagctttttatattaactacttaattcctgtaggataaaatggaccagttgctacagatgctgcaaag

SEQ ID NO: 60053 - DNA, 1366 bp, Homo sapiens
ccagagctgcttcatcttgaaggtaaaacttttctatttaccttgcaaataaagagtagttagaggttaataactggtgtcctgttaaagaatgggttttgaggataatattaaaaatggaacatttctcacttctccttgacccaggctcactctcatatgcagttgaaaccttgggtagaatttgaattcttataattttctatccaaacgaagtgttctgttcaacattttagaacctggtaaaatgaaaaatggcactttaagattttcagattaatattttagattaagttgtcaccattatactttaagaaaatcaattttgggttctgtagactaaggttaaagaatgtatatttttattactccaaattaaatcttttattccttaaattatacaaatatctatcaaaggttcacatttttttttcttgtactttcttatatttcttcacatcttgtcattttagcaatgtgtcaccagatgggacctctcattgatgaaaagctggaagatattgataggtaaaagaacatgggtgcatttatgttgtgtaccttctttcctgaagctatcactgtactgcaaagtgggctataactgccttttaaaaaaaaaatattgtggaggaaccaactctcattcacatatcttgtgctagatgtggagaattagactcatttgtccttttttttaaagtgaggatttgatcgacctttgcaatatagtcaaaaggaccagcgtagataggtcgttttaaaaacaagggctagctatgtaattctctttgctgaagtggcattaccagagctcacaaatgacccatatgttagtaactagggaaaccaagatatttctggtacagtcaggtacgataagacggagttcccttagcacagcacgtaaaccttaaacagtttgggttgcttcagggctaaaatgcaggatatttttgttataagtgaaatttttaataatgtctactagtactactttttgccatttttgatattttgatgtatcattatttagagcattatatcattttagtaacagctatgcttcaaattattgtgtcatgtttcagaaaacattcagaactctcagaacttaatgtgaaagtgatggaggccctttccttatataccaagttaatgaacgaagatccgatgtattccatgtatgcaaagttacagaatcagccatattatatgcagtcatctggtgtttctggttctcaggtaagcttttagaagcccatgttgttttaaattctcaaatgcacagtgaggtgtggtagctcatgcctgtaatctcagcaatttgggaggccaaggcaagaggattgcttgagaccaggag

SEQ ID NO: 60054 - DNA, 1033 bp, Homo sapiens
acttccgttttgtctccaggtctcagcttccccatctataaaatgggggtaatagtttaccgacttcacaggttattatgaggaataagttactttgtgtaaagcatacagcacagtgcttggaacatactaaataccccttaaatgttagcattattgtaatcattctcaatttacagttccaccgtccacccagttgcctggggcaaaaccatgcaattcaccaatacttctttctcttatctctgcactgagctgtctcccaaccatgtcacccaatgtgtaattatttgctaatctcctaaataactctttccaattaatagcactgtatcttgccaacaaatactcataatttcttgcctaatatccatggtctcccagcttctaatcttgcccctatgaatccatctacgctactgccatttaaagccctttctgaactttttcattatccctaagatggtatctagaacaagcattcttcgaccttggcagtgtcttcaagtatgtctctcgctgctcccctacacgctttcaacccttggtaagtgtgctgctggaatgccgatacataccacgcctttcacacctcccatctttgctcactccatgggtaccatgccattccaggctaccacatctctgacgtgacagaacatcttcctcactttttttctactggctaagaataaccctcttggaaaacttcctcaaaccctgaggctcctaaggtacaaggcatatatcttctttatttataaatcatgttgtataaaattatatttttttatgtgtttgcccctactactcagtaagcaccttgaagctaaagaagactctcaggtgtctaacacagtgcctggcacatgctgactgtagtaaactaaaatcagagacaaataaatacataagcttcagtggtctcaaaatactaacagtaattgtcacttattatcaccttataatactaccatcgctacaggtagctttagaaaaccgtcatcagtgacaccttccccaactaacaata

SEQ ID NO: 60055 - DNA, 1660 bp, Homo sapiens
gtgtgcttccgtattttcaaggaaataaaagaaatgaggttatgaggccttcccttccactagtcctttgggaccgttcttgtcaagaaccctggtgatgcccatactgctagactcccggtcagttcaccattctcctcctcctccatttgacagttcgtgattccctcctcttttctgaaatgctttcttcacttgctggtgaccattctcttttcccttctgcctcaccgccacttcttctcagcctcatttgcctcttgcctctttatcttctggacttcaaggtccagtgcacagtagatggactgcctttttctctgtttgcagccgctccccaggggacctcatgaagcccggtgattctgaatgccgtggatctgccgaggattcccagatgcgtatttctcctccgtacttccccacaggacagcaggcttgaatagctgattgcctatgcaggacaacaggcttgaatagctgactgcctatgcattctctttgcttgccagttttttggacatcaaacttgacagatccaagattattactttgatcttccccacacccctcccacccccgagtctactatggtcccatcatagtattctgaaaatcagtgaatggccactctaccagttatttctaccagtttttaggttctaaacctcaggcattctggactcttctgttcattatcatattttgaaggcattatcttcaaaatctatctagactctgaccctttctcccatctccaccattactgccgtggctcttctgctggtcggctctctcctggtggatcgtaataacctgcagtcagctatcctggtccagagggagcccgttaaaccctgtggaatcttatcacgcttctgctcagaacgagccagtgtctttctgtctcactcagagtgtaagctacagtccttattgtggccatcaggtgctgtgtgttctccagccccctccccaccaccgcagtcctgccggtgatcttagctgctctcccctcggcaccccctgcggccccctctgccgcagcactcgtggcctgctgttccttgaacatgcttggtgttttctctcctcaaaggcttctttctgtttacctgaaatgtactttcctagggaatctatctggctcactcgcttactttttccacatctttgcttaagtattgccttattggagaggcaccctaccataaactagaatcccttgccccagctgctctttgtcctccgtattgggctttgtttttgttcttaccagttagaaccacttgacacacgatacatgtgtttgttacccttttctaccactagaacagacgctccatggtggtatagacttatttccgcaaaccaccccccccaactttttttacacaatggttaaataacacacatatttttaatgcaatgcctgatatcacaaagcctaaaataacaatgtttggcacattatagctgtttagtaaaaggttattaaatgaattgactatatgaatgaatgcttagtaaatagcttttccatttatctgtagttgctctataaatcagtattgatgtaattgagtgtttttcttcctccacagtacaatggtcagttccgttcaaggaaacacatatcccagccaggcgccagtatata

SEQ ID NO: 60056 - DNA, 1060 bp, Homo sapiens
aagtcaaacttacaaaaactgttgtgacaaatgttatgtacatatattgatatgtaactgcattagtggccattttgaatcacagtggtgatcgtgtgaatatatttaacactgtgttaaattaatttacgttgctattttattttaatcataaacaactaccatgtttcttaatgttttgtgtaaatttaaggtaattatactatccttttaaacttcaagaaaacaaagttgttagcgtatttacatgaaggcgcattatgttgtcgtgtgtttcagtttcacattaaactgaaccttttactaattgtgagctaaagagatatatatatatatgtgtgtgtatatatatatatctacatgtctttctgtagcctctgcatactactggctgtcatcacaccagcgtacagtagctaaatttttggtgcaattatagcaaatgataatgttcccttttgaacttttacattttggcatgacatttcagagtattgtgggaccatgagacaaaattaagtacgatcacattctttatttctcattttaaagaaatgatgttggtttaccttttcctagttgaagatagtaattaggtttctaagctgtatactgtgtttattggtggcagtgacaccaaagatagaggcaatggatagaaatttttaaactggaaagaaaacctgaattacactacattttcgaagtctcttgtaattatttgggatatcaacaaaatttgattcgtctgtctaatcccttgctagtattttaaatatgtctttaacacattgtatcctttaattcttcattaaaatggaaataagtagatgtttcaaagtaatctacattcctggctttgcttaacgtttatataggtattgttttctttcacactggatttttgggttgctctttctggccttttaaaattctaatggaattattttggcttcttacttgggaatattttcaaatgaatgcttttcttttaattcatgcgaaaaatgttttccactgacattgtaatcttaaatatttacgatttccctggttgggc

SEQ ID NO: 60057 - DNA, 1011 bp, Homo sapiens
tatcatctacctctgcctaccttaactatccctgccattcagcctgaatagttcacctatgtcactgaatggacctgggtaccatggtactgaaacttgggtgcatgatttctagcatgtagttatagcagtgtactttctgaacgtaacctgggggtactttatctccattcgtatctggtgagccttttgttctgagtgattttatcaggaacatctgcattccaagtagaagcgcttcagccatagtactttaactttcattggtgttgatttgaaaacagaaaaataaatagttgtaactctgggacagatactgtatttgtatactgcttcaaactaaaggaggtaagtagcatcagactacatgaaattttattcttgatgttcttgtatgcaaagtggcatcttggtcttggtgaactgaaaatgttaatgtcaccagtatactacacttgccgttctttagctgttgtattgctgagatgctagagtactatggaaactagtagtttccatcttttgtgctggctaaaattgtctaccaagtaaggtgcaaaaccagcagtgattttttttttttttgcatcacaaatatttggcctagaaaaatgccattatatactgcttagttacaagttattaatataaataagtattaaagtagacattaaattcaaggaaggttgtttttttttttaaaatcggcttttttcttgtgttgtcagttaaatttatctattattttatatagttttataaaacaattccacaaataaagaatacttgtttttagttttcctatttgcactttagaagattagataccatgctggcatctaaaaagctttccttaaagtttatattatttaatggaatctgatgaagaagttggggcttacttcaagtactaagtaaactggataaggcttttatacttgttgagggggaaagacaaacttttccggttgtttatcagatttgtgtgttgtctccctttgtaaacaggta

SEQ ID NO: 60058 - DNA, 1045 bp, Homo sapiens
agtagcatgatctgaattactgtttaatgtcttttgaaaatgacatttctaaatattcatggcttattaatcaaatgctgtttataattcatttgtttctcgatgtttattccaagagctgtcatttgagaaatgtaaaatgctatacagaatgcttaaaataagagaattctgaacattaggggtggtttccagcagatacctcttggatgttggacttgaattgctataattttgatgaaatgatgctcacaatagaatgcagtgaatcctgctgttaatgcacagttgccttctaaaaaccagaatgctcggcaaaattgtacaataaagaggccttaggatatatggggaaaactgggttagaggctcagcaacccaaaacttcaacagtgacatacccaagaataaagataagaatctaataagagcagcacagtttgacacatgttaaatggttaataaatatggcactttaccttggaaaagacctgaagtgtgcctgtagaagtgggcataggaagggttgcagctcatgaattaaggtgaagctgtggaaggagagtcagctggaatcagagggtgagttctaatcccaggactgggtaagtgtgactcagtacttgcagtgaacggaggctgctcactcgtgttctgtgtgttccgatgctgggtgtggttttccacatttcacctagcgttgctcctggatgagaccatgcgtaagcaaattgtgaaatttgcgttctgctcatattccttgtagttctgctcatattcattattaatttcctggaacaagtttgtgttttccaaacaaatgtgatatcaatattgactttaaaagacactttgtggtggagaatgagtggctatttaccatttatttctacccagaaaaatactctttgtacttctaaatgaataagaattgtggacaacctctaaggtacaaaactctttcttcccccttaccagatcagaaatgatccccactgaacatgtaaacacatttagattcaaataattattttatgtgttttgc

SEQ ID NO: 60059 - DNA, 1070 bp, Homo sapiens
gcaactggaaaaaaactggtcctggtccgtgccaattgggaattgttgtggttgcaggaagtgagaaaaagagttacttaagaaggggcaaagcttttttggttagaaacatttagaaagaaaaaagatgaagccacgtgaggctcaaccctagagctatgttctaatggtgtcagcaggagctaggaaggctgtcagaggagtggaaggtgtatgcgttggcctcatgttttcgtgggcagaatccaggcatcatggtcctgctgatgaagggagggccttgggacatagtgacttgggagagtcagttaaaggaaagttacccatcgccttttccatttcaagctatttattctgcctctgagacaaagagattgaacctggagagctagagttagaatctacaactctgagtcatcatgcaggacctgaaacagaccaaaaaaaaaaaaaaaaaaaaaaacaaaaaacaaaacactagctccttagtgtgcatagtagctgcagtaaagcaacaaataatgccaagccgcttgttgaaattgcacggaaagaaaaactgatatgtttcaaataagcaagacataatgaatagaaacgaacagtgtagaacccgttattagtcatttaatccctgtagaaacgccacgtgaaggcagtcactggactccattttcaaatggtatttttggctgtgaattcctttttcatagagttttaataacccaattcacatggcaaggagggattaccatagtgtgtataagtaaactggaatttgtttttcttcacggtaattttcttttgtgttcttagtaatgtatgtagctttaaacaccattataagtgataacaagagttgttaaatgatttaatgtaaattttagtatatattgccaaaacatacataagcgtgtaagaaggcaaaaccaaatttatcccaaagggtaaatatacaggtctgtttcctagaatatcaataggacgaggtgtttgctatggcatggcttttggggtaatgattacacaggcgtatcattgaaaaccctcaaatgctggcttgcatctgt

SEQ ID NO: 60060 - DNA, 1076 bp, Homo sapiens
caatttctcattagtcataattaattctgtagcaatttaattaaaattataaatattagaatatggtgaaacatatttgaatatattgtaacatcagcagaaaaaggctacaaagtaaaagggtaaaaagcatttaccagtggttttatctttccagacttttagttgtatagtttagttaggtaacgaaccttatctttaagaagaatcactggtcttaaggaaagttttcttcttgatatgtttctgtgttaggctctaaagcagaacagcagctaccttgaaagaatttttgcagttatatatagatgaaggttccattttgttaataaaccagttcaccattagttagtcaattaactagtcttctggcccttgacattatcaacttatttgaagtcagtgatatgttacaagaggattggggaaatgacatgccccatgaagttagttaattttcccccggaaactggattcatgttagcctttggggtaagggctgagtcttgatccagtagtacaggaaggggtctgtccataggggtcattggctgtgcgtggcagatgttagtgggatttcccatgaactgtgaaatatgaggttgctgttggttctattccatataaacttgttgtaaagtgataaactagctcatcttatacagtacatcaaatatttcaaagacagaatctgttcttccttgcagtttcctaaaacattaattggaacaaaagttaactgtgggctgggcgtggtggctcacacctgtaatctcagcactttgggaggctgaagcaggagggtcacctgaggtcaggagatcgagaccagcctgaccaacatggagaaaccctgtctctactaaaagtagaaaaaaaaaaaaaaattggctgggtgtggtggcgcatgcctgtaatcccagctacttgggaggctggggcaggcaggagaattgcttgaacccaggaggcagagactgcggtgagccgagattgcgccattgcactcagattgcgccattgcactcctgcctgggcaacaagaacgaaactttgtctcaaaaaaaaaaaaaaaa

SEQ ID NO: 60061 - DNA, 1112 bp, Homo sapiens
gttagtcttctacttttaacttccttctgtaccggaaagtgagaatgtcttcagcgttgtaaattttcactaggcatcatgatttttttttagatcggcataattcccttctctcatgaaaagttcctcagattcctagtttgtgatactgtttggcatcctccagcactcttgctggtcatgaaaagtggaactggaattggaggagcatttatttttttcctttctcccacaaaagtcataggaacataaactttttggaattctgaaagtcctttttgaaaagaaaaataaacagaaatgaaatcaagtatgaatcacctgttttgaggtttggcggaggctgatgtgggcccatgaatcactcctgttgtgaatctgggtaaagttaggcatatttatggcacctagttttacagtaacctcatttagaaattgctttccagttcataagggcttttgctttgtaaattgtcataattttaatttattacggagaacaaagtgttaaacataacctctaggcactgttattagaatgaatgaatattattttcaaattgtttatgtgctataagagattcaatacataaagctatagttatcttggacttgttattaagattattgcagctattgaggttgtcttcaattcccgtagaaactctttggctatgggttgagaacagatacatgaatgaaaaaatttcatttatcattgtaataaacctggaaaagctataattcttaatcttttgtatttagtactttgcacaaatttatagcctattaagtgaattagtttttcatatcacttcttttctcctaacttcatcaaaagaaaggaaaaaaaaatctctaagtttagttgtcttagaagtttattttagagccaaaatctaaacagataaattaacttactggaagaaaaataggtggggaagagtaacaagtcctgcttggcatggatgggtagaacatttgtgctgttcttttcaagagattgtgcaagaattgctaagtgtataaattctttgatgctgccaaggtcagggaaaaatatgtacatctgcaaataagtactggttatcaaagttaaagcagctttgatg

SEQ ID NO: 60062 - DNA, 1117 bp, Homo sapiens
gttttctatttggataaggaattattccagggtcgtttataaaatgttttttaccccaccacagatctgcaagtgcaaccctgtcatatatggaacagctatttgttaagtttatttatcagaattaaacataaatcagaataaataaaaacgtaaaacctggaatccccccttctgcccataaaacaattacaaatcaccagattaaaagaagacttgggttctgagccaaactggaagtgagagccctggcaatagttaattatgatatatgacctcggatcaaatgtgttagactttttgcctttgagcactggtttaagtttctctgccttgtgggtttgtgaggaagcacataaaggatgtaagggaatagaggatcccatctctacagataatcatctggcctcatgcaaccagcatgccacttgttggagaagtgtgttcaaaactcatttctggttcgtgcacctgtggcccttggcggcaggtcctgtaacacacagcctgaccactgatacagaggaggcccctgggactgctttccttataagggtcctgcgccttggtagaatttagatttggagttgcagagactcaactcaggaaagcaagtctttaacctctttgaccttggttttctcacgtgttaagctcaggacgtggaaccggtgatttctcatgcctttgatttttaagagtatgtggaatagaattgtgcataactgtgaatcacagtcactgtagaaccacagggctggctggtagctttcggaatctgttagtggctttctctttgctctttgaaagattggtgctgttccatttcatgatgccagaaagtcatgttgggaattggtgttaatttttctgggctcaaaaaatcctgtttcttgactatttttcctacttctttccataatgtgagctattctgcaaaccaaagcactttagtaaaactctctactactagaaatgtgtttaacattattggtgtgttttcaacaatacacatcaaactttgagagccactcttgtgagtgaaattgctgtggagtatggagtgagaagttattctttgatctattttaggctacttgcaaagaaatataataga

SEQ ID NO: 60063 - DNA, 1063 bp, Homo sapiens
tcacactactaggaagagccccttgtgtcttcggtataatactgggtcatgactgatatgctcttcattccctgtattatattttgcaggacattctaaaggtttgggggagaactgaattctaacagatggtgcacactgctgttgtgatcacaaaggcctgaggcagaccacttcagtctaacatgtcattaccaatttaatagaaatatttcttgttggactagtctctaacaaatgtacattgtttgtgagaattggtcttactgaattctgaaggtatttttgtccttactggagtgacagcataatattttgacaaatcaattcaattaaacaacctactgattaagtcagacagacgaactgatttgttttccagattattgattgccatcactgaattccatacaatttatttgacatagtaagagtatagattgttcacaatctagatcccaagagacattaaatgttcttggttataacatttttattctgtagataagaaaatggaggcccagagatctgtatgaatgtgtatgtgtagcactgccattcaattagctgtgtgtgtgcatgtgtgtgcatgtaggtaccttatgtgtctgtctgaaatttatctgctattcaaaatacttctgggcagggcacagtggctcatgcctgtaaccccagtacttttgggtggatcatgaggtcaggagattgagaccatcctggctaacacagtgaaaccccgtctctactaaaagtacaaaaacttagccaggcatggtggcacgtgcctgtagtcccagctacttgggaggctgaggcaggatcacttgaactctggaggcacaagctgcagtgagccaagatcataccactgcaccccagcctgggtgacagaatgagactccatctcaaaaaaaagtacttctggccaagcacagtggctcacgcctgtaatcccaacactttggtaggctgaagcagaaggatctcttgagcccaggagtttaagaccggcctgggcaacatggagaaaccctgtctctacaaaaaaatttaaaaatta

SEQ ID NO: 60064 - DNA, 1029 bp, Homo sapiens
tccgtcttctgacagacacctgcttaaatactcattagactctcccttcacagtacgtctgcaactatgaagagcctagggtgcttaagttgaccaaaaactcttgctaatttcagtaaaaacaaaaaaaggaccaactgtctctatccatccattcagtcaacaatatcaactgagtgctgctcatcaagtgcgtgtctctgctgggcaccagtaggaaaacgacaagtaaaacaaccaatgtccttgccttcaaggagcttaaagtccagggggcaaggcaatttgaatcaaataatcacataagcatagaattacaagctaataagatctttgcatgaatgtacagaatactatgagaatgtagagggggttgacatcttcgagaattagaagggtcagaaaaggtgtctctggggcactgctacctgagctgaggctcaagggtgggaaggagttcactaaaggcagggagagggaagctctacgtggtagaagggagaaggcccagcttaagcagttggagaataaagtaagagagggaggagaagatgaggttagagaggcaggtgattatcaggcaagatcatgagggccacgctggggatcttttctctttctactaagagcagtgggatttctttcccacaagaggcatgatcagatttgtgccatttaaaatccactttggcaggacagttgaagacagattggaagacggctagagagaagccagggagatcagctaggaagtacttttacccaagcaaaagatgatgctctcatgctaaggagctgaagatgggagataaggaaaatgaatgaatctattagatattggggaattcaagtaggtaagtgcaaggacagaaacagaaaatgaaacccaatgtaatacatacacgttcccgtgttctctcattcctgaacatttccatgcatttctgaagttcagtcttcagtaatccgatctgtgataaacctttgttttcatgtcagtgccagtgtacttctatttcttggtccagt

SEQ ID NO: 60065 - DNA, 1048 bp, Homo sapiens
agaatttggaatttaaagcttacattatctattgttttattatgtcacttgtttcataaggcagcttttattggttaagttcaatattcagaggaaaagtaaactgaaggaccctgaagcagatcctttttgaaataagattggagaataatataaggtaaaacatgtaactggggctgttgaagtggagatttggctaagtatgacaaaaatgagaacagaatacagagaaaattaactcaataatatctcagcacaaatcctcgaaatctgcaatgaacgtatcttttgattcctaagtcatgaaagaagacagtctttcattattactttgccatgtaatagccatttatatcaatttcacattctactttcttctatccttattccatagctggtgtgagttagttttcaagacaaactggaagtcccaattttaagtaacacctcctaatttgtaagtgttggcttcagtaaaaattaacaacctcactctgtaggtcaaacagaacccatctggaagccaggttatgctcatggttgacatttgtgaccccaggtatagggggagaagaagggtaactgaggaattctcacgtgttaagaggctgcatataaaaatgataagtgttgggaggccgaggtgggaggatcgcttgagcccaggagttggaggctgcagtgagctatgattgtgccactgtactccagcctggacagcagaccgagaccccatctctaaaaaaaggaaaagtaaagtgataagttgtcaaggaggtcagacaagaaacagggtcctgcttcacactttgataagtaagggtgcagaacatttcaggaggaagagaagagacagccagggggccaaaacagaattcagcaagcaggcatttaattgtgatcttgggagaggagtttcaagaggatggtggaagtcaggcacagatgcagtgagttataaggagcgtgtgggtgatgaaagtagaaacaagcaaatatagcctccttctagaaggaggaagtatggccacaatcacttgaggagaag

SEQ ID NO: 60066 - DNA, 1034 bp, Homo sapiens
ggcgcctgtagtcccagctactcgggaggttgaggcaggagaattgcttgaactcgggaggcgaaggttgcagtgagctgaagtcatgccactgcactccagcctgggcaacagagtaagattgtctcaaaaaaaaaaaaaaaagagattttttgggggtcgtctttagaagaaggcccaatagggagcaaaactcattgataaaaacaggaagagacagtggccagcgtaggatataggagaaccataaaaactgtacaaatttaacttgtctccagcactttcagaagcccagatagaacatttgaggatttctcctagtctttcaaaaatgactcagtggatttcagcgtgtataggcagtgtttgatcatagatgaattcattatttcctcccagccctccaaaatacaaggctagagcaacaatggatgttctataatgatttagtttctaaagctgcctttgagtacattctgattcaactctcctggtgtttcctttcatatacaaaggtagcactggttgtgtattatttaacttcgtctttttctatgaagtcttcgaagaactcatcctcagaattaaaacagcaagcagcaaaaaggaaactttagttacagccgaaacccactttgacttgagaataaaattaggatacttctgtaaaggacttggatttctgttcttattaggtcacagcaaaaatggtattttaaaaggctactaggagtagatgaatgatctcaatgagaaggaaaagctgacagtatatcagagagaactagaatatagcaggtttgccatttggcatggagagaaatcgagaatgtggacttgagccttgttgacttgagccatggctcttccacctaagtgactttaggtacattgttttctatatctgagtagcagggataacagctctacctattaggaatacctcattggtgatagtcatcttactttgtggttgttataaggatttattgagaaaaattcatatacagtgtttcacacagtaactggcacat

SEQ ID NO: 60067 - DNA, 1021 bp, Homo sapiens
ttgaatctaggggtggtactggctcattctccctattctagaccatagccattctcatggccacagaaacaaggagactcaggaacacagaatcagtgtgtttcacaacagtcaaacaggcattttcttgggggctgtcttcaataggaattaccaagagaagtatccatttccagaacaactagaattaattccaagtcctagctttgatgagttgtggcttctgaagtttggggtagaaggtcttttgtgattaggccttggtttgtactatatcaacagaataacttttcaactataactacattttaaacctttctaccacatcaaatctgtattaggtataagtcaaaattagtttaaccagctacttgattgaagggagaaattgtttcatttttttattctagattatgattttaaattcctgctcatctcaggagttttctagtttaaacctatatggaagatagtaaacatgattataattctctttataggagaacctccatttctaccagaatcctttgaccgaattcttctggatgcaccctgtagtggaatgggacagagaccaaacatggcctgtacttggtctgtgaaggaagtggcatcatatcagccattacagcgaaaactcttcactgcagtatgtggtggtctgtttttgtgaaacaaagttaacttttgctactttgatgtttaaactactgacagcaatctccatagcagcgttcattacaatagccaaaaggtgggaacaacccaagagtctgttgacagatacatggataacagaatgtgctatatccatacatggaacattattcagccttcaaagggaatgagattctgatacaggcacaacatgggtgaacctggaaaacattatgctcagtaatatgaaccagacacaaaaggaaaaatgctttaagattttgcttatatgaggtagctgggaaattcacagagacaggaagaagaatagatactaccaggcattgtggggctgggagattga

SEQ ID NO: 60068 - DNA, 1017 bp, Homo sapiens
acactcactgcgaaggtctgcggcttcactcctgaagtcagggagaccatgaaccgaccggaaggaagaaactccagacacatctgaacatctgaaggaacaagctccggacacaacgtctttaagaactgtaacactcatcgcaagggtctgcggcttcattcttgaggtcagcgagaccaagaacccaccagaaggaataaattccagacacatacatttggttaatggatagaggttttaaattagggatgggagtatggtggaaaagaccataatttttcatgtttttctcattatttttatgactgctttggatttataattttctttttttttttctgcatgtgtgtgttttgtttctttttagggagaagttatagcactggataaaatcttcaacaaagtagaaaaaatcaaacagaatgccttattgttagggctgaattccatcagggcattttgttttgatggaacaaaggcggttaaacttgatatggtggaggacacagaaggtgagctattttgattttcttatttttaattgacagatcatatatttgtggcatacagtgtgatgttttgacatgtatataattttgtatacaatgtggaatgattaaaacaagctaattaacatatccatcactgtacttatccttgtggtaatttgaaatttactctcatagcagctttgaaacacaaaatacattagtatagtcaccatgctgtgcagtagatctcaaaaacttactcccgtccatctgaaactttgtaccctttgaacagtgtctcccattccttggtcctccctcctcccccagcctctggtaaccactattctttctatgagtttgacttttttagattccccacttaagtgagatcgtgtaatatttgtccttcactgcctggcttatttcacttagcataatatgatgtcttccaggttcatctattttgttgcaaacaacataatttctttttgttttaaaggctgaatggtattccatcgtg

SEQ ID NO: 60069 - DNA, 1040 bp, Homo sapiens
tacagctcctcacctgtcacctgtcaccactacagcctgtcaccacgcttggctaattttttgtatttttagtagagacagggtttctccatgttggtcgggctggtcttgaactcctgacctcaagtgatcctcccacctctgcctcccaaagtgctgggattacaggcttgagccaaaatagttcttaaaaagatagagcatcttatgtttgacaggctattggagaacgtttctggaaacatagtttgtatagaccatggaatttatacagactaatgttagatttcctatttttcagaggcatgggcataagaatgacagaaccagtatatctcagcccttcatttgacagtgtactgccccgttacttatttttacaagtaagtatgtataaaagtaaaatatttagtgacattgaaacatacatcagtgaattatttgaaatctaggatattttaaaatttaagattttttctgtggtctacttacatacactgatctacctttggttaagcagtaagaaaaaactttacaagcattctcctttcttttctttttctcatttgatttttaaactactttttctatctttctttgcccaaaggtgatttaataactgattaaaatgactgctttccatctcaaaatactaatccctgaatattgcatgcatttgatatacatgtgtggtgttccattagtaaatcatttgacttgttatagtctgctggtttggtagtattattataattcacaatataagatgaagttactgaagaacagatctgttaggactcttggcctatgtcacactcctggtaactggtggtatctgaactcaaacctaagtccaaatgttgtgtgctgccccaccttctctgtccagtaataataataattattattattattttgagacaggctctcactctgttgtctaggctggagtgcagtggtacaatcgtagctcactgtaacctcaaactcctgggctcaagcgatcttcctgccttagcctcgcaaatagttgggaccac

SEQ ID NO: 60070 - DNA, 1035 bp, Homo sapiens
ttttcgttggaggtgtccttactcagactagaggtaataaaagatgtaaggggaaaatgtagatggtgatgaaagacatccagtggctacttttatactcgcataattgttcaggcctcctgaatctccatttctacttagaatttttctcttcctctaactttcctgttggaaaatttagaaccagtgattattctgttattttattcttattcattcatacagccataggccagtcttcagagtttagcataggagatacaaaattaaagaataaagataccttacttcttggcaaagtattcaaacatcaataaacgagacaaacatgaaaaaaaatgcagtgtggtaaattatttaacagatatgtgtaaaaatataacgttggctgcagcacaaggtatacttggacgtaatgtaatgatgagtaggaatttgggtggcatgctagacagaccgaatagaagggacgtgttattctaggcagaagagctaatatgcaaaagggagaggaatgagctagtttggtacttttagggaagctgaaaatagttgagcttggctgtgtgttagtttgcttgcgaggagtgaagaggagatgagattggaaagacaaccaggagaaccttatcacagagggcctccagtgttgactaagacattaaactctctagagcaaggaatgggactcactgaagggtttaatccacagatgtatcttagcctatatttttgttttctgcatcaacaaaattaactaccaatctcagcattttccatttttgtaactatatttatctattccagtggaattagatatattagaataacaggcccaaagcgccacctcacaccaactaaattagattggggtgaagaggcctgggcatcactgccaaggtaaatcgaatgtgcagccagtgttaagaactactgatcttactttatgtgctcctttcccgtgtctttcttccagtatttccacattctcatccttttttttcctgtagcattttagagtctcatgcgtcttat

SEQ ID NO: 60071 - DNA, 2367 bp, Homo sapiens
agtgatgtctttaaattttatttattattgttatattttctgtcacccaggctggagtgtagtcctgtgatctcagctcactgccacctttgcctcccaagttcaagcaattctcctgccccaccctctggagtagatgggattacaagcacctgccaccatgcctggctaattttcgtatttgtagtagagatggattttaccatgttggctaggctggcctcgaactcctgacctcaggtgatctactcgcctcccaaagtgctgggattacaggcgtgagccactgcacctggccagttatttctagtgttacccagaattaagaacaaatgaaatacagttttaattgtagttctttttcagaaccatgtaacagtaacatcttaatttcataatttaatcatttctttccaatccatgaatttcatgttatcattttgaacactggttgccaattgcgtatgattattgtcctttacttctgactgctcagatctcagatcttgtggctcacatttctctctttagcttattctgctcttttttttttttttttttttgagatggagtctctctctgtcgcccaggctggagtgcagtggcgttatctcggctcactgcaagctctgcctcccgggttcatgccattctcctgcctcagcctcccaagtagctgggactacaggtgtctgccaccacgcccggctgattttctgtatttttagtagagacggggtttcaccatgttagctaggatggtctcgatctcctgaccttgtgatcctcccacctcggcctcccaaagtgctgggattacaggtgtgagctactgcgcccggccccagcttattctgctcttaactctggactgtaagcaggtttcaaacacactaaacttaaacttatcatctatctgcatcctgtcttccagaccattctttgtttttgttttgttttgttttgtttgagacggagtgttgctctgtcaccaggctggagtgcagtggtgcaatctcagctcactgccacctctgcctcccaggttcaagtgattctcctgcctcagcctcccaagtaactaggactataggcacctgccaccatgcccggctaagttttgtatttttagtagagacggagtttcaccaaattagccaggttggtcttgaactcctgaccttgtggtctgcccacctcagcctactgaagtgctgggattacaggtgtgagccaccatgcctgacctggctaacttttttcttaagagatgggatattactgtattgcccagtttggtctcaaactcctagatttaactgatcacttctccttggcctcccaaagtgttggaattacaggtgtgagtcattgcacctggcctaaaacattctgatttactgtaactgatagtaacagtagtgtcttttttttttttttttttttttttttgagatggagtctcgctctgttgcccaggctggagcacagtgacccgatctcggctcaccgcaagctccgtcttccgggttcatgccattcttctgcttcaacctcccaagtagctgggactacaggcacccgccaccatgcccggctaatttttttgtattttttgtagagacagggtttcaccgtgttagccaggatggtcttgatctcctgacctcgtgatcctcccacctcggcctcccaaagtgctaagattacaggcgtaaggcaccacgcctggcctaacagtagtgtcttaacctaacatttcctcatgttagggacctacctttcaaaatggtgcattattggtgagttttaccatcacaggccttcagtattatgtgaagcatcatagtgcaaaagtgaagcaaggagcaggattgtttgcaaatgacctgggtcttcatttgagttgcttcaagaaggagccatctggtactgtccttccattcctttctcccaacaggattatctgccttcaagttttgcttatctttaaactagtggcttccttctcaccactgcaggcatgttgttttctgtagatgcttggtaggtggagcttctagctgtcaccaaaatttagaatgcttagtgccaggcagtctgtttgttcctcactgataaaggttcttgtactttaagggataacaaacagggtaatacttaaagattagcttcattagaggacatgtagccaagcttggtggtgtgcacctgtggtcccagctattcaggaggttcaggtaggaggatcacttgagcctgggaggtcgaggctgcagtgatcatgcccctgcactccagcctgggcaacaaagcaagaccctgtctcaaataaataaggagaattatagtgagttatactaagca

SEQ ID NO: 60072 - DNA, 1104 bp, Homo sapiens
ctgaagagattttcattgtacaaagagcagaaacagaatctgctcaaaagaactgtagaagccggttgaaaaaatgttaaacaatgagtaattgtgtaaaaacttgagagtatatgtttgtctttgtgacacatgaaacgtttcaattttaagcttacatgggatttttaagtgagaggaagaaacagatcctggtatacataggtggggaaacttacagatatgaaaacattttgataaaaagctaacttgattggtacagagctaaaaaggtgtgtaaaacaggctttttaaaaaacttacatttaggttataatttttgcctagattaatatttgggtctcctctcccctagatgcaatataagtgaccaactttgctggtgtttcctgcctacccatctcccacattcttttacatgagaactagacagagaatcaatgataattgattttgttacttaacctaggtagccttaacatcataacatttctttctgcattttaagtctagtgatagatattcagtgaatgattctcattaatgagctaactaataatcattgttgaaagcatgtaattgcagtaatgcagtagtgttaaatgtttatgatttgctttctttttgtagaacacaaagtaattatagtgggactggataatgcagggaaaaccaccattctttaccaattgtaagtatgggtgtttattaaacagttttcactagttattgaaactaatgtgtttacaattaataagagatgcattataataatgacggaaaaacttaaatatatgttttttgttttttgtttttttaattttaccgaacacaatctatagaaaagtgagtgaaataaacatttgctaaacccttcacaaacacttattgttttctgccctcgaaagaaagaaattaatattaaataaataaagcgcatattagaagtgctggggtgaggtgataaagtggatttcacttagttcttaccccacttgggtttatgtaaataaattgatagctctaggaagccattgctaccctcctgactaatagctttggaattttttaacatagccagacttgtcaaaagaaatgtgatca

SEQ ID NO: 60073 - DNA, 1580 bp, Homo sapiens
cacccaccccccacattttttaaaaaatgagttagggcctctctctcacccaggctggagtgtagttgcatgattctcagtacagcctcaacttcctaggctcaaagcagtcctcccaccttagcctcccaagtaggtgggactatgtgcatggctaatttttattttttgtagagagacaggttctcactatgttgcccaagctagtctcaaactcctgggctcaagcagtcatcccacctcacctcccagagtgctgggattatatgtgtgtgagccacaatgcctggcctatatcttcttattttttaatatgcaaactcccttttttcatgtatagctttaccaacagatttctcctcttttttctggtgtcttgcctttatttaatttcacctgaatctccagtatataatgcctaagtatatatgtttcaatctggagcatttatggtggatactgttttataaaattgtcttatttttaaaatgcatttatctttttctttcaaactagcttttctttctaagagttaggagattgtggtatacacaagtaagcaattattgactgtttagatgaatgataatggagtactttgaagttttagtgaaaaatattattgaaattagtgtaagtttcttttcaaaaattgctttttactaccagcatttgaaaacaaatcatagtattatgtattcgggcatcacttaaaataaaacaagtggggcacagtttttatttgttgaagctatgagttattttcttactgttaacatttggattttactgcttgatgtggttcagtattataaaagctgtttatggtgaaaaagcagtagatgttttatagtaatgatgatgccatgtagagaaagtacttagattacttgagtagttttacagaaaacttttcagcatcccattcaattttctgtctttccttttaattttcttctagttcatcattcttgttgttgatagcattgacagggaacgactagctattacaaaagaagaattatacagaatgttggctcatgaggtaaatttttaaagtaaatctttaaaaaacagtgtagtaaagtatctgtacgttgcctttgcttttttgcaaagattaatgtgatatgatgttggctattttatgattaacacaactttatgtactaaactgatgaaagtcttgaggtaaaaaaaaatgttcattactttttcaaacttaaaaaaccctaacacattaatttgtagattactactgttattgtaaaaatttttcaaagctaaagttacttaagcatgcctttaaaagtctgataaattgagataagcaaaaggaaaacttaagggtcttttccccaaaagtttcaataactgaaaggttttttttttgttttttgtttttgtttttgttttttttgagacggagtcttgctctgttgcccaggctggagtaccgtggcgcgatcttggctcactgcaacctccgcctcctgggttcaagcagttctctgcctcagcctcccgagtagctgggattacaggaacccgccaccacgcctggttaatttttgtatttt

SEQ ID NO: 60074 - DNA, 1038 bp, Homo sapiens
aatgttttaccaaaaagcaataaactattgaattgagttttcataatccaaatttttttctttgttgcctttatcatatactgagaaaaaaactgtaatgtcacctttcttttaaaaaggaagcttgaaagaaatttcacattttctgcaaggacttaaacctgagctctcagctttctgcaagagtatgtcttctttattattaggaggtcttttgggaggcatatttccagacaataaacagttgagacaaatgccacatggtctattcttccatctctaacaatttgaatgtgggtattaggccaagaagaaccgaatgttatttaagtattatcctgtttatatcagagaacttatcctcaaatcaacctcaccttcttagtttttctcttagtatttatcagaaatagcttgcagtaatagctgtgtgtaggcctttttgactcatacttttaagactgagtctaagtattccattctttagaattgaggaggataaggtgaagttgctattgactttctccagtcgttaagtttcagttaattttaaaaggcggggagtatttgcactcttcatggcaaaactggcaaagttgtatcttcaagatgagactgaagcaatttcccacaaactgattaagaatatttaagagaacattccatttaaaaatttcacttattatagtgtgacttgaatgttgacactgatgtatataaataatgattgtgctaccagcctttggttaagacctaaaaataataagtacgctttcagtttttaagtataaggtttttaattaaaaatacttctatcttttgtttaggttatgccaaggtctagagtggatgacctcccggattggtgtgagataacttttttgcttgaaagagactgctctatttattctgtgacatgaacattttttcctagtacctttggctgctaaggcagcagcatgtttaatttataacaacacaaacctctgagagcaacacttgaatcaagtgcagctgaactggaacataaaagatttt

SEQ ID NO: 60075 - DNA, 2795 bp, Homo sapiens
gtttaagttgttatttgcatggaaattaagtaggctgtttatttatctaaaggaatcaagtccactcttctgcctgcaacatttgttcaaaaactaaccaaggtaaaatatttatttgaaagcccaactttgatgttaaatattcttgaataaatctgttattttaagaatatcacattattcaatgcatataaaactatcagaagttagtaaatcataccagcactaaaaataagacaattggaatatattttagcatcagtttacaaacaactttattatcaacagaaattttagctcttttctttgcaagatatatcacagctgctttgggcagtagctgaagccgaagtatgaacagtccattttgtttcttaaaatttgaagtcgtgtctgtcatagcatttttactaccagcagtatgttacttaaaaaactacatggctttccttgaatttatttgacggtattatgtaatagacttgaaacaattgccatctttgtagttatgccttgggttctaaaatgttataggaaactgctgaattgaatcctagcttttagaatattaataggagactcaaagttaatattcttaacaacttaaaattaaaaaaagtcataatctatcaaaagtttatttattggatggcattaaaacatttttgaggcagttgtctaatatgaacaataatctaaacaatatattccttaaattaagaggaaagacaagtgtcgtatttcgatcctgtttattcaaatgtgtgattttgctgaaatgaaagggataaaatgaatacttagagaataatacttcatttttgcagtactttttaattttgataaaaaagatacaaagttcataatatcaaaatatgtgttcaaaattggtattttaattttaatatttttgtaagttgatttaaattttgctcttttttcaggtgtgcttggtttattatatttagtcaagttaatttagtcgaatgtggtaacatttttctgatttatctttagttggagcacacccttgaactgaacagtggccaaaggaaagctttctgggctttggaaagtagttgtttaactttgttttaagccgttttcttagtgattctgtatcaagtagaggataagtgtagtttaacttagtttttaatataacccataatcaagaacatgagcgaaaagcagacataaatcgatatggatggtttgtggtgtgtgtgggatgtgggggaattaagaaaatgccatttacctaagcacagtttgcctgaatttctgcttggttgtgttgtttaccgtaagtactgagggtagtttccctaagtctgtcctgagaaaaagcatacttagtactcctgtatttgttcttatgaaatgactatctgccttcttgtatctagtaagattggctggctcaattttcttctgtcaaattatatggttattttttatattaccacatcagcattatattaaaagtgtttttaatagttgattgtattttgccaactactagtatagactcaaatttgctatttaatttttaaaatacaatttattttgtaaatcctttaaaaaatatttggttagttttggattagaaatgatttatgttagccatgtgttgaagatgaaattggcatcagtgtagacggtgctgattgggaaaagttcatgattaggaaattcatgtaagactttttaagagtattttttaggttttcactcaatctttcctgtcacagtaacgtgaaaactgattattctttactccaagagaatgttttaacccaagcaagtatctaatactagagcattggttctgacattcattgtaaatcagtgaactgtaagatactgtctaaaaaatgtacatttgtaattagtgcctttattcatattttgaaataagttcttagttttatattatacctgttctttagaagtcatgttagcagctaattatttcagtgatgaaataatttgtgttttatatcccccttcacctccatgtattggttagcacagtttatagtaagtgaaaagcaagggacccacctacattaccttcaggagactgttctaccttttaatttgaaaacaaggaaattaaattttaacagaaatcttttaagtatgttataaccaaagtgttcaattatccttgcaagttcaaatacagcatttttcttaattttgagcgtgtcatgtccttcatctttaaacccatcattcttattgaagcccatttgagaactcttagaattaatagaaccttttataagggaatatatggaatattttttattgttaatgtaacttaattccttaaaacctggaatattaatatatataatctattaaaagctgaagattaaatatgtaatttttgcttttagtttcttgtgttagtatgcttaaaggtatcaatacttttattctatattcattagaagaaaggtaataaatttaagtttcattgctgaaaaattttaaatgagtgccaccccatagccatagtcattttgattaagcataatttaactttcattatagcataaagagaaaataattattttagtatggaaacagtgataggcagtgctgtaaacaatattctctgaaaagttgtgggggtcacaaagaaaattttaaagaatatagaagcttttttaaaaaatctttttagtgtagtttcttagaacaaattataaacataatcattctgaataatcaatttttatttagtccttaactatgtaaaaccgtatcagtagaaaaatgtg

SEQ ID NO: 60076 - DNA, 1788 bp, Homo sapiens
aaaatgtgaatgaaagcagtgaatttctgcctctcctcgtatttagggtacttaaaattactaaaaaatactgtctttttaccatacagctagatggcctgtattattcttaatgtggccaaaggagtgaagactgattagggttttagaatttggaactgtagtcacataaaggcatcttttgcatttcttaaaccagtaatctacattttctcctggaaatggagaaatatgaaatgtgctgtgcatagcttttggaatagaaaacaaagttttaaaagaatggatatgttttcttgcacaacttgtaaaattttaattaaaaaattacctcatttttcaatccataaggtgctttgctcaagtttgtgggatgtttgtaccatcccataaaaacccccttcacccaaactgtatttgaaatatgcaaaattcataactaagggatagcattccttggagactttgttttgttttactcttgtttaccagctgggccaacatggtagatatatgagattcacatatggtttcattaaagcacataggaaagtgctcagtcaatatttaattagtttaattagataagggaaaggagaaatcctaaatttgatggattcttttatactgtgaatatatttccatcagtgttggtaagatatcaaatgactatcagttgatcccagtcatcagtgacttatttgcatatttaagccctattcacaagagaccataatcattttaatcttatattttccctcaggaaatttagggactctgaagcccctattttattctcttggagtaaactgttgagtgtagttacaaaaacttttatttatgacttaaaaaaagtttagctgctatttcagtgaaagtgtaaaataaaacggtcatgatttttttcaattacagaatagttacaaattttaccatgttcatctattccacagagcatgttaaaaacaacaacaacaaaaacctaacagcaattacaaccttggtgttgcgtttattctaatcagagtgaatgattataatcacactttgctattttaacataaattggtgctttagagcattaaagaggaagcagcaggccctgtactcagtatttattatttcttgcctcagaatgcaaaacaactttaaagtgtctatattcatatatatgtgcatttcttaagatttaaatacaaactgttgttactccttaagcttcaggctttctgcgaaagctctaagaatatcttcattactatgcttggtcaactggaagatggtattaataaggtcagaattaggaattggattgctctgtgggtcctccggtattgtgcagaggaaagaaaaatgtctttcacaccacaaactgtgtgtctgaaccccagccaaacaaatgtgttccattggtccaatatataagcattaacaacaacaacaaaaaatttaaaacaagtaaattaatgcattcacatgatcacttcttgaaaatggttcaaagcatgttttcctgatggtgggattgtttaaatgacatgttttaaagtttttaatactttattagttatgaagtgcttcttttatatgttaagtttaggttgccagtactcataatttttatttctgcaattatgttataatgagttgtttgcatgcctacttaacccaagtaaaacgatgctgtttgctctggaatgttcatcttttagacaggttttggctcatttccaatcatggtgcaatatagtgtaacattcatttgttttcattcaacagttttatttt

SEQ ID NO: 60077 - DNA, 1043 bp, Homo sapiens
tactctattgtctttgaaattcttttttttttttttttttgagacagagttttgcccttgttgctcaggctggagtgtactggtgtaatctcggctcaccgcaacctctacctcccgagttcaagcgattctcctggctcagcctcccgagtagctgggattacaggcatgtgccaccacgcctggctaattttgtatttttagtagagacggggtttctccatgttggtcaggctggtctccaactcctgacctcaggtgattggcccgccttggcctcccaaagtgctgggattacaggcatgagtcaccacacctggcccaaaattctttatctggtgtccattctgtccaggttttcccttacctcactggctttcctttctaatttacctgcttggtacttaaaaaaaacaaaccaacccagaaacctccctagcctttgaaaactggaatactccttgggcgcttttcttcagaccagctccctaagagaccttacatggtcttgtagcttaaaaatattatgttgacaacttcaaaatttatatctccaggccttgcccctaaactgcagtcttgtatatgatatttgcagctggatctcaaatctttcactcttttttttttttcttttgggacagagtcttgctctgtcgccgaggctggagtgcagtggcgttatctcggctcactgcaacctccacctcccaggttcaagtgattctcctgcctgagccttccgagtagctgggattacaggcatgtgccaccatgactggctaattgtttttgtgtatgtatttttagtagagatgggatttcaccatgttggccaggctggtctcaaactcctgacctcaagtgatctggccacctcagcctcccaaattgctggaattacaggcatgaaccactacgtttggtcaacccttccatttcttaaacttagtttccaattatttccaaagctggatcctctcagaatcttccctaagtcaggtaaatgcagatagttgttcaggccaaaaatcttggagtta

SEQ ID NO: 60078 - DNA, 1070 bp, Homo sapiens
ttagcatgtttccgaagtgatcctaagatcttaaatgggctaaagatgtttcaagttctctaacatccttttattgtgataaaatatgcataacataacatttagcatcctaaccatttttaagtgtagaatttaagtggcaataagaactttcgcattgggccaggtgcagtggctcacacctgtaatcccagcaatttgggaggccaagatgggcagatcgcttgaggtcaggagttcgagaccagcctggccaacatggtaagaccctgtccctgctaaaaatagaaaagttagccagttgtgctggtgtgcacctgtagtcgcagctactcaggaggctgaggcaagagaatagcttgagcctgggagatggaggttgcagtgagccaagatcatgccactgcattgcagcctgagtgaaagagcaagactccatctcagaaaaaaaggactttctcagcgttgtgcaaccaacatcatcctctgacttcaaaactttttcattatcccaaagtgaaattctgtgttcattacacaataattccccattccacattcccccatcccttaataaccactattacttttcttctttatgaatttgactagtctaggtacctcatataaatggactcatataatatttgttctttggggtctggcttatttcacttagtataatgtcctcaacattcacccatgttgtgccatgtatcaaatttcattcctttttaagactgaataatattccattgtatgtacataacacattttgtttatccattcatccatcgaaagacatttgtctaacctcctttcttgatatgattttaacaaaacaatggcatacaattagtccatatgttcaatccaaaactaacttggaaaagaaaattatgctagcaagtgaagaataaaacgcattccgtataaatcccttaggccacattcatatttcaagataccatatctacatgactagaatgcagatacacttgagattttgtttacctgcatatgaaccattcaatactgactgctggctgaaaattaacttttacttgctc

SEQ ID NO: 60079 - DNA, 1032 bp, Homo sapiens
tacaaacttagactgtagctaccgctgacctaatgaacctggttatttatatgctgtctttttgttcatttgtctggtcaaaagggcccactcaccttcctgtgggcatagctggcgggagcaagtctggtatttcagctgacttctccttttggctttctcttctccttctccttttgctatcttttctcttcaattcattgaaaaatgtctatatataaattacataaatgcaatctgcattgcaaaatatcccaatgaaaagtatatatgaaataatttttggcaaactgagtcatgttcttagtggatatgggttcctgtgatttcaaggaatgctgtcctgaacttttaatttaaaaacattcaacctcctaattattttgccagtccgtagttttatgtttaagattgcccaaaatgtactgcctgtccataattctttcaagaattattgcttctgatattagccattttaattctatttactatttatataggtcctgggaatatacacctttgaattttttgttgttgtcatttagccctttaatttgctaattccaggaaacaaaaattgaactaagagacataccactgtgtctttgcactttttttcttggtgcttgtttggagcagaaacaggagggtcattttagtttttttgtcatacaagaaaaatttgaagaatattttaatactttgaaaactgtggatgccctgtgaaaatcaagttgacttgtgaggttaaaacaaattttatttcacattttagtttgagagcattcttgctatattacaaagatattgctcagtgctttattttcatatgctggttttgttaaactagcataggatattatatatcttgtataatgtacagttgtacctactttgattcataacttggctttaaagtttttatgtagctttaaaaaaggtggtttttttgttcaaactgaatgaattttatgaaaaccttttgttttacgtgaagtgtgagtaaatatagctcctgtatcagaatcttgt

SEQ ID NO: 60080 - DNA, 1940 bp, Homo sapiens
aaaacctagccattatatctcatattctttatacataagttggagatgatacatgttacacatgtctgtgtgatgtgtgcttaaaacatatgacatttcatgatataatttgaaatatctttgtaaagttcaatttgcataatttttatattagttaaccttttcctccaccagggtaacttcagttggaagatgtttctactgtcaatcgaattttttaattcactgtgtgagatagaaaaagacatggtttctatatataaggggtgtgatttacaagaggctatgtgcatgtgtataacatggatacagtgcgagggacaaaccaatacttgtggttgcacaagggagccggggaagagtcccgcggaggtgtgtgtggtgggaaagttctccagggaagacaacattcgattgtcttgtggttgctaaaaggacgcttttgacgccagatgggcttgagtccaaatcttggctctgaaatttcctcgttgccattttgaccttgggaaaaaatattaactctcgaacctccatttcttcatctgtaacacagcagtaaaattactcatctctctagtcataataactgttgtcaaaaatgtctgttctctgaatgtttggtgggtttcagtagaaaaaataaggaagttggaagtgggaagttaaggatgtcagaggcagagacaaaaaagggcagggcaaggcatggaattttctctgaaaactttacttaatctcattaagtgttggttattgatgaatctatatttcaaagtaccagacataaaaccatatcaccttcggtctaatgatagtcaagtgcagtgctactgttgcaggtctgggaaaaattcaggccaatgagagcctttgatggccgtgggaacagtaaattgcagcagtgctgcaattaactagaagtgccgactgcacctccagcaggctcagacttgcatggctgcctgctggaatgcaaagcttttctcttattcacaaccctcccactcactcattgatagcctagggccagatctggatgtggaaaacattattccaataaaaggtgcgttaaaagaacactcaaggagtttattttttaacaaactcatgttgtgtaaaatgagatgagggtctcagaaacagttttcttttcttggcatgggctgaggacactaagcgaaattctgccgcgtcatctactttgaagcaagaaaatactttgaccttattaatgtacttgtttctagggataaataaaccaccttaggagattacacaattcccttggatgataagttaactttttttggataatgatgctctgtgtataaaggaatccaaaatgctacctgtgtgttagtgaattaatcgaaaaggtaagcaatctatgtgtaagaaaaagacacctgttctaagattgcatcaatgaatagaagataagaaatgtcaaaataaaaaatgcatacaaatctttaaaaagcattcagagttcagagtttcctgggcatttcatattttgctttttttttttttttctccagaactgtatggaggcctttagtgttttggttgagtctagccctaaacatatgggcaatagaagtggacgtcttcatggtgttatttgaaagcaatggaaccagtccttgttcctgcatgaacttgcaggttgtcattaacttacagagtcatttatttgggtttagttaatatatcttggaaaatgtgaaatattgcaaggaggaggaatggtcatccatatcttctgcatttgaaacctagaacaggtgtgctaaaaagacaggtatagtgtccaggtttcaatggactgggaaaggaagcctttggcaaggcccctggttagatcaagaacagcacaaaatcacagagaaagagagaggtagagagagagagagagagagagagagtgtgtgtgt

SEQ ID NO: 60081 - DNA, 1998 bp, Homo sapiens
ggccttgcacacctagccgggtgttgaattctcccatgaagttgacagttggcccaaagtgctgaaatttcagacttgagccaccgcacccagacaggttttttatcagctgagtgacaaactcagatgggctcttcaaagggtctctctagtgtggagagcagctaggaagggcaggtctagagatagaccaaattcagcactactggatcaataaagatggaatgtgatgcaggcttcagataagaggaggatagctaagataattctcatgttttccaggtgctttagggaatagaaacatgagctcaaccttagacttggcgagtactgaggtgctcatgggacataccagtgaagacagcaactctcccaggactggggctcagcagggagggctcagatgagttcaggatgtcaaatcatcgaggtgtatctggtggtgatgggaaccagccagtgagcaggaataatcagagaagagcagagggtcaaggtcagagtcctagagagctggtctgggaaggggaaactgaggaatgggcccccaggcgggagatataggaggagccacctagagtgagaggcagattaggaaaagcatcactaggacagatcagggaattcaataagagtggttttggtggaggaatggtggctagctggtggcagattgtggtagggtagtgatgaagatcagagaaggatgcagtaaggtggatgacgtgccagccttttaaaaagcatggctgggatctgggtgtggtggctcacagccataatttcagcactttggggggctgacatgggaggatcgcttgagcccagcagtttgagaccagcctgggcaacaaagtgagaccccatctctacaaaaataaaaataaaaaaattagcaggatgtggtggtgcacatctgtggtcccagctacactggaagctgaggtggaaggatttcttgagcccaagaggttgaggctgcagtgagccaagattggtccaccgcactccagcctgggcaacagagtgagaccctgtctgaaaagaaaacaaaaaaaagagtatggttgggaagtaaatgacagagagggagtggccagaggggaacataagagaagagagggttttttgccggcaaaggagatttgagctcatttataggcatgggggaagacaatcagtaggtgcataagtgagttgagaatctatactagcaatacaggaaaccatgttaggatcactgtctcaacaaaaatgatcacagccttccaaaaatgcaacttgactttaaaaaggctttcttttatcacttgcaagaatattgctgtgacacctaataaaaatttaattaaggcttagatgatatcacgttttatgtaacctgaagtccttaaatccatgaaatcactcaaatagaatcaagtttgttggaaagagaatctcatcttaagaagtggcagcaggaaaaatgagtaagttccattttattttatcagtgaagtctggggctacgaaatggttctaacagcataaagaaataacagctgcattcaagaccaggatatgtaaaataatttgtttagtttcagccactttttaaagtcaattttacaccctgaaagaaaggcaatcctgactccattgttctttcgccaataaggagatcgggaattacaataataaatagaagaaagaatgttgtttttcctcactgtaattaattttatggctcttgcgaagatgaatttttgtggtgattaaaatagtcccttgcacatattaggtactcagtaagcatttgtgaaatagggactttctagcctttatttgtgtttaaggaatcagggaataagttcaaaattgcctttcaagaaatttttggaactctcttctcactaagaaactgtaaagtcttataaaagagacattatttattttctccaagtattgcttgcgaggtgaattgaaggttttttttttatcaacagttgttttata

SEQ ID NO: 60082 - DNA, 1127 bp, Homo sapiens
ttttgcttttaggctttggcatgataacattatactaataaaagtgatttttattaaagataactcacagtggaagctttatacacacacaaacacacacacacagacacacacacacacacacacacacacacacacactcacacaatgtcagctctccttataataaacttggtttgccagacatcatcatctgccagtttgatggtctgtgatgaacttggacccagagatgggcattgagaactttctccaaaaagttcacgttgagtttgagaagcattagtcaatcactgtaagcgcagcaaggattcaggctttgttcagagttttgatgctcatttcgtctttttacatccctgtctttcctggccctgacagctcaacactggcatttcacacatttcatctgctttctccataccgaaaataaactgtttccagacatgaataaatgggggaaatcaaaacaacttgtactaaaaatttgagagttctgaagactttttatttattttccattacttcttatttcacaagcgttcttaaatatcttttttaattgcatccttgaagatacatcataccgtggttacagggataaagaaatcaatcattgctgaaatcatttccttactggaaatcatcagggaagatagatatgtacaaaataattagaatcatgcaaactgagtttctgctgtggctcttttatttttaaagtgacaaataataatagtcataatttattaaacacttgtatggcagatgttcagccatgccctttaagtagactattttattaaactttcacaagaagcaacaagttacctagtttacaactgagggagctaaggtgtacaaaattaagttacttgcctaaagttctacagctagcaagttacagagctagtcaagaccctcactaaataggaagtcattttattatttatttcagcttcccacaatataattaacactattcactttttagatttcaatgacaggagaaaaccaaaatggcctagaactaaatcctctctcgctgtcctctacatctgcaaccgacacacttcttaaagctgtattaatattaaaattgcaaactgaacccaatcaactgaggg

SEQ ID NO: 60083 - DNA, 1010 bp, Homo sapiens
aagctttactgtactcgaggttctgccctctcattactggtatgaatggatgcaaagatagcctctttggttttgtgtttttatgtctttcctacgtcattatcatctactttgctacttctctgccatttagcctctcagggtataatgggtagtaaaaaaacgtcgaaagtacctccaagcatctgaatattcctgtgaaagttctaattgaaggttgttactttctgtttcagcccttgatcatctttggaagcttcataaagaactgagaccttaaaaatggaaaatttagaaagaacaaaccattaatgtagtagtaagcataaagttggttttcacagttgtgtaacagatttctgtaagctctctttctggaaatacacagtcttaacttccagctgcctgacacatgatgaacacctacaatatgatgcccttaaatcctccctcaatttcctaacaagcacatggctaccattgccacattcctgattattatttcagccatctcaaagattcttatatgcttctgctggcttcacaaattcacactttcccccctcatttatacttcattgccaatgaaaaaaataaattactggaatggatacattgcaaaaaaattatcttgtaggtaatttgtagttttcttggctctttagaatgattgaaaacaaaggaaattagatgtattttttgggaggtggaactgaatagcaatataattgatttatgtagtcttagggtattctttatttgtttagtggcttaaacaacacaaatttattgtcctgcatttctggaggtcacaagtcctcaaatcaagttgttgaaatgctgtattccttctggaagctctaggaaagaatttgtttccttcccttttgcagcttctagagctcatctacatcccttggcctgtggccccatcttccttattctaagccggcaaagttgcatttctctgatctttcttccgtgggacaccgctggctaaatctcctgtt

SEQ ID NO: 60084 - DNA, 1055 bp, Homo sapiens
gttgtcaacattaataaatacattgtaataaaatgtctgtaaaatatcagcattaaaaatattagaaagtttcaactaggtttaaacaagtcatttgtcaatgcctatttagaaattaaaactgttatctgggggctgtagaacccgtttcaatgtgatacgtggctttgtaatgtttttatttattttatattttttgaattgaattgaaaaagctcttttttaacctttattttgggtttgggggtacatgtggaggtttgttacatagacagattgtgtttcacggggaatttgtgtagagattattttgtcaccgaggtaataggcataatacccgataggtagtttttttgatcctctctctcctcccacccgccaccctcaatagtctccagtgtctgtcattcccttctttgtgaccatttcttctcaatatttagcttaataggtagttttatatgagatttggaagcttagtctagtcatcttcatgtgcattaaaataagggagtccatgtgcccaggagttctgccaacgtttagcaaactattggcacattctcggaaatagcaaccaatgtcttgcaatgtctgcacctgatcaaaatgtaatgtagtttattcattttctgactctataaaattagcttgaaaagaaaatgttaactctatgccattgaaacaaaaaatatgacccttatttttaaattcatatttagttacataattacccagtcagtaggtagagaccactactagtgtatattctgttgatttattttcaaaaaatttaccctctgtttaataaaatacatttgttttccttgaaaactgttttagtgtatttactctatcagcatatactttttgaccttgacactttattcttctttaaatattatttcaaaacataccaagtatatagaaattaccaagatgaagcatatttgtggttaattcaaaacttttaatgagaaactgcaaaccttaagttaaaatatgtaagatatttttatttcttgtaagttttttgttgacatttgattataccc

SEQ ID NO: 60085 - DNA, 1129 bp, Homo sapiens
ttagagacagggtgggggtgattgggcttgggtcggcatccatgagttccctccaggctgttctctggcaaagagggctatgatcatgggacatacttgttccctgggacaagtcaacccaaatgtaaaaaaaacacaccatttgttgcaccctgggacacgcttttaaattttctctgggtctccttgaaggtcaccagtgtgcgggaaagagtctggactgtttggttcactcccgttttccacatatctaatctttatgctgattcaaatgattacaaaactcctaacagaacagtttgactattggcaccaaagaattgttttgacaggaaatctcctaatacagcaaaacggtcggtacaggttcaaaacaagggtgttcatgctgtgtttttatcatgtgctccaaagtgcactgaagttcacgaccgatgtttgtccatggagttcccagagtgctttgtggcagagatttcgggtggagggagcctagagatgccttagaaatgataaagaaacaaaacaaaacaaaactcttctatgggatgctggctgattccatgcttattggatggcacactcaacagagtagtttgtgggtctgtttgttttgttttgtggattatggttttagatttaaagggagtgtgtatctaatccagctttccactactggaatgttgggattaacattcttcttcgtcttttttttttttttttttttttgaactgagaccttgctcccttacccaggctgtagtgcagtggcacaatcatggctcaatgcagcctcaaactcctgggttcaagccattctctccattctctctcctctacctttggagtagctgggactacaggtgtgcaccacagttcccagctagagttaccatttctttaatccagtgtttgtcaaagtatgatcctttgcacattgaaccagaagtgtagttttagcaaatctggacttgacaaaaacatttgtaaaatatcttataaaacgttatataaagtttactttttactagaaaatgtacatgataagaaattccatttcatttatttggtatcacaaagatctatttccactgcaaagtaagattaggggtgtttggtggcatgcagt

SEQ ID NO: 60086 - DNA, 1727 bp, Homo sapiens
ttcccttttggtcacctgagacttggagagacatcactttttaagtggttgctttttttttttttttttttttttgaagttcttattagaagaggcacaggaatgttgaagagctgcttcaaaggtggaagatagaacattccatgcctatccccaccagctgccactatctaagaatagcctagttcaggccgggtgcagtggctcacacctgtaatcccagcactttgggaggccgaggcaggtgaatcatgaggtcaggcatccgggaccagcctagtgaacatagtgaaaccctgtcttcactaaaaatacaaaaaattagcctggtgtggtggcaggtgcctgtaatcccagttacttgggaggctgaggcagagaatcgcttgaacctgggaggcaaaggttgcagtgagctgagatcatgccactgcactccagctgaggggacagtgtgagactgagtctcagaaaacaaaaaacaaaacaaaacaaaaaagaatagcttagtttatgcctcatctcgttctcaaaagtttggaccttctcgggggtgtgacttgctcaccaggaaatgggctgcaggtattacctggtgttaaccttccttgatccaagaccatataatatttgaaagtgtgagtacagattatctagtgtgtatgctcaaaaactaggccagaaacatgaaaggaatcattgagcgtgttgatcattctgagatagtgctaaaaactgaaatgtgtctgtggaaggggataaaaatctaaagtttacccttctaggtatattttacctacacataactttaaatactgaatgcctcctgtaaacatgttccaatttgctctagcataattttaaataaaacctccttagttgtctcattcaagttctctaaggttactgttttgccatataaaatttcccatataccttacattatatttgcttgtgatggtaaaaaagtaggtatcagcttcagtagagcctttgtcaaacatccaagccatgagaggtgctaggcttatggattcacagacagaacttaagggatctttgaagtcatctcgtttcaccttatagttgtgaaaactgaagacccagagaaatgaaataacctccccattgaagccagagcctttggtgagtgagccaggtagaacccagtactcttgtctctagttgagagctttttctaccatgccaagacacatacagtcttttctatttttagttcattaaaaaagaaaattattttatcaatgaaaatatattacaatttttctgtgttacagatcagtatttaattctgtgcaaatatggatagtgaatagatcgatacatatttaagagtgtatgttctatgtaagcaaattgtttctctttctctgaaatgtctgtctgctgtgtctcaaaatatttccctgaagctatttcttttctctatataggctccactctatcttggcttattacttgtgccattttctttcgacttagtttatttttctcaaactgattccacatgttactttcaatcacagcatctcaagactttggacgaacagccctgaagcattttgcttctttggtattctaaagggaatttagtctgagtgtacagagctattagagctgagctgctgaatgctttatcttagtgggttttttttgcctgtttttctataagccagttgatattttaaaaagaaatacaaaaactt

SEQ ID NO: 60087 - DNA, 1629 bp, Homo sapiens
acgaggtttcaccttgttggcaaggctggtctcgaactcctgacctcaagtgatctgcctgccgcagcctcccaaagtgctgggattacaggcgtgagccaccgttctcagccaggacaactgtgtctaaatgttttacccagaggacacccaattctgatgtccacagaaatgctctacaggctggcagaggctctggagctagacatatgcctctgcctacccattgtgaattgagagatagtgttccagtgtggttaaaagcttatcgtaacttgtactttatggggctgtccctggagggtagggttatgtgtgtgtgttggtgtagagaggcagtgagacacacatcagtgaaagctttgtttacttgctatttttttaaagcacaggttctgggatcaggaggaaggagatggtgttggaggtgaggcttccttctatgagtcatgattccacttacttgactttagccttttggagtgtccctggggttgggtttgttggaggcttcatttgtgaccagtactgtgtgtgttttcactcagtacagttttgaatagatgctaccacatttactttacggcttagttgtatggaactcaagaagaagggataaacgcttgtcaccttggagagtatatatgagactcagcttagtgatttcagtggcaaaatccagctcagtgtttcaaaaactaaaacatgttttgaaagcttataaagttggtctccagtgccagaaattcccattttggactggcttcaaggcaatgaaagctcagacactgactcattgaactatttccttattaataacatagtaccaagcatttttgagggttgaaaaaataactgaactgttgtccaaaacctttgagcctctcaaatgcaaagctttttaaaattcttaattttgagacttttgtgatttcaaaggaaatctgatctatctatctctttatatgttgtttattcttaactcatccaagtgctatttggccaagattggcttatgtttaaaaaaaaaatctcttaagtcattttataagctgttcagggctttatttctttagaccaggaagttgtaaattgccagcattaagcagaaggtgtgttgttgagtgctagttttattgaaaaagaatgaggttttatgtatttttgagatttgctttattgacaatccaccccaaaatatcatttctcttagatatactgttagaaaagtctcgcctgaagaaaaacaaaacaaaaacaaagaacaacaacaaaagacataaagtattgcctagttagaacaatgacaatccaaattattttgatgaaacataagcacatttagaattaacacagggtttatcaaagagttatgtaagagtaaaaatcaaaggatttatataatttttattcatgctaataaaatgtcattctgagggcttggcattgttatacatatttattaaactgaatacttttcatttgatatgggcagaaaaaattgctttatccaattgctacactgaggcaattaaggataatttaaaaaattcaagacagtcaatagaaaatgagggagaaaaaggaactaacaagtcttatctttgatttcatgtgaaaagattgatt

SEQ ID NO: 60088 - DNA, 1046 bp, Homo sapiens
gcacttaggttgattccatatctttgcaattgtgaattgtgctgcaataaacatacatgtgccagtgtctttatgatatagtgacttcttttccaatgccaccaaatcttaagtttgtagtaggttgtgaaagactttaggtctgggggagaaagttgggacaaactaatgatggacacaatataccattttatgagtttttagctttagatactagggtaaattgagtgccttcatttaattaaggcttttacaaatatacctttttgtagtgcaaataatctgtgtttattgcaaaatttggaaaaatgggtaagtaagcagaataaattaagagacctatatccttttaataatatgggggcacttgggagaccatcccgtgatgaagtgtgccagagatccaggccaccccttggcggggcttaattctcaggaccttgctgcatttgagagaaaggagagtagactggagtttcactaattttatcgtagagatcttgtctgtgctagattgagagtcttcggtgatggaagggaagataggactttttttttttttttttttttttgaaacagagacttgctctgttgctcaggctggagtacagtggcccaatcttggctcactgtaacctcggcctcctgggttcaagtgattctattgcctcagcctcccaaatagcttggattacaggcgtgtgccaccatgtccagctaatttttgtgtttttagtagagatggagtttcaccatgttgaccaggcttgtctcgaactcctgacctcagctgattcgcccacttcggcctcccaaagtgctgagattacagatgtgagccaccatgcccagacgatagggctttttatcattctaaaaagaacccattcttggctgggcatggtggttggctcacgcctctaatcccagcactttgggaggctgaggtgggcggattgcatgaggtcaggagttcaacaccagcctggccaatgtggtgaaaccctgctctactaaaagaaaaaaaaaataaataacaacaacaa

SEQ ID NO: 60089 - DNA, 1051 bp, Homo sapiens
ttttggaaaatatgtcagctcaatttggaagattgctaaaccacctaaaacagagcctgtttaaaaaataaataaataaaaaataaaaaaaaggctggcacggtggctcacacctgtaaatcccagcactttgggaggccgaggtgggtgggtcacctgaggttgggagttcaaggccagcctgaccaacaaggtgaaatcccatctctactaaaactacaaaaattagccaggcctggttgcaggtgcttgcaatcccagctactcgggaggctggagacatgagaatcacttgaacccagaaggcagaggttgcagtgaaccaagatcacaccactgcactccagcctgggcgacagagagagactccgctgaaaagaaagaaagagagagagagagaaagaaagtggagagaaagaaagatggaaagaaagaaaagacggtgtgcttttgtttgctgaatgatgggattcagagcagccagtgttgtcttctgcaacccgcaaacacccatgggaaggagagcttgtctggttagttagatgactttggatagatgaagagtacaaatgcatggcaggaaaaaggttttcaaggcatgatcggttttcctttgtgagctgaacttggactcttcagaagtcctgaggacgggccagcttggcaagttttctccttttcagcttccagtgtgcactccttctttccactctcacctctgaatgctgtgtggaggcgctgatctgcctaagacccaggctgtgagccaagctgtttttaatgaccgtccttaagcttcagcccaacagctgttttacaggtgcacatgattcagcaactagctcactgtgagtgtatgatttaaaaggtgcatgtaaatcatttgaaaaggtattttaaatgctccagtgggctcgctatttaaaggaatccttcagcaaatcttttttgaaagggaagactctccttctaatgccagtaatgatcaccgccccctaggtttggccttatgtatatttgatagatttaaagtggggtgagatatattttc

SEQ ID NO: 60090 - DNA, 1025 bp, Homo sapiens
ccaagagatatctctccgtccgcttggctacttaacagcagctgttgtttgaaccataaagtgaattattcattaagtcagcctttttgccagctgactggctgctgactttctgaaaaatgacattgatttcttaagatcctcaaataagtaatgaaaatcaaccgtctaaattcattcaaccttaattgaataaataccgtatggattctcccacaggatctcaaaagcaaaccaaaaattgttcagctgaaattaaacaatctttggctgtataaaactaatgggagttgaaatgcaggaaattccatttagcagtcaaaaaccccagagcatgccagacttattcagagcattgcctccatcttttgttcagagaatatacagagaaatgttgagtatctgaatttctaaaatgattgcttgggtaaagaggacctgcttggatatgtacctatttaaaaagcatttatcttggaaatacgttgagctgtaagtgagatctgtagaagaataggctagttgttacttgcttcggattttccagaaggaaataagacttagtcatgaggggcacattttaaacaggtttacctgtttttgtctggccagaagggagtcaacctaaggaaaagtaattttaattttaatttttttcttctttttttttgttttgatgatctcagctcactgcaacttccacatcctggattcaggcgattctcctgcctcagcctcctaagtagctgggattacaggcatgtgccaccacgcccagctaatttttgtatttattagtagagacagggtttgaccatgttggccaggctggtctcgaactcctgacctcaggtgacccacccacctaggtgtgtaaacttggaattctatagtttctgtacatttttttagaaacaaatttctgatattatagccatcgttttcagaccttatttatacaactagttagtatagactgctgtgtagcaaatgaagtgtggggagatcgcagtgagaacagagtg

SEQ ID NO: 60091 - DNA, 1029 bp, Homo sapiens
attaaaattcagatttttaacttagagtccttaatgagatttaaaaagagtttttggctttgaattttaattatattttttcttaataagctgtgcctatggttaatttctatatctttgtgaaaatgttgtcattttcaattgatgaaggtgttttgattaactttcttcaagatctgcgtatatatatgtatatacacacatatatatgtatatatatactcacagatatatgtatacacatacatatatatgtatatatatatactcacatatatatgtatacatatatatgtgtatatatgtatactcacatatatatgtatacatatatatgtgaatatatatactcattgctattgtgcttcttgcaatgcactaattactttattgtcttcattattgtcaaggaatttggtaggaaaagaaggatatttgttcaaagatactttaggctttccacttctaattggaatttctactttctatttagaagttaaaatctgtaagtagaaacacacacaaaaaattgctttggtagaccctacagaatcaaaagacatacgttttaggtttacctttagagaaacagcagttttgccagtacaggaaaaagttataatactggaattttccctgtgatgatgaattgccagtctgagaggaagtggttggggaatggtggcccaccagcctgaaagcccccaagaacaaccattaataagcactctttggttgaacacccatcattatggggactgagctccctgggagagcgccattctgcctccatttgacattcagaattgtcagtaagagaatgaatggaagtgtataaactcttcctgaaacagactgaaaaagtcttcatttggagtaaagaataaggagctaaaattagaacatctcattttttcaagagagttttataggtgaaactagaatcatgataattactttgattacgctaaaaagtaagacttgggatattttatgtataccatgttttaagtgccaaacattttcaat

SEQ ID NO: 60092 - DNA, 1081 bp, Homo sapiens
ttaattcatttacagacaaacacaggcttggtgtggtgatgacagtgagcagtgaggcatcaatactgtgcctgctctcaaggaattcattgtgtaagagcttttttttttttttttgagatggagtatcactcttgtcacacaggctggagtgcagtggcacaatctcagctcactgcaacctctgcttcctgggttcaagcaattattctgcctcagcctcctgagtagctgggactacaggcgcatgccaccacttttggctattttttgtatttttagtagagatggcatttcaccatgtttgccaggctggtctggactcctgaccttaagtgatccacccacgaaggcctcccaaagtgctgggattacaggcatgagccacctcacctggtcctgtgtaacagcatctaagtgccataagcaaatcatcccagggccatgtgatatgtacaatcaaagtatgcaggctgtagtgtagcatgaaggagagtgtgatgaaactgcttgggattgagagttggggtgttgtcaaagaggcttagcctagaacttggcatttagatgggggcttgacagattgagaggagttcacctaactgatgacctgtttatgggaagagggaggggcatgctaggcagagtaaatttcctctgcagtggctgaggtgtagaatgacatctccaggactgtctcatagggtgaccactggttccagtggcttggggccgagaagttttctggaacgtaggatggcttccagtgttaaatatggaacagttctggacaaactgggatgattggtccctctgactgtgagttattctttattatggttggagctatgaagcggagggaggagaatggtcagagaacagtttgctaagtacagacatttgcagagggtgcattttaggcagatttcagggttgctcgaaggcctcaaaggtggtgttatttcttaagtttctgtagtccttagcactgcaaatcacaaaatatgatcttgcttgtaaactaggtacaacagaaacaagcaagtaaacttgggcaaaaaagcgaagaccacccaaatga

SEQ ID NO: 60093 - DNA, 1034 bp, Homo sapiens
ctggggtgcagcatcaagaaaggagaactgaatagaagcagaggcgtttactctctgcccagaactaggactcgatggatattgaaagggaaaaacacatccctattcggctaaaagcccagactttgccacgacaaaatgcaaaaaatctgcaccccctaagtatgtaaagacttttaaatttcttcgaaaaaggaaagaggagaacacagattccaagaactctgtaatctctcctgtggggtgctgaattttcttaatcatttataaaataagaaatctctttgattgggggtatattaacactcctgaaaatacaatcccggtggttactgtagctgtaattttgtgattcagccaatttttctactttctaccttaacagagggagaccacaaagtgtcaggtttgaatcagtaaaaagagggcagaaggatggcccaggggactgtttggtgggtactcacccagggctaagagctgccaggtactgtgtggatgctcttttgtttggtccacagcagccttgaaagatttgtgtccctgtgttttctgggcaatttcaatgatttttttacacgagggcaatttcagagttaggttttagtattttcctaaggtctcccattaatgagcattcaaaccctgctggtattcaaatgcaagctttgccaggcttacagggttgatcctctaggcttgacgttgctctttctagcaaaaggaaagacaaatgacacttgaattatgtagtgattttgaacagcagcagcccatgagtatccataggagggtaattgtggggtttcagtctggctcataaaagacttgttttgaatccagggttgcatactaagaacactgcttttatttcaagattcatttattttgttggggttctggggattgatggagattattgggatctaaagtcctcaagtagctccttggcactgccactagttgcggaaacaaaaatctacctctgaaagtttggaaagtgtactaggccatttttgccttcctataaagaa

SEQ ID NO: 60094 - DNA, 1037 bp, Homo sapiens
aattgaaatgctgcaaagcacacatgcctggagaaagagagaggcagagagagataaatagagagagagaaacgagaagcaccttactgattcccgttggtgtcagtgatgacagacaacctgaagccactgctgtgaatcttaaactgccctccctgagtgctgattgggctttgtcagtagggagcaggcatcacagtgcttctaggggggcaggggccactgggcagctaagtagaataaagggaacaaggctgatcaaaacatgggacccttccagggttgtgcacccatttgctccttgtagactcattcatgcccctcctcaggttctcttcatgcagtaatccatctctcaacctcctcagggtatcaagaaatacctgtttccaagttcccctgcgatgcgatcaatctgaaatttctctttccatcttcctgaagtattatgtatctgcctagttctcacatgaagaaaccgaattccagttttaaagagggctctattaaccactattttggatcgattactccctttgccctcacacagacttcctccgaacagaattcatccgaacaaatagtagaggaggtttccacttcctcaattactagcacataccaaatttgttttcctgagttcatgaaagttaacttgactagagttctaaggatttcaaacttttcagttccatatttctttttcattctcgtatttaaagatgatcactgcacttacatttgatgagcaaattcaagtgggcttggagtcatgcaggtaaatagttccggtgttaaaagaaggagaaagacagaagaccacatagcatgagttatcttaagaggttttctttctggatgcaggagaatagtggggcatggggaccatggggaccataaggagaatgcccagcctaacaggacagccattacccagctgtggaggattaggggcatgtaggaacctgggcccaggatgccagatctcctagtttctccagagacatccgaacgcttacatattggctattcattca

SEQ ID NO: 60095 - DNA, 1028 bp, Homo sapiens
agccagggtaacatagagagacagcgtatcaatttaagaaaaaattttttaaataatgaagctcaaccaaataaaaaagaatgaaaaccaaattgactgttttaggggcaaactttgactccaataactggtagaatttcttctcatgattgtaacaatttctacagatatagctagctgatatcttatgcaagacactggttttagaggtgtgatgaagtaactgggtccagtgtagattgagaaattacaggcaagggcagggtcaggacccacatcttctatttgtagctactgatttgggcagaccctttcccctgcaccccgacattgcaccttttctgctggttcctggtaattgatgcctggtgctatgaactgaattttatccacttaaattcatatgttgaagccctagcccccagtgtgactgtatatagagatagggtttttaggaggcaattaaggttaatgaggtcataaggacggagtcctaatctgataggattggtgggcttataaaaagagagagaaaaagacatccctctccattcacacacattgaggaaaggccatgtgaggacacagtgggaaagtggccatctgaagaccaggaagagagtcctcacaagaacctgattatgttggcaccttgacactgaacttccagcctctaaaaattgtgagataatgaatttatgttggttaagtcatctagtctatggtattttgctgtggccactaagctgccatggcagcacaggcatattaagactatatatgtggaaaaatgttctattacacaacatttttccaaaagggatcctcatgaaacttccatccgttgaacacctaacctgccaatctgatctcagctatgagtgtagggtactttttaaaaaagaaaacaaaaatctcttttcttttcttgcttttttttttattttttgttttttcttttgaggcagggcttgctctgtctgctcagtacagtcagagctcactagagccttgaattcctgggctca

SEQ ID NO: 60096 - DNA, 1077 bp, Homo sapiens
aattagtgtgaaaatggatagcaattaacataggaaaaatatgtaaagaaggcaagaagaggtgtaggcacactcagaaatctaggagtatgacctgaatgagtctgatagtctgttgccccgagaaattgtaatggggtatgttttgggaaagcatgatgtggccttaaggcacagtcatatatggatgtaggtgccataaatttactgcaaaccacctggactctgtacgctttgaccaagtcttcaaaaaatgtttcataaatttattttctaccatatgaagacgtaatactttttttgtttggctcaaagttaccattcccccttcttttgaatagttaactgttttccatagattttaagaaattagttagcaaattcagtcgattttgtttatgccttttatgttctttaatattttacttctgagcttttgttttctattttgtcaagcctcttaatccatttattgggtcttcccaccaccattttcttgaatcttttttttttctttcatgttaaatatttcttaaaggatgaaatccaagagcacataatgtttacactgtagtaattacaccattgtttcagtattacatttcttttcttttttttttttttgagacagagtcttgctctgtcacccaggctggagtgcagtggtgtgatcttggctcactgaaagctccacctcccgggttcatgccattctcctgcctcagcctcccgaatagctaggactacaggcgcccaccaccacgcccatctaattttttgtatttttagtagagatggggtttcaccgtgttagccaggatggtctcgatctcctgaccttgcgatccgcctaccttggcctcccaaagtgctgtgattttttctttgacattgctttttatgacaatgcccagggttctgttagcctttttggttgcagaagagtcctttgttttatatactatttggggtcatttattatttaataaaggatgcataactaattagtgacacagcaaagtttctcactcacagctaaccaaaatagctcttcttcctgcattcataatctcaatt

SEQ ID NO: 60097 - DNA, 1028 bp, Homo sapiens
agaaaaaacaaatgaaaaccagaaaaagaaaatacaaatgataagctatgggtttccagggatgatataactgagacatctatgagtttcaagtgagagttgtttaagactatagaaaaattgttgttcaaagtttttcttgaggatgtcagaatttctacggttgtgtagagaaggaagagaggatcacagagaggaagatcctgagtaaatatacagatgaggagaatggtagggtatatttgggatagtaaataattgagtttgagttatgtcaatggtatctttaccaaaaaatgtggcatgttaagattggaaaagtaggttgggacaattttacaaaatgccataagggatagttcgagtcattagtccttaagtaataaactttaagaagatgaatatagatgtgtgtataatacattaaagtgtagaaagactgaagttagtacatttaactggaagaatattgcaactatttgtgtgaaaaatattgaagcccttggtgattttgttgcttcaacccaaggaaaaggaatcatactattggtaccaaatacagagtcaagaaacactggctttagggagaaccagtgacttcaatagtgaaacttaaattttgtgtgaaaataaaaaggaatatatctaaatgaaattgctcacaagaagtatgtcttttgacctcatcggatatatccagtatagtgccaggcatttaattaattttgttgaagggttaaatgaaaagggaagaggaaaattgaaaggtggccccaataagccatgaatcatatcctgtccactcatgtcataaaatataatagaaatatggtgattctaaaataccgacattaggcatgttttctgaaatttaggtgaacagtgttctattgaatttttcaaaaagttaactatgaaccatatgtgcttaaaatgtgtacacacagtgtaaaaataatgacagctttgcattttcaatttctcaaattgttttatctttaaaactcatgtcagcaattcagccaata

SEQ ID NO: 60098 - DNA, 1008 bp, Homo sapiens
ccatgtagaatgaaagaaacggaagggataagttcctctggaacaggctctataatcattattctttttttttcctaaaatcaaaatgatctaaacagccatgggtcaaagagtgaacattcaaatacttcagagcactagagacctaagcagcctggagttgtttcaaatctactttaactctgcttctgacaagtggtccctaatgtgtagagtaacgatatctcctaatgctgcaatttctgtgccaatgcttattttacatagctacaatgaaggagctaaatgtttccagtatgtattaaatattttagtgaagatccccaaggcaaatgagaatttgtagccttgcaattaagaggaaagcagaattactagtgaataaggtatttttcttggttgagaagaattactggagttcagcattttagtgaacagctgttactctgggataactatgatttcataacagttgtaaagcctattgttagtactagagtctgctgtttacatgggacactgctgggtactgttgaggaaaccaaaaggcatgatctttgtacccaagaaaggtagagatagattgtaaacaccacccataggaaactattcataatttccacctcataggtaggcaacagagtctgttggttaaagggcaatctatgaaataatatggccttggttcacatcttgtctctgctatttacagctttgtgtcttcttttccttagctgtcttatctgaaaattgggtatatcaatcacacctatcttaaaaaatattatgaggattaatattatactttaagtgcctagagcagtccttagcaaatgctaaacactcaatgaaaatttgctacttttatatttgctaaggaatgctctatgatttaggagtattaatactgcatatcatttttcctccaaattttgcatttgaccttgtctggagcacatcgcttttggaatactcaggcataagctgggctcacaactcattgtgaaa

SEQ ID NO: 60099 - DNA, 1032 bp, Homo sapiens
gatggtgataaaaagtaagggaagaaaattatgagtatttaaacagccagcagcagcagaagagaaaatgaagcaaatgaagaggcaaggggcaggtggaagagaagaaagaggacaagtactcagattttaaggcaggaaatagtctcaaaacaaagagagacaccaaccatgccacatgcagaaacgaatcaagtaggagaaataatttaggcctaaggacctcaagcttatattctatatgaattattaatttgtaaagctaagtaattgttttttatgtctgattactgagatatattttgttttaatcttgaaacttgaaaatccaagcagatttatagatgcatgtgtttaggacagaagctaggcaagaaagtgttaattggtgctatgaaattattataagtattgagcaaacaacctactcttctaaatgtagggtctgtttctttcctacattaaaaaaagcgaaattaattcccttcttaagttactctgaataaaaatttcagaacaacagttttgcagttttccatgtggctggttttcagatctatctattcatttctgtcggatactcggcagattgttttcttattgtgccttgggattcgagttctgatgggcccactgagcgagatcagtgctttgaattgatctagaggcatttgtctcctgtgaataagtaatttagagttgagagtatatgtaacgcagttgaagttaagagatgtcttatttcaccaagaaataggtcatttgaatccggagacactgagtgtgcttacggtaattactggaagcaggtggtcttcacagctagtgctgactttgatgaaagagacctcatagtctgaaaatagcccatgtcgtgttgcgttctgcagggaaaaatgaaaaaaatttaataaccgactttgaagtgaaaaccaatattcggtcagccctcatttattttccatggctggttagagatactattactattttaacttgtttctgtagggaaattgagagcaggatcttttt

SEQ ID NO: 60100 - DNA, 1035 bp, Homo sapiens
ctgtctcagagaaaaaaaaacaaaaaggaatataatataattagtgaaggcctatatagatactggttaatttcaccattatcagaataatattttttcagattagtaaatacatagttatggttaataaatctataatgattgaatgggatttattcctgacaagatctacaatgatagaatcccctaaatgactcgatgaggcttacagatgtaaaaacagattattcacacgactagagaccacctatggaaagcagcccaaggaaagttttcaaggtacaagaacaaagctgttgattacaactgatctcagaatttgactctggttttactagttgttaaggcaaaatggagtggccgtgtattcgctattatttgagattcaaagaacaaaatatgtttgcttctcttacttgattcttttaaatgaaggtgtctttctcagtcccaaattatctgcataaatgaccacttttctgcaaaggcagatgagcagatgagtgctatttatagtagaatcacatagtaagcaaaggagacattgtatgattagctcttcaaatggctacaaagacatgtaaataaaatagttaaaacatatacctgaaggattataaatcattctactataaagacacgtgcacacatatgtttattgcagcactattcacaatagcaaagacttggaaccaacccacatgcccatcaatgatagactggataaagaaaatgtagcacataaaccccatggaatactatgcagccataaaaaaggatgagttaacgtcctttgcacggatgtggatgaagctggaaaccatcattctcagcaaactaatacaggaacagaaaaccaaacactgcatgttctcattcataagtgggagttgagcaatgagaacacatggacacagggaggggaacatcacacacgggggccggtcagggggtggggggcttcgggagggatagcattaggagaagtacctaatgtagatgacgcattgatgggtgcagcaaaccaccatggca

SEQ ID NO: 60101 - DNA, 1049 bp, Homo sapiens
ccttgatcatgttctgatggcaaatgctgtgtgtaaaaataaataaataaagtagccaggtagaaagatcaatgtcccagaggaaattattttattttattttatgtattattattactttttaagacagagtctcattctgttgcctcggctggagtgcagtggcgcgatctcagctcgctgcaacctctgcctcccgagttcaaatgactatcctgcctcagcctcccaaggagctgggattacaggtgcatgccaccatgcctagctaattttttgtgtctcccccaaacccagggtgtagactttccttaatctcctttcttttcccttgatgtttaagtcccaagccatgtttagataagtttccttatctagctattgtcccaggtaaaatccacaccagagtcttgactatcttgagtccaatggcacaagcttcttcaagtgggcaccctgcgtcactgtcttttgtgtgaagttcagactcttcgtgttccaattcaatgtgagcagtcttaactcagagggcacactttttactctgtgtatgtttttatgttttaagtgtacacgtttgtaaaacagatatgttgccgacatctaaatattaaaatatttcaagtaaaaatatagatgtgcgttttttccttgaggactcggaaagccctggaagcccttgtcttgcaaatattgcctggaaaattcactcaaagtgtgcaccctccaatttctccctcatgaatttcttctcttacccaaggcacacagtagcttatgtagaaaggaagtttgaaacctcttttttaaagtggaggtggattttacttatcatcttcatgctgttagttgactgcttccagattttctacagattatgattgtggagatgggggcaggaggcatgttaggaattgatcgtttgatgatagctcaccttgactgtcacgctgttagatgcattgctcaatacctggcagatgagagttcaggagctgtacaataaaaaaagatggaaataattgtgcaaattgttactgataccctgg

SEQ ID NO: 60102 - DNA, 1054 bp, Homo sapiens
gtttcaaccagaatggtgaaatgattgccaaatttaattagatattaatcaacaatgatattgtcaaatgtatatttaacagtgcatttatttgtttttctctagattttatatctataagactgcttataaacaaagattttctaaaactgtataaaaacaaatatacagtaaagttttttttcagaaaacaaatagtaagaggaaaatctgtttccaaaattatagccagcactaaatgaattcatggtgtgcctatatgtgtgataggtttgcagcatctaacatcaattatattatctgagaatctattactttcaacatcaagtagccttctttagaaccaggaactccctgtctcttctattcattcaatagcactaaactgatgttattttttggtttcgtatgtctctcttttctaatacctttgactccctttctagtcttttatctccttcccatggttttgtccatgaaacaagaggatcctactacctttcctccctgtatgaaattcagatctaacatatagttacctgctttgtttttttccagattcctgtcttggtcacacagataagttcaaccaatcatccagtgaaagtcggactgtccgatgcatttgtcgttgtccacaggatccaacaaattcccagtacgtagaagaagggcagtcgcaatgagtgagcctctgtgggggtaaatttaaaggagattggtctatggcagctgtacctgaattaaaaaaaaaatagctaatcgattagctgattaatgcttgttaattctgttgtttgctttataactccgattgggctatctctgtcacccttgagctaactcaggtaaagacaaattaaatagtgaagccaaaaatgtgtaattttggactctttttcttggttcttttttctttcttttgatttggggtcttactctgtcacccaggctggagtgcagtggtgcactcacagctcactgcaaccttgacctcccaggctcaaatgatcctcctacctcagtatcctgagtagctgggaccacgggcatg

SEQ ID NO: 60103 - DNA, 1082 bp, Homo sapiens
aagttttaccagtgtcctgaaactttgcaagcaatgagggaatgttgacaggaaaatctaaaaggcttaaattagcatttcacgctcaactaaggtttatgttttattgaatgcctaatgacattattatttcagagaattagaactacagagagagattttaaaaatgattctggcaaatgcattttttatttgtagctactttatttaacaactccaactagctaattctgctaatgcattgcacttttctgtgggaagcttgtagccactataatagtgtcatttgtatctcaagagtctctcttctcctgagtcttcatgctggaaatgaatcttgtggttatacgatacaggctatttccattaaagagtactcagtaaacggtgcttgtgctggactcgatttgaaccagaaaagaaataagatacaaccatatggagccagtcattaagcattggcaacacataaatagggaaatgttagtgaatcattcatttgacaattcagacaaaatataatacttacacaatatgagtaagccaagttaggagatttctcatatagtctctgtgtgaatgttatgctttcaagacagaaaaataaactagatcatggctaatcatgcctcaaggtactcattagtctgtgttcagttcagctagagtggatattgatcaaagaagattcttggtgtttccatatgatcacattgtccctcctgctgatgctgatcaggctttctaaaacatgcagtatttgcactttgcaacacatcgccttaagctttcgatcacattttctctctgtgtgttaatccgctcagatttaatttttcttaatttttaaaaggcactaatgggtgagtattgatctattggagttgaatcaccatcgctaagactgaacgtttaattcaactttattttggcttattcttgaagaagacccatgagcgaaatatatttttggaatcacatgaaagcttctagtattggcaggggtaaccacaattctaattacttgtttctgacagaggtatctctgaaatactacataaatgaccatttggaagttgtcg

SEQ ID NO: 60104 - DNA, 1011 bp, Homo sapiens
ttttaagcagtttaatggtgtaaacagtgatagtgtgctatataaacacttttaatgagtattattaaaggaaacaacagacagcaagtgagggaccaagtcagactgatagaatagtgtttgcagatgaataatggagatgattttgaaggtgttgagttgatgggtgttataaatggaaggagagagaacatgaagattcaacactatatatgcattttacatatgcttacatagcttttgctataaatatttttcgtctggataaaaggggtgtgctctgaaattctaagtcagtttcaggaaaagcaaattttaagaaaaaactacaagtctaagagtgcttctgttaacataagatgacattaagtgtattttatgaagcagaaaattgcttcacacccaaattcttaaaattcgtttttttgtgctgtctttaataagacatagaacattggtacacatgagctgcataacagtctaatggaattagcatttagtaatttgatattttgtatgcctgacaaatctgatgtagaaaaagcaaggaaatagggaagaacactgttttatgaccagaaccatgctttaaagtggaatgaatttactaattctttgttggcaatctacttaaggacctgagcttggtgcaatcttagaaactgacccaggcaagctcacaaatttataataaagagggtataacaagaattttaaaagaaaacaaagctttctttatattaaaggcactactaaatatatatatgtaatttttaagcattgttattaacttagactttgagagacgaattgaactcagctgtgtgtgtgtgtgtgtgtgtgtgtgtgtgtgtgtgtgtagttaaaattctcaagcatgaagtttttaaaatattaagggtatcatcttggtaaccttgtagcaaactctataagccttgataaagtttttccactgaaatcaatttacttcaactgggaataatcatccttaagagttcagatgacaag

SEQ ID NO: 60105 - DNA, 1014 bp, Homo sapiens
ttcctggaaaaacgttcataataaatatcctaggacatttcagacttccagtgaaatttcatataaaatgtatttcagaaatggcatcttcatttgatatcagtaattgagatattatcacgcattgccttgaattggaaatctgttattaagttctgttaatgtgcttcgttttcttggaagaaagtagacaaccttctcaaagttacaaatgcattcttcaaagagctgctgagtgacaagctagaaagcctcagggactagccagacctcaggctgctgctactgccgtaacccctcacacgtttaagccttttcaaactgtgcagtttattttctgacatggtgaaaaagaagacactgaaatatctgatggtgatggtattagcagcaaattgcatagtatgaaagatctagttaaagctggttcaaaggaacccctgtatgactgcaaaatagtggaatattgttttgagtattagtctcattgtcttatgtctcagagcctgtatgtccataggtgtggagtgtttacatgtgtatacgtacacatgtatttatagaatattagagctagatggaatcttagagataatttagttctatactctcctaacacaaaaggagagactgagtgaggctcagaagagtggaatgacttatccaaggtcaaagagtcatagttctaagaataactctttcttcttttcacatgtaagtgaagcagattcattcagcaggtctcccagcttttctccgcttggctttttttccttcctgtggagtcagttgccagagtctgcttaaatcactacctatctgacatgctgctggggtcatgcggctcacagtggctggtaagcagctgatttttggaggtgataatcataaatttactattattaaaactgaccactgtttacaaaatcaaaacagatccacaatgaccatggtttgtgatatgcagacgcgtggatttaagatttttgaattattagctacattagaattgtt

SEQ ID NO: 60106 - DNA, 1010 bp, Homo sapiens
aatttattttcttctggaatttttatgtacataatttgatgtttgcccatttaacacagtggtgatttcactgtaatacaaataggtattcttttttaaagaacatttttctgttttattatgatggctttgtaaacatcattttaatgtttgtattctattctattcaacattcattcaatagctttatattgactgcctcttatgcagtcaagtggtaactcggaatgcactgagagcctaacatgtgcctagaagtcaaaaaggacctcttttcattcagatgaagactgtgtgttagttttctactgctgttgtaacaaattgccacaaacctagttacttaaaataacacacacttgtcttacagctctggaagtcagaagtgctaaaatcaggatatggacagggctggttccttcgggaggcttcaggggataatcgtttccttgccattttcagcttccacatgccgcatgtgttccttggctcatggtttcttctcatatcattccaacttctgttcccaccgtcacatctcctaccactaacgttgaccctccagcctcctttttgtaaggcccccttgtgactacattgggctcacctgggtaatctaggatactctctgcatctcaaggtccttaactgaaccacatctgcaaagttcctttttaccgtgtaaggtaacattgacaccttttggagattaggacatggacatctttgggaggccattattctgttgagcacagagtgcatcaaatgtgagatgcatcacacgcttccaattaaactctaacacacccttgactgcaagatatgtcccagtttcaattatattaaaatgtaacccaatggatatcttgagtatttcacagtgaaatccaggcttcactaaacacttgtatgagttagttcctgtgctaaacagcgtatataatatggtgaaattgaatgatgctaggccgggagcggtggctcacgcctctaatcccagcactttggga

SEQ ID NO: 60107 - DNA, 1090 bp, Homo sapiens
atttctcaggccctgtgtaaatcagatacgacctcctcagtctcctctgtaaaaccccatgcatttcattatgaaatcagaagccccacttgggagcccctctctctcttcaagagagagagctattcacttttctctttcttttgcctattaaacctccactcttaaacccactttttgtatgtccacatccttcatttccctggcatgagacgacagacctcaggtatttaccccagacgacgacactgcttcacttaaatattttcactacctttgacaggaaggatatttagtatgttctccagagagaggtcatagtcaaggctgcttacgtgatggctaagagcagaggaaggggtcatcctgtaaactatgactcagctacctcataaccctgggcacccagtgatgttcctcccaaggtcttttcccttgacatacttgggtctagttaggtgttgccagatggcctgtagtccccagactggcatgcttggggaggccagctttttcctgggtgtagcatatggccattgactctgatcttcctgactctggcaagctctgaatcttccattctcctacccaccacccagccaaaggaatctctttatagattggagaaaactctcctagtgtttccggccatgattctttggctatctagaatcaggagttctgtcctttttatctcactgtgaaaaccatcgaaatgctcttaagtgcttaggcttctggaagataatagttggaaaggtaagtattttacttccaaacttcagttttcttctctgtcacatgcatgaaatgagctgatgagcacagagcaaactctttgatgaactggggggaaggaaaggagagaagcaaagaggcagtacagtgagaagaaaagaaagatagattcacaacttggtgaaatggtcacctgtctcccaataagctatagacagaaaaaaaattacttggtgcatggcttgagtttccaaagaaaaggaggaatgaactcacttttgactaagtgtttgaacactaagcttagtgtcaaataatgaacctttgtggttctatataaccattttcttat

SEQ ID NO: 60108 - DNA, 1027 bp, Homo sapiens
gtgtggcccactgttgtaaatattcttgagaggcaagtgcaatgagtgagaattgatcactgaatgtagcaacatgaaggtcattaatgatttttggggagcagttttggagttgccatgggggagaaagtttggaagagaatagtgatggggtggaaaggaaaaagctattcactaaagtgaggaacagtgggggaaagcagataggggctgagcatgaagggatcaactagaattattacatctgttgggatttattttccttattggccacatagagccaagttcttaggcagatctgaaggaatgctgcatcatttattttctcagtgactagcatttaatcacttcatttaaatatttgttgttttattcaaaatcaattttgtacttccctgtttaagccttccgaaaatccatcttgccaaaagaaatatgaatcctttgtagggttactgtggctcagagacaaaaagattccttttttttttattgaattattcgtgttgcccagtctggcaatgctctgaatctcatattgtaataagttaatattttattgtactgcaaacacaataatgtggtgtttggtgttaactataaaaataattggattttatatatacgtgcctgtccaaaggcaaatgtgattgtacaaagactttgtaaataacagtacattgctctgtgatgttccttgaacagttgttttatatttagctcttatattgttgatcttctgtatttctatctggattataaattcttgaaaggcagagtgtatatcacgcatatctgtcatagcaaagagacacgtgtgtattgaatattatgacttttctgttaaatgaatgttctcttgcttaaaaactgggagtaggccgggcgcagtggcttacgctgtaatcccagcactttgggaggccaaggcgggtggatcatgaggtcaggatatcgagaccatcctggctaacatggtgaaaccccgtctctactaaaaatatgaaaaattagccaggcttagtgg

SEQ ID NO: 60109 - DNA, 1432 bp, Homo sapiens
gtattcactggaggaaaactaggaaataaaggcatatacaaggagggaatacttgaagggggtataagtggatgtctttgctgctgttctttctctcatttcccttttccttaggaaattgatctgtcatattttcaactgctatctctactggtgactcaaatagatatctcttctggatccgctacccagacactgaggatttttgcaccatcctaaacttcagatctccaaacccaaactctgtctctcccaaccagattaagtctcattttctgccttttatagtacccttcttctaatcacccaggctcaaaatcattgactatttctgcatatctgtacatctttatatttatcactcaccatggccacttattctggattgtgagtagatcaaaagaatagagagatttttaatcaagtgagcctaaatatgcaaagcaagtatggaggagagaaggaaatgaagtgagactctcaggtcacttccatggaagacacagatggtagagttttgacttagtggcaccgagatagatctgtttcagggcaagatagaacagtgggagagatcccggctgggcgtggtggctcatgcctgtaattccagtactttgggaggctgaggtgggcgaatcacctgaagtcaggagtttgagaccagcctggccaacatggtgaaaccctgtctctattaaaaatacaaaaactagccaggcatggtggtaggtgcctgtaatcccagctacttggcaggctgaggcaggataattgcttgaacctgggaggtggaggtttcagtgagccgagatcgtgccactgcattccagtctgggtgatagaaagagactgtgtctcaaaacaacaacaacaacaacaacaacaacaacaacaacaaccaggagaaatccccacattccttggcctgaaaatgtatttgtatgtacattacctgttaacttccttaatattggtatatcaaattttgatagcgttttgctttcaaagttttagaaaagcttagtattgaaaggaatttgcatcttcaaatttgcattttctatcacttcattttggtatcctggtgggtttacatgcaaaacacatctatctccaggctgtctaatgtgctactgtcaattaggggagttaactgtcatgtgttgtgggctgtctttccccggtgacatttaaacggagatggcatcgctatttcagatactgaagttgtgagcctagcattgggtaggagattggatttgctctctacgactcattctaagattaggattttctaacttgatagtgattcataagacaattatttcataatgcatttctactattatatagtgtgcacgtgataggcatacattgatttggacttttcctatgacaacttggaaggcagaaagttaagcacttaaaa

SEQ ID NO: 60110 - DNA, 1048 bp, Homo sapiens
aacatagcacctggagtatagtttttttaaaataatgtttattattcacacttcccatttttgtcgtgtttctgtcctcatccattgcttctggtcttcctcacctctcccgatgacattttattgaaccctgacccctctttttgtttctctaatagctgtgcattgcctctattcattatatatttcttctagcttgtaatcatggtagaggcaaagtggacagtccatttattataaagatttcttccctctgtctcctgggagagcccctcagttgtaccttctgggcttctttgtgttgagcttggtgggaatccataagccatcattccgctccacctcagaggccattccttggatgcatctgtttctccttgatcttggaaatttccagtggaacatgcacacattttgcagtgtttacggtgagttgggacagtgctgtccgttgtcccaataatataagactgttttggtttctactgttttcggaagccagattcatgctccctcctaccttgttctttagggttatagatatcattaccctctaggtggaggacttggcaaggaggagttgaccactgaccattggaaatctcgatacccaccattcgcagcatgctgggctcctctccatccacttccagttccttcctttcttcctttccattcccttcccttcccttcccttccctttcctttttttttttttcagggtcttgctctgtcacccaggctggagtgcagtggtgtgatcccagtctcccaggcttaagtgatacttctacctctgcctcccgagaagctgagatcacaagcacataccataatgctcagctggtttagttttattttttttgtagagatggcagaggggtctcactatgttgcccaggctggtttcaaactgctggcctgaagcaatccttctgcttcagcctcccaaagtgctgggattacagtcatgagccaccatgcctggctcacttccagtttcacttagcttaggttgtgccacctatcagaagtggccaaggaggta

SEQ ID NO: 60111 - DNA, 1083 bp, Homo sapiens
gcagatggaaaaaagaggttatagcagagaggtctactctccttaatcagtagtttctggtctctaaaagcaatgagccagccaaagaacaaatgaaaaaagaaatctattgactagaaacccctttaaaagaggtcttggctgggtgcagtggctcatgcctgtaatcccagcactttgggaggctgaggcaggcggatcacgaggtcaggagatcgagaccatcctggccaacatggtgtaaccccgtctgtactgaaaatacaaaaattagctgggtgtggtggtgcgttcctgtaatcccagctactcaggaggctgagacaggagaatagcttgaaccagggagtcggaggttgcagtgagcagagatcgtgccactgcactccagcctgacaacagagcaagactacatctaaaaaaaaaaaaaaaaaaaaaagagagagagatcttatattaaatctctgatccatctaaaacagcaacattctgttgtgttagactcagcatagctttgtccttcaaggggagacagtccatcagtaaacacataattctgagtgacacctatgtgcctcttgctacaactagggttgagggctagatgtcagagaagttgaggtttctatatgtagaaagtctgcagtctagcttggaaggtgccttagcccattcaggctgccacaacaaaataccatagacaggataatttataaacaacagacatgtatttacttatttatccacttatttttatttttacttttatttttatttttgagacagtctcactctgtcacccaggctggagtgcagtggcgcaatctcggctcactacaacctccacctcccgggttcaagcgattctcctgcctcagcctcctgattagatgggattacaggcatctgccacaatacctggctaatttttgtatttttagtagagacaggggtttcaccatgttggccaggctggtcttgaactcctgacctcaagtgattcttccacctcggcctcccaaagtgctggaattacaggagtgagccacggcacctggcctagttatttatttatttagagac

SEQ ID NO: 60112 - DNA, 1484 bp, Homo sapiens
gagtgaccagccggttctagcttcgttccctccagttcccgcatttgcttgctcacatgctccctctcacaagcagtggccaggagcaggctgagtgaaaggagtcactccagttcccacccctgaagggggtctaggtcaagggaactagcctgtctcactttggaataaaatactttgatttcttctaaggcttgttgttatctgtcttgtgatgctataccagagtcaagttggaatttgttaccttattgctacaaagagtctgttttgtcagtcttatgatctttattttaatgttaatgtggtcaattatgtttcaactccaaaagggagaaggtataatgaggcatgtccaacttcccttcccgtcatggcctgagctagttttttatgtttctttggaatccccttggccaagaggggagtccatttagtcacttggaggacttagtattttatttttggtttacacatgaaagaatatagctaaacagagaaagggaacctgccaggaagcaagtggcatgaaaaaaaagagcaaaggaggccagcctcctggcagtggagggtgtgaatttcgggattaggtcagattgtacagactactgaaacccatagagagcaaggtagatttcgtgtagagggaagacattgctaagtcactgttcaaaggagaactggattcctcatcagcttcctttctcctactgaaaagtcagactgagagagaatctcatgccaaaacctgttagaaatttccacccgttgttattgccagtggaattaagttaagaaaaatctaaccagagccagaccgaaaaaagtgataagacacgtcacacctccctctgagtctacttcctgtctcagagacggagggtgtgtggctaccaaaatactgaataataaactgtgaaacagccagagtaagatccccacgtgtagcccatctctccaccagaaaactcagggaaagaaagaaggctggggagcagtgaggccctgcctcctgtgaggcttaaactccacaggaaaaattctataagttgtaggggaccaaaagtatgcaccccacaatgactgtagacgactaaaatatgccacccaaaaaaaatgcctctttggcataaggatgagtttgagaaactacaaacccaagagatgttctgaaaacagtagaagttacccttttgtaagggaaatttacatctgtaaagggaatctccatttttaaggatatcttcctgtacaagaaagagaaggatgactcttaatcacaagagactcttatcactgtgagatgggattattcccttgaccttgaccccctttgtgggcaggaactagagtggctcgtttcaccaagcctgcagtccatggacagctaagtgttaacagctcagtgaatggtgagggtgagagcctcccgcacctgccctttttgacacctgagttcttgttcagtgtccaggaagaatcag

SEQ ID NO: 60113 - DNA, 1049 bp, Homo sapiens
gagaccccgagttagagaacagaaggatcctgctgcagtctgtcatggagattgcaatctaccctggagattgtggtcctccctggggattacagttcaccctgagggttacagctgatggttcaaagaatcaaagggtgtgtcagggggctggttaagaagtcctacctgaatactgcaagagccctcagatgaatctgttttaggacatgagtagggggctgagcacatcaatctgcccccagctatggctgtaagaagtatataatgaatagagccaagggcagtgaatactttagtctgtcagcaatcatcaagcgtgaacagatttaccttttgtttgaagctcagaaaagggaggaggaaaaaatgtgagcactgcaaaatcacacttagacaaaggaaaagggaaaaatacacagaagttcacagaaaaggcctacaactgaaaatgatccaatgcaggatccaggggagaaaaattaggaagccattagatatccttaatacggtcaaggcaaaaaactccaagtgatcaatttgtagaagtaacaaatactataaagagaaaacatggctgggcacggtgtctcatgccatgcctataatcccagcattttgggaggctgagcagagcagatcgcttgagatcaggagtttgagaccagcctggccaacataatgaaaccctgtctctacaaaaaaatacaaaaattaaccgggcatcgtggcaggcacctgtaatcccagctactcaggaagctgagacaggagagtcatttgaacctgtgaggcggaggttgcagtgagctgagatcacgttattgcactccagcctgggcaacagagctagactctgtctcaaaaaaaaaaaaaaaaaagaaaagaaagaaagaaagaaagaaaagagagaaaacaggttgaaatgaaagccaaaaaaaatcattagattagttaacgctctttacttgcaaataagtaaagaaaaatggaagcaagagaggagaagggatttattgtaagaatatgaggtgattttcaggcttgag

SEQ ID NO: 60114 - DNA, 1038 bp, Homo sapiens
tggagtgtcttatgaagaccaaataaatggttcgtgaggaactagatggaaatagtctctcatgagatttgctttgtttatacctctagggtggagtgttagaaaactggagccagaaaaagaaaataaaggcagattttagggcttacagaagttcagttgggtatttttgttttctgtttgtttgtttgtttgtttttagaggtaagttctggttctacaatccaggctggagtgcactgatgtgatcttggctcactgcatcctcgacctccctgggtcaagcgatcctcccacctcagcctctcaatagctggaatacaggcacataccaccacactcagctaatttttgtatttttatgtagagatggggtttcactatgttgcccatgctggtctcaagcgattcgcctacctcagcctcctaaagtgctggggttgtagacgtgagcccctgcacctgaccaaaaggatgttgttttcatactacagacccctctctgggaggcaatgtgcttaattttgtgttaagtggtgaagaactcttctttctgattataattaaccatttggcagagtatttggaaatgctaatggtcttcgatttacaccctcaagatagatctttttgcccagttgggattaggcctttcccactagggcccaggggcccagggacaggctctgccagctcagggagtccttactgggggagagtctcttctctctttctctttcctctctctcatgacagattcaataatacatgatggtgtttttatagtgaagatatagtctcaattgggaaaaaagtttgtaaaagaatactctaaacgactgggcacggtggctcacgcctgtaatcccagcattttgggaggccgaggcgagtggatcacctgaggtcaggagttccagaccagcctgactaacatggtgaaacctcgtctctactaaaaatacaaaaattagccgggtgtggtggcgggtgcctgtaatcccatctactcgggaggctgagacaggagaatcgctt

SEQ ID NO: 60115 - DNA, 1346 bp, Homo sapiens
agcactttaggaggctgaggtaggcgaatcgcttgagaccagcatgggcaacatagtgaaaccccatctctacataaaaatacaaaaattagctgagtgtggtggtatgtgcctgtattccagctattgagaggctgaggtgggaggatcgcttgacccagggaggtcgaggatgcagtgagccaagatcacatcagtgcactccagcctggattgtagaaccagaacttacctctaaaaacaaacaaacaaacaaacagaaaacaaaaatacccaactgaacttctgtaagccctaaaatctgcctttattttctttttctggctccagttttctaacactccaccctagaggtataaacaaagcaaatctcatgagagactatttccatctagttcctcacgaaccatttatttggtcttcataagacactccaacacatgcgatgcaaatctaatgttgaaaaagatttttttttaatgctatttgcctgaccagagataacaaacaggataccttattctggtttctgatttctcttttataggaaatattttcatgccatccatagaacaataaaggaagccaaatgaaacctctgcgcctcgctccctgaatccaagcagcgatgccgctaccccgtgttaaggatccgtttctgatttagaagggcctagacataagctcatgaagccgagcatccaaaagcaaaactcaacatcaaacatgtctcgaactatgacgtgtactttccaatttaccctcggagtgggaatacttctgtcatctgtatagcatttaaaggaaaaatgcccattaaggaggagaaggtaagagtaagcaaatcgtttttgcacatctgaaaaccctcctgtttcaaaaacttgaaacagttggaaattcagctggccagaaagatctgaacttagactcacttcaaagcaacccagcgaacactggcattgtttgtttcctaggggctccccttgctccttctgtccgtcctctgtcagaataagaacttcaggccatgcgcggtggctcatgcctacaatcccagcacttcaggaggccgaggtgggcagattgctcgagctcaggagttcgagaccagcctgggcaacatgacgaaatcccatctctacaaaaaacagaaaaattagccagacatggtggcacacacctgtagttccagctactcgggaggctgaggtgagggggatcacttgaatccaggaggacaaggctgcagtgagctatgatcatactactgcactccatcagaccaacaccctgtctcaaaatataaaaaataaaaattggccgggcaccgtggctcacgactg

SEQ ID NO: 60116 - DNA, 1160 bp, Homo sapiens
agtacagtggcgccatcttggctaactgcaacctccacctccccggttcaagcaattctcctacctcagcctcctgagtagctgggactacaggcagccgccaccatgaccagctaatttttttttttacttttagtagagatggggtttcaccatgttagccaggatggtctcgaactcctgaccttgtgatccgcccacctcagcctccctaggtgctgggattacaggcgtgagcaaccacccggccttattgttcttatattaaaacaaaagaacctagaaaaaattgcttggttaaattgtagagaggaagggagggaaggaaaatgaaggcttttcttctttgttctttaaaagtccaagcactttctttcagaatcaaaatgtagagaggcagtcagtcttggagcatgcttttgcattttaggatactactcattaattcagttttaaagcattcactgggttgagcacaattttaaaaaggttctgactcacccagatcctgtttgaagctcaactcattttgattgaaagagatttgagacaagaatttcagaagagaaaaatgtgtgttacacctggacatatatacacatgtaacagggattgtattccttctagtctaagacaagagattctatggtaaattatttaaaaaaattagttttttttctagcattgtattgtcaccagaaagaagagtgctgaattctctgtttctgcatttcccaataataaatctcctaggagagataactttttgcagttgtgccccccacccattttctctgtggcttgctttatttcccacatatgaatacacacacagcagatacatcatgcacaaactttttttaatgtgtaatctgtaaatctaggcccattaagttttcattgaagttgggaaactgttgaggacttacttttgttcttcaccatgcgtgcactttgccaaggatctttggtaaccaataaaacgatcatgttcactctgaatgtatttctttgtgattaaatggaaaagagtattcatgaactgcttaaacagtatttttataccaaaacatcaacgcataatgaaaaatgagctatagttgttccaaatgttcagaatagcagctttgcatttacagtcatattttggcaaaactatt

SEQ ID NO: 60117 - DNA, 1041 bp, Homo sapiens
cggcccgcgccaccagcgctgcagagggcggccctaacgtccccgcccccgcgtgcgcgcccccgcgcccgttcattccggcctccgcgcgccgccggctcccctcgcgcccacccccagcacacctcggcggcggcgagcggcgcgggggagggggacggggccccggaggtaggccgggggcagccaacaggccgcggcagcgcgcacgcagggctagcctcgcccaggcctcctccctcacgccggccgcaggacgggcgcgcacgccaagtgacgctccgaggaggaagcgcagcccccttcccctccctcgctgcccctggcccagcgggagccccccctccccccagtgcgcctgtgcggaggccctcttgattatgtgtgccctctccgggcgcccgcgttagcggccgggtggaggtggggagggaagacgctgaggaggaggaggaggcggaggaggcggtggaggggaggtggggggaatcagcaaggacatggctcctgactcctgtgcggaacgtgagtgactgagcggcaaagcccgagtgagcgagcggtgggctgccgggccgggcggggggcgccggggcgggctcggggggctgtgtgggggggaagcactaatcggcttgcatgtgttttttaatggtccccccaactccctcttagatggtctctagcgaccggcccgtgtcactggaggacgaggtctcccatagtatgaaggagatgattggaggctgttgcgtttgctcagacgagagaggctgggccgagaacccgctggtttattgcgacgggcacggctgcagcgtcgcggtgcatcaaggtaaacacccaaccgcccgccggggcgcgccggcctgcgcccaacggtcaccgccgcccccacctgggccgcaaccgccggcgcccccgccccgtgccgcggccgcgggagggacgcggagggtccgcggcggggcgcggggggtgtgggccgcgcatgtgggagaaagtgcgtgtggcccggactgtcatgtgattccgctctca

SEQ ID NO: 60118 - DNA, 2857 bp, Homo sapiens
caacctctgcctcccaggttcaagcgattctcctgccgcagcctcctgagtagtaggattacaggcatgtgccaccacgcctggctaattttgtatttttagtagggacagggtttcttcatgttggtcaggctggtcttgaactcccaacctcaggtgatccgcctgtctcagcctcccaaagtgctgggattataggtgtgagccactgcgcctggcctaattaaaaaaaattttttttttttgtggagatggagtctcactgtattgcctagactgttctggaactcctgggctccagcagccctcccaactcgacctcccaaaatgctgggattacaggcatgaaccattgcacccagccttgatttatttagatgaggtaacacaaaagagttgcatttaaaatttttacttgttaattaagtaagctgtatatgtgataaataggatgtgaactgttttacttctctgtaaagaggtagtttacttgaatagtgacaggtggattaatagggctttgaaagggtatttgatttttccatagttcttcgaatcttaacattttaacacatttcatttttcaacagcttgctatggcattgttcaagtacccactggaccgtggttttgcaggaaatgtgaatctcaggagagagcagccagagtggtaaggactatttatcaaaaacattaaactttagtgagtaggttaggaaattaggaactgcactcctgttgtggtttgtggggttgtcagtcatttcttcaaatatcataatgtaagagataatttaggccaaatattgacttggagtattaaacagattttgtaaaactgaaaaacaaatggaatcaagtgagtatattttggatactttgaaaacaaaaatacatagtcatatttgggctttgttaactagttacagaatcaagaaagcttgaagaagtttgaaggttacactggctaatcatagttaaaatataatggaaatagaaacataaggaagttacattgataattctcttaggttttgtgtaatgggaaaaaaacccaataattttagtgactatcatattccttttactacatctttgggtgtatagtttaacttcgaacactcactgatttcaggcattcagtccctttggcaaaccaacataaaaatcttttttttttttttttttttaacttgggtggttaccttatttcagaacttttctaaacctcttataagaatgaaggaggtgccgggtgcagtggttcacacctgtaatcccagcactttgggaggccgaggcgggagtatctcgaggtcaaaagatggagaccaccctggccaacatggtgaaaccccgtctctactacaaatacaaaaattagctgggtgtggcaagcacctgtagtcccagctacttaggaggctgaagcaggagaattacttgaacccgggaggtagaggttgcagtgagctgagatggtgccattgcactccagcttgggcaataagagtgaaactctgtctcaaaaaaaagaaaaacaaattacaaacattagctgggcgtggtggcacgccctataatcccagctatttgggaggctgaggcaggagaatggcgtgaacctgggaggcggaggttgcagtgagctgagatcatgccattgcactccaacctgggtgacagagcaagactctcaggaaaggaaaaaaaaaaacaaaaaggaggtaggccgggtgcagtgactcacacctgtaatcccaccactttgggaagccgaggcaggaggattgcttgagtccaggagtttgaaaccagcctggtcaacttagtctctacaaaagaaaaattttaaaaattagttggggctgggcacagtggctcatgcctataattccagcactttggtaggctgaggtgggcggatcacttggggtcaggagtttgagaccagcctggccgacatggtgaaacctatctctgctaaaaatacaaaaaattaactggatgtggcagcgcgtgcctatagtctagctactctgggggctaagacgggagaatcgcttgaatgagggagccagaggttgcagtgagccaagattgtgccactgcactccagcctgcactccaaacagagtgagactgtttcaaaaaaaaaaaaaaattagttgggcgtggtggcttgcacctgtactcccagctactctggaagctgagacaggaggattgcttgaacctgggaggttgaggctgcagtgaaccatgactccagcctgggtgacagagtgagagactgtctcacaaaaaacacagtgagggaggtatgtttatcctttgtatccacaagcatttttcccatttggatttctgaaaatatcagaaatagattttattttcattagttatgcaaacctaccatttaaaatatgatagttcctttttaaaatcttattatatttattgatttattatttattccaagacatcttgttatagcaaattcctttcccttggtgttgattatggaattagactgaaggtagagaacaaacattttagcttctttacctaggcatatagcaaaagcagaagcttttgtgtttgcctgggcaatttttgagcggtagaaataatgggctgggtgctgtggctcgtgcttgtaatccttgcactgtgggaggccaaagtgggtggatgacctgaggtcaggagtttgagaccagcctgagcaacatggcgaaaccccacctctactaaaaatacaaaaattagctgggtgtggtggtgtgcacctgtaatgccagccacttgggagactgaggcaggagaatcgcttggacctgggaggcagaggttc

SEQ ID NO: 60119 - DNA, 1044 bp, Homo sapiens
attactttttggtgttaatttttatttttttcctctgtgattaatatttgttctgtatttcagctttccttgtgttttttttcttctaagactataagactaaatctttgtatatcttcttattgctttttttttttttttttttgagatggagttttgcttttgtcacccaggccagagtatagtgacagtgatctcagctcactgcaaccttcacctcctgggttcaagcgattctcctgcctcagcctcctgagtagcaaggattacaggcgcctgccaccacgcctggctagtttttgtatttttaatagagacggggctttaccgtgttggccaggctggtctcgatctcctgacctcaggtgatccacccgcctcggcctcccaaagtgctaggattacaggcgtgagccaccatgcccggcctctctcattgctttcttaaataatctgcatggttatcgtattaggtcgtttatagattcacttttcctttccttccttttatcttcttttctgtttattttcttcttcctcttctttccgtctcctctttctcctctctttgattttattcttctctgttcctccttgcgccttcctcctccctctttcttctctccccttttactttcccttgtctttcctcccccttcctttcctttttaaaccagggaccttcttctgggtaccatctgcttgctcccatctggtctgtttgctccttaggcttgctggagcatcctaaggaacatcccttcaccattatcttggagttttcttcttgcttatattggattccctgtttttctatccccctactcccctgtttctttatatttaagaaggcacatcttctggcagcttcataggaaaaggcgcatgagaaataaattagggttttgcatggttgataaaatgggattgctatcttacttgattgtttgacagaatacatagaattcttggttggaaatcattttccgtcagaatttgaagatatttctctactgccttttagctttcagtgttactgttagc

SEQ ID NO: 60120 - DNA, 1942 bp, Homo sapiens
gttggaatttgaggatttagaattacacttttatgattcttgtttttcttcagctgctcctggtgtctctgagtgtagatttcttccatttaccctctctaggaaattaagctttgcagttttctagggcaggtgagagccagttacgcgttagtatgtagtgaataagggattgttttgattgcttttcagatggtatgcaattcctgttggttagcctcatctgaaaacgtcactcctggatacatagaacatcactgcgcatgtgcatctccccacccccgatgcctggtgtctaacgttcctccagtttctggtgctctgatgcattgcttttgggcttgtcttactacagcagctttcttcggtcctcagtcatttaccacttgtcatatgtcctttctagtttccagggatattcttttttatatttatggctttatgccatttatctcagttgtcatttggcgtttcaagaaggagaggtggtagtgtttaagtggaattaactacttgtgtttctgatgtggtcttttatatttcttacagggttttgttttaccaagtactagtcttcagtctatcctgtttacttgattttttcccactcaactcacaaacatttttgaatcatctcatgaattctgctttccatttacatttttgcccttttgtcttttcctcttcgctgttaaacttcctgaaaaaataaaactagttgattcacttcttcaaatgcctactgtgttgttatttttccccttgtgcttaatgattgagttataactcagttattataagtaatagtttatgaaatctgtatttgatataacactttcatcatggacactgtccattttgttcttcagtgactcttaacataaaagatccacgtacaagaagttcttttaataataaagcatcaggaaaattatctcccttgcgtatctggtatatttcctcctttttgatagatctgtgaaatacattctgtttgtctttttgtcctggttaccaggcagcctagaaccaaatctggtctttagttacatcagctatattaatatcattattagtatatttgttccctctttctccttccgtggggtttaggacttcacctcttatctctgtttctctgcgtgttgatttcattctctcatactacagactctacttcatgaggctggaaccatgactgctggcagctcttgtttccagccccttttaccagaagaaggggctctctagaagaatcctggaaaggactctgattggcctgtcttggatcatgtgcccatcatctctgtggctggagtggggagggtactgtgaatggcaaccctcactagaactacatagttggagtcaggggtaagagcagtttccataatgcaggggggtgggtgctgtttgcaaaacaagggggatgcttatgaagcagaaaaacaatagatgtctatcatactggcttttattatttttctttttttttttcttttttttttttttttttggagacagagtctcgctcttttgcccaggctggagtacagtggtgcgatctgggctcactgcaacccctgcctcccgggttcaagcaattctctggcctcagcctcccaagtagctgggattacaggtgcctgccaccacgtccagctaattttttgtatttttagtagagatggggttttgccatgttggccaggctcgtctcgaactactgacctccggtgatccacccacctcgacctcccaaagtgctgggactacaggcgtgagccactgtgcttggccttatttttctttttttaattgttataatacttgtcctttattgtagactgcctcaaatccttttctaaaaattttaggtttaagtatattaaatatcctaaaataacataaactcctattcattcactctttaagggtgcag

SEQ ID NO: 60121 - DNA, 1042 bp, Homo sapiens
tcgtttttgttgcccagactggagtgcaatggcgcgatcttggctcaccgcaacctgtacctcccggattcaagcaattctcctgcctcagcctccccagtagctgggattacaggcatgcgctgccaagcctggctaattttttatttttagtagagacggggtttctgcatgttggtcaggctggtctcgaactcccgacctcagctaatccgcctgcctcagcctcccaaagttctaagatttacaggcctgagccaccgcgcctggcccatggcaggaatttaaaagttaaaatgtactttaaaaaaattacttgtcctctgaagaagatcacatgtcatcaagaacaactgtttgtgaagaatgttctgaaatattcttggggggcaactaggacaaatgctgctctcacattttcagtagttttgacgttgcagggaagatactacatttttgataatctgaaatattcattacctgtttctttttttttttttatagagatgtgaactttgtccccataaggatggagctttaaaaagaacagataatgggggtaagtgcagagatttcttgaaaaaaattttattgaaaactgggacagtggagtattttcaaatatttggtagtttattttattttatcaaattaaacagcgttttctactcatttttaacagtggtggctataatttataaatccttattgtattgacccacaatttttctactttgtggacaaacttaagcattgggtattttatgcagtatgatctattaaatacatacttctaatttaaattcttatgtttttggctgggcgaggtggctcacacctgtaatcccagcactttgggaggccaagggaggtggatcacctgaggtcaggagtcgagaccagcctggccaacatagtgaaacctggtttctactaaaaatagaaaaattagccaggtgtggtggtgcctgcctgtagtcccagctacttgggaggctgaggcaggagaatcgcttgaacttgggaggcggaggttgcagtg

SEQ ID NO: 60122 - DNA, 1031 bp, Homo sapiens
gggttcattttaattttttcccccatatttatgattctcagacagaaacctgactcttaatatttttaatagtttacttatttgatcaaagtgaccctgtctcactttgtcacccaggctggagtgcagtggtgcagttttggctcactgcagcctcgacctcttgggctcaagcagtccttccacttcagccctctaagtatgtgggactacaggcacacccatcacacccggctaagttttttgtattttttttgtagagttgaggtttcataatgatgcccaggctgatcttgaactcctgagctcaagtgatctgcctgctctggcctcccaaggtgctaagattacaggcatgagccactatatgggcccagccccatcttgtggctttaagactaaaatagttcaagtagaaaaggagcaaaggtagaccaaagaaggaattatttagatataaacatttcattagcctagaataattttagaatatggtaagatatgtgcccaactttcccttcccacctggttagtcaactttttcaacactattgctgaataatctatgttttccatagtgatttgaaatattatttgaatcattactaaattattgaatacttgagtttgtttctggactttttatgtgttcctttggtgtgtctatttttatcctggcaccacacacactattttaaattattgtggctttatatgcattttagtacatggtaagacaaatattatcatgtatttatttttctagatgaacattaggactaataaaagcacaatttagactgtattagagttacagtgaaatactgttttagggatgaatatatttttacaatattgaatctttcctgagatagaacacacacacacacacacacacacacacacacacagttaattgaaacatttcttagaatgaagagatagacactaagttttaaattcctgacttatgttcatgaaacatattactctgtttgtaaaacaagtcttgtgtctacaaattgttcact

SEQ ID NO: 60123 - DNA, 1065 bp, Homo sapiens
ttgcctgagcccaggaggttaaggctgcagtgagctttcattgcaccactgcactccagcctgggtgacagaacgaaaccctgtttttttttttcaaaaaaaaaaaaaaaaaaagaatattgtaacattaggtttcattttcatttcttccattgctttttactgaaaagcacaatttatgtttatctcgcttattgtgctgtgacttaaagcacttagagttgcaaatttagtcttgagtgaatgcatgttttccttgtaaggttatgtaatctgcatccatgggctaaataccatcacttcggccctttagaggcatggcctttccatttgtacctgtgacagattgaaaaagtaaaatgaagtgttaactgatggggtgggattgagggggaagagaatgtatcttaaacttaatatctatttggagacataaaacatgtgtacatcttcatcctaatatgagatgtgtgaagagtttgttttaagccataaacataactttaaaaaaagatcagttgcaggttggggtgaaatacacttggtcacagctagaataaagctttttattttctcatttttttcttaggagatgttattttctcagagcatgaatgattggaagtaaattttatttgcttatatatacaggtactgtgattttagtatatcaataaatatacttggcttttattttcagcgctcagtttgccggactgctttgtgaagaagaaggtaatggtgccgataatgtccaatactgtggctactgtaaataccattttagtaagctggtaagaatttctcttggatttaatgaaatgattatgattagttttgacaatagaatgacactgttttattaaaaaaagcatataacagttcctttttccttgagtttttggctggagattgtgtttagcatgttctttattggaagtaaatagatctgttaatagtaattttaaaagattttgcttgcttcggtgtatttgtaaaggtgaatattctaaagtactctcatttagaatatatattaatattaggccgggtgttgtggctcac

SEQ ID NO: 60124 - DNA, 1604 bp, Homo sapiens
gggaaaaatatctgtttaataatttaataagattgtataatctttacatttgcatggaatttgaacttctttatagtcatttttatctagtttacaccaattcgatgtggtaccaacttttaaacacctcaaataactctcaccttcatacttaattatgcaatggtacaagtgttttaaacagaaatgtgtgatgctttttagtaatgctttgaaaagtgcatgagtctaatactgacatttcctttaattttttaatttttttctttatttgctctatcaaataaaatgtgcaggaattatttattgaactgcagagataaatttttagaaaactgtataccttaatactgatggtataagattaaaagtctttttgcttttcctagtggcataaagtaacacttcaaatatttacctttctattcttctagtcttggcacccttttttaatacggcattttctctttgtattgaaactttttatttttaagctgatgttgaaaatatatagtagcttatttgaaaatagatgatctgttttcacacattttaattaatttacaaaaatatggcattaatgtttagattttcttttataatgcaatggatgatatatgaatggtgtctaaactggattatatagattgaaatagacttaaaaatttcagtagacattaaaaatactttatagttgaattggtttaagcctaacaaaaagatttgtttaaaaagttttatatacatatacatatatgtatatatattttcttttttagaaaaagagcaaacggggatctaataggtcatatgatcaaagtttaagtgattcttcctctcactctcaggataaacatcatgagaaagagaaaaaagtaagtggatttgttgttgctaaatttgtagcacatctacttaatagaatttttttttgcctttttagataaaattacattcttgatagttaaatggagacattgaaatatagaaacattttggctaataaagagtatttaatgaaatgataggtttaatgccatatttgtgaatatggttttacccattgcaactgaacatttagattacaactttactgaaagcatgagggaaatttcttgcatgtgttactgtggtcatcttgcgaaatctttaggtgacttcagcaataatagttcgttgctatatattattaactgatttcttcgcctgtaagtaattatcagcttttttcctttataatagaacaattttgaagttctatatattcttggctattttttctttttcagtggtgctactggtttattaattttttctagtggctacatgtcatgtcttttgtttgagaatattttgtcttttaattaaaacactaaaagcttgcctaaatactaatctgtctttttctgacttgcctgtttttcccgcttacatttttacttgctttataggaaatactttttaataaactaaaaaataatactggaaaatcatttgtacttaatttgttctttaatatgttctttaagaacatattgccattagctgagcatggtggtgggcgcctgtagtcccaactacccaggaggctgaggcgagaggat

SEQ ID NO: 60125 - DNA, 1837 bp, Homo sapiens
ctttatcatatactaaattttcatatataattgactcttttcctgggttttccctttcttaatctgtttaaatcaacatatgtttttagtgacagtcattagacttctttgattcacatttgataggctgttcatatggatataagccatgcacagtgtgttccagtgaacacttgtaatgctcattgcaggatacatttcttgatgtatcacagaggaccagagttctttattgttccatgatttgctttgtatgatttttttacatctctatattgtatgttttcacacatgtacatgtgtattttttgccttttactctcatttgttttgcaagttgttagggtttgtttgtttacttttttgttattcaggatcattcaccattaaattatctcagctcttataaccttgaagaacaaagcccagaatgggaagtagaatatatagagtaaaggaggatagaaaggcttcttaattatctttgtagggagaaaaacattgatataacacttaaagaccaggatcatttcaacttcatagactagagtgtataaatttgttattttggtgtgtgtagttgcccattttcatactgctatgaagaaatacacgagactgggtaattttatagaaaaagaggtttaatggtctcacagttgcacatggctggggaggcctcacaattatggcagaaggcgaaggaggagtaaaggcaagtcttacgtggcggcaggcaggagacaatgtgcaggggaactgccctttataaaaccatcagctctcatgagatttattcactatcatgagaacagcacaggaaaaacccacccctatgattcaattacctcctaccaggtccctcccatgacacgtggggattgtgggatccacaattcaagatgagatttgggtgaagacacagccaaaccatatcaatgtattaacttacaaaaatcctaatattgttattttagtttttttaaataaatgaggtctcactctgtcacccaggttggagtgcagtggtatgatcacagttcactgcagcctcaaccttccaggctcaagcaatcctcccgccttggccctcttagtagctgggaccacaggtttacaccaccacacttggctaattttttattttttttgtagagatggggtctccctatgtttcacaggctggccttgaactccttggcttaagtgatcctcctgccttggcttcccaaagtgccgggattacaggtgtgagccagtgtgcctggcctgtattgttattttgtttgtgctttctttagctcccatgacccaatcgtgtattctagtctggtttcagttacactgttgctttaaaccactccacgacttttagtggcttattaagcggtgggctcagcagggatgatttatctttcttccatgtggtatctgtcgggtttactcatgaggattcattaagctggtggctagctgggtgttcagtgttggtcttattcacatgtctggcgccaggcgctgctggctataggctagagtacctcagttcaccctgtgatgtcattctccatttggcctctctatgagtagagtgtggaatgattctttacatggtggctgataactgaggtggcagaggtggaagccatgaagacttcttaaacctccaggttcttgagcttatacaccatcacttctgccacatcctgttgagtaacacaagtcataaggttaacccaggttcaagggagtggagaagaggatgtcttaggatgagaagagcagtgataacccgttgcagagaatatggcatgattctttggggagtcattatctg

SEQ ID NO: 60126 - DNA, 1997 bp, Homo sapiens
aaaaagtgtatattttgctgaatgtaaatgtagcaaataattacagacttcagttgtttattagtattattttaggcttatcaagaataaaaaagctgaacttacctaaaaagaaactcacactagtattacttgtttataaaacaacacaatgatcagaggaagtgatttttgacagaagtatttgttaatgttttaaattactagttataaaaaaatctctgttgcatatatggggttatagttaaattaaaattggattttacttatattcgtttttagaaatataaagagaaggacaaacacaaacagaaacacaagaagcagccagaaccatcacctgcattggttccatccttgactgttactacagaaaaagtaagttttaagtatcatattttgttttatgtaataagtagttattgtgctgattttcacctctaaaaactgttttcattccctaacttttcccagcttttcaaccacatatcaggcacttagaattctcatttctttttttttttttttttttttttttttgagatggagtctcgctctgtcacccaggctggagtgctgtggcacaatctcagctcactgcaacctccacttacctggttcaagtgattcttctgcctcagactcccgagtagctgggactacaggcgcgtgccactgtgcctggccaattttttgtatctttagtagagacggggtttcactgtgttagccaggatggtctcgatctcctgaccttgtgatccgcccacctcagcctcccaaagtgctgggattacaggcaagagccaccactcctggcctgaattctcatttcttaccttattctaccttctgtttattctgtgcttgtctccaaagcctgttgttaagtaaggataacaagtgggaaccatcattgagacagagaattttggctgtgggtggacttcattcatctgagattttgaattctggccttgccacttactgattgagtgtttaggttaattaaccttggttaactcaattatatcatttgtaaagtgggggaaattattaatgaaatggaatgacagaatatgtgtaaagcaattagaacagtatttggttcatagtgagaattagtaaatattaagtagtattaggattattatcttgtggttaatatgaaaacagagggagactgggacagaataaataagttgggaagtgcagtaggagatgagtctagggtgagggacccattatgcaaagctgtataaaccagtgtaaggactttgtgtttagtttgatcgaaaagtgagctactggaggtttctgaattgagatgtaacgtggtctgacttaggttttgaaaggacctctggctgctttgttttggacaggctgtggaaagtcagaatggaagcagggaggccattagcaaggtatgcaatcgtccagagagagatggtggtaaaaacagaggtagtgataggtgatcagattctgaatacatacaaagcccacctgactttcttacagataagttagaggcatatgagaaagagaggatccatggatgattccaaagattttgggtcagatcactagaaggtatagagtcactgttaacaaagaggggaaagactgtgggcatagcaggttgaggggaaagaaaggaattcagtttgggatgtggttttagttttctattgcagttgaaattactacagtataccagtttaaaacaacataaacttactagtcgttctgtaggccagaagtctgggtggactcagctgtttcctctaattagggtctctcaaggccaaaatcaaggtgttggatggtctgggttcttatctgaaagaatctgtttctaccgttcgtcaggttattggcagaatgaatctgcttatatgcttggtcaggttattggcaaaatttggttccttgtgattggttgtaggactgaggtgcccacttctttgctgcctgtcaggtggggatcagcc

SEQ ID NO: 60127 - DNA, 2297 bp, Homo sapiens
aggctacttaaggttgttctacagctcactgttttttttttaatgtactcattcttttggtgatttatgttgggtagtttacatgttgtagtctcaaggttggcttggtacaaagtttgtggtttttatgggacacttgaatagtacattattttattttaatattttaaccagcacattatgttttctaatggttgaaggcatagcacttgccatcaccaatgcagatgacagagccttgtagactaatctgaggcaaccataccttttgtaaataatcatagctgctgtttctttggttacttgttatagagtcattgtttaattttggatctagttttaaatttttgtttgaagtaaataatttttgtttccacttaatgctattgtataggtatattggtgttgcagcttatcttaggactaatagttggccatgaaataaaaatgacgtgtattctgaattagccttttaaaagattaagttgcccgtaaatcacaatgtagaacaaagtatgcagtacttcagagactctcagtacagccaaatatctagttttatctccagtagaaaacaacaacaacaaaaaaagaacttacatttttcagtagagcaccaaatgaagtagttggcattttgtggtccaatttacattaaaaataagtattattatatacaagaattacactcagagcagtgagatgttcatactatgatagacatttagaatacaaaagtgaggaaacaagattttgtgaatttagtcttgggcttactcatagtgtgtctttcagccatctcccacctccttctggtctccttttacctgtcttcgattttgagttgatcattgtatgtttataatggaattccctagtgccatattgtcccaacagcacattatggaacaagtacttttaaaatcatttttaaacctggaattaaaatagatgtttctctttgaatgaaccctgcattgccttagttagtgtcattatgtgtaatttaaaaattgttaacatctaaagctaaaattcatttttttcacattaagtctgattatgttctgaaacgtaggtttggacatttaaaaaatgttcagttacagttttaatatgattttttgtcactgaagtttgattgttttattcattgctctctttgtaatactgtttcttccaaatgtcatgttttcatgggtttttatggacagatttatacttgagggtttgatcaagggtgttctgttaaataagtgggaaaaatgaccatctctaatgtagattgtcatgtggaagtgaatagcgtatttccatttgtagtactctacccaattttctctccattctttatttgatacatgagcaaaaatacatgagtgaagaacaccactgtgttttcttagatgacttttaaacttcactaggtcatgcaaggatcagatgtgagaggaatggagaacctcaggatcaactcaagtaattggaaaaagtatttgaaaaatgaggtggggtggtttccaaattgacctgcccagcatggaaaaggttcatatttctaaagtaagccatgaagtttcatcagcttaaatgtaattggtttgtaaaatgggattttttttttccttttaaacttactttgaaacgtttgttcttgtttgtggattgtagtttgttagaatagtggagtactttgtttttatgaaatatttcttctatttaatgatgaatatctgttattggcactgagatgatgggggctggggatggcaacagggtgacagaaaagcagcaagatttggttttccaaacacttaatttcttctcttattcctctttttgaaattgtttttgctaaaaatgccagccattttgaaactttattttattgtcatgttctcgtttttcatattcatctgattgtttgtgttgagtggtggctgtatgtgggaaaattcacttttgcatattttcagatttttttcatttttatagcagagattttagatagatacaataaaaaagtattaacttatccaacaaaaatttagtgccgattatgtagcaagcacttagtgaactttatgctgtgcatgcctcagatactttagtgaacttaatggcaacatcaaaatctttgcccttatggactttataaacctttgatttcaaaacatggtgattaatgtgcatctggtataatacactttcatgtagtcattttattcaccattatttgggtataccttgtattaaaaatgactgctaaaactggaaactatacaagtcttcatctt

SEQ ID NO: 60128 - DNA, 1034 bp, Homo sapiens
aacaaatgcagatcaagggaatgattgagaaccatttttagggatagttataaaatcttacctttgcgatatataactttttcctcaacataacaattggaaaaatgatttctgtttcaaatctttctgtttttttttgcaaaggggccctcacctggtttccttcaaaagttttgctctgtcctccgctagccttataaactcatggatatggtcctctaatggatttgtagcaccttagttcccttattgtcaccttcctgtgttgaatactaaagcttattttaatttcatgtctaggaagtgtagacattgttaaaaaaaaatgatgttgcttgacaaatgagtatcttcagtattactgtgtcacttcataaatataactaatacatacttttactagttgttgcaatttgatcctgaaacagccatctttaaattatgtaggctttttcttttcttttctttttttaaaagtaattataatagacttaaattgtttttggatgattttcttaggtgaactgacttatttttagaacagaaactttgtgtttattctgcaagttcttcttattaatgtggcacccattgttttctgtaactaaaatgtaatcaactctttttccttccctttttgaatcaaaatgttagacttatacaagcactagcaacaactctatatctggatcattgaagcgcttggaagatactactgcacgatttacaaatgcaaatttccaggaagtctctgcacacacctctagtggaaaagatgtttcagagactagagggtcagagggcaaagggaagaaatcttcagctcacagctcaggtcaaaggggaagaaagcctggtggtggaagaaatccaggaacaactgtgtcagcagctagcccttttcctcaaggtattagtgatgttttagttaaaatacttgtgtttaagatggttaataatagttatgctttgtaaaataattggtttgtttttgaacttataactaatggatgttctagattattatatgatta

SEQ ID NO: 60129 - DNA, 2203 bp, Homo sapiens
acagggccttgctttgttgcccaggctggagggcagtcatgtgatcacggctcactgcaaggttgacctcctgggctcaagcattcttcctgcttcagaccctcaattagcttttgcctccacctttgtctcccaagtagatgggaccacaagcatgcgtcaccatgcccagctcatttttaaattttttgtagagacgggttcagcctcctgagtagctgggattagaggcacacgtcaccacccccggctaatttttatattttcagtagagtcgggggtttcaccatgttggtcaggctggtcttgaactcctgacctcatgatcctcccgcttcggcctcccaaagtgctgggattacaggcatgagccactgcacccagcctaagtttcttatatcttagaatggtatggtggggtactcatgttctttaaagaaagaataagcagtgatggctgatttctttatgaagttccatgaaaattggattgggagaatgtgagatatagattagattccatatgatcattattttgtcaaatccattttctattatggtagattcagctgaacaataacaatcactagtatgtcttaaagttaaaacttagaactcataacctaggaaacttcttaagttcttattgtatattgggaacattttcaatcataccttcaatattcaaaaaagaagttcccctagacatttagagtcagattatagtcttgttaggtcttcttgcatgactgtggaaaggagactactgttctgtagtccttcctcaggcatacatgaggtgtttgggggagaattgcggaatgttgctgtggcaaaaggtaggtgaaataaagcgcatcttatatcttaataattatttaagtaatagcttgcaattccacagtaaacatttaataccatctataaaatgacacatgtttttaaaggtaattttggggataaatttgacaagtcttaatatacgaatgtcctaagtgttgtagttaatttttttaaactcttctctttaatgattatatcatgtctgctgcttatgggaactttagcatccaatttttctgtcccccccaccccccaacttttttttttttttttttttttaaactacaggcagtttttcaggaactccaggcagtgtaaagtcatcttctggaagttcagtgcagtctccccaggatttcctgagctttacagactcagatctgcgtaatgacagttactctcactcccaacagtcatcagcaaccaaagatgtacataaaggagagtctggaagccaggaagggggggtaaatagttttagtaccttaattggcctcccttcaacctcagctgttacttcacagcctaaaagctttgaaaattcacctggagatttgggtaattccagccttcctacagcaggatataagcgggctcaaacttctggcatagaagaagaaactgtaaaggaaaagaaaaggaaaggaaataaacaaagtaagcatgggcctggcagacccaaaggaaacaaaaatcaagagaatgtttctcatctctcagtttcttctgcttcaccaacatcatctgtagcatcagctgcaggaagcataacaagctctagtctgcagaaatctcctacattgctcaggaatggaagtttacagagcctcagtgttggctcatctccagttggttcaggtaggggtttgcctattattatttttctccttcactcccaccacctcccttcttctgtcccaaaacgttttcaactgttgttacgataatacttgaaattaataaatgacatttaattaaagtgaaatttctcagtttttaaattttctaatggaaaatacaaaaatatcttaaagtcttagatgatttggtgtttgggaaagatgttcggcactaatttgattttacttaattaaatgtaggctaaacaatctattggtcattcattacttacaaaacacttagaatttatttcctatttttgtttcacctgcacagtattttttttttaatgcagaatttatatttagggtgtgagagtttttaccctttggtttttgttttgttttgagctccctttctctaaacttcaattttagtaatcattttctaaacgactcctcacacagatactacttgaattaccctatcctgagacatttttatatcagtgataaatgat

SEQ ID NO: 60130 - DNA, 1003 bp, Homo sapiens
ataagtaggaaggagaaaatgtatacagtcatcctttggcatccatggggacttggttccaggacctcctgcaaataaatacccaagtccaagatgctcaagttcctgttataaaacgtcatagtattttcatataacctatgcacatcttcctgtgtacttaaatcattcttttctagatttcttataatacctagtatcatgtaaatgctatgcaaatagttgttatactatattgcttagggaatcatgacaggaaaaaaagtctgtacacattcagtacagactcaattttttcctccaaatattttctatacaagggtgttgaatccccagatgtggaatcccacagacacagaagacaactgtattatgtattacatcatcacaagttgtttttcatgatgctgtttttaaaagattgactttcttgaatgacaggtcgataatttagtaatgtcgaagatgacctttgtaagcacctgttgtttaaactataacattcactataatactaactcctgaggctaggggctgtttctgacatacaccactgtatccccactgccagcacagtgctttggacatagtaaacgttaaacattattttaagaaatgaatgaataccattagttgtctcgtgagtgtatgtcatgtggttagaagtatgctgtatgattttgtacttcccctctgagtgtttatagctaagctgtaagacatattactttatttgtaaagcttttcttttcttttcttttcttttttgagctggagtcttgctctattgaccaggctagagtgtagtggcctgatctcagctcactgccacctctgcctcccgagttaaagcagttcccctgcctcagcctccctagtagctgggactacaggtgcgcgccaccacactcagctaatttttgtatttttaatagagacagggtttcaccatgttggccaggacagtctccatctcttgacctcatgatccacctgcctcagc

SEQ ID NO: 60131 - DNA, 2215 bp, Homo sapiens
aggcatggtggcatgcacctgtagtcccagctatttgggaggctgaggtgggaggatcacttgaacccagtgagccgagcttgcgccactgcactccatcctgggcaacagagtgagactttgtctcaaaaaaaaaaaaaagatctaaagcacattaatgtatcatgttgcgaatcatactttctcccattaatgaagccttttattctcagacacttgttatacagattcatttgtaagcccttatgtcttttcctcactctttgtaataacacagatacattccacacactcccattaagatttgtgagaattctattctgtttggttctccccctcatgtcccaattattagcttataatttttgtttttgaagttctaggtggcctacttaactacacttttaggtgaatttccctccatttttctggcctatctctttttttacccttgagtcactggcaatttcttcactgatttcctttttccttcctctcaacagaaatttccatgcagtatcggcatgatggagcttgcccaacaactagtaagttgtcaaactgggttgataacccgggccttttgtctcctctagtgctctttctagtatgttatgccacctcggaacctctaaattttaatattccaaaatgcaagtttttcttaattgaacagatacttttctcctgcaaagataatgtactgctttgtcttgttatagatccatattacagtcaagttgtgtacaaattttaattattgttggtcttttaatatggtgcttttgttgcagaattgtgacttcacctccttcttgaaataatgtgtttatttttttaacattttgttttctattcttaatataatttttcaatatttgtatatttgcactaggtggtttttttcattaagtcttctacatgtgttgaggctttcttatactgaagtctaggaaatgagaatatttgatagggttagatgatataatgaggtttttctttataataaatattgttaagtgtgccctaaggcagatttacctatatagatttgcatcctacagtgactcacttttagcaagacattacgttgacataaatgtcttttaaaaagtgatttgaaatacatatttattactaaggaaattattgtcgttatgacaatataccttaacatatctcaatttagttggtaatatgttggcaagtggaatacaatatttaaaaatttataccatgtaaaaatggagccaagcttgcagttttaatgattcaaacaatgatatatgatagacttactgaaattttattatactaattcagtgtatggctatgtatttcttttgtgtgtttgagaatgatcttaacctgaagtccttttttccttacttaaaagcgttctcagagttgctgaatgcaatacacaacggtaagttttattagaatcttctctagtggttcgtttatcacaaaggttgccttttgtagagaatctcgattgaaagctagcatgttctattgattagatgaaatccagtgctgcagtgagtcaattgttcagcaccttagtgaaaaatttttgtagattgccaataagaggctgataggtcaatatggttcatcagtttggcttttattgtttctttttaaggcaaaatgataatagtgttttaagtttctgaaagtctttttatttttacaaatggtttttctagttcttttgagatctctcttgccagtgcaggtaattattggtacctaggggaagaatttgcttggaatgtgaattttattttttagggtttgggtttattaatatatagaatactttaattattttacccctgtattccacatagtgaataaatggaagatagtcttttaaattacatctggtttgggaccaggttttttacagtggagttgtatcttttgctgcattgggttctgaaatcagcatatcaggcaaatactatctttgtaatgtaattatagtgaagattattcttgcaaaaaatgtttgaaggtttcttcagtttccccaaagaacattccttaatcctttgatgttcaaaaattctcgttttgaggctagtgtcaactttgttgattttctttttcagttattaacagatctcatttgttcgagactgtttatgttcgactcatttgttcaagactgcttgattccaagcagtttttcaatacattttca

SEQ ID NO: 60132 - DNA, 1443 bp, Homo sapiens
ttcagctgaaggaatgagctattcagataatgtaacgtttgacctgatacttaaagaatatgtaaaattttgttatttggagatacagggatcagagctagattcttagtctgaggtatgtacagttagcatgagcaatggcatagaatgagaatacacaggctgtgtaaagtaatatatatatatatatatgtatatatatatatatatatatatagcgtgtgtgttttatatatatatatatatacacacacacacacacacacatttatatatatatatatatatattttttttttcttggcatgttttacctccaagatactgatatttgatatgaaaaataacaacattagctattagtccaaggagttgaaagcagttggtgttgagttggaaaaaagataatcaaacctgtactttaggaagtttcaactggtgggtagcatgtaaaaagatggaaaagagctaatgctgaaacagagtaacccaatagttttttgttacaatctaaccaaatttattgatggcctgaatgaggatcctggaagtcaaactgatgagatgtgtattacccaagaagaactggtaatgacagtagctggaaaggatgggtattcatttactaacacaatatttaggtagagatgtttagcacagaattaaatagagcttgggcaccaaagagaattgaaactaggccacttagggggtagtaactgaaactctgagactagtataggctgaaaaatgtgggtagagaagacagaaagaggttgaatcaggtttattttaaaatagtgaagtcttaataggtagaaaggagattaaggattaagattcaaggagtgatatttcatagatcaagaatctggagcagatgggaagagatcaagtgaacatgtagaaaaattaagtttgaaggaagacagagaatcactgtggaaacattcactgtcagaaaaccccccaccaaaccaaattagttttctaaaaccttcataatttgaattaatgaatttttaaattattagaaattttaaaaatagatttccccccaaaagaactgattctttcaggtatgtgtagtaacttgaatgtgtttacaaaagcgttttctttttagtgtacttcagaatagggctttaatgattaaataagagtattaaataatacttaaatatgcaacggttatgcatctgagcgagttattttattttaaattctcagtgtcgcctgagaagtgatctctttcctctcctcttgtatttttttgtccgaaatacctctgtcctggagttactgtttgtgcctgcctgtctgtcattttctctgcctattccttaactattacataaatcaccaagtgctgccttctgaacattttttctaatttactaatttgaggctttctagacatgacttttgtatttaatttttctt

SEQ ID NO: 60133 - DNA, 2106 bp, Homo sapiens
gtgttcagtactactaccgtctttgtctggagggacataatttttaatccagattgtgaaatagcctcctaaaaaaaaatctttgtttccactcatccccgtcagtccctttgctacataagagtcagagggatgatctttttaaaaagtgagtcatactatttgcctttggtgtcttcctactgatcttagcaaaaattcagaacacctgtacatggcttacaaggccttatgatctgttccttcccctctctccaactttgtcttttaccagcctctccacaaggctttagctgtattacctgttttttcttctttcaatatttctgggtcttttggacaagtttttctgtcttactctttgtctagttaacacctacctaacctttaagccttgtcttaaatatttttttagacaggtctttcttgcttcctagtatttcactcttgtggtacctttttctcttccattatagtatgtgttggaatttatattcatgtatttgttttaatgtttgccttgctccttaaattgtaaattcccagagagctaaaatcttgtctgtcttgcttgctacattatcccagctcctagcctcattcctcatacctactgagtatttgtttgatgaaaggaaggaaggaaggaagggaagaaaaggaaaggaaggaatcagtatgtcattgccaccctctgtaccgttctgcagctttgtttctcctccctatcctgaacagatgaatttcagtgtattttcctagagctcatgcattgtaacatttagctctgtttaattcaatgaatgtcaccttgattttagttaaaaacagcatatgacttaagatgaaaatagagtgaagttaaatagaaagcagatacagaagaatttaaggtggatgttgtaccagtcctacctgaggagcaaggaagttgaagggaatacattattttcattttcaaagaaagatttagaattttaagctttcctgccttgataggaaaggaacattttgctctgttttttttgtgtgtgtgttttttttttaccagtaaactgagtaccagatattgtttcaaagtgtgattactggattgcacatttagctgcgtaatttcgtatgtaagtatacgttgatgtaatataaaaacaatttaagttttgagattgaaggtccttaatcaccacgattttgcttctcaatattattcttccaagatgttttactgcatgttgtgatggtaattgcaactttcaaagtgtagtagagacattagaggacctggtagttacaacagtgtactttcctgacttacagatacatttttaatgaaagcattaacaccaaaatggccgtagctaccatttattaaaacttactctgtggtaggcattgctagagcttttttatatggatattctcaaaatctcacaaaaagtctttaaggtagccattatctttgttttatagataagaataatatggaggttcagaagggttaagtagtttgattaagggtcatgtaggtgacagatccagcatttgaacccagttttgtctaagtcaaaagcctctgctgtttcaatttcagcatgctgcctccagctaacttttgttttctaattttagaaattggagactccctgtgtagtacacttttcacccccaaaataactaatcagcattttatctgcttttttttttttttttcctttttttgagatggagtcttgctctgtcgcccaggctggagtgcagtggtgtgatcttggcttattgcaacctccgcctctcaagtgattctcctgcctcagcctctcgagtaactgggactacaggcatgcgccgccatgcctggctaagttttgtatttttagtagagatgggtttcgccatgttggccaggctggtctcaaactcctgacctcaggtgatccacctgcctcggccttccgaagtgctgggattacagatgtgagccaccgcatctggctgcagtattttattttctaagatactctgaaaacactgaattcagtagaaactcaatatttgttgaattatctatggagtagcaacctttaaaaatgcatatctttttctctg

SEQ ID NO: 60134 - DNA, 1113 bp, Homo sapiens
agccaaacttgtttctttttcttcctttcctttctttttcttttttggagacggtcttgttctgtcactgaggctggagtgcagtggcacaatctcggctcaatctcaacctcccaggctcaagcagttctcccacctcagcctcccaagtagctgggactacaggcacacaccaccatgcttgacaccacacccagctaattttgcatttttggtagagataggatttcaccatgttgcccaggctggtcctgggctcaaagagatctgcccaccttggcctcccaaagtgctgggattacaagcatgagccacttgcaccaggccattcctttgaaattcttagagcagtttataagattctctatcttagttttctaagtttgccctttgtgatctatttttgtttgtttaccctttaaatggtaatgttatttagggttctgtctttggttctcttctcttgatcatgctgagaactttccctgggtgattccatttttgttccttggccttgaccattgtgttcatatcaagagttgtaagtaaaatacttatggggccacataggtaacataaatgagtgacatggtaagggatgatggagatgctgatggattaaagtctctatgccctgttcagagctctggtcagattgttgctcttttataatatagtatccagtgttggcaaatcttcagtttttcaagagatattaggcatctagagttcttaatgggaaatttcttatttctataataattatgagcaactggttaaaatttcaaccatagtgcagaccaatagtaagtatttttagtttgcaggtttacttactgtaacttaccatgcttctcactcctagatttatgtcttcagatctgaatttcctgctgggttttaggcttatcccattgtgttctatatgtaggagttctgtgtcccacaggcatctcaaagaccatgaccctgaacctcttaatttgtattaggaagtgatttcatttataggatacctgtgagtttgaatcattatttcaccacctactagctcaccaaaaaagttactttatttctttaaagttctgtttgctcatatgtgaaatgggagta

SEQ ID NO: 60135 - DNA, 1571 bp, Homo sapiens
ctctatgctgagcatgattttctttttttaaaaaataagcacttttaaaaaattaacttgtttcctgttaacttatgctcatcctcccaccctcttttctagaatgaatagcttccaccatttcccaccttatttctggcttttatccccatggtgcctctcaaagtgttttcatcaagtctcccatgattttcacctcctgtgttctctggagtaaatggagctgccaactcatagcccagttcatcatgtcttaatcgttcctcctctcctacccctgcagctgccccatacagtcagtcacaaagtcctgtctgtgttatcgctggaatgtctctagaatctaccaacattctttattcccacacctgtctcccaccaatgtcatcagctcctcttttggtctcggaatttcaagttgggcctgttccattttaatttctaccttgtcggctttctagaacaaggtctcttcctacttcagacttcctcagtgatgatttctggggctttagcatttgccttttggaaggcccattaggtgatttttatggaactctaattgcttcattcctctatttaagaaacgttttcttgctcttagaaactcctaaaatccatgacatattttttacaaagctctttctgctatcccctgcttttaacaaaagcctttttgctaaataaaaatggtgtaggttcttttagacaactgcttcatgagaagtcagtgtttatttgtttagttactagcacaatattttttaaacagcaacaataagatttataattggaggagggatccaggaggaaatgcaagtttactgattatgtgtgtctgtgacaaatttgactgctaagttatatttaaataacatttgtttttttgcaggtatttataacagcaatgatgtagcagtatcgtttccaaatgtagtatctggctcgggatctagtactcctgtctccagctctcacttacctcagcagtcttctgggcatttgcaacaagtaggagcgctctctccctcagctgtgtcatctgcagcccctgctgttgctacaactcaggtaagttgttacactatcatgtgacaggtaataggtgggtttctcatttttaaagtgagttttgttggaggagaaacaaatgacatagggccttctataggaatttatgaaatacctcaatttgtattaatgtattagtgaaaatgataggtatttttacatggtattcatgagagaggatggatgagtgtatgggcaccaactaattctttttaatttctgggttttaaattttgtctgaatgatataaaatatactttcaggggagcttttattctttctttaaaaaagtaggacccacaaaatatgagcaagttttggactcttgtgatttttaaaattccttttataatttttaaaattacacaaaaaatatatgaaatctttttaaagttttaaaaaaaaccgtgtaggagaatgtaggttaaaagaccgaatgaccgcttcaagcactacacatttttcctcctagtgggagagaacagtgtttgtaaataatg

SEQ ID NO: 60136 - DNA, 1830 bp, Homo sapiens
gttttaaaagagtcatataagagaaattgtaatcctgttttataaagaggacagtgcagggggaaagctgtacccaatccccctgtattacaccccccttccccaaagataatcatttaagatttccaaagtattttttttatttatttgaaattatgtatgattttattttcatttctccaaagctctagtagtcttttaatggtcaagaaaatggtcacagggacaaatgtctaataatgaacaactagttaaaatagttgtttataagttcctgtcaacttgagctttatggatgcgtgcataatttccattgcgtgtgttgttaggatatatatacgcttttccggcaagcacaatgttaggttattttgatgcatttgtgtgaatggcacagtgagagcagttgctattaaaattacgtattagaatcaaccccagatagttcagcacagaaaagcaatggcatgattagtagtatcgtctttgaagatgaaagtgaactatttggtgaacctcccaacttgatatagaggagtttgactactttagcagagtttttctgtagttcatgtcactaaaagtgaggtagccataacaggggtttggggttagagagggtgaaaggataaatgaaagaatagctcctataaatggttttatctctttttaattaagtgcaaccatatgctgttgatagttttatatccttggacaaagtctcacatgaacattttcaatgtgcatttctcttttctgtctttataaaagtctgtttaattaccctctggttacttcccggctgaattaagtaaaaatccccatttcttctcattcattatgtctgtgagccagggggttggcattagggaagtggtagagaagagaagtttatagctagagggaaaattccacttgacatgtgactcaactgaagaacaaagaaatcatagttgtaagtaacccaggattcagttcaattaaaatctttactatttatcccctctccatgtttcagaaagatgggtctcttacaaatgtgatcatccagttagatttacatgctgtgtactgagatacctacatctatgtttctgttcagcagtaaatgctttctgtcttcaagctgaagcttatttagcctggcttatctggtgctgctgtagcaaccatcagtctccaggcaactgaggcacgttgacctctcagttgaactgagtgctgaactacttcaatttagctgcctgagacaatagtaatggtgttgaatgtgaaaaatgtgaaattttctaggcaatgtgcaaaggaaaggatacagaaatatttagatagaattgataggactcttaaaattggggatgcacttagcaattgaatcattttttacaaaacgacaaagtttattcctgtttcactctcatatagaccctgtttgttttcaagtcttacattagttgtgtttagatagtcacatctagtgttttatttagggttgctctaagtagttgattttagagcaatgcagtaagataaatgggtgaataaaaattatcaatatttaaaacgtaattctaggctgggcgtggtggctcatgcctgtaatcccagcactttgggaggccacggtgggtggatcacctgaggtcaggagttcaagaccagcctggccaacatggcgaaaccctgtctctactaaaaaattcaaaaattagctgggtatggtggttcaagcctgtagttccagctactcgggaggctgaggcaggagaattgcttgaacatgggaagtggaggctgtagtgagccgagatcatgccactgcactccagc

SEQ ID NO: 60137 - DNA, 1033 bp, Homo sapiens
attctatctaaatatttctgtatcctttcctttgcacattgcctagaaaatttcacatttttcacattcaacaccattactattgtctcaggcagctaaattgaagtagttcagcactcagttcaactgagaggtcaacgtgcctcagttgcctggagactgatggttgctacagcagcaccagataagccaggctaaataagcttcagcttgaagacagaaagcatttactgctgaacagaaacatagatgtaggtatctcagtacacagcatgtaaatctaactggatgatcacatttgtaagagacccatctttctgaaacatggagaggggataaatagtaaagattttaattgaactgaatcctgggttacttacaactatgatttctttgttcttcagttgagtcacatgtcaagtggaattttccctctagctataaacttctcttctctaccacttccctaatgccaaccccctggctcacagacataatgaatgagaagaaatggggatttttacttaattcagccgggaagtaaccagagggtaattaaacagacttttataaagacagaaaagagaaatgcacattgaaaatgttcatgtgagactttgtccaaggatataaaactatcaacagcatatggttgcacttaattaaaaagagataaaaccatttataggagctattctttcatttatcctttcaccctctctaaccccaaacccctgttatggctacctcacttttagtgacatgaactacagaaaaactctgctaaagtagtcaaactcctctatatcaagttgggaggttcaccaaatagttcactttcatcttcaaagacgatactactaatcatgccattgcttttctgtgctgaactatctggggttgattctaatacgtaattttaatagcaactgctctcactgtgccattcacacaaatgcatcaaaataacctaacattgtgcttgccggaaaagcgtatatatatcctaacaacacacgcaatggaaattatg

SEQ ID NO: 60138 - DNA, 1085 bp, Homo sapiens
tcttatgctaagaggtatctccttggaaaacgttgttagtaattttactgtgttcatttgtgtgatgcaatgcagaagagagaaatttgagtcagcaaaagtcctgggttccaggagttttgctactcacttgtataaccttgggcaggtcttttaatttttgtgagcctcaatgtttccatatgtaaaatgggaatactttaagtacctgttctacctgctatacagatactttatgaggttcaaatgcagaccataaaatactttagaattcatggttattgacttcaactgttactcttcagcctaattaccagtgagaaattgtacaggaacacttcctgtattggaaatagtattaacaatttctgttaaaactcatataattcatgctaacatagataaatgaattttagccagtatatatattcagctgtggattaaggtctttcccagttccaaaattatttcaatagctgcctttgtcctacagtaattttttcccagaaaggtaagagctatattgataagatattaaccagttaagaaacctacttagaatttgttggttaatctatacagtcctgttgtccgatcatgagtgttcagtgatggtttaactacacttcattccctcctgctactttatggaaactcaattgtggggcattttggcattagcctaaacaatggttttgaatacgttaagctcctaacaattagggagcagtttggagcattgaataatgtggaatgatgcaattgaacctgacagcttcaacagtcagcctactcatgggacctgaaagttgttcacacttggtttcacctctcatcacatgctgagtattgaagccttactggcggtagctgacacagaaatgggtctgctatcagaatatgttcttagtaaatataaagtttgaattgatctggagaatatgtgaacctttcaattgttccctaatccatgtctaatgttcattcatgtttttgctggaaacttttctaatcaaatatattgtgttcccaaattcaaacaataatataaattggatctagaaacattcaagtccttacattct

SEQ ID NO: 60139 - DNA, 1717 bp, Homo sapiens
aagactgtttcttcctccttctaattaattttccatttctaatctattaaatgtgtagtggatcttttttagaattgtatctacagtaagagtaaattggctctacaaaagctatttttaagtattaggatctgagacgtcaacagatgggactggtaatatctgttttttctgttgaattgtttgtatttttcttattctatattgttttattaatagctaagattcccaaagaattgacttctggagagagaaaaaaatcttaactgtatctctgtttatgaattgtgtgttttatgtgccctctactactaaatacatggtaagtgaacagcacgatcttcatgttgaagttataacttaccttttcccgagggacagttgattgttaaacaggactgaagagtaccaacttactgactttgtctgcatatttttaataagaggaaaaacaaaacccagaaattgacagatttaatttacacattaaagtgtgaactataaaatacacgctttgagataatagaaagcaaggatggtacatcccagaaactgtttccgtgaaccataaacgcacattttcatgctttgtaagtgggctgaaggccaagatgcaatgtcatgatgtgagtctgtccagaaatacagcttcttctctgtgttattttgcttacaactactgtgttgtcttagtctcttgtgtgcagttatacatatccaaatgtcccccatcttttgttcttgttattcagcttctttacgatagaagtgctttagttctttgccgatattttcaagagttttgttctgaaataactgcaatgattttagtttataaaagcttcagtttgatttcattcatgaaaaagaagaacaattctactttaacatttgtggttctgttaaatctgagaattatttcaggccactgagagtcttctgtgagtaacagcattttgtatacaagagatttgcctccaaaatgtcaaattttaaggtcataatattcttggaaagtgggagagagcatgcacatcaaagaaagcatttttattacagtggattacgcaatactttggccagcctccttagcttcatctgtttaagggttcattttcgcttgtttggcacaggtcccagtgaggccttcagaattgtggttagcaacatgaatgaattacaaactttggacgagctcttcagttagtagagctggcttgctgccaaaaagacagtgccttatatggggtcagggcaaagctgtgattcgttgagtcctgcattgtatagaaaacatacttgggatgcctgtttgctttcttttaaaataaaaacaaaacaaaacagaaaaagcagcaggcttccaagtctatcaaaataggaagtaacaaaatagtgtgcaggttttactaatgacagagttaagcaatggaaatacagctccctgtagctaaaatactagaagtaaaagttggacttttgacctccttagccagcttgtgatatgagagattgaagcatttggttagatacctgttgtcttcctgcttttatgtttcagatggcttaataagattaattagtctcatgtccacatggttgctgtgccactggggtttggtatcagctagatatgttgaaaattaaaagcaggaatagttaccttccaacgtgccagttcttcttttttaaaaatttgtagttatggccaggcgcg

SEQ ID NO: 60140 - DNA, 1008 bp, Homo sapiens
gtagttacgtaacttttttttttttttttgagacggagtctcgctctgtcgcccaggctggagtgcagtggcgtgatctcctctcactgcaagctccacctcctgggttcacgccattctcctgcctcagcctcccgagtagctgggactacaggcgcccgccaccatgcacggctaattttttgtatttttagtagagacgggggtttcaccatgttacccaggatggtctcgatctcctgatctcgtgatctgcccacgtcagcctcccaaagtgctgggattacaggcgtgagccaccgcgcccggcctagttatgtaacttttaaaaaattgacatgttgaatggtaaaacaagtaagaacgaaatttgcttttcagaaggtcacaaattttgcttatattcttaggttggagaatataattactagatctattagaagggaaaacttttaatatattttcacatataattcatttatcattgtaattttttccatttaggcaaatactctatctggatcttctctcagtcaggcaccatctcatatgtatggcaatagatcaaattcatcaatggcagctcttatagctcagtctgaaaacaatcaaacaggtaagttttcaagaattactaactctaaaaccctactctcacctactttaatttttttccccttttggttcattttatttgaaaacatgcagggatgtggttagtagaggatttgtactttaaaaaaatattcacagttggaaaatgttaaatatttcaggtgctggttatgttaactagcttgattttattattccacattacattcatatatcataacatcaatttgtactccaaatttatataattacaaactgtcaatttacaataaaaaagaatcacagttggaagtaaatagtatgctgtgctgcaaaatagcaatgtcctttttttttttttttttttttttttattgtctgaaatggaaatgtttcaacagagccatcagcaag

SEQ ID NO: 60141 - DNA, 1232 bp, Homo sapiens
tgtatgttttaggaaaaatcagggcaagagtttaaaacctcttatctagtgagagtcactttatcagctctgaaatatttacactacagatcaagatcttggagacaatagccgcaacctagttggcagaggaagctcaccccgaggaagtctctcgccacggtaagcgctatttacactgcaaagtataggcaaaggaaacgtttgagatttggaaactttcttatctcatatcagtagagtgtacatttgtgaggctataaaagcattctacagataagaagcatgtctagacaagaaaaatgattctaaattaatttaaatattaatttaaacaccattagatttctaagtaaaacaaatccctttcctttggtttccaatcagttcgaactctcttgtatttattacctgtatactgatttgagtaattctttttgatcataaaatagttttaagatctcttaaagttgtagacccaagactttcaagtttgggttccagttttagctctgttctgtgtagcacttaatcccttagtctctagttcctaattcagtaaagtcgtgtggtagatcactaaactcctactagttcttaaattgtttgaatcagttatagcaaatgtattacaagttttttgaaatcattttatgacagtattcaggtaccatttattaaaatctaattaatatatttggggttatcaaactgcatattccttctgttctaaatggggagaatgtggtatgagatactgtgtctgcttgtaggggagaatggaactttggtgatagctatctccttattaattttatttcccttctgtgcgttctctttgttttctccatgttctctaatttaggaaccctccctcaagcatggtgttagactgggtgacaatggagagtaagagaaaagcccattctagggtctttcttccaagaatgggagaaacgtgattaaaaatgaaaactttggtcaggcgtggtggctcatgtctataatcccagcgctttgggaggccaagtttggaggattgcttgaggcctggagttcaagaccagcctgggcaacatgccaagactccatgtctacaattttttttttttttttttccaaaatgaactttttcatgtgatgacagatcatgaataacagtattgctgatatatttggggaatgtctgttaaggaacatcttctttatcctaaagattagttcagtaacca

SEQ ID NO: 60142 - DNA, 1379 bp, Homo sapiens
gaattgttttcaacagatcccctgtaagcagcttacagattcgctatgatcaaccaggcaacagcagtttggaaaatctgcctccagtagcagccagcatagaacagcttttggagaggcagtggagtgaaggacagcaatttttactagaacagggtactcctagtgacagtaagtattcattttcttatatgtgaatcaagacagatgggcagatggacaaacaggcagatggatgcagaagtcacttttcatccagagtagtaatgggattatgatatacattttatataatacagtgagagaaagtataaggtgaagtggtttaatagaagagattctatagtgttactgcttggacttgaatcctgtctttacctgttattaatagtatgatcttgggcatgttttttaaagttctttaatctcctatttttacaattgggagtaataatgcacccatatcagagggttattgtgaggattaaatgacatgaaaaatgtaaggaccactgcctggctcatacatagcattgtctcggtgcttaccatgattatacatattggtactttgtgtctccactgtactttgttcttatcaatcagtttactaaaatacatgagcactgtcttctcttaccccaattgttagaagaaaacttgctcacctctggaaaacttactttaaaaaatacaaatagtcaagtatggccggctagcttcttcattttataatttggaggaagaataataattattgaattaaatctataattagtatatattatgcttatcatctattggattatagagcatgtactatatatctgtgtttcagtatcttcaccatttcaagtattagggccgtgggtgtaaaatgcagagttaaaataggtggtggttagctggagatgtggccttgtcttaattttagggaaaaataggtggttttcatcattttcgagtataaacttttgctgcctcattttattgaaacattttgcttattgttggctagctaagtgccataaattggtattttatgaatggtaccctgacaaaaaatgctaattaattgtgaggaaattcatgccaggctaatcctttaaacacgatagctggaggataggtttagctgagtcttattgcatctcatttgggcccactaaggtttctttgtgggatcttggaggggagggataaaagttaaatccatgggaaacggccagatgtgtctgtaccagaggagttgtatcttctaaaggccctgaggtcatgttaaacaaatacaactttttagtatgtgacggacacttcaaaaatcttaacggcaacactctgtgttgttagctgggaggtccaagttgtggaaggaattg

SEQ ID NO: 60143 - DNA, 1639 bp, Homo sapiens
gatggcagcacttcgtttaaaccggacaacaaacaaaaacatgtgctcattattttggtagagggtattggtgcgatccttaaccattctgtatatgacttcaatgcaaaatagtgacaggcacttgaatttttaataggcttttattttgatgaaaataaaatgtcattacttttcattgagaatggaaaattacctgaagctggtgtgtgttttttggtatgtggcaacaaagtttccagaaggtacatccaggaacactttgcctttgtgcttataaaaatacaaacatagataggcaatttatatccataaacaaatttaggaacaaaactttatcatttagaaacactttacagaatttctactgttctattttaacttatttctaaggttaccggcactgcgtaaaatacttagtcttatgtgtgtacttgtcattattaaaaactatccaaatgtgtggtagttttaggaatgctgaagtcattacaccaacttcaagttgaaaaccgaagattagaggaacaaattaaaaacttgactgccaaaaaggaacggcttcagttattgaatgcacagctttcagtgccttttccaacaataacagcaaatcctagtccgtctcatcaaatacacacattttcagcacagactggtaagtgtgaaaatatttattttgtatctaaggaaaataggctttcagttttatttgtattataagtgagtaataattggtcaccagttatatgaagatgtagaaaaggaactataggttgtttttgaagggcataaagaatcctgttaagtgatcaacttgaatttaactttcttagtccataatataatggtaaaatttacttaaatgtctaatgatctcgttattgatttaaagcgatggtattcaatatagatttttttttcttatttaaatcagtcttaggaatagcaagactagatatttaagtggttttgatacgggcttcagcataagctttttaataagcctttaatcttacacataatgtaatttaatagggtaaataggtttctttttgtcttttattattctagctcctactactgattccttgaacagcagtaagagccctcatataggaaacagctttttacctgataattctcttcctgtattaaatcaggtaatttttgtatggttattttcatctatgttgatttacttgtgaataatagtatattaaatggtttaaaattattttaaacagttttgcagtgttctttaaacttagtttctcttctttcttacgctgggacttaatgtccagtggacttagtttctcttctttcttacgctaggacttaacctccagtggacaaagtaccagcagctcatcagctctttctaccccacctcctgctgggcagagtccggctcaacaaggctcaggagtgagtggagttcagcaggtcaatggcgtgacagtgggggcactagctagtggaatgcagcctgtaacttccaccattcctgccgtgtctgcagtgggtggaataattggagctttgccaggtaaccaactggcaattaatggcattgtaggagctttaaatggggttatgcagactcctgtcacaatgtcccagaaccctacccctc

SEQ ID NO: 60144 - DNA, 1965 bp, Homo sapiens
ccctgctatgtgccaggtgtccttgcaagatacagtgacatttgtgatttcagtctttaataataggctgtaactccattttttttatagattagtaaaaggaaacgcaaagaaagcccaaggacaaatagcaaatgtggaatcacagccgatgactttcttagcccataaaaatttcattctctacagtaccatgttacttctgtggaaaagttgattttggaagatgaattctgcattcattctttacaagttctgtccctcagatgggcccacctctttggtctttttatactgttgaatttaatgtttttaaagtatttactagtaaattcatgtctatatattacgttgcaagtagccttgccaacttgcaagaaaaaagggagtaactttctataccacattttatctcagtcacagtttcaaattcggagaatattatcaaaagttgatttagctaacgcatctgctcttttgtttacctgcagagacttagtgataaaactgggcctgtagctcaagagaaaagttgacacctgagaaacatctagaaattgcctatcctgctgttctagcacttcatctggctgcctttgcagtccttttactacagctatgaagaaacgcaacaagaaactcaatgcacaacaaaggattaattgctgcaaggacattcttgtaaggctttgattagttttcttgttgctttgttgcactgaaatggaattcccatgcccctaccccttaccccagttttttgaacatggaaagaaaatttaataactttttaaagtgacataatttacatgcaatatgtttatcaactcaagaatttaatatagttggtacacaactagttttgtttataaattggagatgcaaatagcaaaactaaatacttgctccatttacaaactacttgattttattgtacaagttgaaatatgctcttttgtttgggttacagtatgcttgctctaagtcaaattccaaggaactaatttcttctcctggagttgcattgattcagtattacaaatatatagcacatcacctgggacttggcaatctttgttaaaaaaaaatttcctttctaatgggatttggccaattttggtaatgaagttaggatggtaatgtctgcatctgctaaaggtaattttcttttgagaattgctttctttagtgttaagacctactcatattttgaagaaatcttgagttaagtgagttctgaggctgctgggggaaccagatcaattcaaagctaaatacttctttcagaaaggggccactgtggaaagtgctggtggggtttgcccttgatcaagtgcctccattgtgctgcaagggctgtagacagcagggtgggacagtcagtcctccgagcagcaggaatcatcccgtcacctgcagccttcccatgcttccgcctttattcagaactttctgtgccactgtagatagctcaggcaaaactattacctgggtatttatccactaatgagtcacaagaaaaggagtggatttggtaagaatagagatttgttttatttaaaccacttcccattactgaccattaaaagctcaccactagagttcctgaaacaggtgaaacctgtatgacagcccttccactttggggagccacgcttttgatgtgacagtaccgcagagtgattcccccactgaggatgtcatcatcaaactcttctttggtgtgtgaattattagtggaaaagacccagctgtaattagacctccactgtgtacttagctggaagaacatgttaattctgcaatatgtttcttggttaaacattgcacagttcttacctcatttctgtaaataaagttttgtgaatctgttttgtattgtgacaaattcataagataacattgatattttgatttgtaatatttctaattggtagatttaattgaaaagtaaaattaatttat

SEQ ID NO: 60145 - DNA, 1013 bp, Homo sapiens
cttaggaatatgacattatgtaaaacagatacttaaattaattagattttatttttgtagaggtaaggaaattatagaaaagacaagttatagtgtattaaatgctttccaaaagtaaaagtttgataatatttaaaatacaactatacctatggagaaacagttttttttttttttttttttaaagatccacatttgtatctgatagtccttttataatgtaaggttttttcaccatattgtatagtataggatttagtttttgtattttatgttgttttccctgcatccagccttattaatataaataactaccttttaggaagaattgagatataattcttatattataattacctggtgacttatatttctcttctcttctactataaacaacctgatggttgagttcatggcctttttatctttgtatccactgtagtgtctatagggtaaatgtaattaaattgagttggtgaattagactgatgccactaatttgtttcacttaatcactcaatgtctattacatgttcttatcctttatgtgttgatctttcaaaggacaatcttatttccgtcattttaaacttctgggagtatcttcccatattcacaactaggaataacaggggtggcagagctaacttgataagttttgacactggattagattcaaatggatgaaccagaaaagcagtttccccagtgatagtctttttttttttttttttttttttttttttgagatggagtctcattctgtcgcccaggctggagtgtgcaatctcggcttactgcaaccactgcctcctgggttcaagcaattctcctgcctcagcctcctgatgagctaggattacaggtgtgcaccaccacgcccagctaatttttatatttttaggagagacagggtttcaccatgttggccaggctgtcagtgacagtttttaagtagagatattctggtacaacaatatggttagtattgaggaaataactttttttaccga

SEQ ID NO: 60146 - DNA, 1033 bp, Homo sapiens
catgctgatttccttcttctctctctccctttttttcttcctatcttcctacaaaggaacactttttttctaatgacattttacatagaaccccagtatattaaagaatgatacaaaaaatttctctggttaatgccaaaatgagggaggctaaagtcttgtcatctcagcttcttcctcactccatgaggtgtagaaccttggaaaagccctaaaattccaagaaacatgtcttccctgcttagtttcacatttatctatatacacaaaaatttagtggttttggaagagttttctgttcctgtttaaaagggttagcactaagagtatggtcctgaaaagtattcaacaaggacttttaatggttcttactctactcttatgccaaaccctcttcatttccaagtaaaatggcccccaaaccaaaattaagccatcaaagtcatagcagtcagttaaagataaatggcatatccttctttattaataaggatagttgttaattgtattatggagtattccagaattgatccactttataatctagtaccatttaagataatatttttcggctggacatggtggcatgtgcctgtaatcctagcactttgggaggccaaggtgggtggatcacctgagatcaggagttcgagaccagcctgatctgcatggtgaaaccccatctctactaaaaatacaaaaattagccaggtgtggtggtgcgcacctgtggtcccagctactcggaggctgaggcaggagaatcgcttgaactccggaggcagaggtggcagtgagccgagatagcgccattgcactccagcctgggtgagaagagtgagactctgtctcaaaaaaaaaaaatttttttttctatgtgtcattagtgatttttttaaagggtagttttccaactatcttgcagtgtaaccaattttaaaccagccctctttatcaaaattctagaatataccatgagtgtgttggtaaattttttttaattggttcttaggaggaaaaaaagccttgattt

SEQ ID NO: 60147 - DNA, 1035 bp, Homo sapiens
tgccaacagtacatctgaattagattttaaatttgtacccatatgattggtataaaattatatcttggtattacttaatttgtatttctttaacctttagagtgtatgagcctcttttcttatttgttagccacgtgggcactcaattgtggattgcccatttatgaccttttgcctatatttttctattgggtggttgtccatttataaaatctgtttatagcaatcttctgtttatactctgaattggatacatcctttccaaatctattatttgtctcttgatttgtttactcttttatcttttttgtaacagcatctgggttttcattcttatttagatgtccccttcctttaaatagtacaagtagattttaagatttctttttgcaaaatttttattgttttggcttttaaagtcaactctcttctctatctggaatttatttgtgtatacagtgtaagagttttcttttaaatggatactcagttgtgtaagcattacttaataaattgttttcccactaaattgaaatatagacaatcctagacttataatgatttgacttacaattttttgactttatgatagtgcaaaaacaatactgtactttgaatttggaatcttttcctggactagcaatatgcggtaggatactccctcataatgctgggtaacagcagcaaactgcagcttccacttagccatatgatcatgaggattaaaactgatcctctacagtgtactgtgtcactatgttattttgcccaactataagctaatgtaaatgttctgagtacacttaaggtagactaggctaagccatgaagttagttttattaaatgcattttctaattaaggatgttttcaatatatgataggtttatcaggatgtaatcccataataagtcaacaagcattggtatttacagattctctattctcttctaggaatttgtctattcctatgccagtatatactgattttgttacattggcagtatagtacatgcaaatacacacatacacacgt

SEQ ID NO: 60148 - DNA, 1048 bp, Homo sapiens
aataaacagttttattgagaaatccaacataaacactggttgttaccacatctctttttaatttgggagttttttattttctaaaggaatatagcaatacaaaattaaaagacactcaattttataggcttttacctcattaaaaagctttgataaaatcatgtgtataaatacttcagccttgagccaccgtagtttaggggtagacataaaagcactgactagaaaatttattctgaatttgattcaattaatatgtaattcacggtaacaaacagctcttatcttgatctttctcctattgagatcctcctttttgttgctgacttcaatggtagagtctttactatagactagtagacaggtagactacacgtagctcctttagtttagatgtcactccaggagtcacatctttgggtgctgtaaaaacatgagatctggtatccacagtatattactggacacttttttgaagggtgtcagtgactagagctatctacagtgctttgaatttactcgatattataatgctgggaacgtacataaacattatctattttggataatttgttttctttttcctttttgtaatataggcacaaatagttttttttgtttttattttaaactccccgtgaaaaactgttatatttgtactgtaggtatgatgatattctgatcaatggacttccagattggcgacagcctgtattctactacaggcgggtgagaaaaatgagcaatgctgagctggcattactcttgttcattattctcacagtgggtcattatgctgtggtttggtcaatctacctggaaaaacaactggtaagtgttagtaataaatcaaatgaactagcctccttaattttatatggaattttggacatttatttttcaactgatgaaaatttctgtttctctctgtatacttctcattctaatagttttatactcaatgtttgacatatttctaagtcaagaagaacccatgaaataagaaaatattcttcttttaaaaaatgtggcacttaagtttgttata

SEQ ID NO: 60149 - DNA, 1018 bp, Homo sapiens
cctttcagaagactggcaatatatttatgtagtagtttataatgccagtgacttaagaggagattacacagaggcccctttcctctactcctacagaatgtatggaatgtagacatcatttcagcagccttctaagttttttaagtcagaccacaacacatacgcacacacacacacataactaaaacaatagtttcacaagatatttcttattgcatgttaaacacattattttctattctaggctagactagtcttttggtgttttttatttatttattttttaaaaatgttggttgtggttcactaaattcatttcatgagacactagtggaccacaatccaaaatttgaaaatgttctacgatacaagagtacctgtaaaaaacaaaacaaaacaacacctggctatttgacatttaggcaaaagccagcctaaatatctgtgtccttcactaggggggtaatacatctccagacaaccctataaattgtgctatgttacattctgaatctttcctcaaatgtattatctggaattagtctgtatcctaaaatgttagctaccattcttgattctcatcttaaccgtttaatttgaatacctctgcttgtcagattgcaaagcacagggattcaagatcttctcttaaagtgttcttcactttataacaagggctggcattggtccagataccatagcagacattcctctggtttgagataatccatagtgttgaaagagtccaagaagcgtgttgaaagaagttttggtcattctgtgcatattttctagttggtttctctgtgagccctagttttgtttcacacatcaagaatgtgcctgtaaaggtagctttatttagttttctaatatttttggcttgaggtttttttctttttgtttgttatcttaaaagtcaataaactttgtaatttctttcagttaccaaaattatttctatcttttcaaaacaaatcacttctcatatataaattgtttcttcattaacatggaa

SEQ ID NO: 60150 - DNA, 1043 bp, Homo sapiens
ataatcaattaaccttagcttactatataacatttctacttgatgaactttttaattttttatctttttgactcttttgtaataacacttagcttaaaacagctttataaaaatatttttgtgtcctttcaagcttttttctatacttatagaaacaatttattatattcattgtttgcctcaattgctaccccttaccccattcagcactggctaatacatttgcctgtaggccaggcatggtggctcatgcctgtaatcccagcactttgggaggccaaggagtttgagaccagcctgggcaacatggcaaaaccctgtttctacaaaaaataaaaatcaaataaatacatttgcctttaaatgtttacgacaaatggcctatctgctctggcagagttctgagtgtggcaaaataaaagcaagccctttacacagtttaagccaacagagaggtcaaaacaaaataaccacagctctttgagaacaaggtcaactctgatctctctggcaccaggaacctaaccaaggccttaggttggcatctttaagacacttagtgagaatcatctttctcttaagtgcttgcctaattgctgtaaattttgacaggtttttagagatcagataaagttgattctgacatttttttgtcaggttattttcactgtttctctggagggacgaacttggagttccctaacatgctgttttttgctgacatgccattgcattgtttccattttgataagcttacattattttcagggtttgttgttggtgttgttttggagacagggtttcactgtgtcacccgggctggagtgtagtggtgcaatcgtggctcactgcagcctcaacctcctgggctcaagtaacacccccacctcagcctcccaagtagctgggattacaggcacatgccaccacacccagctaattaaacaatttttttttgcacagatggggtttttccatgttgctcaggctggtctcaaactcttgggctcaagtgatctgcctgcctcagccttccaaagtgc

SEQ ID NO: 60151 - DNA, 1184 bp, Homo sapiens
gctgcttattatttcctgatcattatccctcaggaagtgtttcatagttcttatctctgaaaataactgaaatattttatttcagtatatttgttacatttgacttttgaccaaaattgtagtcaaattatttctaataatttatcattcaacctttgcagaaatgacaaagaagcaaggcaaatacatagtttgatttctcagatacctctctaatgtcatgattcaaaaatatgggatataataaaagtattaatactaatcagtccttatttccttccttgcagtctttttttttttttttttgagatggagtttcactctgtcacccaggctggagtacagtggcacaatcttggctcactgcaatatctgcctcccgggttcaagtgattctcctgcctcagcctcccaagtagctgggattacaggcatgagccaccacgcctggcccaacttgcagtcttgaatgttaaagtacctatcaaatatgaatatttgaatttctgtatatttactactttgcaagaatgccagaaatcattgcacaaaataattttaggagcaaagtaaataaaatgttgaatctaagaagtacttagatataatatcacaaaaatcttcaagtcagtattattgaaattaatgtggaaatttctaattccaggcagagtgtgtttggtaacctgtagtatatagcacaggctcccttggccaagctttaactttctgaggtttcagttacccatggtcaactgcagtctgaaaatattaagacattttgagacaaaagagagatcatattcacgtaacttttattatagtatattgttgtaattgttctattattattcctgttaatcttattgtgcctaatttataaattgaactttatcataagatatgaatatataggaaaaaacatagtttcagccatccattgggattttagaacgtatcccctacagataacgggagactactggacattaggaacccagttaaggttcaaaaaaagcttgggacaagttaaaagtacctctttttaaaaatgcttgccacttatctcagcttcatgcttcactccctcccaattggagaatttctaggatagagatgccagtaaaactcatttaattaattcagaagagtagccaaacaaattgtatctgtcccagcaggaa

SEQ ID NO: 60152 - DNA, 1975 bp, Homo sapiens
agacatttttggttattagaactggggggctgggagtgggtaatgctactggcatctggtggggtgctgccaaacatcctataatgcacagaacagcctcctacagcaaggaattacctggttcagaaatgtcaatagtgccaaggttgagaaaacctgacttaaaggaaaatggttaagagtgaggactaccctggcacactgctcgggttttgtatcatagccacactactaactgtgtgactgtgggtggttatttaacctctttgtgcccagtttcctcattatattataataatagtagtacctatcttacagggttgttgagaggctgtttaatacatttattatgtgataagcttagatttgtacctggtacatagtaggaatgttggctgctattgttttattgtttctcagtaaaaactaaaatctaaccaattatataacatcaaaaggatggccaattaataaagatatcttagtaatttgggggagtttctaaacatggttgttgagagttactaagttaactctatatttcagcctactatttcctatacaaactgtttttttaatatttgaaaaattacgtttggggcgatgctgcctctttgtagagcagtagcccttcgactgagatattatttcattggccttttctcctagattctgtagttgtagtttttgcctctttgaaagtttcagctcctgcaacatagtgttagatgcttattctgatctttcttcacttctaggctagtgaagacatttttgggaagtatcattatgactacatcctgagagtacaatgagagtgtctgatttatgaaatctaggttatttttagaggcaagagaaaatacttaatttagtcacatcataattttatttcctctttttataaagtattatagtgtactgtaaaattcattaatcccgagtaagtatttgtgtttctcatcgctattcctctcagtggagtaattcatgaactgtacttacattaaaacacataatttaactaaaggtttaattcaaaatatttttatatgccttgcaaatataaaaatgcccagaaaaaattttagattgagagacagtgtacagtgctattttctagaaacatatggcaacttttttatataatttgatttaaacaataaatagcaaaggttaaacagacaaacccatttattaaactaacaaaggaaagtgtgtaagtggtgaagaatacatagttggttttttttttcctcttcttttttttttttttttttttttttaaagttcagttttagttttttaccacttgatggcagtgatggagctagagctctaccctgagaaggttagggcaagaactcattatgaataacaaaagcgtaggtacaaaggaaatccctgacattttaatattattcacatttctaggtgatattacttatattgcaagtgacagtaatagggggaaaagcctctagatggagcttcagtactttctaagggaaaacatttcctgtatctttccaaatgcatattttatattattttacataatatattaaatccagaatggatttttacaaaataatatttaagggtgaatttatttcagatgtaattatggaaattaattcaccaaattacctaataatttgaaaaaatggctatttaagtatcttacatttttaaatcattattaatatttgttgaaaagtatgttaaactttgagtcaaacatttctatctagtataaatgatttgcatatctaacaagttagtaaaagatatttaataagaagtcaggtgcttaaaatcaatattgcactataattaaatctgaccatctatattattatgcctagtatcattcaacatttgagttcccaagagaacataactattactccaactcaattgcccaactaaaaaaattaaaaactaggaattttaatgtaaaataattttttaa

SEQ ID NO: 60153 - DNA, 1044 bp, Homo sapiens
aaagtcaggccaggcatggtggagttcaagacccgcctgggcaacacggcaataacctgtctctacaaaaaaaaaaaaaaagaaaaagaaaaaaaattagctgagcgtggtggcatgcacctgtggtcccggctactcaggaggctgaggtggaaggatcatttgagcccaggaggtcagggctgcagtgaaccatgtgttggtgccactgcactccagcctgggtgacagagtgagataactgtctcaaaaaaaaaaaaaaaaaaaaaaagcaataaaatagcaagttttaattgcatcctagatggatagaatagaatttagagtttagagtaaaaatagagccatctccaattttgaagaagctttaagaagtggcaagtcttaataattggtcaaaagtcttatgttggaattttgaataaattactatacattaattcacaattatttattggttgcttactatgtgcctggcactgttttaggggcacagcattaaacaaaacagacaaaatgtctgcccttattgtgtttacattctagtggaagagaataagtgtaaataaaaaatatgtattatgtactagttacaattctatggagaaaaatacagcagagaagagggataggaagtgtggtgcaagagactgcagttttagataagggtagacaaaggactcctcactgagagggcaatatttgagcaaagacctgaaggagggaggatgtgagtaatgaagataagggggaggaccatttcaggcagaaggatcagcaaatgcagaggccatgatgatatgcccaaagtgttcagggaacatgagggaggcctgagtgtggagaaagttagaggaaaagtgatgggatatgagttcagagagataatgaggcgtcaggtcccagtgacttcagatgccatttaaaagactttggaggatgtgatgtgattgtaagaactttggctttaaaaaacaaaagtaaaatgtgtataacaaaaatttaccattttacccattttaagtatacaattcagtgctatta

SEQ ID NO: 60154 - DNA, 1011 bp, Homo sapiens
acatgctcactgtcttctggagtacccctgaacatatacttcttctaaataatttttctttgtgccttaaaataaaatgcacaagggaaataattatttgttgattttctccacacagtaaggcctttttttaaaaaaaatacatccaaactgagggggctacttgttttcattgtctttagatatgtaccaaggccaccctaaagaagatgcaagccaccatagttacagttgtcttggcactgtattaggcatgatttgtggttactatatacaattcccagggtttatcaaagtcagcaataggaaatttatggaagattgaaaaataagatgatttcttgtatgccatctttgataatagaggccacagaataaacttaattaaaaatgtagccagaaattgctatagactcttgaagcagcaccccgtgtatagttgtgcagtttgtgtatctgcttcaaacctgtcattgtgttataaaaatgttttagactttggcattgttaagaattgcacataggtggttaaactgtgaagtaaataatttctctttgataattgaaatattatgtttctgcgagtggaattttaattttcaggcccatcttgagtgtgagtttctctctcctctctcttcacctctccctagtggctttatagatgtttttactcttttctctgagacacctaggcaagaactaggtcttatataggtggcttagggctccctcctgaggttacattggggccattgcagatccagataccaagcctgcaggtcccttggcctggtctggactgtggggctaaaaccattgcctcttaacatctcagatacataatgttttgtaagttgtagcctcaggcagtgtccttctcactttcgcatttttttttccccacaggcggtggattgccactgcatcccctgatttcaagcagcaagcctggctgtgatcccaggccttggtagagtactttcagtcctcatcactctatgggagtca

SEQ ID NO: 60155 - DNA, 1431 bp, Homo sapiens
atagtctgtgaggcattagttacttagagggataattgtggtatagattggacctgggtggtagcagtggaggtggtgcaaaatggtcagattctggattgaatttcaacatggagcaaacagaattttactgatggcttgaatgtggtatgcgagagaaaaagagaaactgaagataattctaaagatttttggcttcagtaactggaaggatgcaattgccatttgttgagatggagaaacctggactaggagcctggtttggagaacatcaggaatttggtttacggacatgctaaatttggggtgtctgttaaacgttgaagttgagctggtatgtaggcaattggttattcaggtgtagagttacaagaagaaagtttagggctgtagataggaatttgggagtccgaggcacttagagagtaacttgaagccacaaaactggatgagttcaccaagggagtgaacgtaaaagagaagagaagagatctgggagctaataagccttggggattccagactttaagagtcaaggagccgggtgtggtggctcacgcctgtaatcccagcactttgggaggctgaggcgggtggatcacgaggtcaggagttcaagaccagcctggccaacatggtaaaaccccgtttctactaaaaagataaaaattagccaggcgtggtggcaggcgcctggaatcccagctactcgggaggctgaggtagagaactgcttgaacccgggaggcggaggttgcagtgagccaagattgtgccactgcactccagcctgggcgacagagcgagactccgtctcaaaaaaaaaaaaaaaaaaaaaagagtcaagaagatggaggggaatcaacaaagaagatagagcaggaacgaccagtaaggtaggaggcaaaccaatacaaggttctcttcagtcaagtgaaaaaagtgtttcaaagacaaagggatcagctgggttaaatgatgatgatgattcaaataagatgagctttgagacttcaccgttggaattaaccgtatggcggtcacaggctacctcagtaagaactgttttggtgaagtggtgagttcagtagtctgggtagattgggttcaggagagaatgaaagggaagaattggagacaattaatatagaacattcttttgagatatccatatcctaaactagaaggcagagatggtagtgactgtctgtggcatcttctttatccccttatccaccaggtataagataactcagttactctctaagctctataatctgaataacagatgacttagaacttggaccagaccaccttatgaccttggacaagttagttgcctcatttttaggacagatggtagctttttattttcttcatagtaaggcacatagtaaacacctaaatatttattgaatcaaacattataaa

SEQ ID NO: 60156 - DNA, 1050 bp, Homo sapiens
atctcagctcacgcaaccttcatctcttgggttcaagcaattctcatgcctcagcctctcaagtagctgggattacaggtgtatgcaaccacacccagctaatttttgtattttcagtagagacaggattttgccatgttgaccaggctggtctcaaactcctgacctcaagtaatctgcacaccttggcctagaaaaccataattttgttaaactttgcaaataagaaactctgtagtcaaaatcttggcaagaaaatactatttaatttctaaagtgaaatttgggagctgtcatcagtgttgtcatgccatgattttgttagctacttgagtgagtataagataatggcaaaattaaaggagcagacctaagaatgaaattataactttaaatatcaaatctttgtatctaaccagtccacagttttaaaaggatttcgtggatattagaaaagtcatgtctactctttaggacttcagcgtagcatgttgaaacgtattttaggaagtttgatcccttatttttaagcaaagcagttaatgtcacatggggaatatctgagttgtaaagaccaaaattgtgaagtcttcatctaagaagaaatgagaaatcgatttgtaaaaaagaaatgaaaataaacaaatgtaatttggcaaaagatgaaggcaaattttaagttaaaggaaggaagttaggaagaaatgaaagaaagcagtcatactccatgtaacatttaatgagaaaagaacaggttgcattatgtgtcttagaatttctctgcacagacaaataaaaaataattttcctttaaattccgtaagtgatttaaatgattcacttatcttttgtatggattataaaaagcaagttcaattcttaaatcacataatttctatcttcaccagttaatttatatgaaaattaggaactggccaatcacctaataaattccatcaaatagaccatttagataataagcacagttacctcctcaacagcaggttgatttttttttctgtactaaaattataaacgtcaccacttcag

SEQ ID NO: 60157 - DNA, 1072 bp, Homo sapiens
ttgcttttgtgcaaataacgctgaaggaagatattcctttagattgaagagctcatggaactccatggggagaaaaaataataagtttaagtgccatcgagacaaagactagttttaactggcttatatatttattatatattctagtggggatctgttttatccctgcctgctcatatgctacagagaagaaagtttagaacactttagaaactacctctaaataagaaaccattctctctgtgttccctaacaccgatgctttgatggttactttaaactctgagatatttgttaatgaaaatagtctttactgttttaaagctattttaaccacaaatggacagttggaaggagtatttaactgagttatatatgacacttgagagtataagtcaaaaactgtttcagtgaagtttataaaacctgtctatattcttttattaaataacttggcaaggcatagtttgtgacttggaatttgaatggtcaagtttttgcacattcatgatcacagagttcagtggtctcaaattgcatcttatatcacactgtgagacaccaaactgagtattcagaggggacagtaaagcttttattttcaatttaaacatgtaatccaatccctaattatttctaaacagtcattgctgcaataattgatatggacaaatataaccttttctcacattgtatagtttaatttgcatatgtggatttaaaaatgtgtgagggaaatgaaatacaaattacattaaataaactgtaaccacagggtttaaaattaatgatacagtgttctctaaaacagataacttacgcttatgatttggcacaagtgttttgtatttttcccctaaaacttttttgaataaatttatattaaatggtaaatagtacaatttctatttaatattgtcatcatttagtaccattttatgttatttatttatttatctatttattttagtagagatgggggtttttccatgttggccaggctgctcccgaactcctgacctcagatgatccgcccaccttggcctcccaaagtgctgggattacaggcgtg

SEQ ID NO: 60158 - DNA, 1257 bp, Homo sapiens
tctttgggggctataatattttttaatagtaaaaatattaaggcaaaataagttaattgaagctagtaatagtagagttcttgttgtgttctttttattgtttttcacttgatcttgttgctcatctcatttacttataattgactgtccttatagttgatgtttttaatcttgttaaagggtttttaaacccaaattaaaatatcctttttggaacatgactgtaaagaatttattatcataggcatcactggaagttaatttattttagatcatccagacttgaaacatatcgacccagtggttttaaaacattgtcatgcagcagctgcaacttacatactagaggcaggaaagcaccgagctgacaagtcaactctaaggtacaggatttatttaaatatccatttattttcaaatactaccttaatgatttcaatttcagttttaaaaatggagacagaactttggctttttttttctttcttctagcacttatctagaagactgtaaatttgacagagagcgaatagaactgttttgcacggaatatcaggttacttactttaaaatttttaattaacagtactatttttcttttactttgtttgtaaagatgtttttttttctttctttcttgctttcttttttctctccagaataataagaattccctagaaatcctactgggaaggtaggtactgtataaggtgtcaagctgaggcacttttcacttgcaggtatgaatggagagtgttggtgtgaaacaagatcttcgggatcttgacccaaagaaaaggagccaaagggcatgtcaagcaattgaagttaagctcatgtttttaaagatcgtttattgagatgattttgaaatgctcctttaccattcataatttaaaaataaagtttaacaatggtttaaattcagaatggattaaaatggagttgggggtggaaagtagagccattcttagtaaatataaataactgaaaagttcttctgaggagactatgtacgaagttatcattgcatctttcagtataggcagatctctccctcatataacggatgtttcttggcgcttggaatatcagataaaggtaaagtttaagaaacttctctagcgggggatttagggaacttcttaaaacctagagttaaaagctgttgcgtgtttgttgtgttattttagaccaatcaacttcataggatgtacagacctgcatatttggtgaccttaagtgtacaggtattta

SEQ ID NO: 60159 - DNA, 1013 bp, Homo sapiens
cgccggccccgcccccgcggcgcgccgcccctcccccgcccgcccgcccgcccgccgccccgcacgcccgccgaggctcggggctcgggccgggctccgcgcggagttgcagcggtggccggatgccaagtgtaagtgtaagttgctatggaaaccccgaccgaggcgagttccgaatccggagcgagacggagccccgggcgccgccggatccgcccctcgcatcccggcccccgggcgtccgccgcgctcaggccccggcccaggccgactggaggtgctcctcctgcggccccagcacccggctccggaaatgccagggatgcagggagggcagaattgttttccctgcgcgtcgcgtaaaaacgtgccaggttctgcttgctggaaccgtctaaaacaaccggaaccccggattttcacttgcagattcttgaggaagttttataataaattcggagacctggaacaagccctagtggttggtaaatatccgcggggattgtgtggcgtctgcagcagccttggggctgctgggctggaggacaaatggaagaaagagaccctaatacgctcagctcccagcccccaccccagactttcttctacctacaggaatgatctgagagaccagaagtaatgttagttggatccttttgcatcagtttggtagaactgattccgatctgatgagtaaattccttctgtagaaacgttaggacagcccagctgtacagtgttaaatgagttttataaattcagtgtttcagggtttgtgattactagatgatctccattcttgttctgtgaattatggccattatttctgtgtcttgcaggattttttatcaagcagaaatgcatcgaacaacgagaatcaagatcactgagctaaatccccacctgatgtgtgtgctttgtggagggtacttcattgatgccacaaccataatagaatgtctacattcctgtaagtaccgagctttagctctcttttgtatcatgcgtatttc

SEQ ID NO: 60160 - DNA, 1264 bp, Homo sapiens
ttatatttaaatgacaaaaaatgtacatttacctttgttcttttattacttaataaaaatatttttcactagattgatgtcatgtatgaggaggaacctttaaaggattattatacactaatggatattgcctacatttatacctggagaagggtaagtagcatatctgttgttagattatgatggtaaactatatttaaagaattaagagtaatttttttccttttaactttgtagaatggtccacttccattgaaatacagagttcgacctacttgtaaaagaatgaagatcagtcaccagagagatggactgacaaatgctggagaactggaaagtgactctgggagtgacaaggccaacagcccagcaggaggtattccctccacctcttcttgtttgcctagccccagtactccagtgcagtctcctcatccacagtttcctcacatttccagtactatgaatggaaccagcaacagccccagcggtaaccaccaatcttcttttgccaatagacctcgaaaatcatcagtaaatgggtcatcagcaacttcttctggttgatacctgagactgttaaggaaaaaaattttaaacccctgatttatatagatatcttcatgccattacagctttctagatgctaatacatgtgactatcgtccaatttgctttcttttgtagtgacattaaatttggctataaaagatggactacatgtgatactcctatggacgttaattgaaaagaaagattgttgttataaagaattggtttcttggaaagcaggcaagactttttctctgtgttaggaaagatgggaaatggtttctgtaaccattgtttggatttggaagtactctgcagtggacataagcattgggccatagtttgttaatctcaactaacgcctacattacattctccttgatcgttcttgttattacgctgttttgtgaacctgtagaaaacaagtgctttttatcttgaaattcaaccaacggaaagaatatgcatagaataatgcattctatgtagccatgtcactgtgaataacgatttcttgcatatttagccattttgattcctgtttgatttatacttctctgttgctacgcaaaaccgatcaaagaaaagtgaacttcagttttacaatctgtatgcctaaaagcgggtactaccgtttattttactgacttgtttaaatgattcgcttttgtaagaatcagatggcattatgcttgttgtacaatgccatatt

SEQ ID NO: 60161 - DNA, 1035 bp, Homo sapiens
ctacatgggaggattgcttgaactcaggatgtcgatgctgcagtgagccgtgatcacaccactgcattccagcctcagtgacagaacaagaccctgtctcagaaaaaaaaaaaaaaaaaaaaaaaaaactgcgtagagaatctctggtgacatagtttaattagtaatctcaattcttattcttcccaggttttctttcatatgagtcattataacttctagttttccatacttttaacttgttgatgacaagtttgaaactgtcatttcaaatatttagcgttataggtgcagacaagtcccatttcttagattgtagcttgacatgtaattagtgtgatttgcattagcataatcatgaagatggaactgaaggaaataagttatattctaacaatggaatcactttcatggcaacaagtctcagaacatgcatgtacagatgtcttgaggttttttttaagagcagaacagtgctttaaaaaaaaataaccattgtcaaattctgacagctgctatgacttgttttattctttaattctttcctttttaatggaagggcatctcccattcatggctccagcagtttcgcctcctctaaatgagacagagaaatgtgaacctccctggtggtcgatcttttcacagctgcgctgcaattccagtgtgacatcaaattagtaattatagctgagcgggctgctttttacaaatgacagtcttagcatgctgcctgctagcgagcgactcagcaggggacctggggaagtaaaagaaaacataactggactcacttgatttctgggggatttgacctgactctttaaaaagcccatgttcttgagagagagagtcctggggatttacacaaatatgcattttgttcatcatcctgcacagttcttctcaaaactcatgtctgattttattaggtaaagtaaagtatgtgtaatggagccatagggtcacaataagaagatcccttttaacatacagccttcttcctgaaacccatttgaaagaaaacagctgccc

SEQ ID NO: 60162 - DNA, 1072 bp, Homo sapiens
gagcatttggggcacatatcaggtgctcctggaagtctccctccctcacgccttcctgcctttgccctctccacccctcacctcggggccttggctgcatcttggccctgcttgagtcatgagcaggtcttgtttcccttatctccacattcatcagaatgggttgtctttttttttcttttttcttttttcttttttttcttctcagacgaagtctcgttctatcacctaggctggagtgcagtggcacactctcggctcactgcagcctctacctcctgggttcaggcgattctcctgcctcagcctcccgagtagctgggactacaggcacctgccaccatgcccgtctgatttttatatgtttagtagaggcggggtttcactatgttggccaggccggtctcaatctcctcctgacttcaagtaatccaccctcccctgcctcccaaagtgctgggattacatgcgtgagccaccatgcccggccagaatggagcatcttaaaggcagcaagttcctctgtggttggtatgggagcatcatgtctaagcagtgttatgcccaaagatcccctcccctccaagggtgaggatagggaggagctggaggggaaggaggcagacgtcctctaattgttgtgcacgtgactctgtggagaacaccatttatcagctttatcagtgcatacaaactttgggaagttgagagaattttaagtgtgaattctgtataaatcatcggatgtgattctttactcttattcagtgacagattgatatcactagggttacgattctgctccacccctttcctcaaagttctgtttctcccgtgatgctggagaatgaggatacattgcgtggtacagtttacacgtgcggtaatagtcccagaacagataaactgtgaccatttccgaattctcccccaagttaaccatgtgactgccttgttttttttttaagattaacatccttaaaccgttattttgtggtaccctcttttcctcctttcatgcccgacatatgccttttttcctacttattgtgtaaagttcttcatttgtcgt

SEQ ID NO: 60163 - DNA, 1909 bp, Homo sapiens
gtgtagagaatataatgggaaaggcatgagtgccggtaagtctgtaattataatgtacttaatacgctagactttacgtgctgcatgccagtaaaacacagggtaaacaccattctgtagaccttggttctcatgtgtggtctgcagacccactccagcagcagcatctacttctgaaaatgccccacccctgacctgctggatcagaatctgcattttcacatgatccctgggtgattcagttgcttgttaagtttgagatgcactgactatgcagcttttgattcaccctattggcccatgagaggacgttatactgtcctatctaatgtgcataagaaaacgatctatgaaactgaggctgctggaattctatcctgtgctgaatacagttctcctttactattccccatcccccaaaagttgttttacacgtattgtcagtttgacagagtttaaggtctgttccacttggtctgctccacctggctttcataaacttgattgttcccactttgattttatgcccaaagataatctgcaatcttacagttcctagagttcttgttttatttgaaagaaatacccttttgcaaattagtgattgcaagaaaaaagtaagaccactaacaaagagcaataattgctttttgggggctagcatttaaaaccccacaaggggaaattcactttgattttcttcctttttgttctaagtgggaagtagtataaaggagatcttgttcatgttttaggaaagaaaaatgtaattaagaattaaactcttgttaatgtaggcattttcatcctgaaagtcatttttatcattctcagtctatctaataaattttagttgtcttaagaataactgaacactgccaagtcttgctatttaaagtcattggggattatgtagatttttttttttccttctctcaagttttctaataagctaaggaaagcaaattcagttacttggtggcctggactctgcatctggcaggtgcgcctgcttgccttcagatcaaggtgtgctattgcagaacgtgtgatccaccacagggggtgccagggtggtgaggtgagaatcctggaagatgaagatttgctcatgggccacttttctcttcaggcataggtagggcctgcgtaaacccctgcactgctgcaatggattctacctcaggtggttcagtcctgttgatttcatctagaaaggaaggaaaggataaagagactggaatatactagacagaaaggcactctttcttttgcaaattcatgggcagagctatctatcacctgcccctctgaaggtatctgtgttcccttaacttgacagcatttggccactgaggcctttgaatgcccacttcagagagcaagttaaagagagaaagcatgtttgcctttgaatcccacacaggccatcccgcagggccaggcaaggagtgaaagtcactgctcaggagcagtcggcaaggatggagacgagactttctgggggccaggggtttgctagaccccatggctggacggccattgtcaagaggttggggcaaggaggaggcttcttggaggatgtaagaaagaggagatctgaacggaagagtcacatgggaggagaagggtagacctacctagccagtgtcactagcatgaaccagatcttggagtgaatgatgtcagcagagcccctactcagagcccgtccttgtccaccctccaggagatcagtagttctcaaaaatggtggtagggagtggaggatggaccaaattcaaatcgcctaaggaggagctgttttagaagacactctcccaggctcctgcctcctcctcctggggcacacaggtagcatagtctgcaagttaagtactttactagttgagtagtttactagttgaga

SEQ ID NO: 60164 - DNA, 1061 bp, Homo sapiens
gtttcagaccacaagagccagggaatttttttaatgtctgattgtggttaatcagttttctgttcttcctggagataaactgcataagaaaaggtcacatgtttcagggctcctcctgcaaaatcagagatagtatgaaatgacaggaagagtgttttccagtctgaggaaaatacttggaaaaggcaaaatattcattatctgtaacaagtggttaaagattttcaaagacattcataaaaattgaagaataataatgaagttgtcccatggaagaaatattcttcagattacttttcctcttctttgatactgtaataaccagagggccatttaatgtcagctaataaaggagtcacagagtaactactaagcagacttaaggaattaactctccccacaccgtccttaattgagttttttggttgtctgaatattttctgtacatattctcactcattatttggtactttttttttctttttacttagcatattttaagatacaacctttgcaggaaagaagagagaaaactgtatatttaaacagagtgaattttgtgttaactctgaaaggacagagactggaaggaagataagtcagggcttgaatattccaggaaggctttgaggaggaaggaaataaagtctgaacagccttgaagaatgggtagacgtaggaaaggattcaggaaggtctttagataacaaaagtagagatccagtggctgagatgttgtcgatgttttatttttatcttctaaatgcttttcttggaagatcttatttcttttcacacattgtttttcttttgtttttcccagctctctgcttccagggctaatggtgagttttctgccgtgtaaaatcccaaagggtcgcttgcatgtacttgttgccagtagcctgttttcattgggtcatttactgtggtttaatatgccacttccccagtggacctgatgtgaagaaagtccccacaatcctgtcttctgtgacctttctgaggccttttccttgttacttggaacaaagatgtgatagctgattgggaggagagtg

SEQ ID NO: 60165 - DNA, 1344 bp, Homo sapiens
gtccctgtggctaaatgtttggttgttagtctgcatgaaatagatatgacaccaaattagaaataggagaaagcagcagaagaaaagcaaaggttctgtgtataaccaagacaatggggttaaaaaaacacacacacattgctgaagaaagtaagttaagtaagttgagctttcatttgcaaaatgactttttatttggctgtaatattcctctgggatggctctgtgaattcagtaaaacaaagctaaagaaaaacctattctgtttgagggaccgtataattaaccatagaaatgagtgccatccagtgtattactgaagaaaaaggattaaatagtggtatgaataaaaatagtatccctttttattctctctaggctaaaattataaggactgtcagtcattttgttaagggtctagtttattattggctgtgttgggaatagtgctttctatcttcctattatgtaatagtccacaattacatgaatagtgggatttttattttttttattttttattttttttcctcagaagagcctggtgttgaggggctgcaggagcagaacaggaagttatggttgttttggaattgtgtgtggtgtatgtttaaattgtattagaataatttttattctttttaaactgtctttctggttgtctcatgctactttgagtttaatataccctgggcttgatgcaagaccccgggccagggccagagcacctggttctagttctaggtctacctttgactgttgtggtcattttaattaattcatgcatacatatttattgcattttcctgcactgagtcctgcgcatacaaaaatgaataaaacccagttccttcctgtaaggaatcagtttagttggaggatcacagagataagcataattataagacagcttagagatgtatatggagtattttgtgatgtaagggaaggaacccaaaccatccttggcaggaagtaatgggaaagacttcctggaggaggtgatgcctgaattaggtagaagtcataaccatggggatcaggggctttgtagggcattctggctagaggttatcaaatagcaaggcagatagaccccaagtgtgttcagagcactcacctgtccaggaagtggccctggacagggagacaggaaatgaggctgcaggaatgagagagatcactggatctccgtttccttacctagaagtgaagctctgttaatactagaaggcttctcaggaactcactcattttctggaaagctttcatattgctgcttgttggagaatgacatgttaacctgctgctcacctttttaggacgttgagggctgggtattaa

SEQ ID NO: 60166 - DNA, 1111 bp, Homo sapiens
taggcctcatgttaatacatgaggtctacattagacctctaaacttgttcatcctctgtatctgctattttgtatcttttgacctccatctcttcatttgggcctccctccacctcggctctgataaccattgtttgattaaatgcatacctgacctttttaaaaagagtccacatataaaatcatgcaacatttttctctctgtgcctggcgtatttcacttaacataatgtcctccaggtcacttcgtgttgtggcaaatggcagggtctcaggaagggtttctctttcatctgaggtcgacatttccttcatcctttttttttttttttaatctgacttattcttgcctacttgaattgcagattagtatagtgtcacatagcatgccgcatcatgagcatatcagaatatcacatttaatgtataagaacttaatccagtaaaacaaataaggtctcatttgctatttacgagtgagcatgtatgtgctaagtaactgtggagcaggagacagaatgtgcgcgttcttcagctgcggaatacctctcataacagacggccctaaatgcgcttctggcgtctccagacatgaaaaattcaaatggtctaatttagctgcgtcagcgtgagaaatttaaaatgttgaaatgttacctactttgtaccatactctactttattcctagattaaagaaaaaaatagaggctgggcacggtggctcacacctataatcccattcctttgggagacaaaggtgggaggattgctagaagtcaggagtttgagaccagcctgggcaacaaagcaagacctcgtttctactaaaaaaaaatttttttaactaattagttggtgtatgcctgtggtctcagtactcaggaggctgaggtggaacttaagcccaggagttcaaggctgcattgagctttgattgcaacactgcactccagcttgggcaacagagtaaaaccccatctcttaattaaaaaataaaaatccaataagaagaaaatagagcttgctttcttcaattattgagtgacttctcaacctagtataactaacaggaagaaaagtctttttgatgcctactgatgtcagttttca

SEQ ID NO: 60167 - DNA, 1018 bp, Homo sapiens
tccaccggaggagcagggacactggggacacttggctttgagggaaggacagaggaagaagaaacaggaggagaaaacagaggtcggcacaattagatgttcccaagtgcttgaaagtcatggctgtgcttgtggttgattgcgggtggctgtgaaagcttaaagacttaaggagtgaatgagtggaagtagaggcaattcctcttttttggaaggtaagtagaaggaaggtgaaagatgccattttgttaggaatccctggggagtttccttgaatccgtctcttcgtttccattctcacttctgtcactcctaaccagatttgtttccctctttcctagactgatattaaacccccctagcttatttccctgtgtctgcctttatcctcatttcttttcttttttgtactaggaactcctatggcagtccagtgaaggccatagactcctcagaatgaggcttttaaaggaataaatgaaaatacagaggatatgtcctagcaagttcaaggatccttttaattctatccatggaccacttgggagttcatggaaccccatcaagaacccttgcaagaataagatggggatagtgtggggtgagaaagtggggagagcacgcagcagccaggaagaattcttgggggggaacacgcataggctgaattgattacccgcctgggtcacagtgcctagtacttgggattcacaacggtaccgttaaccactgagctgtgctgcctgggccaagctcaggaatcattcatttctttgagttcttttattttcttagtcttaagagctgttcttcttggatggacagagtattagctgttaacatgggagaaaactacttgaaaaccagtttttcccttcatagaaagaaaatcattgttaatgttcagagcatgtagggagagaaccagtacataatttatttaagaaaaatgttgtagggagttttaaaacagtaacttacctaaagctaagcctcacaattctaaatctttatagtt

SEQ ID NO: 60168 - DNA, 1050 bp, Homo sapiens
tttcagtctactaggtgcacagtgttatactaggatttgtagaatactatataaaagttgtcttactattataaccttccaaatgcagcaacattcagggaattttcaagaccttgactacaggggaaggaaatctatggtgattttaagagactgtgaactaagggtttgttatattgaatgtagctgaactgcattgcagtctattaagccaaagtcgatttgattgaaacataacaacttgcaattaaggtgaaaatgttcaagtccattgaggtggtaatgaaaatcttgatttgggcaatggtcatagtcgggagtaagcctgccattgtgtggttaatttgatatgttactgctttgtaacttaaaatacccatcagtgaatggatcagtgccaatttttaagtattttaagcagagaatataactgaatacataaaggaaaagacttaaggcagttttgtcttgttacatttagaattaaactaaaaatgatcaaacagtaagcgtcttaagatgatattttaatagtgtggggaggatgttgaatgatatgagccaagacttgttttaaatagatactctaaaagatttttatccacagtgaaatgtgagccttttagaaattagtattttaaaacctatttaaatatccaaaggaaaacattatctgtatagaaaaatcttaaagcacataaaacttgtttaaaacatgtagcatttagaagtagctaagtattgatgttagaggcttttggtttaaagctgtagaagttgaaatgagctttggcaaaaatgtcaggtattgaggggtttggggggcctatcacagtagaaggaaaggctggtaatggaaccatgtgaagagctgggtgcttgagtgtgtgggtgtgtgagtgcgtgggacttttctgtaccctttggctcagttctccttcatagctggctggttcctccacagagcagggaatgaacggttcctgtatttcacattttgtcatttctgctcccccaaaagggtttcctgtctctaattcagttataaaa

SEQ ID NO: 60169 - DNA, 1030 bp, Homo sapiens
cccggtccgtggggcgaagagcacttggcggagaggggccccaggggctgggagaggggcggcgatcgctgcgacgcgcccggtggggacgcggcgcggaggcccgacccagaggccgaggcaccccccgccgggagcatcgaggccgccccgagtagtgcggcggagccggtgatcgtctccaggtcggatcccagagacgagaagctggccctatacctggccgaggtggagaagcaggacaagtatctgcggcagaggaataagtaccgattccacatcattccagacggcaactgcctctaccgagctgtcagcaagacggtgtatggggaccagagcctgcaccgggagttgagggagcagacggtgcactacatcgccgaccatctcgaccacttcagccccctgattgagggcgacgtgggggagtttatcatcgctgctgcccaagacggggcatgggccgggtacccggagttgctggccatggggcagatgctgaatgtgaatatccatttaactactggagggaggctggagagtcccacggtgtctaccatgattcattatttgggcccagaggattccctgaggcctagtatttggctcagttggctcagtaacggacactatgatgctgtatttgatcactcctatcctaacccagagtacgacaactggtgcaaacaaactcaagtgcaaaggaaacgcgacgaagaacttgccaaatctatggccatatccttgtctaaaatgtatattgaacaaaatgcatgctcttgaaatgtctcaaaaccttacaccctgggaataattgcatatataacttgtgtttggagaatcacatgaactttaatcagggtaatagcactttcaaacttgctagtagattttactgtaggtgtaatgccttaatcatctttttgaatgttttctcagagctggaggttgctgggcacctaaatgatgtttcatgatagctttgggtgattttactgctatttataatttgctgtataaagtgagc

SEQ ID NO: 60170 - DNA, 1598 bp, Homo sapiens
attttattttaaatgttgttgtaaatggaattgtttgcttaatttgatttttgaattgttcattgctagtatatgaaaacacaattgcttttttttatattggtcttgtgctctgcaaccttgctaaacaaatttatttgttttaatagctttttggtagatttttaaaggattttctctatgcatgatcatgtcatctgtgaatagacagttttatttatttctttctaatctagatgtgtttttctacctccctcccttttttacttccttgcctaattgtcctcgctaggtcctgtaatacaatgttaaacagaagtagcacaggtggacatccttgtcttgttctggatcttagaagtaaaagcacccagtctttcaccattaagtataatgctagctgtaggttttccacaaatacactttatcaggttgaggaagttctctttctcttcctactttgttgagtgtttctatcatgaaatggtattggattttttgaaatgctttttctgtatccattaagatgattatttgatttttattctttattatattaatattacatattaactaatttttgatactaaaccaaccttgcattcttgggataaattctacttgattatgttgtacaatccttttcatatgttgctggacttagtttgttgagaatttttgtctatattcataagagatattggtctgtaattttcttgtgatatttttgtctggtttgagtgtcaggataaaagtgactttctccttctatttttcattcttaacactgctgttcaggcacttttgggacatgtaagatgaagggaagagaaggaagtctagggctgatagtgagttccagtcagcagtatggaagaggggaggaaaaccctaaatagattctatagtgggccaaagattcttggctgccacatggacaccaggcggggacctgttattgggtatatcctatgtaaagaatgtgtcctgttctgttctttttatacacatattcattcagaatatttattgatcaccagctgctatctaataagaagtaaacttattaccaaaaagtttaaatagacctgactcctgtcctatgagaacatataggttaaaggggtaggaagacacaatagaataattacaaactaaatgtaaaattacagctatgatttgtatgatgaagggaagattcctggtgctgtgagagcatataatataggggtttggtctggtgttctggcggtgggaataacataccccaaggccctgctttaggaagaagtgaaggaaggccagtgctgggggaacacagagagcaggaggaagggaaataatgggaaggagaaagtaaaaagaaccaggctacctgcggcctggaagtctggtgataggcccatgtcattatcctcagagcagtgtgttttcacttttaaaatgtctgtttctgaagaactgggggccattgcctaaatgaaataacccagaaacagaaagtcaaatactacacttataagtgggagcgaaacaatggccacatacagggtggaatagtagacactggaggctccaaaaggtgagaaaatgggagg

SEQ ID NO: 60171 - DNA, 1050 bp, Homo sapiens
agtggcaggtgtgggacggggccttctgttaccttatgcagactgcactttttctaggccgaggagtccctgagctgcattacaattcaggccagtgtaatttctggctttaccatcacatagtttaaaattttccattaatcctttggtgtgttctaatcaaataatgctgttctcagttaaacagttgaagaagctcccattctggcaggtattatactctttaacacagttgctctgttgtcaccaaggacacttctgcatctgatattgatttaaatcttcagttatgaaggtcttgaagatgactttgtagataatgaagattgtattggctcaagaaactgtaacaatggaaagaatatagtgcatacttgttcatccaatctgagaaacagagtagccttattgataagcaatttacaaagcattttgttctatgctgatacaaagttgaaacatagtgggtgttctatttggtgtcaagtgttgaaagtatttttggaaaattcattatattttggagacagttcaagttgtgttgaacttttactcaaataaagatttatatagctgtgccttgattttgaaaaatttgttttatcaaaatctgaattgcagaatagatacatcagaaacaaatgccattacaaaataatctccaggtagctcatcaaatacctatggaatgggtacaatgagtatagggaaccgggtcaccatctatccttcttattctctagggtctgatcaataaagcaaaccaatgaagcaagattgctagccagatagaaaatgaaaagagtgattttgctttgtagagtcctctgtgcacatccttgtaaaatctatattaaaatatttgctttaggcttcatcaaaagtgagactattgactcttactctttatctagatgtgagcaccacaagctcagatgtgcatacagaaggagtgaggcaccagatcttctgggccatccccaataccgtgtgcttgaatatggatgaggctggcaggttggttccagaaagaagacattataggtggaa

SEQ ID NO: 60172 - DNA, 1649 bp, Homo sapiens
aaatttgggaggttcaacaggttgctgttttttaatatgtggatcacccgatttgggaggctcactctgcctctgagattaaagagatgagggcactggctcccagcgaaggctctcggccttaatcatgtgtgaaatgttttccttcctcggctgcagagcctcggtggtttgcagcagtggaaccaggcaggcccagttgtgggtaggagaggccgtcacctgttgaggcctcccccccacacccccgcatcgccctgccctggcagagcccagcccccagtccccggagagcgcgcctgaggacggacggacggacggacggacagacctagggacggagggccaggggcaggggagatccaagaggccccgcgctggaatgcagttttctcgggcgagggagactttgcaccggagtggaaaatagtttggggtggggtttcgcaccgtcccctcctccccagccccgggccccctcccaggcgctttctgggagcttttagaactgcgctctgaagtttccagagagcgaggagcttttgcggcaggcagagacaatggaagaaaatgaaagccagaaatgtgagccgtgccttccttactcagcagacagaagacagatgcagggtaagtaacagacccattcaaagatggagttacagggacgcgtgccccttgccgcttgctgctttttataaactgcagctctgggacccggcaaaggaaaaaaaaaaaaaaggcaatttcttgggatggtacattttccaaactgagtagagcatagagaactgtgatttcttaggcttgactttatctctggcacgattttcttaagcagcaaaagaggtggtggggtgatgtcacatttgtagtgcagtgagccatcagcatgagctgtatctctaagcaatgacaaataaatcactaagcagcttttaatcatttccccccggggctccagccacgggagaaaggagctgtttttgtgaaactgtctctaggaccgcagcttccattcattggttgggggattccatgtggcagatgcatgctggctgcaaagtttgtgcagaattttagagttaaatcacagaaaccaggcatgttttattttacagatccgagcagcaggggagggcttgagcatctgggtgatagatagaactctggatcttcttttatgttttaattcaaaacttgggagttgttggacaattttggtaaattttctccaggcagtttccctttaattgtgtttataatagacttgtcttttccgtagggaatttccagaagcttatgttgttccaaagaaatttcgcaccgggttgggtggccagaggaggtccctgctctctggcatctgatgcctgtgatgccaagagctgattctgtgggatcctataggcagcatgttcataaaccacacagccctggaccacccgccccaccctccctcaggttcatgcaggggccagtacacaacaaaaagacgtgcgggagtgcagtgctgtgcgtgggagtagggattatgcacaggggaaaaggtgtgtgttttatgaaaatgtgaaagggaagtaacacatgactcatccacgctgaaaatgcaaagctaagccagtcaggagaacttacaatgacaagag

SEQ ID NO: 60173 - DNA, 1116 bp, Homo sapiens
tgccctgggctctgcagaggctgggaggggcaggaaagggaaacaggactgcctttcagcaagcccaagccttgccttcatgctacagcttcattattttgtttgacaaggattcccagaatagcgaacagctagacacacccatatttaaatgttaacaccaaagcgcattccaaacaagaaatcgaattgtatttctgttttgatgacttggataatccacacttgagcttttctctattcatgtggataatgaggagttggccaggctcagatctctgacaacatggctgtggaattgtgactaaatgtcctctgcctgatccctctctagtttgtaatcattcttagtttttctccactgaaaagaccacattctccttaaatggctggaatggcagagttgttgcttctcccccaggtgtggggcttgacgcttccaagagctgagccttgtcgaggaaaaggctcaagtgacagatgtgctgaagtgcctttgtgtggaaagtggcgttaggtggctctgagtgctggtgacaggagagcaggtgcctcgaggtaggaggggaggcagacaggatgatagagcattgggcattgggtggaaggcacaaggcaggaaattgagacaaaaggaaggagtgagctccaaaggcaatccgatgtttgccaagtggctgcattgagccttctagccttgctagtggttgatgctttttgtacctttcctctaaatcgcatcaatccttgttaagcaactggagatattttggaaaaatccacaagaaagagaaaaaacagaaaagcaacatgaggtgaaaagtgctaggaaaaaaacaggggtctgatgagtctagtccagtaagtcagggctgctcaaagattaatgtggactgaagattggctctgacccccaaaactctccccttccatctcccttcccaactcatttcaaagaagaaagagggtttattgtcccggctgtcttgaactctcttgatgctctttggatgaaacagaatagatcatatgagcctgtgcagcatagtaaggcaggatgcgactttctgccgttattgccgttggacatgcatggatgtttatctgtatggctgt

SEQ ID NO: 60174 - DNA, 3009 bp, Homo sapiens
gtcttcccgcaatatcccaaggagacacaccctaggggggccccgaagttccaaggaaatactgggaatgcaaacatctgagatggatcggaagagagaagcgttcctagaacatctgaagcagaagtacccccaccacgcctctgcaatcatgggtcaccaagagaggctgagagaccaggtacgaatatgctctcatttctccttgtgtagctcgctctctaatgaacatcgaggaaagcaaacttactttctttgtaaaaggtaaaggatagcttagtggactgtgcatactatttagttgttctggatttctttggggccttgggaggaggaagccgggtgtagaaaacttctgcctgcaagctcagtcttctttgccaatacagcaagagaacaggaggccaggccagagaggaagggcctagagagtatgcagttccccaaaagagtgttcccatgttcaaccacaaacacatctaaacacatctaaagtgcagggaatgaaggggtattatctactgaggaaagcatggcaccaactaccgtgtaccctgaaagcacggagtgcttagcactgtgaatgaatgaagtaatgaatgaatgaatacacaaatacataaatgtattttcagggtaaaatagatcttacagatacagacttgtggtaactccttttccttaaaaagctgacattagggttttgtttctgctcttcttttttttttttttttttttttttttgagatggagtcttgctctgtcgcccaggctagagtgcagtggtgcgatcttggttcactgcaagctctgcctcccgggttcacaccattctcctgcctcagcctcctgagtagctgggactacaggcactggccaccatgcccggctaattttttgtatttttagtagagacggtgtttcatcgtgttacccaggatggtctcgatctcctgatctcgtgatccgcccacctcagcctcccaaagtgctgggattacaggcgtaagccactgcaccccggcctttttttttttttttttttttttggagatgggttattgctgtattacccaggctggagtgcagtagtgccatcatagctcactgcagcctagaaatcctgcactcaagatcctctcatctcagcctcctgactagctaggactacagacatgcagcaccatgcctggctcattttttatttttggtagtagagacggggtctttctctattgaccaggttggtcttgaactcctggcctcaagtgatcctcctgcttctgtctcccaaagtactagaattacaggcatgaaccactgtgcctggcatttttttcttttgaatcacagatgtgctccttctgcatgcgttgctttgtgctagctttctgtcttcacctacctgtttcctctggttattttgacagtcatatagacattacccaactgtggctagggatgtttttgtttcttggctgtgtgcaattacttttagcagatagagcaagtttggggtcacaggagatttgaggcctcctctaccgacctcactggcgagttaccagattgacctttgtgtatggagaatgtagggaaggaagcagaaagcacttaaccatatatgtgacgggtgggggtgggaaggagggcaggatgatattgatttccacacaagggaggaaagctcagtgttttaagtctgctgtcttcccagttaggtgcaaaaattatgtctaactcactcagcctttgattatccatggaaatggagattggcatcagcccgaataattgaaatctatactttattctcaatctcatattcttccttaaattcaatcttctcttctagagaatcattatctgagtggctaaaaatgtgaaacgtgctttatggacttcatgtttgctttttgttcacacttccaacagtcagtaaacccagaagaggagaaaagaaaaagaatcctggttgctataaggatgggctaatgattaattctttgataattttaaaaagactctgggcacagtggttcatgcctgtaatcccaacactttgggaagccaaggctagaggatcagttgaggccaggagcttgagaccagctgggtaacatagcgagaccccatctcaacaaaaaaatttaaaaaaattaactgggtgtggtggcacacacctgtagtcccagcttctcaggagactgaggtgggaagatcactgaagccccaaaatgagaccccgtctctaaaacaaaagtatcaattttgctgagaaatatagaaattggcctgtcaaaaatggtatatttttccatgtcaaaaataatgattattgttactcttcttatttgtagtgttataattattgttattgctgtaataatggtggctttggttaaaacaattacaagggaagcctaattataattaaggttgaaaggagtaatgaatatattttggtgttctcaagctctgatctgctgttacatacattgctagttctgccatggctggccagctgtcccttctctgataatgagggatgaacaagtcacattctatctttctgcctcttttgtactcgaagctgaccatccaaaaggagagagtttttaatgcatgaatctatgtatacatttttattctcttattaacaggaaaggggtcctgatccagaccccaagagagggttcttgggtctcgcacaagaaagaattcagggtgagttcataaagtgaaagcaagaattttgtttgtttgtttttgtttttgttttttgagatggagtctcgctctgttgcccaggctggagtacagtggcgcaatcttggctcactgcaacctccactcacttcaacctccacctctcaggttcaagtaattctcttgcctcagccccccagtagctgagattacaagtatgcaccaccacacccagctaatttttgtagttttagtagagacggtgttttaccatgttggccaggctggtctcgaactcct

SEQ ID NO: 60175 - DNA, 1049 bp, Homo sapiens
attagcaaagtaaagaaataaaagaatggctactccatagagcagccctgagggctgctggttgcccatttttatggttatttcttgatgatatgctaaacaaggggtggattattcatgcctcccctttttagaccatataggataatttcctgacgttgccatggcatttgtaaactgtcatggcagtggtgggagtgtagcagtgaggaccaccagaggtcactcttgtggccatgttggtttggtaggttttggctggtgtctttactgtgacctgttttatcagtagggtctttatgatctgtatcttgtgatgacctcctatctcaccctgtgacttagaatgtcttaaccgtctgggaatgcagcccagtaggtctcagcctcattttacctagctcctatttaagatggagttgctctggttcaaacgcccctaacactgtcattgcccttctgcaagcaaaccccaaccagcattgtaaacaccagagatcggtgtagacatggcctatgaaattgctgcagacatcatctcatcttctgtcttttccactctttttctcctaccacccatttcctctttcctgtcttcctctctgcaatgccatttgttcctcctggaccttctcagtatggactatcccaggcttcctttgcaggaagattacacagccagctgtgagaaggaagtcagataacacacatctgatgctctcctccagatactgaggctcttaataccagatgctcttctggcagctgtttttctggcttcctctcagagaagtatccttgataagaagagagccaatcagcaagatagagaataagatgttgaaagtgatgtatctgccgtctaacatgaaatctcttaaaatctaggttcttttttttttttttttttggaagacagggtcttgctctgttgcccaggctagagtgcagtggcatgatcatggctcactgcagcctcaacctccgcggctcaagcaatcctcccaccccagcacccaccacccaccccgcccacccccagataactg

SEQ ID NO: 60176 - DNA, 1825 bp, Homo sapiens
gggggatgaaacagaaagatgttctgaaatgctaaggaaaagaaagactggactggggaccagtctgcctcgtgtcagtaagtgtgaatgagatttaacgctcatcctgcaatggatgaagtgccagcgtcctggttggatttgcctttaataatttgaagaagaaaaggagtttggcactgaagaagcagtagtgtgcctgcctgtagtcccagctacttgggaggctgagctggggggatcatccatgcccagaggtcaaggctgctgtgagctgagcagtgatcgtaccactgcactccagcctgggtaacggagtgcgactctgtctcaaaaataaataagtaaataataaagaagcagttgcatacatagtggtgagtacgcagaaagtgaaaactgagaaaaaaccattttcagagcaagcactgcacgtgaaaggagtatggtgtcataacagaatcacaagtcatagctggagaatttacaatattgtatgtgcgagtgtatatttaatggaatactggaggcccgtgagcaaagaatatgataggatcgaatcagtagaaaaacatctcttgtcctcagagaaattccagataatgttagatatgtctaaggaaaatcaggatgtggtcaatgatcaggaacaatagtcatttacatttggatatgatgaaaaacaaaagtaaaaaagaaaaaaaatgaacagaaagaagagcctaagatctaagagagatgatgttcctcaagggatgagatgaaggagctagcttggatgtgatacctggaggactgatttatttttcactcttgggtttttttttttttttgagatggagtccggctctctcacccaggctggagtgcagtggcatgatctcggctcactgcaacctccacctccggggttcagccttctgcctcagcctcccatatagctgggactacaggcatgtgccaccacgcctgagtaatctttgtattcttagtagagatggggtttcaccacgttggccagggtggtctcaaactcctgacctcaagcaaattcacctgccctggattcccaaagtgttgggattacaggcgtgagccactgcacgtggccgaggactgacactttgagttgtgactcaaaggtcgttgaagtacatctcagaagatttggaccattacatagtaggacatcttgcggcagagactgaacaattgaaaagactaaattcaggggttgtagttttacttgcaaaattgacgtacagttgacgttaatcacccagaatgcagaaaaacagcaaaggaatcctaaatggggatcattcataacacatcgcttttgatccatgtttaattgggtgccaccaacctcagcattagctttcattttaattagtgacatggaagagcaagagaacatatcttgagaacagtgctatattaaggaaagctctgcaagaaatcaaaataagattctactagaaaacctgctaaggagtgcccgggggtaggtggggaagtatggaaaggcaagaaccgaagtctagctaggcagtgtcaggagacacctggaaagtggtagtcagctagaggaaattgccacaaaattagatggaaattttcagtgttgagggatctaaaaaagaccaatgtgattcagtccagtgcatagatgcagaactcatactgcaaatgtccaaattgtccttcctgtcttttcttgtcaaacttgagcctttgccatttattcattcttcctgcagttatgttcttggattaattcattcaaatgcttatttatttattagggatctacatttcgagg

SEQ ID NO: 60177 - DNA, 1692 bp, Homo sapiens
tagctatgtactgcaaatattctaaaatccaaaaaaaaaaaaaaatctgaaacctgaaacacctctggtcccaagcattttggataacagttactcaacctgtaatgagcgtgtttattagaaactacatacatatatatcggccgggtgcggtggctcatgcctgtaatcccaacactttgggaggctaaggcaggcggatcacctgaggtcaggagttcgagaccagcctggccaatatggtgaaaccctgtctctactaaaaatgcaaaagttagctgggtgtggtgacgcatgcatatagtcccagctactcagagctgaggcagaattgcttgaacccaggaggcagaggttgcagtgagccgagatcatgccgctgcactccagcctgggtgacagagcaaaactgtctcaaaaaaaaaaaaaaaaaaaaaaagaaactacatacaaaaaacttggctttgctttttcagcctaattcgttaagtctgtttttaatgggaaattccgtccactagcatttagtgtaacaactgatggacttaattatattcctccatcttaatttgacagcaagtactgtatgtctattcttcttctctcttaaatgtggctcatgctatttaaatgcgaaacaatggcttgagtttaggtcttgacaagctgtatctgaaatgacagtggttgctccaagtgaaaatgactgttagacaattggagataaaataggactggaccctatgccaggaaacaagactagacagatacatgttggagggatcagctctattagtcacagttcttcagaatatcagagccaatagcagaattcctttttctttgggggacctcagtctttgcttctaaggtcttcaactgattaaatgaggtctactcacattatggtgggccatctgccttactccaagtctactgatttaaatgctaatcacacctaaaaaatacctttacagcaacatctacactggtgtttgaccgaacaactgggcaccataacctggccaagttgaaacatgaaattaaccatccccctctgcaccaacagttgacagaatgtgaatggataatttctaaaaacaagtaacaactacaatcaaacacagagccaaagatcaagggtttagcattagagaattaccacagttggggtccatgtttcattaaagaatccaagcattcttatcttttggtgatacttgtagtgtggtcttgacttacgaaatgtatatgtgttgttttctacctttttcatgtttgacagtttttctttagaccagaacttcggattgcagctatttcttaagagttgctatttcattagccttatcaacatcctagagatctgtttgccctggggttttgagggctaagccctgagttgtaatgcattaactctgttctgtgcagtccttctaggactaaatacagcctgcagctaaatacatactgcttctccaaggctgctgctgtgctgatgtttctgtctgaactaccccagactccagtaccgtctgttaactccgtatctcggaggatctgcagaaggtccgcgttgaccctttgcaatccagtatgcactttcaggctcatctactaaataaatcctttcagcatggcttcgtttagttaggctcttagtatcccaattatgagcaattttattaaact

SEQ ID NO: 60178 - DNA, 1840 bp, Homo sapiens
tttattgagctctgatttgattagtatgatgctaaggttgccatcaggcaaatcacaatgtcattaaggcttagtgagatgtttttctcattcagggatggtaggaaaaatcgtcactggactggccacctctaatcaactcttggcatttctgcccagccttcgtgtgttgtccttattgctgggatccttgttgccaaacactttcccagctctaagttgttcaagatctctctgtcttgatcataataatgtcaatgctggttacaaatttttctcttgggtttacctctgcctgtccactgaggaaacggttaatggagttgctttcccatctgaattctttctggactctctccatttgcctttacattctgactcttctcgctctcttttccaagcctgaattcaataagcaaaagctgagatactgtaatttcctaaataacccaaagggaagatctggcataatttataaccactctgactgctgaatcaacttgcacttgctcttctctctaatggaactttgaagaataactgtaattgaatagtgcctccaccccatcttcagatttgactgaatcaagcctagatctggttatatctggtttttgtttgtttcatgttgtgtttgtgccccactgagtataaagcccaagtgtgggcttcatctggatgtattttcatctcacagagacattaattgaatctctgacaatagtcttgcctccgaggagtgctccaactctggctgcggtattaaaccaaggtagttcttggttgccttcaaaggtaacctcccatctgttgacagtgaactacggcaatgcaacgcttacagaatcattggaggagaggatccaaagcgtttacaattccctgctatgcaaagagtcattctgagtttttttaacctatgattgctctctgtaaatacctgggtgcacccagcaaggtgtagaggttaatgtttgctctctgacctttgaagacagatgcactgaatatgttgcagtttgcaatgggatccgtggcaagttaacagcagactgctccttcagctactgctgtttccaaaactctgcagtgtcacatcttgctcgcggctgcctcctcagaagtgcttctcagcttccattcagctccctgctgagttcctctgaagaactttgtactgtggcatatgacagcgacctgataacattatgataaactcctatgggtttgaactcagtcctattcaaattttctggtgcctagtggtcagcagtcttagacctggggagtaagaggtgtgtctgcagtgaatttagaggtgagaagaaagagggctggactcagatattgagtatcttagagcctacggaccatttcccaaagcctagaatagatttcagcgtaattctggtaatttacataaactaggatagacatgcaaaatatctggatatgttaggaaggagttaaaaagttctccacaccttttcctaccacctctgcagccatagaagccgaggggaaatgcacacacacacacacatacacactctggcagggaacctgttttgcaagttttgctggtaaaaagttctaggaagggggctggtggagaacagagtggaaaagaagtatcaattgaaggtttttcaagacctgagttttcaaggtaactttatcctgcagagagagacacgcatggccgctgtaggtttttcttccaccaattaagtgcattgttagacagggaggggcagattaacgaacgcctataattttgatcattgttttttgcaaaacagctcaggctttgaaaatgaagccatcgttcccggctaag

SEQ ID NO: 60179 - DNA, 1801 bp, Homo sapiens
tacaagtaggttttatgcaaatgacgagagtttcactgggaaaaactgcaaaagaaaacagcccagacatggaggggggttttacctgacagctccgaaggaagaccctggagtccgttccagacaaaaacttccagaagaattagattttctgctttaactgccgcctcacctgtggagctctgggtacaggtaaatatgcggggtttttttcttccaagtttttgccaaaaattatttggaaacatttcgctctgtttctcggcattgttctcttggcaggaagaagtgaatcaataagcccagctttcccatagcaatgttcgtgctaaagggctgtttttaagggcttttttttttttttttattgaatgaactgagatttttgaatagagctgaaaacaagcgatgcattgtgcgttctgctgattgtgcccggtgaatactgctataaaagtgccacagataagggttagatggacaatctgaaaattgagatgctccatgtatttcttatttattcccagatgtgtgtgtgtgtgtgtgtgtgtttgtgtgtgtgtgtgtgtgtgttcttttactcttacgacaaacctgaaattgagactatgggtagttttgtattttcacattgtaaaaatgccaaaaataaaatccatggaatgttgcagaaataatctttgaatcaggtttatgaacattgcacttttttaaaagtatgtatctgatgcttttctcaccgaggcatttttcccagactagaaaaaaacagtcctgatagagacatccagtttttgagcttttagggaagcaggatttctaaattccaagaagatagataaagacttcttggaggaaggtggggtgtgggtgataaaggtagtttttaaagcatggtttaaaagaaaatactggtcacttgggagtatgagggttttttttgtttgcttcggctgccagtgaggataagtaaacagtcttgccagccatttggatgtgatagcaatcactggatgcggctgtggatctgtgagttagctgaaaggggttagttcagaggcatcagttgccctgtgagtagttagttccaccaagcttaaaaagaacacaaagaaagcctattgtttcttccacacagtgcatggcagcgtgtgaggttaaagcggagttcagaatcatcgaaagatacctgtgaaatgggaatttggacttttgaaactaaaactacttaggaataagtggataggctttcaaaatgttttaagaactgcctcatgtgtgagaatgagacctcctgaaattttgcagttagataatgtggattaatgccagaactcacattcatattaaattgttaccacagttattgcaaaacagtgagtgacaaagaactgtgcctccaacatcggaagttctgggcgttgagttctggcttcaccacttagtggctgtataactagaggaaagtaaattcatgtccttaggcctcagtcatcatgtccataaaatgggatgccagtagctagctgtgttgtgaggattaaataacaaaacagacgtagcacagttctaagcattcatgttccaaatgttaatgattgtttttattgactgctgaaatggcattggatatttagaaagtgtttttatattctttacttcctcttatcattacaagtaatgactagcagtcaagtaaggctagtagtctttttttttttaaaaaaaaaagacagggtctcactctgccacctaggctgaagtgcagtggcgcgatcttggctcactgcaacctctgcct

SEQ ID NO: 60180 - DNA, 1158 bp, Homo sapiens
ctcccagcagcagcaatgattctgtaaagtaattaaaatacaaaatgttaagtatgccaaaggagccagggtatttatatttttatattaattatgcttttgccacttttttctagacaggctacagaagtgatattaatttactttttactggtacctactgataggagctccagtactgcacagacttaaaattttaaattctacctgcctgaaatttttcttggccatacaagtagagtcggattttaatgttacaggtattttcggagtgagaacccaagtcaccaaggggctgtggttgctacagggtgcagaaggagcctaggagtcgaatatactgtcctttattccttctgtattctagacgttggcacttcctcccttgcctctatcccagacagaaacacagcccataattatatcctacatccattgtatgtaagagacaaatatgtttttcattgtgctatttttagccacagtgtttctagctggggaaaacactctcttcattccagggttttcttaacaatttttccagtttttccatgtcagactattcagaattattcaggttccacactcctgggagaaggctcttaatgaagtattgagtaggctcatcgagggggattctagagggattttggcatctgagctgctgagcctgaactcattctatgacagatgatgtctgtggtcccatgaattaggctgcattgaggactctcattcccagcactgtttgggggcactgggaaaaggttgagttaccttatcccaagggtagatctataaggagaaaagcaaatatttatttatttgttttaaatttctgcttttatttttagatataggaggtacatgtataggattgttgcatgggtatactggatccagataatgagcatagtacccaataggtagttttttaacccacatcccacctccatccccactctagtagtccccagtgtattttgttcccatgtttacatccatgtgtgctccatgtttagcccccacttgtaagtgagaacatgtggtattgggttttctatttctgcattaatttgctaggaaaatggtattcagctccatccatgttgctgccaaagaaatgatttcattcttttttatggctttatagaattc

SEQ ID NO: 60181 - DNA, 1080 bp, Homo sapiens
tgaacatcataacccataggtaatttttcaaccctcacccccttcccaccctccctccttttgcagtccccagggtccattatttccatctttatgttcatatataccaattgtttaactcccgcttaataagtgagaatatgcagtatttgttttttttgtttctgagctagttcacttaggataatggcctccagctccaaccatgttactacaaaagacgtgtttcattcttttttatggctgtgtagaatattcacatatatacaggaatatatatatatatatacacatctatgaatgtgtagaatattcatatgtatgaatacatacgaatgaatatatatgtgtgtttgtgtgtatatataggactatatatacacatctatgaatgtatacaatattcatatatatgaatatataagaatgaatatatatgagtttgtgtatgtatatatacatatagatcctgttttagaagcccagtgaagctttttattacacttaattgtcgtagcgttcagagattatctttgatcaataagtagcgatcgcattgagcagagcactttacacctagtgggttttagcaaaggcttgtaaatcagatgggctgcgtgcagtgactgaagaagtctcctgcctggattcggatcctgccttcattacttgctcgtagcacaggctttccactgaagagcatatgaagttttgttcatattccaaataaaatagagcatctgaatttccaatgcctcttgataaaggaattagtggtctttaagtattacattattctctttgaatgtcatttttggaattttcacagaaatgatttcttcagaaagaaaggcactgaaaatttaactggaagttcctctcggctggctaccggggaggtagagagcagagagttctcctgggtgggagggatttctagaagctctttacagctgaggcccttttcatcgctatttattaatttgacttgatcagaagcaatccagttttgaaggtgtagtttctaaaatctctttatttcaaagaaagtcatcctgaagaatggtgtcatcccagatg

SEQ ID NO: 60182 - DNA, 1952 bp, Homo sapiens
gtccgcttattgcaacctccgcctcccggattcaagtgattctcctgcctcagcctcccgagtagctgagattataggcatgtgctaccatgccctgctaatttttctaattttagtagagacagggttttgccgtgttacccaggctgatctcgaactcccggcctcaagtgatccgcctgcctcatcctctcaaagtgctgggatgacagacatgagccagtgcttccggccagcttatcctaacggcaggaagctttgatacttttacttcctgaccacagacttagtaggcagcaggaacagtcttcaacttcctggttgtataattacaagagccaatgtgaaatattatgcatttggagaagcccttctctagagctcttatagaaaaggaatgtacagccaagtttatgggaagcatgaggatggtgagtccaaagtcaaggtaggtgatagcattggtggccccttgcagcaccgggagtctatatggcggtctaacttcgcaccccctatttgtcacttcatagcactcttcactttcactccgtttcacttgctcatgattaagcaacaaacgtggtaatggtgtttcctactctgagtttcactagatttagtaaacgcacatgatcatgctggtcccgtcgaagtgacgataggagtcctcggagctgtggtctccgccctggctggttgcacctgctctgtgctctgctcagatcatacaagatggagagagcagagaccccatcagagagaggcttctgttggctgcagtgtgacactgtagacttgccagaaagggctctctttggacctactacttgccactcagaagcaaatgggctgcagcctcatacgtttttggagtgaataagagaactaagattctgatggacccttggtgattttctctcttcaatattatgaatgttcatgaatgcccctcagaaggtcacagggatgtcagatctcattttctccccttccccttccccttccttttcctttccgagacaaggtctctctttatcactcaggctggagtgtagtggtacaatcatgtctcactgcagcctcaacctcccgggctcaagcaatcctcctgcctctgtctcccaagtagctgggactgcaggcatgtaccatcacaccaactaattttttttttttttcttttaggtagagccagggtctcactttgttacttaggctggtctcagactcctgggctcaaacaatcctcccactttagtctccccaaaagtttagatcaaaggtgtcaaccactgcacctggccaggtctcattttcatagcagtcactggtagtaaggtaaatgtgctgcagataatcgtttggcctgtgttttggagggacctttttgttttttaattgtctctttgaattttgcacaaagaagggttgcacgggctccgttcatctttaacttattatttgcatccttttttatgataagttttaagactactgaagaaagcagctccggtaaagagcctcacaaaggccaattttcaatttctcccttgtgggctgtgtgtgtgtttatgacggtcagaagaagacagactctcatttaaaactattctctcttcaaagcaattataaagtggccccatcatagataaacttgaccccttttaattgctggttagattgcttcttttttctctccctgttgtgaacaggactgcagtgaccatccttgtatctgtgcatgtgggaacgaatctgaaggacaaatttctagaatgtcaagttggattgctagttttggaaggtattgcccaaactttttctcaaaaacactcagtttattctgtcgatatgaatgttgcaggggatattatggtacgttcagagaatacagttcactacagtgatgccaatgtgtgaaatacacttgacatgtgggtaggaacaca

SEQ ID NO: 60183 - DNA, 1666 bp, Homo sapiens
ctttagacataatttcaaacactagctcctgtttaattcagatgcacagaatgcattaaaaccacgagtgtagtggacgtgatttatacattctcttagcacaaatcagtacctatcttcactgtaattagacttttcttcctttctccttctcaaaagctacttttgaaaccttatgttttccctggacatattttctgtacttcataaaatagctcagttctgcaactaactgcaaatatttgcaaaagggaacaaatgtaaaataaacgtcccctaatgcagtgtttggtgaagaaacatatgtctgacattagttggttaacctgaaaaatagtaagaaacaactctacttaggggaaagggggtagaattgagcccgtactgtgcaaatcaagagaaagctataatttacgcaatttttattaaagagaatacaagtgctgtaggcttggggtggtgctaggtcatatttaagcctaattgagctttttctatatcattagaaaaatgggccaagtttcctatattatagggtaaatacaacattttcttcctgcaaatattaaataccactggctttttaagacgtaaacatccaaatctcaaatgtctttattcatgccaatgcaatacaataaaaatattccccatatacacttaaatcactgcaagtaagccttagaatccccacaagtattattacttactatatctcagaaactttcacacacattatttcaaatatagttctcccaaaaaaaccctgcggagagatacctgtaaaccaaggctgagactagcctagacagttcgttctttagacaacaggagtggagatttgaacccagctattgtgactcaagcaagcctagggcatgtttctgagatctctaaggtgtgcgctgtgaaaccggtggctcattttatgggttggatttccaaacacgactatcacaatcatgccaggaatcaatgactgacttcttgcctccgtggcctgaagttctcctctgcacctcctacctttttgccatttcagtgatgcaccaaagggtggagttgaagaacatcagttttgctgctgcttgttggcaatactctcaaaaaggcgtggggagggagaggtgtaactcacccctgaagtcaagcctggagattacttgtcaggaatgtcaaaagcatttgttaagcaaccttcttcctggcattttaagaagaaagccgcatacatagatcaaatcccttccttcagaaacctgtactctctgaacagagccttggaattcagcctagagaaagaatacttggtggttcatagaacttggttcacaaaagagtgcttgctgcccacgcattttgcacaatgactcccaaacacacagaatgcacattggcaacaattttacgcgtgtttccaaaagtgctgactggaattgaagggacacatttggcactttttttttttgaaatggggtctctctctgtcacccaggctggagtgcagtggcgcaatctcggctcactgcaacctccacctcccaggttcaagcgattctcctgcttcagcctctggagtaactgggactacatgtgcctgccaccacgccttgctaattttttttttttttgtattgttaatagagacggagtttcgccatgatgg

SEQ ID NO: 60184 - DNA, 1383 bp, Homo sapiens
cttgattgtttgtttaccagttctcaacatcttcagtgtccacttggttactaaaatgtttactccttagcccagtgtgtaggcatgtgcctgtaatcccagctactcaggaggctgaggcagaagaatctcttgaacctgggaggtagagattgaagtgagccaagattgtgccactgcaatccagcctgggcaacacagcgggactctgtctccaaagaaaaaaaaaaaagaaaaggaaagaaaaaattatccaggcatagtggtactcacctgtagtcccagctgctcgggaggttgaagcgggaggatcacctgagcccaggaggttgaggctgcagtgagccatgatcaggccactgcactccagcctgggtgacagagtgagactctgtctcaaaaagaatataaaaataataaaaataaaataaaatgtttcctcttgatcacaaaaaaaaggatatagttctatgcaatcatgtctgaaacaggatacgtgtgtcatgcatccctgagttcgggttacctcaatgacatgaccatttacctaatctttgctttttcatctgctctcaattgaaaagaaagaaaccattaattatattgaaagatgctgacttgtaagcttctcccctctcctggctcaggtcagttgctcagaatgcacccagcaaagattggctgaacaaagacagggagatgttgtgagtcccactgatgcccttaacaccgggcattgttcaacttggggtcatttgtgaaaatgatgggaatgcaacttcctcactttacagatgagaaaacagcctcagagaaatgctgggatatgggatatgagttggtctcatagcctgtgagtgccagagccagctcgaatccaagtttctgactcacagtgactcttatccagcaggacgtattcttcagaggccatgtgttgaaaacagttaggtgggttgggggctgcaggccataccattaggaaatggggggcatgtcctctgggtggttcctaagcatttggatgttacagccctgcctttctttattctgttgttctagaagctccaacctggtatgcttttaaggcagatatggccacaaatgaagcacattcacatgactgcactgcctttctggatgaaacaatttgaccaaacactggtgttgagacagttggtgatttgggctttgccacgtggtgggaatgacacaataaatatattttgatatgaattaggtaaagatctgtctctaaccttgggctatatgtgaacattaactgcccattggatactggggaactataaatgtctccgtccaactctgttcaactctaatttttttttttttttgagacggagtcttactctgtcacccagg

SEQ ID NO: 60185 - DNA, 1871 bp, Homo sapiens
gccaaaagagggccgggggccaatctggtttctttcaagtgaaattatgcttctcaagcagagaatgattgcccacagcagttaaaccttgtttaatggtaattaaattgcttttcttcactttgaaaaatctcttaattttctgtacaaaggcaggaagcatttttctttgattctacaggatgtttctaagtatggtgtaatcagttcatcttaccttgccgggctctgaaagaatgagtgtgtgggatcagatttagaaatgcctcaaaggttagaaagccgagtgctgccgattaactcaagctcagatgaccaaaaaaaaaaaaaaaaaaaaaaagctgcttttcccctcacttctccctctggttctgcctcagtactttgcttaggagtttctaaaagcaggcacagttgcctgcggggctggtgtgtgtcaccttcgcaaagtgcagatgaggtctggcatgtcccatcttgttcctgcctgactacaactctgcacacagacagtgttgatctggcttggagcccatagtggcaatccttggagtggaggcagcagagatctcagttcttcctagtgcttgagaagttaactaactgtctttcccatgaggaaaatgttttgagactgtagaagcagagaagagacttcgccaaagcccatagaaaataaaaagcaaaccctcaagcatgaaaatccctggccctggagtaagtgcaggtgataaggcttgctatctgatgcctcattccatgtctctggcttcccattgcctaaattaagatgtcctgaaagaaaccttgggaaaaaaaaagcacagtccccacatttgaagtagaaatagaattaaggagaaattgtgattttcctgaaggaacagaaccaacactggttttcaaaagccttagttttacattttagtagaaactgttagcagtaggaggatttgctttgtgtgtgtgtgtgtctgtctgctttgccttattttggttctgaccataccactgctatctcagtcttagaggctgattttgtggcccagagtgtttcgttcagatatctttgtgttgaggtgatattgagccagcagccaaagaaatgcatggccaagatatggaatatctggtcaacagagaataacaacaaagtgggacgcatcataaggtcataggtcagtgaaaacagctgctagccatttatatgcaggagagaaagaaggcccagggagttggaaagactgaaggtattttggactgagcagagcaaagggatttggggacatataaatgtatgaaacaagatggtcaggaaaacaatttttttcaaaggtagcatgaatagagtgaggtaaggaaacccatggccatggtactggtggcctaatgggaaaaggcagtgtaatgacttctacatggagacttcagttctgcccctcgtactgttgaagaatattctgtccagagaggctcttcagtttctacctggttttctaatggctttaaaaaactttggtgtattgggggaatggaaacaaagatatttactagagaagtgtttggcaaaaagtgccaagcttattcctgagaaaggatggaacggcgtggggggtggagggagggttggaaccatactccaaattcccctgaggcccacacgtgttcaccagacatctgtggggagcccggatgagatgtggggcccttcccctttctcattttcttttttacttttagatcctggatcaaaatgagtccttgattccctcatcccatcccaggacccttttttagttgcattaccacctagtgaagtctaccaagtcttgatttgagaatcaaaacaaactcagatcaaagtcaacctc

SEQ ID NO: 60186 - DNA, 1761 bp, Homo sapiens
tgtgtgttcctaaaaaagcctctggaaaagtggtttaggaagcttctgggctaggagagacaccatgaaaaacaaaacacaaagtatgtgagtcagttatgatcaattgtgccataatcgacatttcagttgtatagtagttacactatgaaaagcacagacatatttaaaaagacaattttgaggccaggcatggtggctcatgcctgtaatcctagcactttgggaggctgagtcagaaggatcaattgagtccagaagctcgagacgatcctgggcaactttgtgagacctcatctctacaaaaaaaaaaaaaaaaaaaaagccaagtatgctggcacatcccagctccttgggaagctgaggcgggaggatcacttgagcccaggagttcgaggctgcagtgagctatgattgagccactgccctccagcctgggcaacagaatgagatcatctcttaaaaaaaaaaggagaaagataattttgagattcaacatagcccactaacagcttcatttagacatcataccttttgtctagacttgacagaatttgttaaatactggaaagttgtattttttatcttgtttcccctgttctgtctgtgaatagagacgtttgttctttacctagtttataggactgtcatgaggaaaggtgacataataatgggttcacagtattggaagggggaggacaaaatgcctgtttacaagagacccagttacagagctatgtgaagtaaatactgaatgtcaattctaggtaacgatcctcaatgtcacaggtacttcacgtattaatacctctttgccattatacatatgtccttctccaaatgatggctctttgctgtaaaagtttgtcttctaagctggttgtgtggaatttggcccctaccttccacattgtcttataggagtgcatttaggccaggtgtggtggctcatgactctaattacagcactctgggaggctgaggcaggtggattacttgaggtcaggcgtttgagaccagcctggccaacatggtgaaaccccttttctacaaaaatacaaaaattagctggacctagtggtgggcgtctgtaatctcagctacttgggaggctgaggcaggagaatccttgaacctgggaggcagaggctacagtgagccgagattgcaccactgcactccagactgggtggtagagcaagactctgtctcagacaaaaaaaaaaaaaaagcatttaatctggtgctgagctgacctcttgtactctgattttttcattgtttagattggaaataggtcctgagttctaattctgtatttgggacttggtgactgcttctatcccagtctttgatggtttagacagtggaaccctccatgggggcatgtgggtgatcctcttgtcggggaaaaaagagggtgagtgactagggggtgggctaccgtaaccaggactctgaggataggtgcagggtcactgatgactgggaagagttgtaggtcctgccaccatctattttgcatgggaaggacatttgcctgagctaagccatgggaaaaatctaaatttagatacctgagctctccacagcaactaagccaagacacagtagacagaatgttttggcctttcagaatcagtattttacatacaaggactcgatttcacagaaaacccttctcaatgcttatgtgtatatgaaaagaaagtttgacctgcaggaatcattgtaatgtatcagatccatatcacagctcaa

SEQ ID NO: 60187 - DNA, 1443 bp, Homo sapiens
cacatgtccacagagaaccgcacaaggacttcaaggtgaaatagtggctgatcaagtcctaggagtctgagcaatcaaacattggcatgtgttaccaattaagtagagaggtggctgctgttttagaggcttgatgattgtctgtctttaagagtcaatattggccgggcgtggtggctcacacctgtaatcccagcactttgggaggccgaggtgggtggatcacaaggtcaggagatagagaccatcctggctaatacggtgaaactccgtgtctactaaaaatacaaaaaattagccgggcgaggtggcgggcaactgtaatcccagcttttcgggaggctgaagcaggagaatggcgtgaacccaggaggcggagcttgcagtgagcccagatcacacaactgcactccagcctgggtgacagcgagactccgtctcaaagaaaaaaaaaaaaaaaaagagtcaatatttgtgggagtctcaatttaaggtgctaggtaaattgggagttccatctgaggtttctttcaagataaaatgccttataaaagtactgtaagtccacctggccaacatggcgaaacctcatctctgctaaatatacaaaaaaattagctgggcacaatggtggctcatacctgtaatgccagctacttgggaggctgaggtgggaggattctgtgaatctgggaggtggaggctgcagtgagccagtatcgcaccactgcactccagtctgggtaacagcaagaccctgtctcaaaaaaaaaaaaaaaagagaaaagtattgtaagtcacttcagtattagggatgggggccaaagtccactcacgtataaaaatatccctcagaggaagacttctatgtgtgtctcatgcaaccactttatgctgtctctgaggttgttcattccagttttcctgcttttctgttccagacttgggctgataccagagagtgtggattgcctgcagggcttcatgcgcatttctctgtgtatttaaatactcacggaagattagcaactatgcataaactttccagttgtacttccttaataatgattactgctactctttgttggtagctaagggaagcgtctgcatggaggtggcttagaattgacaatgtgcaaaattctgggtcgtttcatgggggctgggggaaggcttggaaataaaggcttgggtcattcccttgtgtttagctcttgcaggaaactcttgcaacaccatgctgttgtgttatcatctgcctgggtttcgtccccaggacagaacggcatgaatgatgtctttagtgtctcacagaaggaacactgggttcttgagtgcctgccatctctgtctcatcttgactccaaggacattttaacctctcaatgccttgttttgcagccaaaggtatattatctgtctcccatatgcgttctgggagat

SEQ ID NO: 60188 - DNA, 1055 bp, Homo sapiens
ctctctctctctctctctctctctctctctcattctctctttctctctctctctccctttctccctttctctctttctctgtctctctttctctctttctttcttgtctcattctgttgccctggctagagtacaatggcacaatcctagctcactgcagcctcaacttctgggctcaggtgatcctcccacctcaacctcctgagtagctgggactacaagtgtgtgccactacccaccacaccctgctaaatttttgttgttgttgttttgaggagaccaggttttaccatgttacccaggctggtctcgaactcctgggctcaagcaatccgcccaccttggccacccaaagtgatgagtgctaagattacaggcatgagcctctgtgcccagcttggatatttcaaagacattagccatggccttcatgtttatctggacttgagggcttcatatctttgaccatagatgatgcttaagttggtctttcacgtggtttcagatccacagacattttgattaggtcaaataacaatcgtcttcataatgccaccatgtatgtatgtagtcctttggagactattttgacatcatttataactgacaacactgtgactttcatcctcctcttagctcacatgccttaatcccacatgtactgccctgtagagaaatattcctccttcctcttggcttgctttcttagctttgtctctatcccaggacaataactgaacaaaggctcttcattcttggtgcaactcagagttggaagagtcaagggtgaaggggcattgggcagccggccatagctgtcttcttcctctcttaatgtctttgtctctcccatcttcatgtggacattttctctctccttcttctctttttcctcccctcgctgaaaaaaataggattactgttttgaaccgggcattatgctagatgatagatgtacaggggtcagcaagatgggcaaggtttccatcttcatgtatattaaagtttggagggaataaaacattaaaataaatagttacaagggtggtgagtag

SEQ ID NO: 60189 - DNA, 2087 bp, Homo sapiens
gcgctctgtaaaatgcactaatcagcactctgtaaaacgcaccaatcagcaggagtctaaaagtagccagttgtggaggattaaaaaaagggcattctgataggacagaaatcgaatttgggaggggacaaataagggaataaatgctggccaccccagccagtagtggcaacccgctcggtccccttccacgatgtggaagctttgtcctttgcttttcgcaataaatccttgctactgctcacgctttgggtcggtgccatctttaaaagctgtaacactcaggactgcgaaggtccgcagcttcattcttgaagtcagcgagaccacgaacccaccagaaggaaccagacacagtgccacctacccacatcttcccctatggctagatggcaggaatccacaaacacctgccaagatagtattgtgatcatgttaccagctataattggaggtgaggagtttggagtagaaatttgtctgtttttataataacgaggttgaattatttatagctttgtgtctttcctcttctccataagtataattaattttattaggcatctattcctaagagccaggaattcacatagctgctgggaagatgaagacttataaagaccacttgtggtctctcaaggagtctgttggcagagactggcatacataaaacaaatggaataaatattctatcaggaatatgggtaaggtcttacagaaacccagaagaggaaagagttctcccaaggtaagggaacctagaaaaagttacaaaacggaaagagctatccatctatctgtatctgtatctataactatatatctacatctatacctatatctgtagagatgggatcttgccatgttgcccacgctagtcttgaactcctggcctcaaatgatcttcctttctcagcctcccaaagagctgggattacaggcatgagccaccatgcctggccccaagaagggatatttgagttgatcctaagagaatgatagactgctgataaagctaaatagacttttttagagtgttccattatttttgtattttgtagttaatgcttaatatgagtaatcatgctttagaaagagaaagcaccaatcaaaacaagcctattttcttttcacctaggcatagtacttggtatgagttggcctagaaacaactgcatattctactcacactgctgcatggtttgcctaagagtactccatagatggactattgaaatttgggtgtgggttaaattttcataaatcaaatttcatttcccattatcttacacctaattaaagagataatgtgccttctgatgaccctgtaattggcagttgtaactggccctttaactttgtttccctgcgctgcagctcctgtctccagcagttagttcatcatctgtacactaacagtaagctacgcgggcaggcactattttaaaaaacacacacaaagctgtctgtgaatggcaaaggaatcagagcaagtcattactctctagttcatttggctagaaaggtcaggtcgcctatattgacttttcatgaaaactaggcgaactagtagttttcatgcacaatatgtcaacaacctgttatatttgaaattctttttaaattaggtgggtgaatggtgtaaaacttcactatattttctccctgcctgttaattgacttgctaatctcctgccaatatatgtccattttaaaaaacaaacaaccccatcaaaaagtgggcaaaggacatgaacagacacttctcaaaagaagacatttatgcagccaaaaaacacatgaaaaaatgctcatcatcactggccatcagagaaatgcaaatcaaaaccactatgaggtatcatctcacaccagttagaatggcaatcattaaaaagtcaggaaacaacaggtgctggagaggatgtggagaaataggaacacttttacactgttggtgggactgtaaactagttcaaccattgtggaagtcagcgtggagattcctcagggatctagaactagaaataccatttgacccagccatcccattactgggtatatacccaaaggactataaatcatgc

SEQ ID NO: 60190 - DNA, 1092 bp, Homo sapiens
catctaacaggtttggttaactcaagaagttctaggaaatgttcaaacactgcagatatttatcaaggggcatttttaggagtagcagagtgtcaagaactcaaattgacatctagtggcaacacttctaaagattggggccccgtactatatacaatgctaaatttccaatgctgtgattggaaaagactatgagaaggcctctagtctcttcccactaccatcatctgcagcaggcccacaccacccaaatcaacacaggtatggaagaatcgccccctgccacaggagtgggcagtaagcgttagaacacagattgccgagttctggttctcagtccacccaagtctggtctgtttccctaactgtagaaggaaggtgttagaaatggaaaatccttaatatattctttgattttttcaaaacagaataattgatttttatcatctttcttagtatacctttcacgttctgcacaattattctagattcaaactgaagattgtggttcatgtcaagagtcagtttggtcactgaacactgtctcatccagctgtgggacactcatatgagcttggtcataggtggctcatcttcccccacttactgggtttccataatgccattctcttgggctgttagataaaatatttacaacccatccctccatcatcatcaaagcaatttatttgcacaaactccactgtcactaaatcacatgaatgcatccatctttcttattttcatctttttgaaaattagccagcatgaaaaataacagcaatcgattaagctattgcattgtgaagagtagcttagatttctttctttctttttttcaccctgttgcccaggctggagtgcagtggtgcgatttcagctcactgcaacctctgcctcccaggttcaagagattctcctgcctcagccgcctaagtaactgagattacgggcgcctgcctccacacccagctaatttttgttttattttttttagtagttatggggtttcaccatgttacccaggctggtctcgaactcctgacctcaagtaatccacctgccttggcctcccaaggtgatgggatcata

SEQ ID NO: 60191 - DNA, 1423 bp, Homo sapiens
aacattgaacttagtaatcacctccctaggagtgaaatttcatggtcatatatattgaaaaaacctcacaatataaccaacatgctatctgaatcttgattgagattccacatcataagtgctaatttcagttctgactataaccaatttgttagtttatacttactctttactaaaggaaagaagagtaggaataggatggtgcggtggctcacacctgtaattctagcactttgggaggccgaggtgggtagatcacatgaacccaggagttcaagaccagcgtgggcaacgtggcaaaaccccatctctgcaaaaaattataataattagccaggcgtggtggcatgtacttgtagtcccaggtactggagaggctgaggtggaaggatcacctgagcctggggaggttgaggctgcagtgtgtcgagattgtgccactgcacttcagcctgggtgacagagtgagaccctgtcttaaaaaaaaaaaagagtgagaataatgaaactgtgcacacgcaggccttttaataaactttccccctgtacgcagcccattctagctatatatatttcttggtcccagcctcttcaaataaaaattgttttattcaaaagtatgacctagccttatacaagataagatagcccacttaaaagtggcataaaaggccacttttatgcatctccattttaggttggttacaagaggcacagagagaccaaagcccatgggatgctcgtgagagtaggaaattgggtgggaagggtggactcgggagacaacctgacatctctctacttgaagcctagcaataaggttcaaaggttcctcatgccttgttttcccttctctctacatgattaagatcccattcctgtaacagatagcaatgtgtttatgcagtaaaattagataagggagattactagggaagtcactactcagttagggatgtcagtggtgctcactgcaggtccaggttagtaataagaactctggactagtagctaggagtgcttgaatctagattagttctactttctaactcgatgtgtgacattttttccacttaatttttttggccttggttatcttattggaaaaaatattcaagttgcacaaataactaaatgatgcctgagttttcattcagttctaaaacttctcaactgagcaatctgttgttgaaaggagagtacgagttctaaaagctactctagggagctctgcattcaccaagccgctccatcattgttgggaagaaaatactaaggttgactcattgtcaaagccacattctactcaaactcaatgtacataactcgaattctagccacattccagccaaattgagatagctgttcaaatagtcatggatttatttaataactgacttcgaaattctttacttctttcaag

SEQ ID NO: 60192 - DNA, 6949 bp, Homo sapiens
atagcatccaccccagttctttctctggtccttgcactctgagaatgaagtcttagacagcagaatgtcaggggactctcattgcgtaaaagtctgtgcccttctgcgccttggacagttatggacagaagcctttaagaagaagaaaattaaaactagttaattttttagttaattttagcaacactacatatatgagagagagaaaagatggcattttctgaatgaatgagatgcctctgcattttgcccaactcattggagactcaggatagagaaaagggagaaattatgtttagaggctgataaatttccctatggttactatcaagagatcagactcttattaacatttgcaaagtgtgagcagagaagagcatttgaacaataagcatagattaagtactcctctttccttcattcccttttctctagtcatattctcagacagtccaggctaagtattaatgatcttctttgaagttaaacatacccttgctactttcattacattattatttttatgttcttccttttggagtactcaaggtaaatgacatggcagaatctgtcccagtccagtgagggtgtcacataagaggcccttggcttacctctatgcataactggcccacgtcacatctttaattagaagtccaagttattggctggacgccatggctcatgcctgtaatccaagcactttgggaggccaaggtgggtggatcacctgaggtcaggagttcgagaccagcctggccaacatagtgaaaccctgtctctactaaaaatgcaaatatcagccgggtgtggtggcacatgcctgtaatcacagctactcgggaggcttgaggctggagaatcgcctgagcacacgagatggaggttgcagtgagccgagatcgtgccactgtgttctagcctgggcgacagaacaagactctgtctcaaaaaaaaaaaaaaagtccaagttactgttgcagggattgggacatcttgcctttctcaagttgagcaatattcccaaatataaaaatgtaggatcttagtccaatcagagcagatatttggtgtagggcattttctaatgtagtaccaataaattagacgcatacctcaaccaaaaaacagcccatatccagtaagtaataaggcaatgatttacatttcacatattaccagagtaatgactaatagcatacatgtataaactgaaaagtgactgatgcttattttcagatgggtccaaatttattggataattatggagaataatgtatgttttctgagagttggtagtaagaaaatattgccattgctggccaggcacaatggctcacacctataatcccagcattttgggagacttgaggtcaggagttcatgaccagccacctcagcctcccaagtaactagaactactggtgcatgccaccaagtccagctaatttttttttttttttgagacggaatattgctctgtcacccagattggctgtgttctccattctaagtccagtggttagaaattgtcaagttctcacatctgcaaaaaaagtaaaaaagatgaacctgctacatctaaatatactttgttgtcttcctacaagtcctattttacatacttatggcatttttactgcagtttgaaaatacagtcaattcttgttattcacagtattgatgttctataaacttgccctaaatactgcattagtgagtcctgaatttattagttaatactgaatttcctaggggaaatacagggttaggttcctgtgagtctttggttacctttttatcaaccaatcaacaaaaatccttattttacctgtgtttttgtttgaagacaccttttaaaatatatattattgattcattagcattgaactaagcttatctaatgcacttattttttgtgtaaggtgtatcacagccttcttgagcctaggaatgccaaatagtacttccacaccatacttaagggccatttcattttatttcttatttttaaaatttattctcttttcttatttaaagaaaaaatttgtagatgccgggtctcgccctcttgaccaggctggagtgcagtgacacaatcacaactcactggagcctcaaactcctgggctcaagtgatcttcccacctcagcctcccaaatatctgggactacaggcacacgccaccatgcccagctaattttttaattttatttttttgtagaggcagggtctggctatgtttttgaggtcttaattccccaatgaacatgactagtatattccaggctggtcttgaactcctgtcacaaagcaattctcttgccttagcctcccaaagtgctgggatttcaggcatgagccactgcacctggcttggaccattttaaatagtgaagtcactcacacacacatacacgcatgcaggtgcacacacagacacaaaaagacacaaaaatgcgaaacttgtggcactaaaaagactgtggaaagggtgcttccttacagtatgaaaactgaaacaaaaaagcagagtgttgtttagttagacgccacctgggaacgtgcttgttgggaaactccagttgtccactgtcctgccatgtctatgatgactgcaaacatttgggagtattaatttgagggtcacaaacagattttaggtgatgggcatatttacaaatacagaatctgctagtaatgaggactgactgtataatgctttagtagtctcaagtatgttttttttctcattaagcctttgcttaagatgcaggcaagattgatgctgttggtttggtgcaaaagtaattgcagtgcttcccatttaaaagtaatggcacacactgcaattacttttgctccaacttaatacttggctttattgacttttagcatcagtgcagtttggttaatgataaaattttccaaagcagtgtctcatctgcaggagcaaactatagcaagggccctggccatcagttctcccttctggtcctgatattcctttttaaactgtctttccatacccctccctccagtgggcttggcgatgttgcattaaatagcaaagagaaggaaactcctccccagtcctcactgaccatttctttttccactcagtcctgctcagaatgtagaagagaagttgaatttaattcataaattcagcagcttgaggactgtcagttttgtcgttatttagtgaaatagtaattgaattgggctacaaggtcattggaatctgctgtttcatttcatatcattttacgtgttattattctaataagaatacaaatggagtttgatgccatttgctgatcatccatcttattgatgccattgaacagaacgcagaaacacaaagggatttataaggcatttcagttttgatgtcctttgaaaaatgaaagtcttttcagaaatgcaaaagacaaaatgacttagaattccatctcgttctgcccggtttgagggcatcccttcctattccttagatagctgttaataagagtcctgaggaaaactgggtttgaatttaaaaacaaaaaatttttaagagacagggtctcgctttgtcacccaggctggagtgcagtggcacaatcatagcccctgtaaccttgaagtcctggactcaagtgatgctcccacctcagcctccctagtagctggaactactggcacatgccatcaagtccagctttttttttttttttttctgagatggaatctcactttgtcaccgaggccgtagtgcagtggcgcgatctcggctcacagcaacctctgtctctcaagttcaagtgattgtcctgcctcagcctcctgagtagctgggactacaagcatgtgctactacgcccagctaatttttgtatttttagtagagacagggtttcaccatattggccaggctggtctggaactcctgaccttgtgatccgtccgcctcagcctctcaaagtgctgggattacaggcatgagccaccacacccagccaagtccagctaattaaaaaaaaaataaaaatcgtagagatggggtctccccgtgttgcccaagctggtgtcaaattcctgacctcaagcaatcctcccacctcggcctcccaaagctctatgattatagatgtgagctgccatgcctggccttaaatttttcaaaagcttttaaaccaatcttaaaatgttttatcctcttagaatcatgtccctagttttatagcttggaaattcttgctcttttcaaattgctctttaactctggcctgattggaaggtggcagcttttcaaatacaggtcatggcagcgctcaacctggattcctcagttgcagaagactgcttttgctagactgctgaatttacttccaacttttcagatgtttctgaggttgaccctggtgtggttcccactcaaagtggagcaagcaggtgggtggcaggtctcttcttagcggcttcctagagggaagcctcgtgagtgggatgggggacaggttgccctgggggagcccaggaatggggagacaaggccacctgctatgcagatgatatagtttggctgtgtacccacccacttctcatcttgaattgtagttcccataatccccacatgttgtgggaggaacctggtgggaggtaattgaatcatgggggcggttttccccatgctattttcataatagtgagtgagttctcatgaaagctgatggttttataaggggctttccctttcactgggcactcattcttctccttgctgctgccatgtgaagaaggacgtgtttgcttccccttcaaccatgattgtaagtttcctgaggcctccccagccctgcagaactgtgagtcaattaaacctctttcctttataaattacccaatctcaggtttgtcctaatcgcagcatgagaatggcctaatacagtaggttttcctgagtcctctctctgactcaccctctgacgggcaaaagacagtggcagcactgccagcaatcagctgggaacttctcccctgtgatagaaagcagtgcttgctggcttccctttgtgatgcttttggacagcagctctatggacctatgccttttgtcctttgaggacggacgcacagtctgtgcagctcgaggacgccgtcatgggtgagatgctgtggagtgtgatgacgccacctcttaggctgtgtgtgaaagtagcgaggagaggcagggtctgcatgagccactttggagcaggccaaaacactgtggagaagcacattacagccacagtggcggtgtaaagggtcagactgaccactggcttctggaaagtcttcatttctgaaagactgtcaggtagaagatggatgagagttactctgtgaggccggaaacctagaactcagaccattgtgtgcagaccagggagaggcagtgtttggagtgagataagcaggaattttgaaattacacagacccggttttgaatttactcatgagctgtgtggcttagagaaagctgtttaatcccactgaccttcatctgtgaagtgtccaaaaataatacagagcttgcagagttgtgtggataagggataatctatcgaaagcatgtggcaagtggcagacacaatgtgggcactaggcaagtggcaagtcccttgtattgagtcttatttgtctattcagtgaatatttggataccaactctgctgttctgggcatgatgttagccactggggagacagaaggaatgaaagagatgagtaacctaatgtgtgctgtctagtggggactgcaaataaagtgggtgttaccactagcgtgctctacagtgttatgctagagagaaatttacttcctttggccactcacttccttgtttttaaataagaactgagttaaagttgctaactgtgaagactgagtaatttgaatctgctgttggtgtactcagattacttttttttttttttttcttggagacagagtctcactctgttgctcaggctggagtgcagcggcccaatctcagctcactgcaacctctgcctcccaggctcaagcgattctcatgcctcagcctcctgagtagctgggattacagtcacgggccaccactaatttttgtatttatagtagagacagggtttgccaggctggtcttgaactcccaacctcaggtgatccgcacatcttggcctcccaaagtactgggattgcaggcataagccaccacacccagctcagattactgtttactcaaattaatggggatgattgaggatgaaacagtgcagggattccccattgttttgttttcttctttgcatttctagtgtctgtttttttttttgttggtggtggtggtgtttttgtttgtttgtttttttttttaaaaaaagatctgcagaggctattgtgtcctttgcataacccaagtccagtagcatccttgacttcaaagtctgttggcattgatggcatctgactcagtcataactatctttaatacatcattataaaatctacaatattgctcaagtgaagatattatcatgtaactgggagatattactaattaatgagtatgtggaaaattttccctagaaaatgaagtgtttgtgaaagggactgaaggatttttgcagaagagtctatgagaaagttattataaaccaaagggttatgaattctgcatatgaaacataaatagctattaaatattttatttcaatcaaaaagtgtaatgaaattagagcttctcattatgaatctgggatttatatggaaacttataaaactaaaaggtaatacattcaaaatagaagcacagatttaccaattaactggagttaaaactttttacttctctttacagtgacaggagaaaaatacatcctaaatatgttattatggtaaaaaaataatattgctagtggacagaaaaaatagtcgtt

SEQ ID NO: 60193 - DNA, 1002 bp, Homo sapiens
attgtactagttgagaactgatgaaataaaaccataactcgattcatcaaactgtttagaattcaaatgttgagacatatctcacttaataacatgagggtattttgtttttctttttaaattgttcactctggcctttagtagccaccagggagacatgtgagtttggaagggcatctcaggtcaatcctaaaagcctgcagaagaactgagctggcagaatataatcctgcaggttgaaacttagccagcctttgaaattattttcatcgggaaagtactacaggattttttaaaatgacatagtagacaccctactcagaagcctactccctaatttttttttctagttactcatttgccaagatgacttgtttatttgaaagttgttgtgatggaagttggattatgtatattatgattgcttttcttcctgtgtattattttcatttgaaaatgtcaaagtatctcaccattttcctattttatagactagtaaactgagttatatgattttggtgaatttaagcttccagggctagatctccatttagctttctcttctactatttagcgcagtccatacaaagctagctgcaccagagagcattttatctgaatcctattcttgttcaccatgccttcagcaagcacattttacagagcgtccacacgccggccaatagaactgcaggtgtgagcagttccattaacctgtcctcaagccttagtgggagagatggcacagaattgctatataggatgtgaatgctcactcaagggacagagcatacaaggagaccagagaaacagaccatgggaacactagagggaacaaaaggataagaggcagtttgggtcagggaaggctgaggcttgaagagtgagttggagtttgccagacacagaagagacccttggaagcaaagagatcatggtatgtcctgtgcagagtttaatgagcacagcgtgtgtaggggacatgcttggacatgagacagc

SEQ ID NO: 60194 - DNA, 1033 bp, Homo sapiens
attggaggatttttgtttagtggattaaaaattcaataatacttgaaaactttgtccagctcttcaacagagatatttggatgagttttctggcttttctaatcaggaaaggcttgttggagaattaaaggagatatgattgaggaaataaaacacaatacaagatttttctggatttattatgaataaaaagggaccccagaggattaagtggatgtagtttgcagttgaggttaagtggtcatggcagtttaccgtggacattgtttaactgatggaaaactccaaaagactgaccaaggaattgaagtagaccaatttggaccaataacttggagctcagaattaaccactgtatttctctattccaaatacccattcctcttccctggaacctcaggctggccacacaaactttcttgaaaattcttggggttctgcctttacaggaaggccatttgcctcactcatcagaagtattagaggtttattctgcacaaccatgaagaggttaaagagaagggtagggaggccatgagggttcttacattccatcttgagtcaaccatctcctgttaccctctgaaaagtggcagaatttgtcccagacttttttttgttgcacttcatatctactatggaattacatttatagctaatgcattaactctaaaaatggagaaacccattgctctgctgttttcatggtaaggaaaaactgctgagtcatgattgacatgggctgtttcaagagtttccacggaatgaaggtaaacgcttaggatatcgcagcctgagtgagaggcactgcaaagtgtggccgctacttgaagttcttcatggtgagtggagagggaatcctgagcgcatcctggattagaaaaaaaaaagaagaaaggtggcctgaaatatgatctgagtatatctggaaatacgcagacatctagtacttcacttgcagcactctgtgaaccagaaggccaatttctacatgctacaagctgcacttcaagatgcacccaaaatgcatgct

SEQ ID NO: 60195 - DNA, 1015 bp, Homo sapiens
cccggccaggatccacattttaacaaggggtctccaggtgattccaatgcagctgagttgggagttctggctttgtacattgcacagaaccttgtataaagcagagactccctggatagctattgaacaactaatgaataaatcacattaaaagctgagtttcttctcattgacttagagggaggttacctcataattactcaaacatagaaaacgtaacccaacatgtaccattttcctatgaccattttgagtcttaaaaacgtggaaacccttttcttcttttaaaatcttggatttgttatttcagatcacctttgatagtttttctttctttcattttttgtgtaccctcactgggtagtgtttggccttcgcgaagaaggatagagagaaagcttgctaattggggctaaatacagattatgtgcaaaaaaagaaattgctagcatctaaaaataagcactctacacgtgtatagttttataatcttatcagctgtgatcttcaggaccaagtacgtggcaactacaggaggatggtctctgtcgctgtcaaaagctgagtattccaactctcacttacttgataccaaccacagaaggacatgagactgtaatacactgggattttcaaaatgcaaaagaatttgatattaaaggcttgttagctgtctaggaataaaacaagaatggggagaaacatataaagtaaggaagattatctctctacagctaaaaccaggcaaaaggaccacccactatggcatattgtgaaaattttgggggctacttttgtttgtcacaataattggagcagttggttgaagggtacaatgcagcagggccatgttctgttaaggaaacagatccactgactacatttgtgtttaataattgcatgcttagtggtctgtttctcctcagtgtgacgtaagtaactaccatgagtttgcctaatggaagtagcatccacacacatccagcacatgccccttgatggacagacagggaag

SEQ ID NO: 60196 - DNA, 1246 bp, Homo sapiens
atataaaaagaggccttgggtctgatgggtttgagaattactggcatggacagcctcattagttcctgtcttaagacagaggataataaaagttaaaggctcagacttaatcaaagggttagaaataggagtagcgagccgggcgcagtggctcacgtctatcattccagcactttgggaggccgaagtgggcggatcacctgaggtcaggagtttgagaccagcctggtcaacatggcaaaacctcttctctactaaatatacaaaaattagccgggcatggtagtacctgcttatagtctcagctactcaggaggctgaggcaggagaatcacttgaacttggaaggcggaggccatggtgagccaagatcgcaccactgcactccagcctgggcgacagaggaagactccatctcaaaaagaaaaaataaataaataaaataaaataaatagtaagagcatatcccacaggaaaagaagctgagagacaatcttggagggaattcatgtatggggcaacttgtcagaatgaacagagcttgggctcaggaattaatgcactgagtttggtgctcttctcttcaactttcagaattcaactatcctgaattctggcttctgggggtcccggcagggtcagaatgaatattagagataatgaccttaaaacacctagcacagagttgcaaaaaatgttacaaattgtaaatactgtatataataacgctaatgtcatctggctcttcaaaatggaaaatgatgaagctatcttactggcttttagagaagttgaccgagttttctacaattgctcatggctagattttggggccaggctctaaaatccaggttctttagattattttgagcctaacaaccaacttaggtttgacctgacttgaatcactctcttcctctaaaattccctgtactcttggctttgtccatacagaacctgtacatcaaattacaccaaatatcacaatcctgtagctttctcatggcaacgtaagtgcctttgatatgtgagttttttcctttttttctggaaacagggtcttgctctgttgcccaggctctgatcgtagctcactgcagccttgacctccctggctcaaacagtcctcccacctcagcctcccaagtagctgagaccataggtgtgcaccaccacgcctggctaattttttaatttttttgtagagacagaatctccctatgttgctcaggctggtttgaaactc

SEQ ID NO: 60197 - DNA, 2959 bp, Homo sapiens
gtgttggccgtctttgtattaggacatctaactcttgtgtttgacttaatgggattcaaatttgcacgtgtgtggttttctgaatgtggcctacagtttcacttggatcttcatattctttttcatcataatctgtaaaagcagaaaaaaagaccattggaaagaaatgctgtatgaaactttctgaaaatggatagaaccagaaatgatgctgacaggagttttagaaatgaaaaatagagagtattcagaccaaatataagtaaattagcataaatcagcattctctgatttccacgcctacttacccaagttggttgactcaacagctgctaagactacagctgtgtgaatcctccacatttttttttttttttgcatggaaaagtgtttcagtttgtcattgcttcatcatttcgaattccatattaggttacctttttttttttttttttgcctgaccatagtacttaagaaaaatcttgcaactgtccttcattctgttgaaccaactatatcttatgttttcacttgacattttgttttagatctacttggggctttatttaaatttttttaacatttaaaaaaatttttttacttaaataatgaggcagtgtctcattattatccaggctggactgcatggggcattcatagttcctgggctcaagcaatcttcctgtctcagcctccaaagtaactaggactaacagcatgtaccaccacatccaactagtttttttcatttttttatagggacggggtctcgttatgttgcccaggctggtcttgaactcctggcctcaagtgctcctcctacctttaagtgctgagattacaggcatgagccaccagacctgaccttggggttttattatttgccttcgagccccttcagacagttcttcttggaggtttggggaaggcttctgtaaagaaaacttccttacacctgtttgatgatggtaaaaggtccaggtggagaaagacttcctaggcagaaggaaaaggaagtgcaaagctatgtagcctctacaagagcacatgtgtagtttagggtggctgcataggacctgggaagagagctgggtgatgcagggcagatgactggcaggtaatgaaggtacttatgggctatgctaaggagtatggaaaatggggagtattcaaaatttagagcccagggtacagtgatgggattgcattttttgacaaagctactttgactgccatgtaaagaacaaatgggaggtgagggagcctgattagaaggtccttgatgatgcaggcaaaagatgatgaaggtctcaaagttctttgagccttgactggaacacatttagtgtgacgtgtgtttataacataaaattaaatacgaaagcagaaacattggtgatggagaggagagcacaaaattggggagatattgtagccaggttgaaagcttgtactgctcactgcacaacagccagtaagtcaagagacaaggagttagagtaaggaagatgactttatttggagagccagcaaaccaagaagatggtggactggtgtcctaaagaaccatcttaaaagacatgaatctcaagcttctttttatatttgggaaaggggaacaaggagagggttgaggtgacaggtgaccacagacatctgagcattagcaggcgtccgagggtgttacattgaatattgcattgttacttgtgtctatgccctttttatttcctcagtggttagttttgggaagggactattatcatccttgctttaaactgtaaactaaatcccccccatggttatcttggcttatgtgtgggaatgagcaaagatagtcagcttgagcggttagaagcaagatggagttagttagctacgttatgtttctgtaactgttacgtcttacttgtaggattacaacatctacttggatgaatggtgatgtcattctagcatgaggagcaggtgggattaggttgaggttgaatgggaccatagttctgtcaggacgtgtcatctttgtggagcccaggggtcatccattaagcagctgggaatacagttctggggctcagcagagacctcagcctggaagaacatgtttagaagtcatcaacatctcattaggaaagagaaagagatcgcccaggagaggaaatagagcaaggagagaaaatggtcaacaagggaaaccatgctgggattgagtctctgtggtaccaatggtcttactattgacgtcagagttaaaaaagaagagagttatattcaaattctggttgagttagtctcttattaacatttcctgactcaccaactggtaaatgtccaagaaaaatatatctttttgttttatcagaaaatatacatgctatttgatcactcttcaggcattaacaaatggtgtctatgagaacattttaacaaaatgtcctttctactgttaatacccacagcaaccaacttggaaatcagtcatcatagaagatgactgcaggttctggctttcccaaatcaccaataattcacacctttgtacatggttctgtgcatgatctgttcctaatattatgcaacacttgtgaaatctttaggactttaagtaattcatcgttttgccccaaacctagacactactataagaaacccaacaggctactcttaccagcaataggggttcctgaacaatatcacggaacaatgagaaatcctgcactcatgaattctctttacaaccccaggtgctcaagcatggtttttaagggtgactccctggccacctggtaagtctgagtgacttgcgggcagctgtctttctggagcgggagttattctctgaagccatagaaagtgtcagggaaggctggatacacatcacgtatgtgcatgagaagtaatactttcaacagcagcagcatcttccaagtgataaaaataactcagctttagtcagtag

SEQ ID NO: 60198 - DNA, 2563 bp, Homo sapiens
tgggtgttattaatcattgaaagatgtggctgtgactgctattatttcctgtgttaagcttcccaccagcaaacctggccaagtgctttggcgctgtggaaacagccttcgtgtacacacttcttgacccttcactcccttcatgcccttcttcccatcaagacttaatgattggctgggcatggtagctcatgcttataatcccagcgctttgggaggtcaaagtggaaggatcacttgaatccaggagtttgagaccagcctggaccacataatgagaccccatctctccaaaaaaaaaaaaaaaaatattagccaggcatagtggcaacatgcctgtagtcccagctacatgagaggctgaggctggaggattgcttgagcgtaagaggtcggggctacattgagccgtgattgtgctactgcacttagccttggtgacagagtgagaccttgtctcaaaaaaaagaaaagaactggaaaagaaaaaagaatggtgttcatctccacccagcatgctagagcaggcatgccattcattgtggaggcaaaactcccgcatagctgccaaaataactgctgagtgctttgcgatggagagaaacaaaggaatgttgggtcactgcccgagtcatggggtctctgcctgagccatagaaagcttttgatttctggagccacattgaatgaactgattatgtttaaaattataaaagaaaaatatagcctaagataattgagtgcaataaaccaatttaacttatttgttcttacgtgtaacaattgttgagtaggtaccatggtacccactctattgctaagctgtggaaggagccttgctttggaattctctcagctcctctttcccatcatttccttagctgtgtcccttttcagcctcctgtgctaactgatagcacatgtgtttcagaatggaacctggaaaaggaatgtgtgcagccctcgtaaggatataccgttccacattccatatgctgttagataatatgctggctagaccgtcaacagttaccccaggaagggggaatttggattggaaagaaatcaaaggaattggaggtaacataatggactgcagttaaacagtaatagggtggtctggacaactggacgaaggccagtttctaaattgcaggcaatcccctctgcccttttagaacaaggcaaggtccactgaatggagaagaaggcaggccatcagccttcttagggtttaattcagacacgggctctgagctttgtcttttgttctctttaaaggaacaaagccattgaatccagccagaaaaacctgtgcgtatccatcataaacatccacaaactcttctttaatctcccttgttattctccctaagaagtaaggctccaacataagttcttggttgcatctgacaagtgtcagctgatgtccatgaccccttcgtttcctgtgtcccttctacttgatgcaatgactggcataacgtatttgttggaatgaatgaatgaatggcattggtggctgggcacagtggctcatgcctctaatcccagcactttgggagtccgaggtggctagatcagttgaggtgaggagtttgagaccagcctggccaacatggtgaaatgctgtctctactaaaatttcaaaaattagctaggcatggtggctaatgcctgtaatcccagctacttgggaggctgaggtcggaggatcacttgaacccaggaggcggaggttgcagtgagctgagatcacaccactgcactgcagcctgggtgacagagcaagactctgtcaaaaaaaaaaaaaaaaaaaggaaggaaggaagggagggagggagggagggaaggagggagagagagaggaagggtgagtgagtggaagaaaacaatgaaatccagttctgagggtaaggagcatgccatcaatatgatgggggatgtgatatggtatgaggatggggtctttcaaactgtattgtgtagaccagtagaccatgacaaataggcgcgcgcacgcgcgcgcgcacacacacacacacacacacacacacacgggcttccatgttcttacaaatgttgcacactatatctgactgtgggatcacagtgtacgtttgtataccaaagtctctgtaaagacctgcaatgaagtgaacccctttaacctttcttttactcagtgttcccctattgtatttgactgtggaaccctctgcgtcatacccttttacatcccagaacccaccgaacacagtttcttcaacattggcagaaatttacaaaatcatcgtagtcttgagtccagctgacctgagtgtgaatcaaggtttaccacatagtgtgtgatcctgagccaaattaagtaacctctggttccctccttcctcatctatatgatgaggataatgtgcatctcctaaaaggagagaatgaaggcagttaatgcaggtaatccatcttgcgtgcacccagcacagggtggctcttccctggttaatttccaccctgatgtgtagaatttccctgcaacactctgctaccacaaagaggggcttct

SEQ ID NO: 60199 - DNA, 1734 bp, Homo sapiens
aacaaaacaaagcaaaaaaatgaagattgccaaatatttaaatgtcagttactattaatttaaatgtccatcagggttctccttgaagtcaaaactgctgttttccccaatgccagaactcctaacagtggaccccaggccgtaggaggtgatctagaattgcccctgaattaaaggctttgtgttctgcacacgtgatgcaacctcaggatcggacatgtgttagttcccagcctgtgtcctgtgacaccttggagaacaatcgagactggttgatatttggagggttaagcaaaggacctttcttttgccagctactctgccgtggttgaagtgtcttgagggtggtgaacgggtcctcgctgggcttgtctctgagctgcacacattgacttgacacaggagtcaagtagtaagtattggttgaaggaatcagcgatgtttggctacccattgtgtgctctctaatatttgctagggatatggtgataagggaggaaaaagacccaaggagtaatgaccgagcagctatgtaagtgaatcaatgatgtgaccacattgctttttcttagccgatagttacagctctatgcaactttttctacttattgctggaggtaatcacattccaaccctgaggactgctcccatgctgggcggtactgcagtgacctctgcatttgagctggggtttcttgtatctcacgagggtcaggggcctgtgggaactttttgtcatctggggggacaaaggctttcttgggaaaaaaaagtctcctttttatcctctgcgggtgaaaaagaagtgccgttagaataggaaggggcttcttgtaggcttgaaaagagaaggacttggcaggtggcacctgggctttgttcagcagaactgagagggcaagagtatagctggcttttttgtaagactcatgaactctgtggcccattgatgagatgctctctgctctacaaagtggactttcctcgaggtggaattttattttcctccctgtgctggtgttagattctctggatacataaggtgacccgaggagaagcaggcaatgtcatcacagtttatttgtaggatctgggcttcctccttcagaggaggtgccactcacacccgagatgcctgctctctccctgagcctttcagcacaagggcaggacggagaggagcccagctaacgaggggccagctcaaagtcattcaggaaaaacagatatacacagacatggccggaagcctcaatgtgtttttctactgcaggaaggttaaagtggaacttcatgtcatagatttaaaaaaaaaaaaaaaaaaggctggggccaggcacagtggctcacgcctataatcccagcactttgggaggccaaggcggccgaatcacctgaggtcaggagttcgagatcagcctgggcaagatggtaaaacctcgtctctacgaaaagaaatacaaaaattagctgggcgtggtggcgcatgcctgtaatcccagctgctcgggaggctgaggcaggagaattccttgaacctgggaagcggaggttgcagtgagccaggattgtgccactgcactccagcctggtgacagaatgagactccatttcaaaaccaaacaaaaaaaaggtgggcatggcggctcatgtctgtaatcccaacattttgggaggatgagagggaggattgcttgagtccaggagttcgagaccagcctgggcaatatagtg

SEQ ID NO: 60200 - DNA, 1100 bp, Homo sapiens
tctctcctcaccgcgatctcttccagttaactgctgaatgcaaatcaacagtagagcgggacgtattttgcagttcagttattgatttttagggagcctgggtgggtacccttatctgtgtctctttgaggacaatgacaggagccctcattgccaacagagataacagtgagattgtatttttatttgttccacaaacactgacgtgacaaagtgctcttactggtaggcttgaggagagtagcctggcgattaaatgttcttatttcgagtgagcagccgggctgtgttcagaagagcccattagcagagcacgggacccatcaacagtccaattaagagcaaagggatgtgactgcggaaatattaatgggctgtgttggtaaagctgcccggggttagcgccagatggagtttttctgtatacagtttgtaggaaactcttgtgtattttcacgcgggatgtccttctgcagagggggatggttttagataatgactgttgtgctttttggggataccacctgcagagatgtgtttattttgagtgtttatagattgcagaaagctggtgaaaccaccttgagagaggtgatcctttgattgaatgtttttttcatccaacaccaaaaaattacaggccatgattggattttggagctgattcttgctttgtaagactgcatggttttggtgaacatccatctggttgttttttttttttttttttttgagtctcactctgtcacccaggctggagtgcagtggtgcaatctcggctcactgcaacttccacctcccgggctcaagtgattctcctgcctcagcctcccgagtagctgggattaccagtgcccaccaccgcgcccagctaatttttgtatttttagtagagatggggtttctctatgttggtcaggttggtcttgaactcctgactgaacatccttcttgaatgatgaagtcaaccttatttacccttgaaagatgacttaatccttaccaagagagcttcaaaaatacctgttattctgtaccttcgtttaaaaaataagtcctattgccttaactcctgtccaatgcctactgtagctctgttt

SEQ ID NO: 60201 - DNA, 1717 bp, Homo sapiens
ttgggaggccgaggcaggaggatcatgattgtcaggagattgagaccatcctggctaacacagtgaaaccccatctctactaaaaatacaaaaaaaatcagccgggcgtggtggcaggcccctgtagtcccagctactcaggaggctgaggcaggagaatggcgtgaacccaggaggcagagcttgcagtgaactgagatagcgccgctgcactccagcctgggcgacagagcgagactgtctcgaaaaaaaaataataataataaaataataaaataaacccattgttcatctaagaacctacccatgtctttcgggaggctttccatcttatcttgtcttggttcagacagtcttccatgggacccactgataccctggagcatctctggaaggttgaagcggaggacagaggaggcatggaaaaggtgtgcagtaatacataggaagcttccaaagagaagtgggtgcaagacagcacagaaacatgttcagttgcctcagctgctgatgttcaaaatacctgcagaaaatcaacgctgctacacccaaaagaaaaggaagatggaactgggggcctagagtgaattttttcaaaggtaaaaaggagcccaaatttcacagaatgatctcccgcttcagaaagggaaaccctctaagtacactatacacttccctgcctgttttctggagagtgataccgagtgttggcactgtctgcaaggaaggaagtaggactttgactaattgcacaaacagcaattttgtgtttttgaagtgcgaggactcagtcctgtgtccacgaagcctccttcaggaggttacttcttgacatagcccatcaaccggacctcccgttgctaggttctgagccttagggtgctttcaaatgcaatatctaggccaggagtggtggcccacacctgtaatcccagcactttgggaggctgaggcaagaggatggcttgaggcaggaggatcgaagtcaaggctgccgcgagctgtgatcgtgccactgcatgctagcctaggcaacagagcaagaccttgtttcaaaacaaaacaagaaaaaaaaaatatgtgcagaatccactaatggaagtcatcataaatttgttgccagaatgggaatgtatcagtttatacttcctacattttgttttttgtgatgactttaactttggatcattttatcagtgactggatgaaagtttatctttattttatctaatggggggggggaatccaaggagctttttaaagacagccagtataattgattataaagggtagttccctgctaagctgaaaatgctgtcttcgaacactttaggcatctgtttctacctaagagatgcattgtggagcccagtctatagcacctgccactggtcttcaatgtgttcagtatgtatcctgataatatatgaaacatcagggtccgctcacctgcttcaggtgctgtgtgtactccaacaggtattctacaatccgagctgttcatcagttgttaaattactgtgatttgagtcccttcaaagtgagatccattggcagcaggaactgttatatagtattatgtgtgtgtttaagggcagagggatggtgttatctaactgtcctgtcccagtttgcaggcatggaaggagttcctaggatgtgtgactttcaattttaaaactgagaaaggcctggacaaaccaggatgagttgtcaa

SEQ ID NO: 60202 - DNA, 1096 bp, Homo sapiens
tggtgagattgtgtagtctagaaaaggctagaattataaattattataaacgttggccatgtggggaaattcttataccaaaaatactgcaatgtatgtcagcctatagattttcatgtagtttcttgtccaaaactgtatatgagagcagaaatgattgattatgttatgttcaatgtatacctaatatctagtgctgatacataaataaacccatcatttgtgacaagggtcttttgtccgcatttaattttattttgttactttttatttatttatttatttttcagccagggtcctgctatgtcgcccaggctggtctcaaatttccggactcaagcgattcccccacctcagcctcctgagtagctgggactggaggtgtgcaccaccacacccagcttaattttatttttatggccaaatatgacacaggtgaaagccattacccagaccttcaaaggagtgtcacgatggggttggcaatgaggacaaggggtgatgaggaaaatacattgctggaaatcaagttgataataggtttggtggaagatctaagaaatgtagtgtggaacctctgaggtagggaaactgggaattcttttctttagaatatacatgtatattggcatgtatgtagaatatgcatgtctggaactccagaatacaatctgggctgcagccatcagtgtacaggttaaaggttcttaggctttctctgttcacggcattcctgtagactaaaagaaacagctaacagctccgtttattaagtagtaaagcccaaacaacttagtaattatttatgacctaacaatttagtggccaattgaaaatacaatcacatcaattcaaaagaaaagatgtattttttcatttttaggtgatggctggttttatgcatcaacgtgcgtagggcatggggcctagatatttggtcaaacccctgactgggtattgctgtgaaggtttgttttttagatgagattaacatttaaataggtaagttttctgggtgcagtggctcatgcctgcaatcccagcactttgggaagcggaggcaggaagatcacttgaggctaggagtttgagacca

SEQ ID NO: 60203 - DNA, 1064 bp, Homo sapiens
aggtaaaagtggatggaatcagtggaattatatgtatgatatgaaatgctctttggcatctattaaatttttattttgaagaaaaaataaaggacaaggaaagcatcctattccaagactccaaggagattatatttttaattccacaccacagaaaatgcaaacaaatttctaattacacttcatgcatggagatctgtagaggaaaaataaattggtacccatccacccaaaagccacaaatcagacatagaatggctaatcacaaatataacttgtgtgcctgatgctgattactttctccgcagtctgttgtgaacaattaagaatttagatcttgggctgggagtgctgtttttaaagtgtgactcaaaagcataaagttcatttaaatttctcctaatcctggtttgcaatttctattcctttttggttagagtattatttatcttcaggaggcccctattatactataaatattgccttggggcagtgttcatagcaccacagcacctatctatccatttatcagaataatcagcacttcctgttggctgagaaaacactgtcatttttactgtttaaaaacagaacagctttcagtagcaattgccattaattgatttcatggcaggaagacggaaaattctccattttttcattctcataagtcacctaagaacatcttaaaagctacagagaggccgggctcagtggctcatacttgtaatcccagcactttgggaggctgaggcgggcggatcacgaggtcgggagatcgagaccatcctggctaacacagtgaaaccctgtctctactaaaaatacaaaaccaaaattagccgggtgtggtggcaggtgcctgtagtcccagctacttgggaagctgaggcaggagaatggcgtgaacccaggaggtggagcttgcagtgagctgagatcacaccactgcactccagcctgggcaacagagcgagactccatctcaaaaaaaaaacaaaaaaaatgctacagagaaaggggacagctgccatggaaaacagtggggcggttcctcagaaaaa

SEQ ID NO: 60204 - DNA, 1028 bp, Homo sapiens
caacataccaaaaccccatctctactaaaaatacaaaacttaactgggcgtagtggtgcatgcctgtaatcccagctactcaggaggcgggagaattgcttgaacccaggaggcagaggttgcagtgagccaagatcgcgccactgcactccagcctgggtaacagagagcaaggcttcatctcaaaggaaaaaaaaggagccaaaggatggacacaacccaggaagaatggataaaatgtgaaggaaattctgacacatgctacaaaatggatgaaccttgaggacattatgctcagtgaactaagccagtcaccaaaaagacaaatagtataggattccacttgtatgaagtacttagggtagtcgaattcagagacagaaagtagaatggtgattgccaggggctgggagaggggagatggggatttactgttcaatgggtgtgcagtttcagttttgcaaggtgaaaagtgttctggagatgggtggtggtgatgatcacataacaacatgaaaatacttagtgccactgaaccggacgctcaaaaatggctaggttggtacattttgtggtgtattttactgacattttattttattttattttattttttgagacagggtctcgctctgtcacccaggctggagtgcggtggcccgatctcggctcactgcaatctccacctcccaggttcacgcgattctcccacctcagcctcctgagtagctgggatcacaggtgcatgctatcacacctgactaattattattattatcatttggcagagatggtgttttaccatgttggccaggctggtcttgaattcctgacctctagtgatccacccgcctcagcctcccaaagtgctgggattacaggtgtgagccaccatgtctggcctgaaatttatttttaaaaaagcaaatctacagaggagtgggctccaccatagaaattcagttccagttagtcagcagtagcggcctgggcagcagcaattctggtctaaggtgcggggtaatctc

SEQ ID NO: 60205 - DNA, 2059 bp, Homo sapiens
accatatcacatttgtagtatattgcatagtataaacatatgctgtttatatacatagtatataagtagcacatagcatatactatatacatagtatataaatagtataaatatatagtatataaatagtataaatatatactatgtaattagtatataattatactggagtgtatatatatactataaatatatacatagtttatatttatacatagtacataaatggtgtatatacatagtatataaatagtgtacctagtatataaatagtataaatatatgctatttatatacatagtatataaatagtacaaatataaataagtttataaatatattttttaaacagaagtataaatatgtatactatattatacatagtgtaaatatatacaatatacttgctgctcagtggaaaataagaattatttgcttatacttaattaatacaaaatcttttctagagtaaaatcattataaattcccctttcttcagagccaaaggagaaaaataaattgtcttcaaatataagtgcatcactcattgcatgatccaccctttacagacctaaaggggcaatgtacgctctcctggagtatgtcaatgggaagttgagcatgaatagccctgcatttagtaaatcagaagttatttaactactcggaacctagatgttcctatgtgttagataggaatgaaaatacccatctttccaggtttactcacatttaaatatgatcgtgtaatgtacttagtacagtgcctggctgccttctagtgtcggcactcaataaggagtagttatcattggttcttcgtagactgccattgggaacttgagcaggtttggagaagtggccattagcaaagaaatcataatggaaagaggctaggaatatacacaaagccagcactgtcttatggggttgcctaaaatataggaaattatggaaaatggaggcaagaaaatctctattcttgacttagaacttgcttaacttgtctaatgcataatttacctaaggattcaaaagtgtgggttgcttaagaataagcagaaacggctgggcgtggtggctcacacctgtaatcccagcactttgggaggccgaggcaggttgatcacctgaggtcaggagttggagaccagcctggccaacatggtgaaatcctgtttctactaaaaatacaaaaattagccaggcgtggtggcgtgcacctgtaatcccagctactcagaaggctgaggcaggagaatcacttgaacccaggaggcagaggttgcagtaagccaagcccacaccactgcactccagcctaggtaactagagtgaaactccatctcaaaaaaaaaaaaaaaaagaataggtagaaacttgaaaagcaaggctatgttaccctttggacattttttgtttgtttgtttgccatttaagaggacgtaaaaggagatcattagacagaaagtttgtaagttttggaagtaaaattttagagcaaaaggaacctttgcaagcacttttgatatagatctgtcattccagagaatccatacataggcttccagaacatctaactaagccatagaccttggaggtatcaggggtcttgctgccctcttctgccttatagaatcaaataaattcatagagaaacagtaggggcattttttatttttgagacagggtctagctctgtcacccaggctacagcacagtggtgtgatcatggctcactgtaacctcctcctaccaagctcaagcaatcctcccacctcagcccccaagtagctgggactacaggtgcatgccaccacaccaggctaattttttaattttttgtagagatgggtttttccatgttgctcaggctgttcttgaactcttgggctcaagcaatctgcccaccttggcctcctaaagtactgggattatatgtgtgagccactgtgcccagccaggacattttatttttatcttatatatatttttttatttttattttttgagacagggtctcactgtgttgcccaggctggagtgcattggcatgatc

SEQ ID NO: 60206 - DNA, 1249 bp, Homo sapiens
ggagtgacatttattcctcaaagcgtatctttttcataatttcaatttttatttgggattcagggggtatgtgtgcaggtttgttgcctgggcatatttcatgatgccaagatttgggtatgagatcccatcactcaggtagtgagctaaaagcagtataaaatgggtttctttcttagccctgtaagttggttctttcttgaccaactaccctctaaggagagttaagagaagatcttgtaggtataaagctaaaaatcaataggctggcctacaaggtcaagtaacaaagcacgttgttttaagctcagggtcttaggcttagtggagcagggatctggtctgatccctacaagtaaaagaatgattagagacattgaaaaagccataaagatggttaaaaggttggggaaaataaggcttccaggccaaacaaaacttgaattcagtgtggaaaaatgttgagagataagttattaatgttaagtatgcaaagaactcctaaaagcacatggatgtcagctgttctatatttcttttgctgaccaactaagagggcaaattcttaactgaatgaagcatttgccctacatcaacttggaatagatttaaaagaagagagtatgactattactaaacatggagataagttagtgggggagggtatgtgtctccttctaagagatctttaaaattatgagcaattgtggctggaggatacatacatgttatacatttataaaatatttgagtttggactcaaagtagaaaatgaagatgagcccttttgtctctttcaactatgcatcaagattagtattagttttggatgacttagtctattgcaagaaagttttcactaggggttgggcatggcggagcatgcctatagttccagctacttgggaggccaaggcaggaggattgcttaagcccaggatttcagatctaacctgggcaatatagtgagaccctgtgtcttagaaaagaaaaaaagatgaaggaaggaaggaaagatggaggggtggaggagggagggaaggatggaaggaaggaaggaaggaaggaaggaaggaaggaaggaaggaaggaacttacttgaattggcattttccttttcctatcacaactatgccttcagctttcttctaattaccatctaagtccttataataaggacttataaatccttacatctaagtgccttacagtagtgtatataaattcttactgtatttgctcacctaac

SEQ ID NO: 60207 - DNA, 1191 bp, Homo sapiens
tctgtctttctctaactgcaactcctgcatttccatctttatccaatttcttacgaaggcaaagctgcactggatggtctgttcatatatctgggtatttttttccacaggataactttctaaaggtagaattgattgttcaaaatgtttacaaatcttaccagaaatgttagacctatttggatatatataatattctgcaacatataagaatgctagttgatagttgctatcctgtatattaactttttaaaagttttgctaacccaatgagtaaaaaaagctcattgttttgatttacatttttataatcattgacgttagagtatattttcctatattagttagtcaattttgtgtttgtgcgaagctccagtttgtgtttttacccatttttaattggatgatgaggtttttggggggtatttttagaccacttcataaattaaggaattaactttcacactttatgcaaatatttctccagttgttaaagtttgcatgtatttttcccatagaaatttaaaattttcatgcaatcaacctcagaaatctttcctctcatatttctgcctctggaattgtatttttagaaagaacttccctgtcctaatattacatattaagcattgtttgtgttctatactagtgctcttagagtttagcttccttacgttgtaatatttgatccttctacagtttattttgaggcaaggagtttgatagagatctagctttctttcttttgccaagtggctagtcaacagtaccactaccacgaactgaataattaatcttttcccttgttgatttgaaatgccactttgtgagatccaaatttctgcctgtgtttgggtctgtttctgaactctatgtttcattccattgagctgtttttccgtctccaattctacgatgtttgagtgactatatttttagttatgggccatgcagggggaagatttgcaaaattggttgctcagttcactgttttgaaactgcttaatgaagaggcctctttgtttccattttctctattaacaccagaattagtgttcacgatgacattgtatcatccaaaaagaattaattttgcccttataataagcttaacaagattgaatataaacaaaattttaaataaataagataatgttaaaaatagcatctagaaggatatttttaaatgtc

SEQ ID NO: 60208 - DNA, 2392 bp, Homo sapiens
tacattttgtttattcattcatctgtcaaaggacatttggtattttgggttttgttggcccttttttttttttttttttttggaggcagagtcttgctctgtcaccaggctgaagtgcagtggtgtgatctcagctcactgcaacctccgcctcctgcattcaagcgattcttgtgcctcagcctcccaagtagctgggaccaccaggtgtgcaccaccacacccggctaatttttgtattttagtggagttggggttttgccatgttggccaggctggtctcgaactcctgacctcaagtgatcctcccaccttggcctcccaaagtgctgggacaacaggcatgagccactgcaaccagccaggttttgttggcttttaatcaagataatatgcaaacactacttttgtccatctgatgatgtctcaacaaagccattttagaatctgaagatacttcctcattaaattgttactattgttaataaccgagtgttggcttagtgagtgttaaggtatataagagtagtccaaataaatggcatagaaataaatgacagtgattaatcactcactagtctgatacctcatagcttccttacttcaagtttaggcaggtgcaggagtcatgaaaaaaagccaaaagataaaggtcgcaaccacttggtgaggaatgtttgctttcttgaaatgatagccctctacccagcaccatgaaaagtgtgtttttcgtggtcattttcaggcctctaagcttgaggtgtgggtttatattctgaaggatgcagtgcgtgatctttctcaccaaactctctcaaatactgcactggataaacactcagaggactggaaagtgggactggaaggagccattgagattttttttacatcctcttgtcctggagtactttccttcctctacactttccttacatttctcagagaaaaaaagaaaaactttgtcatttttgtattacaaacgtgccagctttgactacccttgacactaggtaagtgggagattaattgttgggattatacccatggaaaaagccataaggcttacatcacaagttttattttttttaatattttgttttcatagctggggattactctattggcattcagggagagagaatgaaaaaatatactaggataaaaaagggagtactaattaaaactacaaaagcaatgcaaacatacattaaaagatacaacaaattccatgccagtttcgtgaagaaatgctttgaggtttttttccccccagctttattgagtataattgacaaataaaaaatgcatatatttaaggtgtatgacctgacaatttcatatacaaatacattgtgaaatggttaccacaatcaaattcatgaatatatccatcaccacacatggttaccatcctttgagttttaaggtgaattaatggaatgcgtgtcattcatatgcatattcatatgcatgtcatttgcataccattccttgactcaagaaagttgctatatgagtgaaagataattattgatcatatgaacttaagatacaattattctcatctggccaggtgcagtggctcacgcctgtaatcccagcactttgggaggcagaggcaggtagatcacttgaggtcagaagtttgagaccagcctggccaacttggtgaaaccccattactgaaaatacaaaattagctgggcatggtggcacatgcttacttgggaggctgaggcagaatcgcttgaacctgggaggcagaagttgcagtgagccaagatcacaccactgcactctagcctgggtgacagagtgagaccctgtcacaaaaataaaataaaatgaaataattatcctacaagaattaccagtaagtatacttctaaaatagatcttactctagttcattccaatactcacataatacaactatatattaaatggtgaaaatatcattgcagataaattctaaatgaaaataaatcctaatatgtaatccattaggaaataaaattctaaatttaattctacaaattactttgtgattttgataaaatttacctaaagatacagggaagattttaaatttgtttaaaaatgggaagttagtaaaatcttgaggataaagaagaaatgtatacatatcaggcaagcccaccactgcatgttccatagaatcttacagataatggatctcaagaataagcaggctaaattttcacacccatcccccaagtagctgaatcattggggattttcttttggagaaatttagggccctagcaaagagtagatagcgttctgagcaagttactactcccaagggttggcccaagcattcaaaaacagctgggggctgggcacagtggctcctgactataatcccaga

SEQ ID NO: 60209 - DNA, 1172 bp, Homo sapiens
tatggtggccaaagcaccacccttctattaaaaagtataatctttttttttgttgttgttaaccaatcaaatgttccatctgtttagactccgctgtctgctctggattttagaacaatgcagtcaaggttattcttgctcagtaatcttgccttgaaaaagtgagttactgttcccagaggcaaaggcactgcttcttgatgacaggcaagtgggatttattagctttgtgaaggaggtgggagggcatcgtgatacttggtaaattatgagaggggctggggagaccatgtcaaaaagaaagggattccttgccagatgttcctaagagttgaattaccatggagaaaataatctgaaaatatgagtgacctcgactttgtcctaaacccccatggcttaaagtgcaagcgaaaggagggaatgtggctttataggggcttgcaggtagatggagggtgggtgggggtggtgtcaggtcagttccttatgggcttccctaagtcagtgctggagagcaaaaagagtgttgaggcctcccgagaacgctagaatgaccccacatccctctacatcagctttagacccacagcagcctcctaggtcttctaggtggaggctgagatagagatgttctatcctgaatatgttcagacaagccaggggcactcatataggtggtgcggtttcctgttttgcaaaggacaggagatagagccacccaagcagatgtcccagatgaaaatggctgtgaaacgacagtgtcaccttaatatccatttggacctcatttatgggaaaagccacctttcccacaccactatattttgtttgttacaatctctgtttgtccttctctttcaaacatatttctcattagatttattccatcgcatattttcagcttgtttctgtgaagttccgacaggaggggtgttccaggaagctccgcggtaccttttattttattttactttatttttgcccttctcctggaagagcacttggtaatcttcttaaatgctttttgaaagccttttaatgacatcactcagtgccccgctgatcactcatgaactgcagttgtacaccagctccaaaagttccatatttatgatgataaacaagagctgtaagatttctaattttgctgaggggctattttccctctc

SEQ ID NO: 60210 - DNA, 1204 bp, Homo sapiens
agggaggcatggcagaccaaaaggcaacatttgggcacaaaaacaggaatgcccgttcccatttagggccatgggtttccagacttgagggtggggcttttgccaaggaaccaccctcttctacccagtatttccctgcctcctgtccatgtcatttgtacaagaaaacatttttctcccagtaaagcttatcagttttcacagaataattgtcagcccctaaagtatttttggctgtctccagaggttagtaggtaagaagcttgaagatgaggccagagttcagcattgagctgtcccaggtgacacagactggtgagggcaggcaggttggctgaactcagtccctggagcttggggccagaggaggttgcagctgtgtaagcaggtgggcttcagcccctcaggatagcaagtctcacagccagggatgcagatgctaacatctgtcacattgtcttcagtggtttattatcttagtttcagctgctgcaaccaataccatcgacttgggggcttaaatgacagggatttatttctcatagttctggaggctagaagtccaagagcagggtgccagcatggtcaggttctggtgacaaccctctttctagttggtagacctctgtcttcttgctgtgtcctcatatggcagaaagaaagcatctgtctcatgtctctttttagaaggacactaatcccatcacaagggctctactcttgtgaccaaatcacaccccaaaggcctcacttccaaatactatcacattggagattagggcttcaacatgtaaatttggggttggggggcactcacattcagttcatggcacttgtgaactgaagccaagtgttgtaggtcttctgtcgccacagctgagcaggctgagatgagcatagcaagtcctcactcttttttttttttttttttttttttttttttttttttttgagacagagtctcactctgtctcccaggctggagtacagtggcccgatctcggctcactgcaacctccacctcccgggttcaagccattctcctgcttcagcctccccactagctgggactacaggtgtctgccaccacgcccggctaatttttgtatttttagtagagacgggatttcactatattggtcaggctggtctcaaactcctgactttgtgatccacccgcctcggcctcccaaagtgctgggat

SEQ ID NO: 60211 - DNA, 1012 bp, Homo sapiens
tgtttcctatggaagaaaagggagaatcagaagtgcattctggactagcttcaataaatcatcttatgtcttatcccacctcttttccctattaaaattcttacctttggccgggcccaagcttgagaaggccactcctaaagcaaggcccctttggactagggcctgggcaagagttaactggcacctgctatgccagcacaaagcttaattcccctgcagcagcacacccgcaggcagctattgaagcaaggatggaatgtcttacaatacaaagcctttgtaataatgagagggaaatagaaaccagaggtttgcaagctctttttttcttggggggttctgagtatttttgtttaacttaagtttcgtgttccaaggaaggggcgttttagtgaaaattgtgaagggaaaccctgccaaacagaaattccttataggatgagtattttcctcctttcaaggtgtgagagcgaccaagaagcaataacgcataggggagtcggggtgatagattggaatgctcttggctggagtgtgattggtgtctggaagtgagtcccagcaggttggctggtgaggccatgtgagcattgggcctgttccagggctgtgaagtgtgcaggcttgcttgaggctgtaggcaccactgcctgagccatgcacgtaaactccccagaccctaagagtagtttactgtcagggggtaagcccccaaatcaagcaagctgcacagagccaagactcccaagaaccaatgccttcttccagcctttcattcattcattctgtaagtgaaaactcagcgtggatgtggatgaagatattcatgcctttgtgatcattacatttcagtgtgtgggtgcaaggggaaggagacagataagaagtgagcaaataagtaaagtatctagtgtgtctaggggttttaaatgttatggaggcaaaaataagcagagttctcaaggaactggtcatcccgatgtccatgggctgcacttggttggggcag

SEQ ID NO: 60212 - DNA, 1135 bp, Homo sapiens
gttagccaatgtgtttgttcattctaatactttctttctttcttttttcttttcttttctttctttctttctttttttttttttttttgtttttttgagatagagtctcactctgtcacccaggctggagtgcagtggtgctatcttggctcactgcaacctccacctcctaagctcaagtgattctcgtgcctcagcctcccaagtagctgggactacaggcgtgtgccacaaaacccaattaattttttgtgtgttttttgtaaatacggagtctcagcatgttggccaggctggtctccaactcctggcctcaagtgatctgcccgcctcggcctcccaaagtgtcgggattacaggcatgagccaccatgcctgacttagctttcatttgatgagaatattaattatttcaaattgctcataaatctgcattactgtatgtcagatattggctttagcatttttctcaagttatttcatacaacaaagtataatataaacatcattattactatgtcatgaatgaagaaagtgtacatgaaacatgcctaaggtaatatgcccaaagtctcacagatagtaagtgttgaaaatgaagcttacgcccagttctttctctttccagaaattatactttcaaccactatcctatattcactataggattactttagattctaagattccttaggaaattagaaattcttagaattagaagctgttgggatatcaccctgaactcttttttgttaaatgttgctgctttttagtttatttacccttgaaggtctttgaggctttatattttattattgttatatcaactataattcttagtgtgacttataaagtctcacaaggctacgtaattttattccatctttaagtattttaaacagttagaaaaggaattatattacaattagatttctcaatttagtagctctttttttttaacccaaataatcagaaattactttgctcccccagttactgacagactgtgtatctttaggatataattacttttttttttttttttttttttttgagacagactcttactctgtcgcccaggccggagtacagtggcacaatctgggatcactgcaacctctacctcccgggttca

SEQ ID NO: 60213 - DNA, 1126 bp, Homo sapiens
catcagaaagtctctaatttctgggccgggcgcggtggctcacgcctataatcccagcactttgagaggccagggtaggcagatcacttgaggcccggagttcgataccagcctggccagcatggcaaaaccctatctctactaaaaatacaaaaattagccaggcagaggttacagtgagctgagatcatgccactgcactccagcctgggtgacagagtgaaactgtctcaaatttaattaaaaaaaaagaagaagaagaaaagaaaatctttaatttgtgaacaaaagtggaactttgggtgagtgcttaaattttagcagcctccagagtttcctgatgttactccctagagatcaacaattcactttttccctcctttactgatacttttctttgtgccttgttatagaattatatttattatagaaaaccctgaaatagacatagcaaaagaaataaaataaatatcgcttgtcattcagaccgtttgaagtactgtacgtgtgtcattcatttctggttctctccactacatttgctcattgtgtggttacccaatatttattattcttgagcaattcttctcagactcatcagcattaggaaagaaactctgaacccctttcccttcctgccacatttagcctttcaaagagatctcaagtgccatttagtacaacaacaatgtctgaagtttctttttgccattttcttatgatagctgatgaatttattaggagtctctgaaataataaatgctcttctgtttaatttttacagtattattatttttgccattccttgaggtagttgagtcttcctgttttctcagtaacattcctttagttttttgtgggttttgtttttgtttttttttttttttgaaacagggtcttactctgttgaccgagctggagtgcagcgtgcagtggcacaatctcagttcactgcaccctccacctcctgggctcaagcagtcctcccaccttagcctcccaagtagctgagacttcaggcgtgtgccactatgcccagctaatttttgtattttttgtagagatggagtctcattgtgttgcccaagctggttttgcacacctgacctcaagcactcagcccacc

SEQ ID NO: 60214 - DNA, 1040 bp, Homo sapiens
ggttgaggtctctttgtccctcctggcagactcactgggactccggtctcttccattaccactttccattcctggtcctctctgaagggctgtggttgtcctggttctcctcccgcagccggtgttacttatcatcgctctgtgattttctgtgctttttttttgtcccccttttccctgtccatagcagctcttcaaatctatcatcctgtttttatcttacacttttatttaccatgcatctgcagggctttattatttgtggtctacttcagggtatttctttcacagttgatgaagcctgtaaacttcagagcagagaatcagagggccctaagcaaccctcacctttctggtgagaatatattcacctagaaaagggcttttatgaggtcactttagctaattgtttttctaatagtgtcactccctttttctcttcaaggtctcttcaagttcttttatttatttatttatttttttaacccctatgtgcatcttgggtagaatattttagtacagtttttgtctggagacctgttgtttggctttttggctttcgagtgtagccatctgtgttcaagtgttctttttcttctagtggaaatttgtgtctgatgtgtgggactaagttctaagtaatatacacacatatatataatctatacacaatggtgatatggatcatggatattgtataattcaatcatgacggtacttagaggctcctatatgttactagtccttatggatatgtgtatatgcgtgtgcagtaagatatgcagctatggcaccccactggcagatattgggcacaagaggaagtcactcttcttgcatgaggattatagaaattttcattttttaagtcacaaaaaaatatttcactgccatgtttttttaaaaagttaagttgctcaaaaatgagtcggatgcagtggctcacaaatgtaattccagcactttgggaggccgaagcaggcagatcacttgaggttaggagtttgagaccagcctggccaacatggttaaaccccatc

SEQ ID NO: 60215 - DNA, 1068 bp, Homo sapiens
tagccagctttggtggtgggcgcctgtaatcccagctactccggaggctgaggcaggagaatcgctttaactcgggaagcagagggtgcggtgagctgagatcacgccactgcactccagcctgggcgacaaagtgagattctgtgtcaaaaactaaaaataaaaataaaaataaagtcagtggcatcaatgagaattaaaatatttaaatgcttgcacagtaagcattgtaaaccaaaggcacactccagggtccaccaggttcaaatattagaatttgtgccctgaattacagtgtggatcttctgttcctgcatgtattcaccttgggtgtgccctcctgcatggcaaagcatgggcagagagcactgcactcacaggcctgctttcgtggagcaatctagtggccagtgagcccggggccagtgacaatcaagatggcagcctcagactgcattctggctaagaaagctatttcatttgggttgggcaggctctagtaagttccctgcagctctgggacaacctcagggatggtggattaatatgacacattctccaatgatacaaggtgaattcagaagcgcctatggcagggtattttggggcaaacccattgctagttaaggcttcaacatgtctttctaaaatataaggatggaactgtcatcatttttctttcttttcggggaagaggagttaaccgtgctacattttcatcatgaataaataggtggtccatttggtcaacctattctttttctcttcatgttttcaccccttttctttcctatttttttcttgttttctcctggtccacaggctttgaagggcatgctgatctctcttcaggcagaacttgacattcaaaggtacttgatgaaaattgaatcgtctcagcgagttagtactctacctgttctttttctgcatcgagttgcaccctcatcctgcacctttccctcacctgcaagtgccattctaatcagtgtcagccactaacgcctgcacttttcgctgtttaccccaatccctgattcaaaactatcagagccaagtgcttgtagc

SEQ ID NO: 60216 - DNA, 1051 bp, Homo sapiens
gaacactaattgcatgcttgcttcgaaatatttaatttgctttccacagattggattgtggaatcagcagtaatgcaaccacaagctggagatctttgaataattgtttgaaaagtgggcatctctaagcagagatcctatccttgccagcttgctccagcagaatactcatggcagtaaaacagaagcctgaatcattctgacaatcccaaagctatgtcattctgctttgctcagttccaatgtgtccaatgttgggtccagatcattttacttatatacattttaataatgatcataatggaaataaacacatttctttagaacttatatacaccaggcactgttctaagtgccttacaagtattaacttctcacagcaaccctgtgggggaggtatactatgatccccattttacaaatgaggtgattgaggcacagagaagttaagtaacttgcccaaggtcacacagctaggtaatggttgtgcttaggaaatgttcggccatctggctttgtacaaaagtgacctccttcccattggtcagtcttcagtgaccatgcttatctctttaccttccccttcttaataatcagtctcattgatctctttttagggtaacaagctcaatttagaaagttcctgcccagacaaataaacattaaagttcaagtttagacactaaagagaattttcatgtcacacatcatcccaattctgatgagtgtttatccttaattttattcttaatcattttcacattcctaaaattcatgcaaaatagaggcatctttattatttccgtgcgcatgtattgtgcactaagttaaaatgcagaaagggaaaagaagggcatagtgagctcttccctacaacttcacaccctgccattaacctttattcctactttcagaatagagatttgacattgcccagtgggattttcccatcataagtagtactgagtttgggattccctcccgctattctttttttcttctgcttgaaacaaataaatcttcagtactgactttccttttctttcttttt

SEQ ID NO: 60217 - DNA, 1010 bp, Homo sapiens
tatttgttaatttaatattttgttcctggaatttttaataaaagtacctagcaactagaatgttctcttcaactgaaatcagaattttgactgggtttgagttgaaagtttcacaagtgaaagaaatggggctaaagtgtctgaatgtcatgattaaattaaccatgtcctttaatgagtgctaggaatgagtcattccaaatacatttgcatgtggaaaacttcattgtattttcaaatgccctgtggcaaattgggcattaattaggatgaagtaaaacttcatcacggcaatgttgatttttcttttcacaatagaacgtaatctgaagcaaagtgaataccttggctagccagacaccccactgttcctggcaattaacatattacgtaaagctacatttgcaggttcattttctggacctcggcatttcaatttagggtttaagggtctgaaaacgggaatgaaaaatacatcatcaatacctctagctctaactttcttttatctttgttgttatctccaaatccaatagcattgcaaagaatatgaataaatctgatctccctcgcagaacagtgcacttggtgaacatttcagcaaatatttgttcatgatgttaaaatgaaatcatgaccgtcttttaaaaattaatgctgttcaactatgttgcatacacttgaggacataaatgcggaaagccagatcttagcactacctagctacatatatctatggagcaggtgctataggataaataattcgaaggaaatctcagtaaactgtttttctggatgacatgatcttttcttcttatatgatgtgtacttagagttagaaagttttggtcctgcaagggatctgagacaccaactagctcaacctctggccttacagatgagatacctgtgactcaacgaggttatatgtggaccagtttttggcagaagctgaactagaactagcattcccagactcctggttaaataaaaattttaggcagggtgca

SEQ ID NO: 60218 - DNA, 1026 bp, Homo sapiens
atcaggcacaccttgggcatccctgaaacaaatctgtagcccaaaactcaaggcaggactggctaaagaattgtcagggtaccttgttcaaaaatcattaataaggccgggcatggtagctcgcaccttggaatcccagcactttgggaggctgaggcaggtgcatcacctgaagtcaggagtttgagaccaccctagccaacgtggcaaaaccccatctctactaaaaatacaaaaattagctgggcatgatggtacatgcctgtaatcccagctacttgggaggttgaggcaggagaattgcttgaacccaggaggcagaggttgaagtgagccaagatggcaccactgcactccagtctgagcaacaagaatgaaacgccatctcagaaaaaataaaataaaataaaaatctcccttgcaatgtgagtttactgattgtggaaacagtcttggtatgagactctgaaggaccagttgtgttcaatttactctggtattagtagctcatccatctagggtgcgtagaagagtatacagtcccatctgttgtgaaagcactgttagaatttgtcgggcaaaaggaattgttttgctgtcactttcttataatgtggcttgtcctcaactccctgttcaaaatgcaccacataagtcaaacaataaaaatcttaatggagaccaggtgcagcgggtcacgcctataatcctagcactttgggaggccgaggcaggcggatcacctgaggtcaggagttcaagagtactcaaagtactcaaagcctggccatcatggtgaaaccccatctctgctaaaaaacacaaaaactagccaggcatgttggggcacacctgtagtcccagttattcaggaggctgaggcacaagaattgcttgaaaaccggaggtggaggttgtagtgagccgatctcacaccactgcactctggcaataaataaataaataaataaataaataaataaataaatacaatggaacacttaagggcaatgttattttccggta

SEQ ID NO: 60219 - DNA, 1026 bp, Homo sapiens
catattatttttccagattaatagaaatggcattggacatattttccacacgattaataatagtctattttcccactttctttaaaatgccttttgcagacaaggagccccaaactgtctcacagtcctcaaccacccagtctgggtgacccggtcgagcatttatcagagacgtccgctgattctttggaagccatgtctgagggggatgctccaacccctttttccagaggcagccggactcgtgcgagccttcctgtggtgaggtcaaccaaccagacgaaagaaagatctctgggtaagctttagaaggcagtttctgatgcccctttcttactgaatgcgtttgttgttatactactgaacctatactctttcattcaacattaatttgatcttgatttgcaaatactctagtactgggaaacttcattggtttaatatcaagcattgaggatttgcctgctgggtaatcaggtcaagtgcaagctgattttgaggctgggcactttcagaagtggttgggattagcaattcaagccaagaggctagtagtattttacctatgttcctgctactatacagcaggagtccccagtccccaggccatggaccagtaccagtctgtggcctgttaggaaacagaccacacagcaagaggtgagcagaggatgagcaagcattaccgcctgagctccgcctcctgtcagatcagctgtggcatccgcttctcataggagctgaaccctattatgaactgcatgagtgagggatctaggttgcatgctccttatgagaatctaactaatgcctgatgatccgagatggagcagtttcattccgaaaccatctgccatccatggaaaaactgtctttcatgaaaccagtccctggtgccaaaaaaaattagggaccagtgctctataggaaattgtgaggaactgaccgtagaatgatcctcttctcaccttgcaaccctcctctccagtcccagaggccaggacagttggcatttgtacccagtgg

SEQ ID NO: 60220 - DNA, 1026 bp, Homo sapiens
attgccatgttaaggttctgatttgggtacttgtgtttgcaaacagatgggcttggggataagaggggacaggaaaagagtcaacatgcaaaagccttcagagtctagcacgtgcaaaagacagctgaactctgccatgtaaaactgagcaaatgccttgctgggagaagaaagaaaaagattgatgtgagagaaggtaccctgattttagttcctttgctgcagataatgacccaagcagactgaattcagacattgtcctagctgtcctaaaaaaaaaccctacaactttgttattatttgtattatcaatattaatatttaacattaaattttgtgtcaaattaaattttgatcaaattaagatcaaattaaaatttgatcttaggttagtaatctaggatcctcattgtataaatgagagaagaccacagaaaatgtgctttttgtttatgtgtgtgtttgcttgtttgagctcacacacttaattaagtggcagcagtgggaagtccagggctccagttcccattaacatgatcttacaaatgaagggacaaggacacacaggggagggacacacccaaggagcatcatgggccaagacagtgtcaagatgacacaggcttccacaccgtcaccaggctggggctttctgtgtggattcaagaaatttgtggtttttcttttcttttttttttttttttttcttgagacagagttttgctctgtcacccaggctggagtgcaatggcatgatcatgattcactacagcctcgacttcccacgttcaagggatcctcccatctcagccttcagagtagatgggactacaggcacgcacccaggcgcctggctaattttttattttttgtagagatggggtctcactatgttgcccaggctggtctggaattcctggactcaagtaatcctcccaccttaacctcacaaaatgctgggattataggcatgagccagcatgtctggcctgaaacttgtgctttcttaactccactcacacttag

SEQ ID NO: 60221 - DNA, 2313 bp, Homo sapiens
atttcctctgcagccaagaacggttggcagtgcaggttgagacttgctgggttcaggaaccaagccttggggcagagaggctgcaggagctggggccggcttgcccaaggaatggctgagggtggcgggtgttttcgcacggggtggccacgcttctgcaaattgctccattttactcagcatcctttgctgtagagtgccggtgtgctgtcacagcaggctgaaaaatgcatctgacctgtttattctgccctccctgtgaggggctttttggcctgccatttttcactactcctggatagaaacaaaggaacacagtaagaggagaggagagaaatgagaagtttcttgccaaagccaagggaagctctggttccagaaaatgaggctggcactgggccagctgggttgatgttgcccttgaccgcctctttgtggccgattggggaatgtccccccagccgcacctggcccttatggcgtaatccagttgagcctggacgggaaataaaaaggaaaatgtgactcacagcaagtgcaaatgcagtctccctcccaggggccttgctcagcttagtctttgggaaactccccgcctgcctggccttatttaacacacagacgcacgggttcctgggataaacagtgctccccagagagccccggccatgagcagggtgtctaccagcacctgggtggcccagaagcacagctgcaactccatggggcctcagatatgccgactggatactttgagctgtaacccccctggaaacccgctgttgatgccatctggaagccctgggtgtcttttggcatctgtatgttgtcactttatctcaatccatagagttttaagttctctcatgaagccctgttgatcttgcctttatttaaaattttgatggtttatcatgaattttttttatcattttattttttaggagcaattttttaggtttgtaacaagatcgagcagaaagtacagacagttcccatacacccttggcctccacgcatgaacagcctcccccatgatcagcataccctactagagtggtacgtttgttacgatcaatgaaatgagaccgacacattgatatcacccagagtccatagtttacactggggttcactcttgctgttgtacattccatggatttggacaaagaggctgtcaagggcaacatcaacccagctggctcagtgtcgcccaggctggagtgcagtggaacgatctcggctcaccgcaatctctgtctcccgggttcacgccattctcctgcctcagcctcctgagtagctgggacgcaggtgcctgccaccatgcctggctaattttttagtatttttagtagagaccaggtttcaccatgttagccaggatggtctcgatctcctgacctcgtgatccgcctgccttggcctcctaaagtgctgggattactggcgtgagccaccacacccacctgctttttaaaagtattgcacaaagacattatttatcatgatcactgagcttttgggagacccttaaattttgcactggaggtatgcgtcttgttgacctcaccccagtgctggcccctcatgtaaccccaggagcatcagacactgttactgccagcccccagccacggggcctggagtaaggagagtgaggaaagcccagttcccggcctgtacactggcacgtggtgccacagtttgtcactggagtccttccccagctcaggcagcacagaaaggggagggctaggcaacttgagggtggagccaggacaagatggaatcctcacaccactccggctcctgagaggagaggaagccttccctcacttcagtctgcctgtgcctggagataaacctgcctgcctcttagtttctccacttgaataagtcctcatttctattgcttcagtgtatttgggggctgggagaaatgcaggaaggctgagcatggtgcatttcgcaaatggtgttaaaagacatgcaagagaaagtgtggggaacagtagctgtgttttggacccgtcttagacatcactggtgtctgtgtaatggtctccctcgggtgctgtcctgggatgcaaggtgtctacttctcatttgggagaagcattttgacattcagacagagccaagtgacagcaacacacaagtcctttctgaggcttagagcctagaaatttacaaagaagaaaggtaaagaaagaaattgatgggttcagcagcactgacttatcccaacgccaggttccaacaacctatcgtgtctaaatctgtacttccacagagtgatgggttccctgc

SEQ ID NO: 60222 - DNA, 1062 bp, Homo sapiens
ctctcttcagtgaaaatagagaagaccaggagaaaggaagactaaaaagtaaagtgaaaaccgccttccaatagaatttggttgcagaaataatttccatgaaaaatggtcgggctgatattaggtctggagtcttaatgatggagtagtttccttttaatcatggtgctgtcttagaaatgcctgtctggaatgtgaccatgggcgggggttggtgtctggccactgcgtagtcggccttcggggaaagggtagccacaagatgttcccactcttctgtgagccctcaggaatttgaaaataagactcatgtgaaaacaggaacaacagcagcaacttcttgatgcagacagattcctttgttgaccatattctgaatgcatagctttagaaaagagacctcactgaccagcccggcagccagaggagttcccatttctgcaacaaactgcctctgaaacactcagactgaaaaagcaaaaatgatcttaagtggcataggaggattttagactggttagagggagaagttcctcagggggacgaattattgaatatctgtgtggctgttcttttattccaacatgattaactttgatgcttatcattccctatgggaatttaaggaaaagaaggctcataattgccagaatcttccatcctgtgtacatgcaaggctgagtaggaaatcagggcaaaggaattgatgaattgtctgtctctaaagatgaaaacaaagagggggcaacaactgtaagactaatgtgagactgtctgaatgtgaacagttatttcttgaatattcaaaaataaatctattttatttatttatttatttatttatttagagacagggtctttctctgttgcccaggctggagtacagtggcacaaacatagctcactgcagccttgaagtccctgactcaagcaatcctcccacctcatcctcctgagtagctgggactacaagtgcacaccaccatgcccagctaatttttctgtttttatttttttttagaaatggggtcttgctgtgttttctgctggtctcaaacacct

SEQ ID NO: 60223 - DNA, 1899 bp, Homo sapiens
ccctggcctaagtagctgggagtgggtggttagggtgtctggctggaatcacccataccagtctcttcctagtgcacctgctgctaccactgaggctggaaagcagattctttctggaatatccaatgtgctgggttctggaaggtgagaagcaaggcagttgtggagacttgggttttttgttttgttttgttttgttttttttcagcattatttgccaagctcccagggcacggccaccagcttgatcgggttgagactgctggggcaggcatccatctctagtactgaagtgaaggtgaggcccaactctgcatctgtgctggcagcttccaatcaaggcagcatggctttggaatcacacctgaccagagtttaaggaagcttcctctttaccaaaccaggtctatagtcacccagttttactgtgaagattcagcccagtgattctgcaagccatttaataaatccattttttttaactggctgaaccagttcagttctctacaactgatctctgactgcacaggggcctaacttattatatttgtagatattgtagtgctgcctgttctgtgtgtttcaggaaataggacaagtgctggagggtataggttgatgacttctggaggcttggcagggagctgtaagtgtggttttcaaactatgttctagagaacatggaagttctatattataaatactgcaatttcatgtaagatctcatttgaaaaatgagctgatgctaaactggtaaaaaatacaataaaataaaaccgatacacacaataaaaattaaataggccagtagtatgggggaaaaaaggagggagggagggagggaaggaaggaaggaaggaaggaaggaaggaaggaaggaaggaaggaaggaaggaaaattatgaggaaatttcaaaagaaagggagaaagagagagggagggagggaaggaaggaaatgaataaatgtcctttatactcagcaggagtctttaaatactttaatttgccaaaacattctcttagttttctcgcacttgatgtaatgaatgtcctgagaggtagttttttaaaaaccgagtcaatctttaagtaaaacatttcaggctaagaattaaccattgtaaggaatatgtcaaaaatttcttcagtatagtgaagcatgttttgtgatacaagcatccccccagtttgtcctttatcaactaggattttcatatatgaggcttgctgaaaaaaggcagcgttgtccaggtttcctcacttggctcccaattcacccataagaaagaatgttcttgtaaaagatcatgtggattcatgatgcatttgtgcttactttaaaaaacaaagttggtcagatatccttaggaatctcttgtgattaaaattcctgggttgaaactctagaagagatttctcaaactttgaagcaattgtttagttaatatggacctgagagattctatgccttttaccaaaaaaaatatatcttctaggattactttgcagatgggacataggtaaaaaagcatggcctgaagtgaggagaagatgtgatgaatgacaaaggtgtcaaccctcaggcaccattattttagagggactttcagtgatcagggactatgaggaggaaacagtcttagcagtgagagaggtcttagagaagatttaggttctcctgtttctttctttctttctttttttttttttttttttttttttttgtgagacggagttttgctcttgtcacccaggctggagtgcagtggtgtgatctcaactcactgcaacctccacctctggggttcagcaattcttgtgcttcagcctcctaagtagctgggattacaggcaacggccaacacacctggttaatttttgtatttttaataaagac

SEQ ID NO: 60224 - DNA, 1033 bp, Homo sapiens
ttcaaaaatgaaccctccatcaagtttcaaagacaacacagaagaaagtaggcaagttttatctatgatttatacctttctaaatccaaattagatttgatctggcttcatcaaaaccaataaaaatatcaaagaaccattaaaataagaattaatacaagtagctgttgggtaaaatatgtgttccagaaaaattaagataaagatgatggctgtaattgcagttaatattagaatataagacaaaagaagaaatgtaaggcattattacatggattgcattgtttaagatgaggtttataccagctcattagaaaaaaaaaaagttttaaggcattatcttccaacaactcttatatcttaatgtttttgacatctgattatctactaagcagttatatatcacagttgttttatgaaatgttttccatgtggctatatctttaccataaaacttcaaaatccaacaacacagtattaagtcatgcagtgagaaggccataacttagaatctatagatttccagggatctaatttaatacatggaaaaagttgatgtagtcttgataattgctttagccctcagatggttggtccttggctattagttgtcttagcaggttgggtaacttcagctgaagaggaatatttgagaggcagatcattgttgaagacttgaatggcaaaagagagttagaaaagtcatttctcccacagtgacaaaattccaaaatttttaatatgttccaataataccagctactactctacactttccccgggaatgacattggaaatttatggattcagatgctgtacttttagatgttctgcaatggtttggttggaacaagagatgagacattaggaaatgttacctgaactgtgtatgaggaaaaagattttgtttatcagcctcttttgtttccctttgccatgaaaactctatctaaaatctgttcaccatgccttactgttttcataaatgcaaaatatattacacacattatttttttttaattaaaagtttctg

SEQ ID NO: 60225 - DNA, 1027 bp, Homo sapiens
gcctgactttcctggtagggttggagggagccctctcctgccccgctcatgcctgactagctgcctaccataataatagaagtggacccacacagctcaaactgtattgttcacaggtcaactgtagttgtacatagccagtgagatcatataggtcatgttcttaatacactgcctgatatatagtaagtactctgtaaattagctgatggtcatagcgatgaactgaggtttttttcttaatgtctattgcattctaaggtaggacattacaaatttcatttagaaatatttacatcataatggttaaaattaagacatttctcatttgtgacgtactcacttttaacttattctttttaccgatgatgttaactcaaacctcatctctttcccaattcaaaaaaatgctctatcattgtcctttcacatcgtgtttcatttgctaagttcatgagttattttataataattaacattttagattggtcagctgaattctgatagtctttattctcattggtaacatgtcactgagttatattttaggttatcttagatcccatctctaaattctaatggccactctgtgttgcactgttcttttcaattctgtctttcagttcctgggtccatcagatctaagaatgtgactgaggtattccagcatggagagagttaatgtgaggttgaatgtggataatgcttcagaaagagtccaaaaaatacagaaattatgctaataggaaagaatgagtatcagaagatttctagcaatatagcagcatgagggatcttagatgctaactgtaccccttgtcaccacaaacacgtagcgacccaggatgaaatataataataacaaaaaaataataataatacatggcaagtttgaaagcgatgaaaggaaatctccagattccaaaagtgaagaagaatatcaaagtggaaatcaccatggacatggatatttcagagatgggtaccatgtctttgaactaggactttgctacttaacatagcaaca

SEQ ID NO: 60226 - DNA, 1014 bp, Homo sapiens
acttaagattgaaaaataacacaaaattccaagcaagaaacatacacacacacacacacacacacacacacacacacacaggcccactttggagaaactgcaaaacatcaaagatcaaaagaaaattttaaaagcagctggagagaaatgacaggttacttacaaagaaaagaaaacttaataccagcatgcttttataagccaagaagtcagaaagcaagagtaatagcttcaaaatccaagggaaagaagttaccatcaaccaatatatatatatatatatatttttatccagcaaaattctttatttgagagtgagggcaaaaagagcctactttaagataaacaagattaggagtatttaccattcacagactcactgaaagtactattaccatatgtatttcacacaaaaatccttaatacattataagcaaatcagattcatcaaggtgtaaaagcaataatacatcacaaccaagcgaggtttattccaggtatgcacggctggttcaatatttgaaaatttataaagtaatccaccatatgaacaggctgaagaaggagaatcatatgatcatgttaattgacagttaaaaatatttgataaaatctaacaacaattcatgattaaaaaaacacaaaactcccagcaaactaggaatagaggtgaactttctcacttcataaagagcatctaccagaaacctacagccaacatcatactttccctctaagatagggaacagccaggagtgtctgatcttaccactcttaacataattctggacatggtagccactgcaataggcaggaaaaagaaataaaaggcatgtagtttgggaagtaagaaataaaactgtctctgtttgcagatgacattatctacataggaaatccaatgaatgcaccaaaacaactctcctagaagtaatgagtgagttcaagatcaacatacaaaatctattgcatttctatatactaagaatgagcaaatggaagccaaaataaaaa

SEQ ID NO: 60227 - DNA, 1050 bp, Homo sapiens
tgcagtatagtgcctgaaccataacaaacacttcataagttgggggtatttttgtttttaagcatttcataaaaccaatgtgggaaaataaatcatgagctatcaacccaccctccgaatgtatatagatcctgaccacttcttacatcccctactcctaatccaccaccacctcttgctgggacttgtgcagtagccacctaactggttcccctcttatcacgagcagtctccacagggcaacccaagtagttgttccaactcctgagtcacatcacacctttcctctattcaatatactgcgtggcccatcatttcattcagaataaaagagtacaagccttggctcatcccctgccaccctcctctcacctctctgctccaattcctggcatcttggcagcttctttaataacctagtttattggcaacaacctcaaggcctttgtactttctgttcttttttgcctgatatgttcttctcctagatgtctgtgggagagtggcttctccctcatcaatctttattcaaacaccatcttatctgaagaagggctctctggccacaatctctgaaatatcctttccttccctgttaaatttatctctaacctgccttatttccctatagaggactaatagccacctgatatagtatacgctcattcttaaactgacatatgacctgtctcttgctaaccagcatcggtggtccatgacagcaactatcttgttttgttcactgctgttttacaagctcctagtatggtgcctgcacatagtagatgctcaataaatatgtgttgcattagttaatgaactggcgtggatgatacagtagtttatattggactttcgaagcacttttacatacacagtcttatttgatccttggaaataagaatcacagggggacagattttttttcttgcccctacacctacaaagattggctcagatcccaaaggggcttccattttttccaaaaccaagtaccctgacaccactttacttttgtacttatgtcaaatattactattttatttgact

SEQ ID NO: 60228 - DNA, 1122 bp, Homo sapiens
cagccctagccattgacctcatcttgtcacacctctgctcataatcctctgttgccttgcagctcaatcaagagcacaagggcctccaccatgtgatcacctaccacctttctaacctcttctcattccatttctcatctcactcatttccctccaaacacagtagctctctgctgtttctggagcacatccagcatacttttgtctcaagaaaacttgcttttccctttgcctccttcccccagatatctacaagtctcgcttccacacttcttccaaatatcttcacatcagcaggatgtgcaactactatgaataaaatagcaatccgcccacttccaccccactgctctctagtccccacaccctgttttgtctttttccctgtgtcttggcacactctacacttacttgtttatgagtttagtgtctatctacatcaatagaagctatgatctctgagcttaccatcgtatcccctccttttagaagactgaggtacatggtggtattcaaaaaatatttctagagtaaatgaaatccatcttttaccatacccattttgtttaagtgtgaagtttaatgcaatactgtttctctgtaaatctaaaacagtcctaagtttcatcaacagttctctattcctaaagaatttatttaaggatcaagataatagtccagtctgctttgctttagttgttcctccttgcataagtatgccacataggttgaattatcttgtcctgtggaaaggggacacagactattatcctcccttttgttatgcttgttatataagcataatgtttacatatgagctgaattgctactatagaaggtaaagctgacagaatgcacagatgctggtaagggaagcagattccttccacctggggtaggtgctcaacttgtttaatgcatgttatgattggggtagctcagtatgatgactttgcttgataagttcctcaggtaacaaagcagatgggagggggtacttatagggttgattgcttttttcccagtgccttgagttggaaagccaacaattgtcgttttgatcatgaggcatttagggggacttctacctctgtatgtaatggggagagaaaggtgatttat

SEQ ID NO: 60229 - DNA, 1951 bp, Homo sapiens
gaaaactttagagcgtaaatggtaacaaaagttgttccccaatatataaactttggataccctaaaagcagctcagcgtgactcagtttttgctactagcataaaaccaaaaataatcagatccctgcagaagtagagggtactcaggtatccacctccatagcactacttaagaaataaaaataaaataacctgttcatagagtggacagcacaacttgaatgccaaaaggcagagaaggttctgttcctggctttgatgctgacgcttgggaaacaccccttgtctttctgcatcacacacaagcctgcctggggcaagaatccagaggcttgtatatgcccatgtctaaatatttttaaaggtataaatcaagctaacaaactattagataaaatgtgttctatcctcatactttgacaaatttaccttcacgatgaccgaggatgccagatttgattttagacttctctgagccctcacagttgtgggctggatcatgtgatcaggaagggtcccccccacatcccagcctgcagcaagccatcttccctcctcttcatcctccctccagctcccttccgctttgcaaggaggctcaggcacacgtgagtgattttcctcaactacacgggcaggttccctccatgtgccctgcaaacagcattctttggtcacccctcagtgtgaggggtgcatacaccaatgtcaggcaaggattacgggacaaggactcccttcccagactcctcctccattccacagtttgacccttattccttcaggacttatacccctaatccctgtacttccatcaagtcagtcacaaggatttagggaagctgatcatttctatgagagctggcaatggatggattaggttcctttatgttttcaggtcacgtaagagatacagcgagtcttttgttttttttaagagctccaagatgaaggccagcgtgatatgaatttcctcaaactgcccacacagtctttctccccaccctctggggaaaaaaatctgagcctccccctcagatacctaagaagaagctgagaaaaatctgcccagaagaggaacagctgctgagagcctgcctcaccctccctggctggccgtatttccaactttgttgccttcttcagtagatctggggaacaaaaaagcaaggcgtgaaatttgagtgttcccaagtctctctccatagctgcccgtgagcagtgttaccttttgattgaggcactcacgcttgagggccacatgaataaatgcacgcctaagtgtgagggtggcaaagaccaatcattcacagactgatgggaattgtttccctaaaatattcccctgagctgctagaaagggggtgatttccacgagagcatagactgatgcggactagaattgctaggacagggaacccccgtggacggctggccattgagacacagtggagaggaaggagaccatggtgtgaagtctacgaatgagagtgaggaaaaggaagaggtgggaagaagtggtacccaaggataaggctttatggaatctaagcatcccacatttactgtttttaaaaatgagcttgaaaaattagggtgtccgtcctgtgaaatggaatcccacagccacagatctgctaacatttgtttatatttgttgtcaaagaatagcttgatttttttttttttggttattaacataacttaagtggaataaaagtataaaggagcaagcaccatggttttctgtcatctcctctcctcttttcttttttcttttctgagacagagtgttgctctgtcacccaggctggagtgcagtggtacaatcatagctcactgcagccttgatctcctgggctcccgggtcctcctgcctcagcctccgtagtagctgggactacaggcatctgccaccaccaataaaaaaaaaatgctgctttttttttat

SEQ ID NO: 60230 - DNA, 1037 bp, Homo sapiens
aagattgttcagaggacttgatgtatatgtgaagcaaagaggtggtgagaagtgcgtggcgcagcgtgtgggatgaatgtgcaccgtaagaggtccagtcccactgcggtgccctagcaaagtgggacgcttcgggaaaataaggcaggaagaggagttgaggtcacatggtgaatatccttggataccatgttgagataaagatattttagaagatgtcccacattctggaactgattctgagacgcaaaagataatgaagatgtgtgggcacaagtgtgacctgccaactgcaccctgctttttgtaaaatgtgagtaagagatcttggttaaaatccacattcctttgcaaagccatggaggtgaaagaacccttcagtgttcaggcttctcagggggacactgagcattgcaaggttcatatcgacactcactctggcacaggtttcagagctcggcacctccccctcccaccccacacccccatccagcatgtggatccattctaaccctgtgatggcattcccttcggttgaggtaaagacgggaatcttttttctgagctgcacccagcacgcttcaacatcttcaagcagatggtcagcctaaaagtgtgaggatagctcaggttgccctgagaggatgcttgcaggagatggacagagctaaatgcaggatttcaggagaagtatgcttcaagaaagagagcatggcatctatgaatttggcagaagtggacatatagcttctgccaaatgatgagttgtaacttttaggcaaattgcttggactttctgagcttttatttccttatctgtgaaatggggtcatagtatccatctgacaagagatactgtgctgatgagatgaaatacatacacatggtttctgacatatggcaggcatcctataaatgcatttctctcatcctcatcccttcttcataaaaagggagtttgggaggcagagtcccctggacaacctctgggaatctggagcagccagcactaacttggagcgaggaagcctgtgcca

SEQ ID NO: 60231 - DNA, 1089 bp, Homo sapiens
gctgagcgagggaatcttcatctgtatttacagctgctccccattgctcgaatcactgtctgagctccacctcctgtcagatcagcagcagcataagattctcataggagcgtgaaccctactgtgaactgcgcatggtgagggatctaggttgcatgcgccttaagagaatcccatgcctgatgatctgtcactgtcactcatcacctccagatgggactgactagttacaggaaaacaagctcagggcttccactgattctacattatggtgcgttgtataattatttcattatatattgcaatgcaataataatagaaataaagtgcatgctaaatgtaatgcgtttgaatcatcccaaaaccatctccccctaaccctgtccatggaaaaattgtcttccacaaaaccggtccttggtgccaaaaaggctagggaccactgatgtagcaaatgtccatctctcttcccaccccacccagccaggtagccacccatcacatccacagaagatggaagagtccacatcaaacacactggattctggctgaccaagcataggggaaggggctgatatgccctcgaccgaatgctggcaaaggggccagctccttagtcaggacactggagggtcctctctaggaatgctgaatgacccatgagaagagacaaacttttgtgtgtatgtgagagactgagtcttgccttgctctgttgcctaggctggagtgcagtgacatgatcagggctcactgcagccccaacctcatgaattcaagctatcctcccacctcagccccctgagtacctgggaccataggagagaaccactacacccagctaattttttgtatattttttttagtgatggggttttgccatgttgcctaggctggttttaaactcctgagctcaagtgatctgaccacctcggactcccaaagttctgggatgacagccatgagctaccatgtctggcctgacaaacagatttttgagggtcatattcagattctgtctggtcaccccatagcgaagcagccagacccacatataaaacttcccaaaattacaaccgtgcctccctc

SEQ ID NO: 60232 - DNA, 1114 bp, Homo sapiens
tctttaacacctgcttggacttcaaagaacgaaggtgagtacttacacaataaccaaacagtgcattccttggaaattccaaacctagatctcttgttacatgcttgccaagcttgtcctgaacgttcctaagtgcagcaggaaagaagtggctcagcttgtgctgtgtgtcccctgagtcttgacctgtgactaataactgtttcctttgtgtgcaggggttctctatctccagtatggagatgaaaccaagcagctcaggatgccgaatgaaatcacaagtgcagacacaatccgtgctctcttcgtaagtgcctttccacagcagctcaccatgaaaatgctggaatcgcccagtgtcgccatttacatcaaagatgaaagcagaaatgtctattatgaattaaatgatgtaaggtaagttgtgacatcattttttgcctgccattttgccttagagttttttttgttttttgtttttttgtttttgaggggtttttttttacccactatattgcatttagagtgtttttttgttttttgttttttgttttttgttttttgtttggtccatcatatccctttcatagagtttataccaaattctaatttctttatatcctagtgaagaaagcagattcattatcctgattggttgggcttatttcacccagtcagatgatttcactatctggttttctacaattcatttacagggtatagcttataaaaacgaggacaaatttctccgccacagatttttgaatgctacatctgaaaagaacattagaaatgattcagtccaccattttatctaagggttagggaaactaaggcccaaaaaggtagcggagagacctgatcgaggtcttaagagttgtaggcagtacttcattcatattggaactttcccaattccccctcaagtgttctttcctccatagaaagaccctgtggacattttaggtaatgatcccactgggtcgttatttacacataacaagttagaataaaagcagtgggctctgtattattttccataagaaaagagactgagaagcatcttcactttccattcatttcttaaagagttgtcctttacccaaagatctta

SEQ ID NO: 60233 - DNA, 1010 bp, Homo sapiens
catgcctggcctcatctctctttttttgaagacagggtcttgctctgtcacccaggctggacctcagtggcatgatcatgtctcagtgcagcctcgaccttctgggctcaaatgatcctcccacctctgccttccgagtagctggcactaccggcacatgccaccatatctggctaatttttaatcttttgtagagacagaatctccctatgttacccaggctggtctgaaactcctgaggcaagcaatcctctagtctcggactcccaaatggttgggattataggcgtgggccaccacacctggctcaaaagcatctttattgtcattttggtgtcatgtatacagtagaaagaactcatttgatctgttccaaccaaacaacctggaaaacaggacttagatcaacacaagcaatcagttgctagtatggtctctaaacattttagaactccacagattatttagtgactaatccagccatttcattttatggaaccagaaactcagacgcataaaatttgagggacttattcaaaagcacacagccagctaagtaccaagctctgccccaaatatggctgttcacacttcttggtcaagaactttttgatttcttcgaatgttccctcaccaaatcactggaggcagaacttggggtttctgagtccacaccctggggggaatagcaagttgccctgtttcttcatcatggaattaatgggtaccacttttaaaaaatatgcctctagtgcataataaatgtaaactgatctgtatctaccaatgatcacaaatgacatatttaggcatgtgcccaggtgtatgagtaatttagaactttcaaagtttgacacatgcctcaaggtatagatactacatctgtttcacaaccttacagctttttaaaaatgtgtttaaatattcatgggtacccaaaaattcatgtttgtttttaaactaaattattaatcaagctgtcaccaaaagaaattttttgcattcacaaa

SEQ ID NO: 60234 - DNA, 1061 bp, Homo sapiens
tggggagctcctttagtgaaaccccacatccttacctctgtgagtctccccttcatattcacccagccccctttaataacagggctgctggttccccctcaagccgacttctaacaagctactggagcaaccgtgcaagcttgggctagtcattgcttcaaagcaattactggcggatatttaaaggagaaagagaagactagtccaagaatcctccacttcagttaaaacagaaacacaagccagtaatcccagtgattgggtcagcccactaaatgaggctgcacctggaagagaggaattcttcctcctgcccacatttctctgagctagcccagccggcattggaagggatcacagtgtagacagagccaaaagggccttgggtggcccttctgctgatgaaagctgaacatggagggagagagacttcatagatattcatgtgctcttcgataattttaaggtaggctctgatcctgtcttttgctacgttatgacaccttggctctaagagccgggttcagagaaaaaagaagaatttatctgctgctatttcttcacatccagcaattcgatttgtatatagaaaaactaattttctaacccactatggaaggaaaaaaggcatggtaaagatattagatctttttggtactgtttttttttttttttctggactccagataccttttctttcagttgccgaaagtgtttgaaggcaaaaaaaaaaaaaaaaaaagaaaaagaaaaaaatcttctttcatgtacattcattagataagcagcaaaccaggtgtttgggaaaagtaaacaattaaatatttaaatatcaaccaaatctctttgaatgtattgtaaatattggaactttatttttttttttaaagccttagtttccatactcggaatcttgaaagaaagttcgtgccacccaacatttatgggtggggaactatactggaggaataatactttcttggggaacaagaaaaggagagaaaagctgaagtcatttttcttcttcttttccgtatttataattgcctattttatggtca

SEQ ID NO: 60235 - DNA, 2893 bp, Homo sapiens
agggattaaaataaggctggacacatcctaatttatctttaagcaaggagttatgtccttactttaaatgaattctgaaaatcttcctataaaagggtccctggtccacagtatattaactgactcagaagatctcttgcatttctttctccaattaaagcaaacctaacatacaaaaaggcaaacagcaaggtgcacaattgcatggaaaatctattcatactcttacattagctcttccaagttctaacattctaattcaatttctcaccttctaattcaggagctaccctggaagaattttgttgttgtactgtcttaaatattaccatatcctctctgagccatgctgaggtcataatacaaaaatccgcatgatttgggaactaaaattctctagctttagattgtctcaggagattatccaaacattcaaagcacacagggatgttttgaagaaaaaagaaggagaaactgaaaaagcagattttaagatcatattaatgcaggtccactagaaagggattgagtttctaaaaataaggctacattcctctgtagcaaaactgggaggtaaaaagaagattagcttctcagctgtacaccccctacacacacacacacacatttggaagacactgtgccattttttctcatcttttctacagattagcacttggctggatgctcaagtttagctagaaaaataaataaataaatgattaccttttattgccaaagaaacccaggcactgttctgtcttggagctgcagttttgttcctgagcgaggctgtctctgcttcctgatagtacatattagtttcctgttgctgctgtaataaattaggacaaattcagtgacttaaaacaacacagatttactctcttaaattttagagtctgtagactgaaagtctctggtctgacataaggggtcaccagcaggtatgcattcttttctggaggccctagggagaatcttttcttttttttttttttcccccaacttctagaggtcatcaacatttcttggtttgctgtcctcttcctccatcttcaaacccagcaagatagcttccctttgaccctgcttccatgctcacatccctaaccctcccatgtccacttttaaggacactttaaggacattgagcctccctgatcctccagaaaaatctccctatttcaaggtcagctgactggcaatcttgactcccccttttccatgtaacctgatgtagtcacaggttgaggggactaggatgcagacatctttcagggaccagcattctgctttccatattgggtaagtttagaaccataaaagaagccagcagatctagctgaaagtgctgggagaaggtctgtccttctggactggaatatgaatgacgacattgtgggatcagagcctacacttctggagggaaaggcctctcacgtactcaactgctgttatttttgtgtcagaaatgatgtgtgacttgaattgaaagctgtgtcgctacttcagaaattctaggattttcagccttattttgccagttatactttatgtgtaaaccagagccacatggagacagattgagtcatgccaatcgtgaagcatggactaaatattacagcaccatttgccttttattactctgttattctctttcttggagacattcatcaatgtcttcgctccttgaatatctttattttttgctatgtctagccttcaccctggagttccatggtgctgagagttctgttcctatcacatagagccatttccacaccggtgccccagaatcgcctctgagaatcttgtttgtggctggaaagacacctgttttaaccctccagcagctctggtacctacgtaaggaccagcagtgaggactgagagtatcgaatattgaccgtatgaacaaagctgatcaggatatgcagaacatgtgctgtgggtttctgcagagtggttctgttcttacttcaagatgaaaccctgctgatcactttttctgggttacccagagcctactttaagccctcattttgtgtgtgtgagaaactcaatcattgtccccaaatgaagggacagtaaatgttcaccatctaaccagcagaaaagcttttgtgtttcaatgcagattacttagaaatgagaaatagaaagcggtttcaaagccagctaggtgtgatcatgcctgcagtttgcaacttggttcctgttcacagattgcagacgctaaaaggcatggaattcagctgccctcaccttttggctctgcaggttggaattctttttcctttcttgatgaatgtggctgcattgccattaaagggcaggaagctttgttgagccctgcctctggagcccagctgcacaacccactgcccatggtggagaacagaaacagagaacagagcaagcatcaattgttgtagactaaaccacgctgcagcgtggggttagggaactccgtcctcccttatgtttgcaatgtgagcgtggccatgaaggaattcgatgctaactactcacatgagtcagtcactgcagtcctgcccctgatgtcattagacctcactccccagcctccagagacagcctggcacagacctcccagctgcctgcttatgaccaataaacatgcatgtcatgaaaaacatcagttggaataagcagaggggcaacaaaagtcacaccagaactcctcaggggctcctgagactttccttaaccaatgaatgtaatatcttgcctttgaaagaaaagaaaatgtaaaactctccatctaaaacagtcttcccagagcggttttatgattggaaatgtgttactcaggaagcgtgctagactaggcctcagagtgtgcgtggaatgcatgcttggtggggaa

SEQ ID NO: 60236 - DNA, 1004 bp, Homo sapiens
gactttttaatgatcgccattctaactggcgtgagatggtatctgattgtggttttgatttgcatttctctgatggccagtgatgatgagcattttttcatgtgttttttggctgcataaatgtcttcttttgagaagtgtctgttcatatccttcacccacttgttgatggggttgtttgtttttttcttgtaaatttgtttgagttcattgtagattctggatattagcactttgtcagatgagtaggttgcttaatttcattatacatctctttcatggtatctttttatatttaattttgcttcattctcttcttttctgagcacactaaaaatatatccattaaaaaaagaaaagaaaagaaaagaaaaagagtgagttgcccatttagtatgtgtgtctgcagtggccactgaactcagagcactttttctcacagggcagtgttcttgttgagaagaggggtttgggattcagggagtatcaagtcatcccgtagtaacaaaagaatcccacagaaatggaagtttcagaaaacactcctagctgataatctatttagagatcgtttttgacccacctgtaatatccccttcactcatgcaatgacaacggtatcaataactaacattcctgacgtgcttactctgtgccagtcaccatactgagcaatttgcttgtatttactgccatttgattttcacacctatacaatgtgagagaagttcttattattctcctgtttcagaagtggaagctgaggcttaagagaggtcagtgtgcttgctcaaagctacccagctaaagagaagtggagctgaatttagagccaggcaggccaactctagaactggcctttgtaatcatgcctgtggtcactaccgtccgtcctttcccaccactgtcttcatcagtgtgtcgatgagtcatcgccacatgtccatgggcctctcatttctgaagacctaacccagaagccactctcttcatcaagcctctct

SEQ ID NO: 60237 - DNA, 1929 bp, Homo sapiens
ctccctggctcaagtgatcctctgccccagcctcctgattagctggaactactggcacacaccacaatacttggctaattttctgaattctttgtagagacacagtctccctatgttgcccaggctggctttgaactcctaggctccagggatcctccctccatgccttccaaagtgctgggattacaggcatgagccactgtgcctggccccttgcttttagattgagtcgatagtcagtatttcaaatatctctaaacttacaccgtaagggtgatgatttttgaacagttaacctaacttcattactgtaagcgtttactgattcactcaatcagccatagtgagtcagatccttcctctggtctcagctctcatgcaagatcctgaagatatattggcaaaaagcaataatgatacagacaataatcaattaactcaataatcaataatgatacagacatctataatttttcacataagttcaggctcatgaaatccttgcctgtgttctataatttgctggagttaacactatggaactcatttatgagtgatatacataatgatatcttttttatattgtgcttttctgggaggcaaaaagatgtttctgttatgattgataaggaaggactcttacagaaatgattagctaggcaaacacatttgaatacagtggctgtccagaacatgggagatattttcttgttccttctctgcttccagttataaagtcttattttttagaagcaagaaaaggtaatatatgcacatctgatatgcaacttccaagtgatacaaatctcatctttcctgctgcgtggctgcttgcttttccttgtactatttttttttttattttttgtcattgagaggttatgacaacatgagccatattgtatttataaacatcacgtgtttccttgatatggcttgcagtttctgccagacagaacacatggaagaaacatttctcgttagttcagcattggttttagttatgctgatttccgggacaggaaaaatgccttcctactcagaattaactttcatagagtagaaacaaaacctctgaatgtccgtgaaatagttttaacaagagtggatactgctcctttaaaccacatattttgactaaaagcttccttctgtaaaaaacccaaggcttgcatttagtcaccatgaagacaggcaaagctgaaagcattggagagaggggtggtttcgaggtctctgcaagtctagaaagtttcttctagaaaagaaaggctcacggaaaatgtaaggtaagaactgtgcctttatgataggatattatctttagaatcttttttcatgctctggcacgtttatctttcattaacttgtcttctgtattcaagttcaatgcaataggcgattgcaattttaggttttattttaacttcttgcacactgcctagaagaaaacctctctttgttattgacattattctgtttttttgaaatccacttaaattaaactgggctggtcttcaatctataaatcttgtggtctagtttctggctaaccttataatttggaatgggatttaaagtgccaacacagtttgcttttacaggtcttgttgatttatgtgctctgtgacaattttcagtgttttcatgaagttgttgacatacattcagtgtctgaggcaaagtcgataatttgaaggcatggtacaagcaaggagggaaattcatatgtgtcctttaacattccagggaaaaattatttggtgttttgttcttgtgaaaatcactttaaatttaaaaataaaaataacctttatcctggtcttgaaaaaattttaaagaaatagcagtttaatctgtatgaaatcacattaaaaacttctacagttttaaatgacaagcttgatataacaaatctcttatagcagg

SEQ ID NO: 60238 - DNA, 1065 bp, Homo sapiens
gctctcttctttgcttcatgtgccgtgttgctcataaaaaaatgtttccataggacagagcaggaagcttgtttgtgagcttgatttgggagcaagaaagtatctttgaatggagactggctaactgtgcctgcccactgcccttcaggctgctggcagagctctcaggagggggacaggaagaatgttaaggctgaaggtggagggttctgaagttagggcagctggctcagctgcctgagagcccgaacttcaccttcaacagtgctcttcccacctcctcctgaagattgagacatcaacacagcagcaaaaatatcctggtgatttgtaatgcaaagtaattactgctaacagcatcaacaggggatgcagctgctcacaacacaggcttcaggatcaaggcttccagccccagttcagcataaaatccaggattggctacacaaccaacacaactcaaagttgattggagcagaaccttccttctccccaacaggtcctagggttagctcccgaagagttctgagccgtggctggctggagtgcacatgagaggtttttgccacatccctctgccctttgatatccaaaccacatcccttttctttgctcttataagtataggtgttggcggagattgcttttgactggggacatatgtcctttcattttcaagttgcatcccttgtacctgcatgttgttcacttgctgaggtcttgcttttctgtgttctttgtgggtgcccagcaaggcatcccagaccatactaggctgttgtctaccacatcagcctaggcgccccgagtcccagaccctactctatagagggcttccaggggaccatttttctcttgatgctgtttctaacatttctcaaatgagcatgtgttacttttatataaatttgggggtagggagagaacacgttaatcttttaaaaagaaaaaagtgtttttaagatacattttgcctactggtaacacattttcttctgtcctagtttttcttgtggagcaggtgatctctgcttgcatgtggtttgcagaagtcatagatactct

SEQ ID NO: 60239 - DNA, 1078 bp, Homo sapiens
ataaagaagtgacaaaaatagggctggatctcaagtcaccgttcccaagaccagacccttgtctctatgcagtgccatttcagcctgttctctgcttttgttctcacccctctggatcttatgaggtttgtcttcttgattgatttagaaaaacactatctatttgactatctatttgacttctcttagccatcttttgtggtacctgagtccagccagctttcgctaatcctctagaaagcaggacaactctcttttctggattatcttactaaaagagaaccagaaatcctgtagttaggccagagctgattaattggaaatgcatgagcctggactaaaaataaatggattttaaactaaccagatttagattatccagtattttttatggaaggagaataggccatcatgtcaactgaaaaatagcagctgtttcaaattatgagatactttgaatagagcaatattggctcagcaagattgtacagtgttatggcattattttaaaaaacagcctctttgctgtggcaaatagctcctgcagttatgctgtttgaaatgttaatgtatgactcctcacattactttcagagttgttcattgcttggaaccagtgattttaggtggcaactagaaaagcagtttgtaaatggtaataattatatgatgttgttttgaatgaatgttggaaagactggtagcacaaagaacttgagagttacttttcattaactccttaagtcacaactataattcttagtcacgactaaggagagaaaaagtcaatttaaaactgacttaaagaaaattattaaatgagtactaggacagctgatacaaagatatagccaaagtggtgatagtatcttgttaatgtatgaagtataaaaaccaaggctttaagatgaagcccaaattgagggttcaaggaaggaacagggtaaaacttgatttaaaagcatacaattggcaaaaaaaaagaaaaacgaaaaaaaaccattttgatgtccaaatgaattctaattcctctctaagagttctcaagacgatcagcatcgtactatttggcagaaaa

SEQ ID NO: 60240 - DNA, 1049 bp, Homo sapiens
aacacaaacaacaataaggaatcataccaatgccaatgatggggcaattcagaaatagcaggggcctgatctgtagggtgcttaaacttccatgcatgattttcatgaaatgcagcacctctaaagcataggactggtggtcagggtctgatagcttcgtctagaatgagcatctagtgccagtccttgcagtcacttacaaggaaggagggcacggaatagaacatgttgtagatggttgaccccttgcagtagggactgagggatcatgacggatacatcatggatggaaatccacaaagtggaaaccgtttttgcttgcctttaaaagcaaatctaaaaatatgttttctagcagctgtgtaactgcaaggaaaaaaaaaaaaatctgctccactgcaacacaactcgctcaccagatatctgcagggttcagatcttaatgcttcagaaatttgttgcagattttactgtatatatttagaccaaggagcctattagcttgcaatctgagagaacctctgcattttcatgaaaatgagaaatgtggcactgttggcaacctcgggctataattatgttaatctgaccattttaagactgaaatatgttgttttaaaatgtttctgtatttttattattcgtaacaatgatctgaagaaatttactgaaatgctaataagtttctattcagtatcactttgagactagagcacaaaaaatgagtcagatgtggaattttgatatttttaattttggcacagaatttttatcgacagatatgtactcatatacatagagtatcttaatataaaaactacccaaatataattttatattttaaatatagatacagtgagtatatgtgcaaagctgtcttggcagatatgtgcaataacaaaacatctctacatttgcattaaattcccaatctttgctctgccaaaaattaattttgcgcattattacaagataaatgtttttctatcaagaaccatgctaaagcacccagttccctgtttttgatataaatgtaggacaggactaga

SEQ ID NO: 60241 - DNA, 4186 bp, Homo sapiens
ggagtgcagtggtataatcatagctcactgcagccttgaactcctgggctcaagccatccttcacctcggccttcaagtagccagggtacaggcatgcaccaccatgcctggctaattttttaaattttaattttgcagagacagggccttgctatgttgcccaggctggtctcaaactcctggcttctagccatcctcccgccttggcctcccaaagtgctaggtttataggtgtgagagccactgtgctcagccctaatcatgaactttgaaaagtgctccatagattacaaagcattttcttcacttgccttacatcctgtgtgggaaggaagtctttccttcctggaggcaacgggtaagaagagcaactagacagtgtgtagctccttactctcggtaggcatttcgtcatatggagcatgacttattgacttgcttctgttctttctcatgagctactcagtgtcaggagtacagggcttgacttaaacatagggatactcaaaggcccacctggcagtttgttgttgggacacagggaagcagattgtgtctctgaagaggaggcttctgtcggtgtcagagcctggtggggaagaagggattggtcaatatttggctaaactccttcagctgttggtgcagcaaaaggcatggcagggcgtgggcagagatgcctgccaagcccggcctcagggcatgtacagctcccaaactggttgtctttgaggctgttatttatccaaataaggagaagcagtagttttgctgaccatctcagatttccaagccatgctccctggctggctgactgacttgctatttgaactgaaaacacgaaggtattcctttgaaatggagcagtcttgtggggctcgtgagtaccctagagtcattacttggaagaagattttttttgctccccacatttgtagataacatgaacatggcttggtctatttgacccttctcttgtgactctggcaacactcaatacagatggacctgatctgggacagaaatagtactcattttcagaggttcttgaaccactgccctcctttgaagaggattcaaaggtcagacctccacactgatttcttaacactagaatgcaagattattctagcacttcatagatcctggccctgttatctgacttcaggtaagatatttgaagtctctgagccccagtttgttcatctgtgaaatgggaattataatgtatctaatgggaatgagatgagaattaaatgaggtaattttggaaagcattggtaaataggaagtcacccaaaatattcattttcttccctatttccatcttctcttggcagatttaattgacaatatttataatagagaaattctagataattatgattgctgtccaaaggatttaaccaagctcacagtagaatggagattgtgatgtgaacgttcagtgaccctgcattactatgtccctctactcactaaagcagtggttctcaaagagtattccctgaaccagcaggtcagtatcacctggggacttgttagaaatacagattcctcggcaccacccgagacctactgaatcagacacagtggatgttagacccagtaatctgatttactaaactctccaggtgattctgaagcccaccatctgagagttggagaaccactgtccgagagtaactcactggttgggtcggtagtctagccattcccccagggcacctggactttcctatcccttgtccttgaccatgccttagttcctgcctggaatacctaagaaagggacctctttcttacctgctgaaattctattcatcattcatgaacccactctcacctcttcagaaaagtgttcctcagtcatccccaccataagaacctcattattctatgaactaccagagtatttgtctgttgcactcatttgacacttagcaaagttattcttgctttctcatattttaatgttcacgtacatgccttatttttcctactagaatgtaagttcttcagaggtagaaatcatgtcttacagatcccttttccctcatcagccttaaccctgggctttgtatataggtagctactctgtaaatatatggacccacagaatctcatcattggaatgggccttagagaaagtctacatgagatttcttatttacagataaagaaagggatgttgaccaggcgtgatggttgacgcttgtaatcctagcactctgggaggcctaggcaggaagatttcttgaggcaaggagtttgaggccagcctgggcaatgtagtgagctcttagctctacaaaaaaaaaaaatgttttttaattagctggggatggtagtgtgcacctataatcctacctattcaggaggctgaggtgggaggatcacttgaaccaaggaattcaaggcttcagtgagctatgatcacaccactgcactacaacctgagcaacagaatgagaccctgtctctttaaaactaaaaaaagtgaaaagaaagaaaacaatgttaacacctggaccaaaatgctagttccgggactccccatttggtgttcttcccccatcaccctgctgtgccgactgcggagaaacatacctgggggctttcagagccactggcctggccccaaaactagcaggtgttctcatgttctctgccacagacttcaactaaacccaaggaaagcagatgggttttcaaagctatactcatttaatttataaacctggaacctcttacattttttcataactaatgaaaactgggaaagtacaaaattttcattcataagcctataaaattgtataacaaatggcatcaattcctagccttacacgtgagaatttccccagctcacacactccgtatacttaggatacccatggaacttcttttatttttgaataaaagttcacagtgaagatcattcacagtggagcaggcggctcttctgaacccaggaagaatgggcatgagggcttttttaatctaggtccccatcattgtttttttcatgtttattttgaggaaaaattgaacctggcagatctgtgaattactgtctttcggtgttaccctctgggactattccctcagacaatcctttcttctcttgacacatgggctgatgttgtttggctgaggatcaaaataatggcacaactaaaacacctttcatcagaagtcatccataacataccctttaaaatttgctccacagacacagctcactttatgctgtatgttttttcttttgcttggtaatagaacctacacatatcctactgagatcaatatgaacacagcagaatgcaggcaatggaatgtgtttcctgtagacgggctaagacggtaacccaggtccacagagttggtttcagaaaagctataatcaaagaaggaggaacagtgaaggtagacatgagacaggcctgaaggggttaaacctactagggagcaattggtagtaagaagctgagaccacatgaggctgtgagaaaggagttattacagaaacagacatcctgggatttgagtagctccattgtgagaagacattgacagaccacgaataaatggccatatggtttccaagttgacatctgccattccccaatgtgtttaccaccattttctctcacgggctctgaaaaccatctatcctttacactgcaattgtatagtgtgaaattctacatagatcaacatcaattcattgtttcagtttaggtatatcatatcatcaaactaaaatatatatacattttaattttcatgctgtaatcatcctaaagttatataacactccatctagctgttttcatatctgtcctttaaactgcaattgtagagcataacattctttttttgtttttgtttttgttttgttttgttttgttttggtggtggggagacagagtcttgctctgttgcccaggctggagtacagctgcataatcttggctcactgcagcctccatctcccaggttccagcaattctcctgcctcagcctcccaagtagctgggattacaggtgtgtgctaccatgactggctagttttttgtacttttagtagagatggggtttcaccatgttgtccaggctggtctcaaactcctggcctcaggtgatccgcccaccttggcctcccacagtgctgggattaca

SEQ ID NO: 60242 - DNA, 1092 bp, Homo sapiens
atggagtgaggtacttctcaacagacttgttcatgtttcacaccatggccagaaatcgaataaggaatccatcagtgatcacgcgtgggcaggcatgaggaacatcgttctttgcagaatagcttgcagtgtcctgaagtgcacagcaggtcacacgcaaacaaccgaggaagctggggttcttgctgcctcactgcttagcagctatgggaagctgggtgaggttcttaactccctgcacttctgtttcccaactattcaaaaagacataagacacctgttctatgtctttcactgagttctggagcccatgaaatgtcacaattgagagccctttgtaaactgcaaactgctatgtgattattggagtgtttgtgggtggggtatggtgagcacggggatttaaaatctcttgttagaatatgaagtgtcacaagcaaataaagcagtatatcctatatggcaacatgtggttgacaagttacatagtagtttcaagaactgtcataaagagaaaaataaagtctaaggcgctaaaaagttgtagttgggtgccgcagataacttactagcatccaatctagaaaacattaaaagggagctgtgcataaaagaacaaggttcgtccaggaaatgggtggatgtgcagagatggagataagagaaggaattatttgtaccatctgttgcaagtggcataaaaaagatatcattttacaaactgtaactatttttggtacaaaaggaggttgtccttggcctggggaacatgggagtagcccagcagaagattgagtgtcagtgagaaggacatttttcttttatccatcctacagcactgcacaattattgattgtggcttggaagcgaaatgatttatttaacattacttctctattctgctccagattgagatctttaatcactgttggacccaggactggtcagccaggtctggccactggagggctcagtagagttcctctgtcaaaagatttatagaaataacgctcatcttaaatatagccataagctaaccgctgactggaccatctctttcctgggaattaaataattttggcagcagtctgt

SEQ ID NO: 60243 - DNA, 1016 bp, Homo sapiens
tactattggccttgccagagcataaaaattacttcctgttgaggtaatcctgaatatttcctagcacgtccattcttaacactgactcagaaagaatacattgcttccactttgcttttaggcctagtcaatgaaaggaagagggaaaatgaagagtgggacactttatacactgctgggaagaggaacgtagtaatggctgtaatgtcccaaggtagagaaggcagagaaggatctggtgatgtaatcaaaccaaagcgtgggggtgttagtggttgcacacactcatactgaaccaaactttatggtgagttagcctgaaagagcccttctctggagaatgtgccttccactgagataaagccactgggtcctagatggcaccaggatattgtttaggaaattggcttgtctggttcattagcaggtactctggggcctttggagattgaactccacctctcttgggtgagcttggcgcttgctaaagagcatttaactcatcctgattcaccgcaggattgggctggctttcaaactcctgacagtgaattactgctcttgtaatgacgaatccatgcatgcatgctacagacagtgccctggagcattttgaaagtgaaaggaaattgctgtgaacctggcaggaaggaagagaagggagaggtaaactagacttcttctcgcattgaaccgaccgactctcattgtaacagggtcaacagaagccacctctctctagcgtaatggacatggtttcttgtggttttaccctttgttgcttttttttggagccagggtctcactctgtcacccaggctggagcgcaatggtgtgatcttggctcactgtagcctctcaacctctcaggctcaagtgatcctcccacctcagcctcccaagtagctgggaacacaggcatgcaccagcatgcccagctaagtttttactttttgtataggctgggcctccctatgttgcccaagctggtctcaaactcctgggctcaggggatc

SEQ ID NO: 60244 - DNA, 1025 bp, Homo sapiens
gaagaattataagagccatgtctgttagcacacctcacgccataagacagggtctttggaggatgtgataggggcggcatcgtggcctaatcagacaagggggaccactcctccatcccccttcctggaaagtacgtgcttgactgaagacacaaaacaaaacctgcctaatgtataccagattcatcagaagctgatagtgtgtgcctcccatactctggtgagaaataacaaacccttgctgattagattaaaagtcaagagcttccacattccttctactgttttccgacctcttaggtggcatctgttacaaccacttcatccaaatatttttcctagtgagacatcttaggagggtggcaatgtcacgtgctccatttgcccccttctttaataaccacaaagtgatttgatggcagtaaacagtttttttagaaagcctgcaaaggactggatttgaacttgaaagacgtcatggaattcttttggtcagcaagaacaacctctaaaagccttaaaatgttttaaaaatgcacaggctgcccagagcgtggtagttgggtgtggcgtgaagccagtggggcttccagcccagtgagtggagttccttgtcaccgtattcccacttggatagctttcggttccacccagtccccaagggctcagaaaacatgatggtaatcagagcctgcctgggagcgcaggagatgcttcctttctcccccaccttttgctagcaatgcattaatgccagtcctccgctgagagctgcacaagtcacttcgtgttgtggacacgcaccttcttgtacctgttcccctggaagataccagctgtgctgacagcggttgtagccagaggtctctggggatcgcctaccttctcgtccttcatcttgtttagggtggggcagaagggctctggtttcctttccagaatcccctctgcacagccctggtttgccctctctatctttccttctcgtttcagatgtattttccagggtgattgcagttccttgc

SEQ ID NO: 60245 - DNA, 1034 bp, Homo sapiens
ggatctttgtgtcttttgtgatgattttgtttctgaagaggaagctgtctaaaatattcaagtgtgcaaccaaggatttagatgaagccagcaaacaaaggaatcatgtaatcaggacctgagcgaatgtgcttactcacggcgttagttacacaggtgatttccttaagaaaaagtaagtggctttaattctttgagggtgaaagagtgtcttaagattccatttcagttttctctgcttacttcattgtgtggtctgattgagtggtatgtttacaaattctagacttggaagggtggggtttgaaatacaacaaactgtacataatattccttttccacaagcaatatatatatatataaatgctccacagacatgattacatgaggcagtttcccaagatgattttaaacaaatattttttatactaggttttttttttctggaaacaattttaatatgttgtttcttatcttacgttcaagaaacttctgaatgagtgatattcgatttgacttatggttcttttgggaaataatatatagctacatgtaagaatttctaactcagacttcagatcttaatttgaaatggccccagatattttctggtgtttcagaagtatggtgtaaacagcattttgatccgtgtgcagtctgtgggcagggacacctgcctgtcagcctgctattatgatgaggctcttgaagaaactaccctctttctaagaactggaagaactcaaataatgaagagacaatagaggtttgggcagtaatggaaagaagaaaagacagtgcctagccaagcagatgaatgaggtagaacagtcttgttcatacattgccattatatctagtgcagttgaatgaacattttctgtgtctgggcttaggtgcaggcaaatagttatctgtgttgtattcagataaggggttagaagaatctttatttttctgtgtcggtcatctctttcttgctgtaaaatgaaattgtttaaagcttacattatgacattagtgttgaaattctg

SEQ ID NO: 60246 - DNA, 2266 bp, Homo sapiens
agatgataagattagtagcatcagagagatcagtggcagaataagggactgggatatattaatgtgaatggcaactcgtatgtgtgtatgtgtatgtgtgtgtgtatgtgtgtgtgtgtgtgtgtgtgtgttgcttatttattttctttgtaagtttagtataattttctcccacaaggtctgactttgagtaccagcgcaggaaaaacccagtatgtatttaatgccatgtctttactcattagccaaataacagttaaaaaccaaaacaaaataaatctgtgttggtgacagattctaggaagatctctccttagtaagaatacccgcagcaaaggctgggtttgttttaaactgtgaattatacaatcttaaccatcatgctgcttccatctatcagattctggagtctctaaattctactttttattgcaagtgtgaccttggaaatcacattgaagacttgaaaacatccctccagtgatgtccccttaccttcccccacatcctaagagcgagttgccttaggttggtccctgtcttttatggtaggattcccaagttgtctgatcgtaagggttcattctagttgtggttttaaaacaaatgtttcccactctatattgggatcattgtgtcatttttcttcttgggctctgtttagagccaaggatgaaatacatgatcctggttctttttaaaactccgtcttagaaagtcagtcacagcttggcaaaccaacataagaattctgccaagacttccaacatctaagtcacctgtgttgatagagacattcaacctcagattaccaattctgtcacaaccgaatgtttgtattcagcgccactgtggataactcagattgatggtgactctttcggtgacccttttggatgatggcaagattattttgaagtggacagggcagggaagacacacaggattagctccagatccgggctgctgactgttcatggcaagcagccgtcctcattggctgaggtcccattctggttggttggtgtccatgccatactggatattagctgtaaaatatttcgactatcactggtgtttcccacatgaatgcccaatacaatgtatcagaattacttttagttaattgttatatttctttctaatctcatctatacataccactagtaaatctattgagatattctagttagatctttaaatgtttcattttaaaggttatttatatatctcctaaccattttttgcatgtcaccaagcatgtttttaaaatacctatgtaaatacctttgctgttttcaaagaaatgtactcaactttttatgaatttaaataaattttacattttctttttactaatattatttatccttctggacagttctatactctctagaatattttattttattttattttactttattttattggagacagagagtcttgctgtgtcgcccaggttggagtactgtggtgtattcttggctcactgcaacctccgcctcccaggctcaagcaattcgtgtgcctcagcctcctgagtagctggattacaggcgcatgcactgcgcctggctaatttttgtatttttttatagagacagggttttgccatgttgcccaagctggtctcaaactcctggcctcaagtgatccgcccacctcagcctcccaaaatgttgggattataggcgtgaaccactgcaccgagaccctagaatcttaatgtccctttttacactcctgccaaaaagaggaaagcttctgctggttaattgggatcgtagtcccccagataaagatgtactctgaaggtggctaaggaaggaaaagagaacagggaatagtgactgacctagttaggactgttgttcataccaagagggttctagatattatattgattgattgattgattgagacagagtctcactttgtcacccaggctggagtgcagtggtattatctcggctcactgcaacctccacctcccgggttcaagcaattctcctgcctcagcctcccgagtagctaggactacaggtgcatgccaccatgcccagctaatttttgtattattagtagagagggggttttgccacgttggccaggctggtctcgaactcctgacctcaagtgatccgcctgcctcggcctcccaaagtgctgggattacaggcctgagccactgtgcccaggcagttctacatattttaaatatttttctggaattaataacaataatgacaacagtacctaccat

SEQ ID NO: 60247 - DNA, 1271 bp, Homo sapiens
tctggtctaaagcactgagcacctgagtcatgagggtgtccaatgagcagggaggtcctcatgggctggagcatcagggcaggggccatgcagagcagacgcacctggagcctgacctcgaaccttcatatggatccccaagaactagcacatggggagagagaccctggagtgaggacagcatcaggatatcacaagttaggtttagagaagggagaacagattagcctatcataatgggagctctgtgtgtgttttgggaggggagtagagaggaagtggagataaaattgtaattgtgagggaggagcctgcatactccagggggcccagaaatagcccctataggagccaagaggccaattccgtggtgcccaggtcatgtattcaaaaagggctcccttttgttgctacatattagcaccttatttgcacttctcattggtcactttcattatgaaatccacttgtctatgtaaaacttgcagggcagggattctacaccgctggatccttccaggagcaagataaggaagccatgggagtcccactggttgttcctgcattcttatctacgaagtttaagaaagaaggtgccctctccatggcgcttgggagtttccatggaacttgggggcttctttagaactgtatcctagaataaccccaggcacttaccaagtgcttggtaaatactctttactacatgcagtgaatttttgtgataaagaagcagttagtttgtatcctgtgcattaggctctgtttcattttcaaccttctcctggtgcctctactatccctactgtcttccacatcatccacatcatggggtctcttggctgctcatcttggttcttgccattcaagcccccacctctttcctcgggtccctccctcatccaccctccaaccatttatacccttcttctctgtcacatctcctggaagtcaggatagggactgtgggctcctgtgacctcaccaatagaacttgaagaatggatggagcctgtctctccttccctcagttatttggagaatctcagtggtcatttccccactgcaccttgaccaaagcaaaaatatatgaaatcatcatatcctgagttatttttttttttattctactcccttgctaaacacagtaacatagttgcaaattacagttgaccattgaacaaggtgggagttagggatgctaagtcccccacacacagtaaaaaaaaaaatcagtgtagaggccaggtgcagtggctcatgcctataat

SEQ ID NO: 60248 - DNA, 3011 bp, Homo sapiens
cttcatgttgaataggtgagaaggaggaagagaagggcttggccttgctctctcaggagtggcaggggagggaggatatctgtgtatcagtcaacctgcacagttcaaagctgtgttcttcaagggtccactgccattgtactcttattgcttaattatttccttccagcctctccatgctgatttctcataggctcaaatgaagagttggtgaatgaatgaaacttcccttccaggttttcccccatgcatctcctttccccctgctcatctccctagattgtatccactttgaaagatgggaaacatggttactatttcccagggctaacagtagaaaaacgtgctcaggacaagttttagaagactcagcgtgagcactattgatacactagacctgcatttattaagcagcatctctaagaagctgtgacattaaaatttaagccaccacactattttttcctgaaatcccacaaaattgcactctccatcaggtgtattcatttcttgtggttgctgtaacaaattaccataaatttagtggcttaaaacgtcatgatttttttaaacaccataggtgtatcattttacttttatggagatcagaagtccttaatggattttgcacatcaatatcaatgtgtcggcagggtcatcctccctctggaggctccagagtgggatccatttcctcaccttttccagcttctagcagctgcccacattccttggctcatggccccttctcatagcaccttccaaactcttctaaccctacttccatcagcatagatctcccctggagctgatttccctgcctccttcctccgcatataaagacccttgtgattgccttgagttcaccaggataaagatctcccatctcaccatcctcaacttcaccccatctgcaaagtctcttttgccatgtaaggaaacatattcacagattccaggatgagggtgtatacatcttgcaggggaagtcacacggttacacactgagacttctcttgaaacacgaatatcaaagtcaactttctgatcccttgttttcttttcagatgcagagagaacttgtttatgcaagaggagatggccctggggcccctcgccccggatctactgctcatccaccccatgcgattccaaattccccaccgtctactccagtgccccattccatgcccccctccccgtccagaattccttatgggggcacccgctccatggttgttcctggcaatgccaccatccccagggacagaatctccagcctgccagtctccagacccatctctccaagcccaagcgccattttagaaagaagagatgtcaagcctgatgaagacatgagtggcaaaaacattgcaatgtacagaaatgagggtttctatgctgatccttacctttatcacgagggacggatgagcatagcctcatcccatggtggacacccactggatgtccccgaccacatcattgcatatcaccgcaccgccatccggtcagcgagtgcttattgtaacccctcaatgcaagcggaaatgcatatggaacaatcactgtacagacagaaatcaaggaaatatccggatagccatttgcctacactgggctccaaaacaccccctgcctctcctcacagagtcagtgacctgaggatgatagacatgcacgctcactataatgcccacggcccccctcacaccatgcagccagaccgggcctctccgagccgccaggcctttaaaaaggagccaggcaccttggtgtatatagaaaagccacggagcgctgcaggattatccagccttgtagacctcggccctcctctaatggagaagcaagtttttgcctacagcacggcgacaatacccaaagacagagagaccaggtaaggtgcagtgagggtgaccgagggtggtacctgggcccatgtgtcactgtgggcagctctacaggggtcaaaccgacagaataaatgtctgagcacccatctctgcagcatgtcctgtggatgctgcaggagtcacagagtggtgtcaaagccaccattgtctgcaaatagtttctaaattggcaggggttacagtcattaagccatgttcaagaagacaggtgcagcaacaatagtaatcagtcccttgtgcctctggagcatggatctaagagcattatcatttgtataaatctgaataatttggaagaaaattgtcattagcagaagacagatgaaaagatcaaaaggtcataataattgatctgctactgctgaaaataaggagtgagtgttttcagttttaactgttggaaatggcagtttgtgtttttccttgtggaatacaattttgttttctcatctggttgtgggaagtggaaataatgtgtctgttttctaggaggataaacatctgaatttgcatgaaaatagaatggcttagatttaatatttatctaggagtggtgctgaaatcagcaaaatttttccagggaaagactctctggggacttgaatttctttttaaatagacatattttataatttaccaattcagaagcttcctactctatcttgaaaaccttccaaagttcatatagtaatagaaaagctaattttgataaagggaatttctctagcctgaattggttgaaacaagtcaacataataatcataaaaatctagccaaagaaattgagtccaaagaaggtttaagcatgctgctacctattgttatatatgaatcaaggggtatgaaaaataagatgtccaggccaagtgcagtggcttacgcctgtaatcccagcactttgggaggctgaggcaggtggatcacctgagctcaggagttctagacaagcctggccaacatggtgaaaatccatctctattaaaaatacaaaaattagtcgggtgtggtggcaggtgcctgtaatctcagctactcgggaggctgaggcaggagaatcacttgaacctgggaggtggaggttgcagtgagccaaga

SEQ ID NO: 60249 - DNA, 2747 bp, Homo sapiens
tgcatataatgttgagagccagaatcctacctcccacactgacctatcctagataaaagagcatcaggagcttgattttgccatgaccatattgaactgtttccaccccggttcttggatgataaaaacctgaatttgcatgaaaacagattagtttagatgtaatattcttttgggaatagtgctgaaattatcaaaatttttggccaaccaaagatggtgtctgccttctttccagaacctagctcagtgtcatctgtgtgattaccacgcacacacaacttaatgtacatccttgagcctcacttttcaagacgtttagttatggagagaataaaacaaaccctctgctgacctgtggagtcatctctgtatgggatcaaaatcttgaaagattttagcttttggtactatgggtattctttgagagcctccactcccttttttaaaaaagatctgccaaccctagagacttccattttgtaaaatttcagaaaattctatggacttcagttttacatgttagaaaacctttttagaaaatccaaattattctatttccagattaacaatataagaaaaactgacaaaacagatgaatattcacctaaaatacagtcattatcaccagtgtattctgacatatgattgtaattatgaatgtaattttacatgttcacatttttcattccccataatgtaaaatagcacaggaaaaattttatctcatacatcttgccaaggtgactccccacctgtaatcagcttatctccagagggtggaattggaatgcttgggtatatgtgggccggttagattctcttttcctagagacctgcacatagacacacagacacacagagacacacacataccacatggacacacaaagacacagacacacacagacacacgacacacacacaagacagacacacctacacattctctctacatttagactcactattgctgaaagacctaaacactccccgctaactcccctcagtcacatgtcaaaggtgaagaataattctctggtcaaaagaacttgagtctggaacttttgccctcagcactcctacatgcttcccccattgtttcttacatgggacaaagtgacaagggtgaagctcatgccatacttcctcctccaaggacagctcagaatctggccctgaactcttttagatatcttggtaactaggctgacatgtagcattcctggggaatgtataggaaggaggtgaatggcacctatcatttattgagagccttttatgagccaagcactatgtgaagtggtttctatacattatatgatgtaatcatcatgacaacccagtgagatatgtactatcatcatctcctttttacagatggagaaactgaggctcagagaggttaagtaacttgcccgaggccacaaagccagtaggtggcataaaatgtccaggactattaaagaattctacatattccatgctgtttaccactgtgcagtattctgccttgcaaatgagaactataagccccacctccacacaacagagaagttaattcaggagtgaattctaaacatttcaaccagaattcttcaaaaattgtttcaggactagatgctaagtaactgctcctaaaggatatttacaatcataaacacagtagaatttgcataattatgctgctaaatatacacatgccattttaaatataactgccctagctagtatattagcacaattatgcagaaataggggaagaaagaggacagcattcttggtagacttcatttttttaaatgcatctgagtactatgtcaaagaaaaatgttaaaaacaggaacatcagaaacaattaccgaagcacaaaattataatccattgtctcatctataccatgatgttatttagaaatgcttaatctgtgtaagtattgttaaagaattttcaaccccttaaagcttaacttcatgagcacagggtcgtataaagaaccaatccaatttctgttgcaatttcataatattaaaaagcaaataaatatgagagtgtttttcatatgagagtctcaagtgacattttacatcgaagatgtgaagctgcaaaaacaccagtgggaggctgagaaatcggtggctgtgctttctgttggcactgctgggttcttatgctgttctgaagagcacttcaatatagtagcccaaataactgtgggatgttagaaatcagagggaaaaattcttccttccacatgcatactttgaagacatccagtggtagcttttttgaaggaacatgatttggtaacagctctgttgacttgaaaatagctcactcaagactaagtaattgagtcttcagtcttatatttagtcacataccttgtgctaatgaatttggcatttctttctttctaaagatgcttcaatgagcatctagtaataataaattgcatctagaatatctgaagaacacagtgtctatggtataacattcttgtgatggtaggggtctcctaccagggactttggggtacagtgacagatcatagctgctttgactttcagaacagccattctagtgtctgagcttctagaaaagaaagcaatcttgagtgatgaagtggttttatccaagtgacttccattcagctaggactccaagtagagaatagtcctagtgaccaggagagactgcccaaggagaccatgtgtgacaaatggcttagtgcctgaggctctgtc

SEQ ID NO: 60250 - DNA, 1051 bp, Homo sapiens
agtaacaccattctgagttagaactcaaggtcagaggatggctgtaaagattttgaggctgtatagtgccaaatttctgtaggggttgtaagtatggatgttgaagctacaaaggatggcagctggggtatggtggatgggagcaccagggatgggaggggatttcctgggtagtggtagggaacttagggatgagatagtcaagaattccaaagcaggggagatactgagacattagacgaaacaaaatattgaagtgctttttaggggagacagaacgtagccagtcttcttgctcatgccataagcacagggcccggggagaagaaatggcagccctgactgcccactacaccagtgtctcccaaatagatctaaatgtgtcaatgagaagttaaatgtattgggagtttggggaacaatgtctttagttacacagcttttccaccaataggttaacttctggcagaaatagaaaggtcattgcttagagtcacatttgaagctttaccacaaattcagacaatttaaattcctttgttttgttgaactcgtctgaaaacagtctttaattactttgggtttttttttcctcataccagagtcagggcatgaacaaacaagggcatagcctcgctttaaacctgttcactattgcatcctggaaaaatgccttcggcactgccaagatcaaagagttttagttcaggtagattgctcctagaaaaaaggaaattgacattgtcaaagaaaggcatgcctgggaaaggggatgcagtgcctctgctgtgtccacggcagctagcatgttacctagcacgtattaagggctcaaaaatatttgttgattgactctttggccatgtaacactttctggggtggggagagagatgacagggaatgagcaggaatacaaagaaaaaaattgcaaaatttagaactagaagcaaatggcggaaccacctagtagggactctcagaaggccagaatactgcagttgttactgactacagtgggttgaggctgcagtgagctatgatcattcgtgc

SEQ ID NO: 60251 - DNA, 2320 bp, Homo sapiens
aaaacctccaggctaaagttcctatgacattagatctaacatcatctaccttcaaataaatgggttgttttgttttgttttgagacagagtctcactcttttgcccagtctgtagttcactggtgcaatcttggtagcagagacagggtttcaccatgttggccaagctggtctcaaactcctgacctcaggtgatctgcccacctcggcttcccaaagtgctgggattacaggtgtgagccaccgcgcccggccgggtttcagtcatatttctccatggtctaaagaagagacatgtttgtgttgcccctaagctgtgacacaagtgttactacccacacagcaaacagctccatcatttacaccaaaaccactccgcagcctcccagctgaggtgtacggcatagaaatgtgtgcagctaggtgagatctggcctgggacactgcgaatgctagggaacagcccttttgtgcaaggtgaaagaaagaaagcagggcagaaagactcaaaaacataggatgtgcaaacaggagtgtttccgagggagatgtctttgagttggtccgtgctgtgtctttttttagccagtcaggtcactggcttgatactgaacactgatcacgaatcttgacctgagctaaggatgtgcggctcttcatgttcctgagccaggttgggtgaacttccacggccttctaggtggtaccttttataaccctcaggtggtgcattcacccggacaaactggtttgaaagtccataaagctttaacaaacaattctcttgttttacagagagaggatgcaagccatggagaaacagattgccagtttaactggccttgttcagtctgcgctttttaaagggcccattacaagttatagcaaagatgcgtctaggtaaaaaagaagaaagccaatgaaaaaaataattcaatctgtttctcttttaatcattaagataattcattcattcaaatctgttttcttgtaatcatttcaaggctgaaaatattcacatctctatggatcatgggcgttatttttttgttttggggggtttggttgctttttttctttcctccttctggtaattcttggtcgaaagtaacactttggcccaagaaggtaaatgggcttcccagtgcatgtggcttcatggaccactcaccgtgcagtgcctgcaaccaccacccttgcgtgtccacgtcgccatcatctgaaagtcacaagtgagcctggctgcattccacccccagtgtcaggtgcacacctgggaagccttttccatcctggccaattgtgatgctgatgctaaaataccttcattgcttaatcccatcactgccaattgcttcaaatagtggatggaatgggctttaaaaaaaaaaaaaaaggcattttggaaactgcatagctgactctctttttcttttattcagcgagaaaatgatgaaaaccacagccaacaggaaccacacagatagtgcaggtaagtaagtgtttttggagctgtaggaggcctgtgggctgcctgggatgagccctggctggtctcagaaatgtttaacatttccctaagtcacgtatttggtatgatgtcaggggattcctagatattcctgccaatactgaaattccagatttattcattaattcgggggcaaagcactgtattctcccttcggttttcattcattcgctcattcatttgttcattgatatggccacacggtggtcatcttgcagacacggggctgcctgcctagaacttagaattcagtggggaagatggaaatgggacaagtaattttatgtgtgtcaagtgtttaaaagtgcaggataaatgtttcaccaataggactagcctataccaagggcagtccccagacaaagtgacataaactaagcccagaaagatgaagaggacttagggggaagaagggttgtccagtcaagggaatttaaaattgttctaagtgcaaagtgaagccatcggaaggttgtacactggggaaggacatcagcccagctgcaatatggggatggatgagaagggacagtagccaataaggaatgaccagtgtccagatgggagaaaaaggagtacttggactagggcctactttttattttatctttttaatctcatgacagatgacaaggcctgctttttaaatgccagcattccccagaaagacagcccagttctgttagtagtggcgttcactagtatccaggtctttgcaatgaatgtctcatccagcagtctcaagccaggcctctgcaagaagatgaggtcttccctctcatcgggtta

SEQ ID NO: 60252 - DNA, 1047 bp, Homo sapiens
tgagtagatagtggtgccactggctacaattaggcccgtattataatggacattggagactcagaagtgggcagggtgggaggggatgagggataaaaaaaactacgaattgggtacaaagtacactactcaggtgatgggtgtactaaaatctccgacttctccactatacaattcatccatgtatccaaaaactacttgttcctcaaaagttattgaaattatatatataatacaattaggcccacagagacagaaagagctttgtggaagacgagtggaaataatgaatttgacttgtttatggaaaagttcagtagtggcgtgaaggcgttagtatgtggatctgaagatgattgtgtgctgctgacgagggtgcgggagaccttggtgggtggtggtagcagaagtggcctccctagaaagtatgtccagcaagaagagaagtggacccagggacacaacatatcaggatttaaaaggttggcagaggaaggagttagaaaagagattgaccaagacggagcagcagaaagggaagaagatcatggaaagtttcaaagtgactaaaaggaaaagaagtggctgacaaagcttagtgtcacattgaagcaaaggagagagtccacaggggtgacaactagaagatcgctgaaatgaacataaagagccatttcagagaatgaaggagctatgacatgtaccaaatataggagattaagaggttatagatgaagatttttttaagtgagtatagattccattaagaaatttggttgtggcttggcatggtgacccacgcctataatcccagcactttggccgaggcaggaggatcgcttgaggccaggagttcaagaccaccctgggcaacatggcaaaaccccgtctctacaaaaaatacaaaaatattagccagatgtggtggcacatacccatagtcccagctttggaaggctgatgtgggaggatcacctgagaccaggaaggttgaggctcggggaattgcaccgctgcactcaagcctgagtgacagagcgaaaccat

SEQ ID NO: 60253 - DNA, 1050 bp, Homo sapiens
gttcgagacctgcctgggcaatacggtgagaccctgttctcaaaaataaaaaatagtaaacaaacaaacaaaaaaccttatattggaaaagcacagctggagataccgttaacactttgttttatacacttctaagcttttctctatgcaaacctgtgtgtttaaaaaagctctacttccaggggttaagaaaagaaaaaaaaattaaaataaaaaaaaaataaacaaaattgatcaattgatagaacaatcagtggatagatagataggagcataggcagctctgtggcctgtcttcctatggcactttcttactaaacttctagaatgtgatcattgcacactgcataccataacactgtgtgattcatatatatgcatattttttgtaatgagagaattaggcctttttagaattaccagtcatctgcattgggatgggatgcatagcttagactttcctttgtggccttctgagttctctgatgcacttttctcataggaacgccccatgtgtctggtgggaagatgctcagtgctctggagtccacggtgcctcccagccagcctccacctgtgggcacctcagccatccacatgagcctgcttgagatgaggcggagcgtggcggaactcaggctccagctccagcagatgcggcagctccaggtattcctcatgcacggcggcctctgtctcggttgccctgagctcttcctaccttccttttcctaggggctccgtgaagacctagagaatgtagaaccatagaaacagcatggcttcctctctcacacacacaatccaagtctagagccttccactgcaactatagtcaatctataaccacttctttttttttttttttttttttttttttttttttttttgagacgtagtctcgctttgtcccccaggctggagtgcagtggcgcgatctcggctcactgcaagctccgtctcccgggttcacgccattctcctgcctcagcctcccgagtagctggaactacaggcgcccgccaccacgcccggctaattttttctatg

SEQ ID NO: 60254 - DNA, 1049 bp, Homo sapiens
tcagagggggcctatcggctcccaagttcgttcttacctggggctcctggaggtcaagcccttcccttcactgctcctgccttttggcaccatctgctggccatttcgaaattgttacctcctcattgcgccctttaagaaaaacatacatatcatttgtatggaagtacctaactgctctcaaaagtgagcatttgttggtttggggacagggatggaattgctttagcataaatgccgcacttcccctgggaatttcacaggcgttagaggtgaatttgataccaaggctctcttgatgtctgtagctacagcgtcaccccatcagtggctggcgtagtttggtcctctggccggctgggagggatctctcacacttgtctcgccttgcaacccttgaactgtgcagctttgtgaaaaagagcagttttcttaaacaaagaaggtctttggtcaaggtctaggaatgctgtgttaaccacacaagtttctttattgctccagaactactcaacttttctggctttctgggaataaagaacagtgagcaaatgtgcttttgagcctgggaagttgggcagttctaaagcgcagactcgcagggaaaaataagcatggtgtttcctaacctggctgttactgtttctacctctgcatttgtattccctgggtcccattcagctttcctccccatcaaacttctgtcttttcaatcgagggagtctacttaagacaaaaacagcttagaataattaagctatctcggcaccaattctccttcaacatgtgcggtattatataccaaaaatgaactgcagccgcacagtggctctaagtccaataatggagctatcattagagatatacgaaacactagactagtctcaaaagaacaaaaattgaattagaaattcaaatattctttgaactgtgttataaaatagtgaaactgaataaaaccatttgtgcttggcagccagctccagtaattagataattaaatcattggaaaatcctagactgtagagcatatcctatttgagcatttc

SEQ ID NO: 60255 - DNA, 3534 bp, Homo sapiens
agtttcccatgtgcaacagacccgtgtcccctgccaagcagaaataataaacggaactagtacagggcttgacgattaggctgcttacaatgtgccaaggtctagtcagatcttcagacaacaagaagctttctaagatggggagacagcaccccaataacatgggttatatagctgtgaccaggcatcccttgtcttgttccctgaagcctgcaggaacagatccaggtgggatcaggagtcgttctgaggtctggctttcctcctgaatctttctgatttgtggtataaccactgttccatgtcactgctagacagcaaaatcagtccaattacattatccattgttggcaagactgatagtcttagattttacctaagaaatcaaaattgagtatgtgagatataggtccattttcaggttgggggaattaggtttaggcatttgctagtttctccatgaagtgatttggataacttatttggtccaattaaaattttaatggacaagagcattatttctgtctcttattttacaagagtgcttataaaaatggcaaagcattttcaataaattatctttctagctatgaggaataactgcaactctacttgccctcccactgtgggcaactagaaaactgaaaaataagcaaatgtatgaaacaaatgttttcagaaattaaacaacacaggaccgtaatccttaggagaatggggggaaaaaacctacagttgacccagctttctgtctggaggcacttttcagatcttggtgcaggaaggaaaaacccaagcatggcactgacagtgagttgaggagataagaccaaagtttagagagagctgaaacagctagaactggtggactggagaaccaaacacaagaaagctctgcagagaaagaagtacatcaataaatgggtctgttattaaatattaagccaagcatgtacagtgtgaaagcaaccgctaagccaggcagaaactaagtcgggggctgtaagccaaaaagttcccgaagttcacacaggcctgggagatgttcacgttttgaaaagcaaaaagcgaagaggccttgttgagcacctgggcattttgtagagatcggagaaggactgtgcctcagtcttaggactaaactagccccagaggaaagactacccttgatttaacctaactgcttaaaaataagcctttaaaggacaaagctgatccacaagtaactggactgtctgccagagaaagtccaaaatctgtaaaggaaaacaacaaaattcagagctccatgcccaatatccactcaaaaattactagacatgtgatgatgctgacaaatgtgacctataacattaagaaaaatttgtcaagagaaaccaaccagacatggcagggataatgaaatcagcagcaaggacttcaaaacagctattataattattctcaaggatttaaaggaagacatgaacataatgaggaaagaaatggaagatataaaaaatatccaagtggagctttcaagagctgaaaaacaatatccaaatgtgcttaacagaagattaatcactgcccaaaatgtcagtcaccctaaaaacagcaatggaaactgttcaaactgaagtatagagagacaagagactaaagaaaatgaattaaaatgtagtgaccagtgagacaatattaataaaagatgaagtggaaagagaaaaatattcaaaaaggtaatgactgaattttttccaaatttgatgaaagctgtaaatccacagaccaaaaaagctcagtgaacccctagaatggtaagcacaatggaaattgcaccaaagcacatggtagtcaaattgctaaaaaccagagataaatggaaaaatcttcaaagcagctgggggtggagagaaaacccattacatacaggaatcacaattaagaattaatgccaacttctcatcagaaacaaaaggcaagtcaggacacagtggaatgacgtctttaaagtattgaaaggaagaaaagtctttcagaaaacagagaatacttcctaactcattttatgaagcctgcattaccctaagagcaaaaccagacaaaaatattataagggaagaaaaccacaaaccaatatccctcacgaaaatatatgtaacaaatccttaacaaaacgttagtaactgaatccagcaatatataaaaagaataatacattatcctggggttttattccaggaatgcaagattgttttaatacgaaaaaaatcaacgtatttgaccttattaacagaaaaatcgtatttcaataaatgcagaaaaagcatgtaacaaaatttagcatcaatgataaaaacagcgctctagaagtagaaggaagcttccttaccttgataaacaatgtttgtgaatgacctacagaaaacatagttaatggtgaaacactaaacacattccccataaaatcaggagcaaggccaagaaacctactctgacatctgtttaacactgtactgaagattgtagcaagttcagtatggctagagaaagaaatagagtcacacaaatcgaaatgtaaaatgtctaattggctttactcacaaatgacatgattatatatgtgtaacattaaatggaatctacaaaacatgctactagaaataagtgacttgagcaagatcacaagaatcaagtcaatgtacacaaatattaaaattttgttatatccatttgtacaatgaaatgccacttagcaataaaagaatgaatcactgaaaaactcagcaacagggctggatctcagaaaaacatattctgaacaaaataagctggacacaaaggagcacatgttatataattccatttttataacgttctagaacacaaagaactcatctataatgacagaaagcagagtggtggtttctttgggctggggcttggggattgattgtaaaaggtctcaaaggaattttttaggatgataaaatatatagctgtctttcagcagtggttacatcagtgtatacatttgtcaaaattcatcgaacggtgcacttaagatggatatgttttattgtctgtaaactttgtgcctcaagacagttgattttaactattgaaatgtaggtatcacctcttaagcaaaaaccaacttaacaatttgagcttccaaaaagtaatttacttgaagcatttagagaaagatggtgatccacatcatatctttagcacttttttacactgtgctcagataagcaggaactgtcctgcagcctggagacagtggcaagaacaccagacagggagggcagggggactgggaaagcagacagagaacctatgtagaccttgttcattcatgattcactcctcattgcccacgtgccagccggtgagctatgacagcttccctctttagtaccctcagcaggatcctgtaaggccccgctttctagacaggaggataataaagcctaggattgaaacagagcctctccctctcctcctcttctagtggagtaagtctagttgtgtttaaacattatg

SEQ ID NO: 60256 - DNA, 1043 bp, Homo sapiens
actaagtggtaaaactggaaatcgaacccaggcagtctttccccagaggccagttcatcaccatgcagtgctgatgttgggacctaatggtggttctgcttgtggcctgtgttgaaatgttttatctttattcagagaaaacagaaggcatgatgtggctttaagcaggtggtgacatggtcagattgcatttcccctcaatttacatggataatggacagttgacaaagacatcatcacccccatgagatgataaaccagtccatgaaaccggaaaacaggaaaccattgaaatttgttaaatgatatttcagtggaactttggggataatatactaggcataatatcattattgtgatggaggctgattgagtgaattcactcgatggagctgctgttagaaaattgtcctgctccagggactcaagtgctcaaccagactcctgcgaagcctgaataaagctcccacctcctatattctctgggatgagaaacaagaatgttctcggaactgtttggaaattgtgagttctgtatacaggtagcctacctccaatctagagaaattcataaattgccaaaagccctggactcatccagaatcattatcattgccaacattaaagtcctatgttttaagcatctgtgatttcatggtacttggtacatggaaccatgtgaacgaaaaggacacagatcctctttgaactgatactgacgtatttcatagccaaatcaccacgtgttgagttcccattctacaccatgcggtatttcatgtaaccctcaagaatggccaaggaaagtggattccccatcattagaggtaaggaaatgaagaccaagggagtctaaataatgggcccaaagtctcacagtgggctagagagagagtatgggattagacccaaagtcttcttggctccaaagcaggtgccctgtgctgctccctctaaagatacatcagtgagagtttacgcctgttgtccatgatgcattgaccagagtagaaaaaggatcctttgtcttgcaggcagtctgg

SEQ ID NO: 60257 - DNA, 1037 bp, Homo sapiens
ggcaatatagcaggaccctgtctctactaaaaataaaaaattagccagctgtggtggcatgcctctgtagtctcagctactcaggaggctgaagcaggaggatcgtttgagcccaggagttcaaagctgcagtgagctatgactgcacctctgcattccagcatggatatcagagcaagactcaatctctaaaacaagaaagaagaaagaaagaaatggtttgttaaactcaactgaggtggccttgaagatggggagattgcatcagcagaggctagagatggaaggacttccaggcagtagaaccctgcaaaccaacaagtttctggcctggaaaatgcaagatgtctttagagaactggggagcagtccagttaggcagcagagttgggtgcaagatactaataacatcccatatttggggagtgtcattcccatttgcacactgacttcctgtatcttagaccatactcaggcctcacatacctgcttgatgcctgtctgggctgtgcctacagagattggaagattctgtaagagaaacctggatttctggcttttcttgaaagttccggggttcaaccccagattcacaatttctgtggatggggcttaggaatctgcagtttacaaacaaagccggtgattctgaagcactttcacatttgagagttactgcctagaatgatgaggaagacactgagtgtttgggtttgtttggtttttgtttttgatcaaggaagtagcaaagctagagctgtattggagagaggtccctctggtgatcatgtgccggactgattaagaggaaaatagatcagtgactaggagaccatatgggaagctactgtatccgtcaggcaaaaggcagtgaggcctgaaccacatagtagaagtaagaaagaagtcaaatgcaaaacgtcctatggtattcaccgtctaagactagctctcaaaattcttctttaaaacaccttttgaaatatatatccttttggctgggtgcagtggctcatgcctgtaaccccagcactttg

SEQ ID NO: 60258 - DNA, 1023 bp, Homo sapiens
atgctgaagttgaaaagcctgatattaaccactgtgggcttcttgttttactgcaccgcaggtcggtctccctctctctctctttctctctttctccctctctctcctaccccaccctcccacctatccctccttctgtccctctgttggcatcagcaccactgaataaaaagactcggtcctctgttagccaggcacaatcgtccctttggccaatgtagaacattccctggaaaaccctccttgtacctgcctcacaccactgcaaaatgttcccagccactgttaaaagatgagcgacccccctccaccaccaccacacgaaaggcaggggggaggagctggggctctacacaaaatcagaggctgagacgggcactcggcccctcctcttcctctgtgaggcctcgtgttcagctctatgtgctggtgtccttgctcccgcagcgagttggaagactttgttgaagacttgaagaaggactccacggcagccagccgattggttactctgaaagacgtggaagacggggctttcctcctgcgtcaagtgggagaggctgtagctaccctgaaaggtaaactttctgctgggtcgggggaggagtctgagctgtctttcctgcggtgtttaaaaatctgccacatagaggattcattcatgtatgcaagtatttattaaacgtctacatgtgccaggcattgttctggacacttgggataccccacagcacaaagtaggtgcacatccccctcttcttggagctggtattagagtgggtgctgtaagatttcacactaaatgattccagtaacactttctatttgctaggctcttacagtgcaccgggatgcatgtgccaaacccgttaaaaacacaaggtgggaggatcacttgatcccaggagttcaagaccagcctgggcaatatagagagactcacatctctaccaaaaaaaaaaaaaaaaaaaaaaaaatatatatatatatatatatatatacacacacacacaaaaaaaaatt

SEQ ID NO: 60259 - DNA, 1346 bp, Homo sapiens
aggaattagaatgtgggcggcccacccaagatgcttggcagtgaaaggaggagggaataagcaaacttttggcttagaactaagcatatttgagggctgcataggccagaatcaggcggaggagttagagaggctgctgttagactcatgattcattttcttctacccaccccccaaacaatgatggagttgcaagggtctgagcacaactgcaccagcagaaagggatatgtctatacatgtccctaagcggctactctgagctttgggatgtgtgactctcacctggctttgggatgacatagcctgcaagtataccaccatgagaaagtgacatgagggttaatgccgctgtgcatggtttctcctagacatgtcactgatgggctcctgaaaggcacggacgcagcccaagccgcacagtacatggctatggaaaaggccacagccgcagaagtcctgaagagtcaggaggaggcagcccacacctccggccagcccttccacagcacaggtgcccctggcgatgcgaagtcggaagtggtgcctttgtccggcatgatggttcgccacgcgcagagctcccctgtggtcatccagccctcccagcactccgtggccctgctgaaccctgctcagaacttgcctcacgtggccagctccccagccgtcccccaggaagcaacctccactctgcagatgtcgcaggctccgcagtccccacagatacccatgaatgggtctgccatgcagagcttgttcattgaagaaatccacagtgtgagtgccaagaacagggcagtgtctatcgaggtagagtcctatttctgtttctcataaccccataaaggagtctgatacatggacctttcccttaaagcatttataggtcagatgatgacatgattgtgtatggatcagagacagggttttggaagtggaagtgggattcagtggccaggttaagagataggtcatgtggtttcagagaagggtgagacacctggcctgtaggaaggtgagacacctggcctgtaggaaggtgagacacctggcctgtaggaaggtgagacagcagtgtgctggtaaatgtttaacaaccagctctctggtagcggttgtggcggcggggtgggggggcagagtgggtgcgtgcagatctgtgtgtggcatttgccaatttccatggtgtaaatatcgcaaccatggctgatttcaagttatgacatgacaccactactgctgaagttgggagaaatgtaacaatcagctctcctgggccaggacaagccggcttcaagcactccactgaggtgaaggcagcctggggagggtctgccacacat

SEQ ID NO: 60260 - DNA, 2679 bp, Homo sapiens
tggtggcgcgtgcctgtagccccagctactcagggggttgaggtgggtggatcacccaggcccagggaggtcaaggcttcagtgagccaagatcacgccactgcactctagcctgggcgacagagtgagaccctgtcttaaaaatcataagatcaaatgacatattatgtttttaaatattctttttatcaagggctggtaccagtgctccgataacacatttgtcttttctacttcttttttcttcttgcctcgtaacttttcctccactcatttgctttatcacccaacaaccttgtcgtaaccctcctgcctctactgaaagtcaccagtggagaggtcaggttgggtatatcgagacgacctggcaaaactgccacagccacggtcgcagcctcggggcctctgaacactaggtggtttctctgtgtcgcaagggccctggcttgcctctaatcagagccagctattttaaaaacgcatatcacaagggtacagaaatgtgattgacagagtgtgattctattcccagtacctagtagggcaggggagggaaagacatttcctcctaagaattggcagatccgtcacttaagacgtcttgccactttaaacatctcaacatttaaaggatgtcagtatgatggcactcttatttaacaaatctctgttgagaacctagtgggcatagttatcattgtgatgtgtgtattttacgctttgagaggagacacgagtcatctctgaaaatgccctgatccacaggtatggaggcctgggtttttctgccagctctgccactgacaaatggggtgagctttattcattcaacagagattactgagcctgttatgtaccaggccctcgtaggctcgggggaaagccagtgaacagaagagacaaagtctctgccctcaagacacttacctacttgtaggaagagacagaaaaaaagtatatgccaggtggtaataaatgctaggaagaaaaaataaaggagggttagaatggtgaaggtggtggctattatttatatgtaatgaaacttgggcaaattctccatctcgctggacctcaaagttcccatatgttgattcaatgatctttgccaattcttaggttataaggttccactaatcttggtgtgaatttccactctgcccccttagaattattaatgtgctggttcaaaagtcacagaaaacattcttttaaaaagtatgcagatgttttaaaatgcattttatgtataactctctgttgtggaacttaaaggagtttacaggtcatctaaataatacctcctccctcattttataagtaggacaatgtgacccagagggcatatagcaattctttgatagaagtggtactaagacacaggatttttgttcttagtgttgtgggttttgtttgtttgcttggacatctcttctacaatgaaaactcaatttaaaaaaattttaggctgggcatggtggctcatgcctgtaatcccagcactttggattataggcatgagccaccatgcccagcctaattttttttttaattgagtgagactcatgtctcactcagggcagaaggattccttgaggcaggttgtttaagaccagcctgggcaacgtaacagaacccattgctacttaaaaaaaaaaaaaattagccatgtgtggtggctgaacatgtgtaatcctagttactcaggaggctgaggcaggaggattgcttaagcccagatgttggaggctgcagtgagctataatgacaccactgcactgcagcttggatgacagattgagaccctgcctctaaaaaaatacatcttggtagtagaaaaaatacttttaaaagcatcttttttaaagttcaggggtacaattgcaggtttgttgcataagtaaacatgtcatatgggtttgttgtgcagattatttcatcacccaggtcttaagcccagtacccattagttatttttcctgatcctctccttcctcccaccctccaccctctgagaggtcccagtgtccgttgttctcctctatgtgtccacgtaacttcctttacgtgctatattcctccagaaagcagaaaagaaatgggaggaaaaaaggcaaaatctggatcactataatgggaaagagtttgagaagctcctagaagaagctcaggccaatatcatgaagtcaataccaaatctggagatgccgccagccacaggcccactgccaaggggagatgccccagtggacaaggtggaactttcaggtaagttccggtcccacagcaggaatatatggaggtacatggctttgggcaaatacagtgccatccacgacagcacatactcatcaacagaaccaatgtctcagttcttacaaatcttacaaaatgtaaaacctggaagagcaaatcctctggtgttccttagatctttactactatctctctctttttgttttttttttttgtttttttttttgtttttgaaatggggtcttgctctgccacccaggctggagtgtagtggtatgatcttagctcactataacttccaactactgggctcaagcaatcctcccacctcagcctcccaagaagtagctagggctgtagatgtgtacaccactgcacatgtctaatttttttttatttttttagagacaggtttcttcctct

SEQ ID NO: 60261 - DNA, 1656 bp, Homo sapiens
ctgcacttcagcctgagtgaaagagcaataccctgtctcaaaaataaaacaaaaaaggcctggtgcagtggctcacacctgtaatcccagcactttgggaggctgaggcagacagattgcttgatcccaggagttcaagaccagcctgtgcaacatggcagaaaccccgcctgtaaaaaaaaaaagaaaagaaaagaaattagccaggtgttgtgacacacacctgtaatgccagctactagggaggctaaggtgggaggatcacctgagccccggaggctgaggcctcagtgagccttgatcacaccactgcattccagagtgagtgacagtgagaccctatctacaaaataaaaaaaattaaaaaatttgtttaattaaaaaaatcaaatccacttcctctccaactttgttctttgttctcatttgcatcccattttttctctggccctccctaagccagattctactctgacattgaccttcagcagaaacccctcttgctgatactgttttttcagactgagggatgaagtatttggaggccaagccaggggctatggatttgcctttgggcttcaattttttttttttatctatccaagtaatactcagctttttccataacaagaatgttatttaataatagtaggtaatactttacatagcatttacactatgccaagctcagcgtataagtcattcaatccttatgacaccccagaggaaagtatattatactacccatttaacagatgagaaaactgagaccgagagaggtttagtaacttgtgcagggtctttttgggatttaaatccagtcactctttagggtctatacacttaatccttgctctatggagagaacagaaaatttttaaatcagattgcattgggtttgtagcaatataccagactttctggatgttttcttgaaaaaagattattcttgtaatggtgcactgttttccagaagattctccaaattcggaacaggacttggaaaagctggggggaaagtcgccccctcctcctccgccacctcctcgtcgaagctacctgccaggatcgggactcaccaccacgaggtcaggcgatgtggtctacaccggcagaaaggagaacatcaccgctaaggtctgataggctaagccctggtaaactggcctctgggttcagatgatacccttagacaaggttctctctgttggaacataaaaagtagtgaggcagagaagtagtaactcgaccacacaagatccccaggaagcaccacagatggaacaatggcagccagtatgattggactagacccagaccatgagttttatccttattttacttttagctgcaacaatatgaaatgcaaatcacaagctatttcccatgtgggcatcataagattgaaaatgagggtaggagggggaaacgcaagaaagattatcttccaaaggtaactgaggtgagctgacaccgttgtgggagtctatacagaaagatgttcaatgagctttaaattccacttaactaaccaagtgttagctttcatgttaaatgtaaaacacaatttccaaagagatgcagtatgggagggcctttcatgaggactgtattagtctgttctcagggtgctgatagagacatgcctgagactgg

SEQ ID NO: 60262 - DNA, 5840 bp, Homo sapiens
acggtccgatctcgtgagacttattcaccacctcgagaacagcacgggaaagacctgcccccatgagtcaattacctcccacctgatccctccaatgacacgtgggaattacgggagctacagttcaagatgagatttgggtggggtcacagccaaaccatatcaaagacactgaatgttgaggagttccaattatattataattatttaatccattcaccaaaatgacaacttatgcaaacacaaatacaaactaaatgcaaaggaataaaatagcctttcagctattttctcagctaagatctaggaagcaagtgttctagacagtgagggaccatacgatctgtcccttttttgctagcacctaggagatgttaaaccactatctgttgtttcaatctcccacaggcaagcagtgaagatgctggaccaagcccacagaccagagctacaaaatatccagcagaggagcctgcttcagcctggaccccatccccaccgcctgtcaccacctcctcctcaaaggatgaggaggaagaagaagaagaaggagacaaaataatggcagaactccaggtatgtggatgaggtgactgacattggctccttgcctcccgcctgggtctctccagccatggcactcacagatttgttagcgagaaggccagggaagcgcatggaccgggaccatagaagctgtgtcttctggccttagcctttgctttcccaagatggcgctgaacaaggctctcaggatgcctataagatgtgcaaggaatgaccatttcacaaaacaactcacgctttcctacctctggctgtaaaattgactttcctttctttccatcttaagagattctgcttcatttcaaaagcaagtaagataaggattagaaataccagccattgtcctgtcttgataaggacagactgaaggacacgttacgtgggttcccgttccttggctttaccacttagagccactgaccttggatcatggactcaaggccaatgactggcctcctgtggtccataaccaggtccctgttcaatatcaatgtcatcttttcagatattctgaaaagctgaattattttgttttccattttccttggtctatttgagaaatgatactgtatcagttttagatatttattttttaactatgacacagtccactcataggatgaaggatggcgtgccaaggctgtgcccaaaactgatcccacattcccatcacggatgtgattctaccccaggtctatgtcctgagaacttgtctcatcagagacatataaacaattcctagaacaaactttgtgtagagtatttcatttgcctcatgcttcttataggatttttctgtcaatcagatagttggaacaccagcaccttggggctcaaaaacatgttagctttttaccgacgtaccaatggctttgtgccaacccataaattttcctcttttctttggagtagggagaattttcaatctacattgtttttactgcacttgttctactctggtttccatggtaataactgccaaaattgagctgcctggattttgcagggaaaacagaactgctggttgatttgtcacatacgtgagccctttcacacttcactaaaactcacagactagcctgggacatccccgcaaccaatcaggctatttgcaggtttttagaaggcttggataattgttttcataggaactacagatttataaagctggtatctttcaggcttgtggataattttttacacctctctaagagaaatactaaatttgttgcagccacttacagcccaccactgagggacactcttctccattgaagtctaaatatttgatgccctctttgaccactgtacagacattggcatatctggcttcatgtcatattcttggtggttacataataaaagtggtggccaggcatggtggctcatgtctgtaatcccagcactttgggaggctgaggcgggcagatcacctgaggtcaggagttcgagaccaacctggccaacataacgaaaccccatctctactaaaaactacaaaaattagctgggcatggtggtgggtgcctgtaatcccagctactcgggaggctgagacaggaaaatcacttggacccgggaggtggaagttgcagtgagccaggatcacaccactgcacttcagcctgggtgacaagagtgaaactctgtctcaaaaaaaaaaaaaaaaaaaaaagcgtggtgaatgaagtgctctaaccttaacttaaccaaaccctgttagccctctggctgggatagaaacccagcctgctaaatccgcaactcgatcaatggccagtggccataatgattctcttgtttctgcaccttctcaaggcaggacaaggagcagctgtggccccttctaaggacagttgtggaaccactttctgtgctccacatctccaggcatcagaagaaaacacaggctctgaaatcgagggtctaatagctcaaaggagatggcaattggcatttgtaagcagctttctaagtaagcggataaaccaaacacatccggggcaagctaggactggtatgactaaggaacagcaaggagaccaggtacagcagagacaggggagcaaacagtcatggaagaaaaggccagagaaagtccctcatcagccaccttcagattttaggaccagtgttggaatgtttactgagggaggacatacattattctttctgctggcagagatatctccaaatgacaacatttgacataaagaaaacactaggcaattatttaggctgattcatttaaataagtggtctttcaccaggcacagtggcttatacctgcaatcccagcactttgggaggctgaggtgggcagattgcttgaggtcagcagtttgagaccagcctggccaacatggtgaaaccccatctctactaaaactacaaaaaaatcagccaggcgtggtggcgggtgcctgtcatcccagctacctgggaggctgaggcaggagaattgcttgaacccgggaagcagaggttgcagtgagctgagatctcaccactgcactccagcgtgggcgacagggagagactctgcctcaaataaataaacaaacaaacaaacaaataaaaatagtttttaatcctagctgcacattagaattactttgggagttaaaaaaaaatcctacagctcagagattctgatttgtgtattctctgagtggggtctcaagagtatttgagaacaacagtattttttttttaacctgggtggtatatagcctggttgagaaccactgttgtccataaacttgggtccctgagttaccagtctctccttctctcatgatcatattatctgggcattgcccacatgcccgcttcctttttagccctgtagacacagtctatgtctatactttctccctttgtctgagaactgaccttcctgactgaagttcacaagagccaacagttggctcttatagttttcagagacaaatctccagggttcaggcagctcctaggccactcggaatgacatcgttgcttaaaagcatcactttactctaaatgagcctcagaacacctcggagcgcggtagtacctgttactatttcagagaaggattgctaagagtacttttattgtaagacttaaaggtttaaaacgtcttgtgagcttttgctgtataatttcaataaaactcataaaaaaagaggaataaaaaagaaagatagttttttgttttaatttatttacatattgagcattttttaaatgtcaaagcaagaagccctcctaagtaccaatttatgttcaccccagacaggcagaaaaggtagtaatgtctattttatcttggcattccccaagaaaggaaggcagcctttgcctcggactctgcctccaagccagctttgtcaacatgagagcacgtgaggagcaggatttcagggtgctgcctccctggcctaaacctgcgtgcaggacccgggttggggtccacaagcgtctggttgttcctgcctgtttccctccattctcctcagtacccttggatccctgttaacctcagtattttaattccttaggcattccagaagtgttcctttatggatgtaaattcaaacagtcatgctgagccatcccgggctgacagtcacgttaaagacactaggtcgggcgccacagtgccacccaaggagaagaaggtaacgtggcaactgcacatttgccacacggttgggagtccttccttccttgctctgacactaacacggctcttatactcgacctttgtcccctctgtcttttttctctctcttttttttaactaatggagacacaggcataggttaaaatcagagatatcttgctcaggttttcagagcaaacactgtgttccagcccacagcatacaatagtatatgcagaatttagacactatcttcccaaactaaagagtgaacacctttcagtactttctagaacaactctagaaagaaatatatagaaacagcaaccaagtatttagcagtttttctaatttgtaagaccctttgggaaaaaaagaaaaacaactatatatgttaagaaaaataggtaaaaatcggctgggtgcagtggctcacgcttgtaatcccaccactttgggaggccgaggcaggtggatcacctgaggtcaggagttcgagaccagcctggccaacatggtgaaaccccatctctacttaaaatacaaaaaattagctgggtgtggaggtggacacctctattctcagctactcgggaggctgaggcaggaggatcgcttgaacccaggaggtggaggttgcagtgagccgagattgcgccactgcactccagcctgggcaacaagagcaaaactctgtctcaaaaaaaaaaaaaaagtaaaaacctttgatttgggaaagaaaatgcatggtagaaagtatctaccaccacacactggtgtaacctcatggaaacatacaaatgtgtatttgcacaaacgtccaaggatgccaaacagaatttttgctaagtattatccatttataaagtgtaccttccaagatagtaagttcagtatagttttagtgttaacatacatgtgtgatgtcaaaaaaagaatccaggctctgaaacaaagtctgctgtcattgtataagtaagcactctagggaaacgaccatagcctgaatgtttgaaatgcaactttaagttgcacctagagcatctctgattttcagatataaagacatcttacttgaattaagcttccatctaaacttcaggataaaaagcttgcaaggcctaacatttttctccagggacttatctttcagaattcaaagattctagctttccttaaacaaaatcaaactaatcagatgcaagagagcccaatagctactacagatgggtacctcagtccatgtacgacagctcaaggaggtagatgtagtatcacaaaactgaaaggctattctaacacaaccattcaagagacacagttttgggctcccagctcccagccaagaggccttgccaaggaggccagcttgcttccccctggctcataaccaccacggcacccttgtgtaaactctctgccacataaattgacatgtgacactgttaatgggggaagggaatctcgctatatccaaggggggttattgttgataaatgtttctcatgaagaaaacctggcctggcatggtggctcacacctgtaatcccagcattttaggaggccaagacggaagaatcacttgaggccaggagttcaagaccagcctgggcaacatagtgag

SEQ ID NO: 60263 - DNA, 2009 bp, Homo sapiens
catgaaaccatgttggaaatatattgatttttattgtttttggttttttttttttttttttgtgagaccgagtctcactctgtcacccaggctggattgctgtgacgtggtctcggctcactgcaacctccgcctcccgggttcaagcagttctctgtttcagcctctctagtagctgggattacaggcgcctgccaccatgcctagctaatttttgtatttttagtagagatggggtttcaccatcttggccaggttggtcttgaactcctgacctcgtgatccacccgcctcagcctctcaaaatgctgggattacaggcgtgagccaccgcacccagccggaaatatattggtcttttcagtatgtggaatttccttatgagggcttattaaaactaactcatggaaggcctggtatagcatgttatacttaggctaatgtgaccatttctgtctagaacactgactgggaatttggactttctcaaagatccctctggagaccattattgtctcattgtagaatttttcttttcttttcttttctttttaattgaaatggagtctcgctctatcacccaagctggagtgcaatggcgccatctcagctcactgcaacctccccctccccggttcaagtgattctcgtgcctcagcctcccgagtagctgggactacaggcgtgcaccaccacacccggctaatttttttgtatttttattagagatagggtttcaccttgttggccaggctggtcttcaactactgacctcaggtgatccacccgcctcagactcccaaagtgctgggattacaagcgtgagccaccgtgcatttctaattggctagaaagtggcatgagatttcttgccccataattagaaatccatatcccattggtctcatttatctcagttgaggatccactggctaataagcaggtctttattgagtgcccaacactgagtttagtcacaggtgcttattctggataattaatctcagtagattaaccttcttcagaatgaccatgtatatcagacttctcttatccccaattctgggtccttattaacctcttccagggctaagtatttacccttccataaatcggatgttttcttaagcattttttctcctgtcatcactgaaactccagcctagttcttcacttgtatgcaattttcttgtaaccctgtctctcgttttggtttattgtccatatgcctattgagtgcttttccagttgtcttcataatccaaatcccagggcctataaatacatattaaagaggcataattacctttcacccagagtcttgaccatctaagactaagaaatcactgtgagtttgcatgacaattatgaccaagctcctgcacttgctttgatacattcattcatttttttctagcccagtgataaaaagtataggtcgtgtgaaaaccaaacttcacatttttatcctagtgactttccattagagcatttatgctactactcagttttaaaatacatatattacaggggggatttttgaaatttatttatttatttttgagaccgagtctcgctctctcgcccaggctggagtgcagtggtgcaatctcaactcactgcaacctccgcctcctgagttcaagcaattctcctacctcggcctcctgagtagctgggattataggtgtgtgccaccacgcctggctaatttttgtatttttagtagagacagggtttcaccatgttggtcaggctggtctcgaactcctgacctcatgatccacccacctccacctcccaaagtgctgggattacaggtgtgagccaccatgcctggcctgaaacgtttaatgatgggaatggcacaggccatgaccaaccaacagacaccagccctaacctccagtaaatagacccccagaacatctgccacgtgtgtgtctttagatcacatgccaaatccatccacgattcagggggcaaattctcatttgggtcctagcatg

SEQ ID NO: 60264 - DNA, 3132 bp, Homo sapiens
aaattcccctgggctggttcctaagtttataggcaagaaaactgaggccaaagaagtaaagtgacttatctaaagtaacacagtttagtggcagatcttgattaggatcaaaactttctgtcagcccatacattgtgcttttcacaattcttcaggttttaaattctgctaagctcacaatctgatgttgaaaagaggacatgttagtaatgactctgtccctttattttcttcaccactcccctacaaaattttaaattcttgaaatcttttgctaattgagattttcatcttgtgcaaacacagggcatttttggcagttggagaacaaagcaatccaaggtaaacagctgtaggctttggattggtgtgtaagaaatatgcgtggcccgcatgtcttagaaatgtaattaaaggaacgatttagttatagtccacttttttggggggatgtggttttgtggagtaacatgtcctacactattctaccagaatttggaatttttccatgaagatgtacggaaatctgatgttgaatatgaaaatggcccccaaatggaattccaaaaggtgagttcaccagatctgggttccgaccaataccatgcacattaagtacctgcctctgcagatccattgctgattaacgtgtgtggtttccctcctccgttctccctctcaggttaccacaggggctgtaagacctagtgaccctcctaagtgggaaagaggaatggagaatagtatttctgatgcatcaagaacatcagaatataaaactgagatcataatgaaggaaaattccatatccaatatgagtttactcagagacagtagaaactattcccaggaaactgtgcctaaggccagtttcggtttctctggcattagtccattagaagatgaaataaacaaagggtctaaaatctcaggcctgcaatactctatacctgacaccgagaaccagacgctgaattacggaaagacaaaggagatggaaaagcaaaatacggataagtgtcacgtttcctctcacactagactaacagaatcaagcgtgcatgattttaaaacagaagatcaagaggttatcacgacagattttggccaagttgttctaagacccaaggaggcaaggcatgctaacgtgaaccctaatgaggatggagaatcaagttcaagttctcccactgaagaaaatgcagccactgacaatattgccttcatgattaccgaaaccactgtccaggttctttccagtggggaggtgcatgatattgttagccaaaagggagaagacatacagacggttaatatcgatgccagaaaagagatgaccccccgacaagaagggactgacaatgaggatccagtcgtgtgcctggacaagaaaccagtgatcatcattttcgatgagcccatggacatccggtctgcctataagagactttcaactatctttgaggaatgtgatgaggaattagagagaatgatgatggaggaaaagatagaggaggaggaagaggaggaaaatggggattctgtagtccagaataataacacttcccagatgtctcataagaaggtggccccaggcaatcttagaaccggacaacaggtggaaacaaagtcacagccacactccctggccacagagaccagaaacccaggaggacaggaaatgaacagaacggagctgaacaagttcagccacgtggattctccaaattcggaatgcaagggtgaggacgcgaccgatgaccagtttgaaagccccaagaaaaagtttaaattcaaattccctaagaagcaactcgccgctctcactcaagccattcgcaccggaactaaaacagggaagaagactttgcaagtggtagtctatgaagaagaggaagaggatggcaccctgaaacagcacaaagaagccaagcgcttcgaaatcgctaggtctcaacctgaagacacccctgaaaacacagtgaggaggcaagagcagcccagcatcgagagtacatctccgatttcaagaactgatgaaattagaaaaaacacctacagaacattggatagcctggagcagaccattaaacagctcgaaaatacaatcagtgaaatgagtcccaaagccctagttgatacctcatgttcttccaacagagattctgttgcaagttcatcccacatagcccaagaggcctctccccgacccttgctagttccggatgaaggtcccactgccctagagccccctacgtcgataccttcagcttcacgtaaggtatcttggtctgctggaaaatgaaaagacccagctgctttcctaaatctgccataatcaccattagtgaaaggtgtcttgtaacttaattgctttctttcaggtggcttttttttttttgtctgttcgccatgaaacccttctttcatactttctccctcaccttccaaacaacaacaactaggtatctaacagctaatcagttctgtttttgcctctgttgctgactggtgttgggtaaacacgaggctgctgggtcagccatgtgctgttgaaatggttgctctgatactcacattaaaatccgtttgatcagtagtgagcagttgattctgtttgattcttctgattaaccccagttggtgtctcctagatctgtcctgcatgtagggctgtggcttctcaccttgagcttctctgcacatcgtggggcagcctcacagatgacctactcatgcgcttctccttctcttccccctctcactggtccttcccacagggctccagcggggccccacagacgagcaggatgcctgtccccatgagtgccaagaacagacccggaaccctggacaaacccggcaagcagtccaaactgcaggatccccgccaatatcgtcaggtagttttaccttaaacccacttttggatggacgctatttcagttaagcaagtcactgacttagtttataccaaatattgtgctttctttgtaagataacggtttacatagacatcctggatctgggggcatgaagaaagtctaaataaacctttgttacacttttttaccacgcttttgcatgcttgcaataaaacatcttttactttgtgactccaaactccaaatt

SEQ ID NO: 60265 - DNA, 1770 bp, Homo sapiens
ctacttccccctccttacctgcttctaagattccagccctttctcccagctctgggaaaagcagttctctgccctcttctagtggtgacagctctaacctccctaatccacctgctactaaaccatcgattgcttctaaccctctcagcccccaaacaggaccacctgctcactctgcctccctcatcccttctgtctctaatggctctttgaagtttcagagcctcactcatacaggtaaaggtcaccatctttcattctcaccgcagagtcaaaatggccgagcaccccctcctttgtcattttcctcctcccctccttctcctgcctcctccgtctcactgaatcaaggtgccaagggcaccaggaccatccatactcccagcctcaccagctacaaggcacagaatggaagttcaagcaaagccaccccatccacagcaaaagaaacctcttaaaggtcaaatcctattaggcacaagtcggagttacatttaaaaaaaattaacagtctacaacaactgttttcacaagagaatgtaacatattgctgtatcgtttgaggcttaatgctaaatatgtgctaaatactggattaatagatttcagtaaagctcgttcgttttgtttggttttctttttacctagttgctatagtgtctacagtctatactcaatacctataaaatgcagtaagcatgtgttacagaaagaggttctggtgggagagaaaggtgcgtgtgagacaggagaattgtcttaagcatataaaacatgtatgattccagaattttagtatgttttgtataaaactatttttcattacggagactagaagtgaacagagaattacacaagtgtgactatacaaattgtaaaacagatactataatatttccttttattttagtgttatttagctttattacagatttctatttttgtcaaaacttcatggttcctttcaagatcttttttgccaaaacattttgatactatagcattgtacatttgaaagtagtgttctagactataaaaccaatgaacttctacatgagccctacagacaggcatgtgtagaaggcaatttatcaaacctattgcactgccatgaaaagtgtgtataataatttgctagcccaagcaagctagttttctttgcttgcttcttttctttcttttttccttccttttttttttttttttcttttttaacatgttgagattctctagttgttttctttggcgtatctaaccccttcttttgttttctgagacctggtaacccacgctcttgcattgtggattttaaaatgtatactctgtacggttctgtaaaccgaaaaacttttgtaaatatataaatatacatagacataaaaatactgtatgtgacagcacatagagtagttttcccacaccaaagttaatttttatgcatgctttaaaagtatatatcgggaccggcagaaatggaagtatccatacatttttaaaaagcaacaagtttgcacagctagagtgtttttgtaaataaatgtatttgtataacacagtcatgtaatatacagaactataagcagagactttgcaaaactaaataaagggctgcatgcttattattttttgtaccttgtcactataactacttcctagtcaaagaacgaaatgtaactgttaccgagttaaatgtttttccgctttgagggatgtaaccacatccactcagaggacactacttttctgaaagctctggggtgactaatgatg

SEQ ID NO: 60266 - DNA, 1055 bp, Homo sapiens
ggggagagagaatctgaactttcagctgtaaaccggttaaaaccaaaatgctcagcccaggacctttccatctcagactggctggccagggaacgcctacgcaccagtacctctgaccttagcagaggagaaatcggagatccccagacagagaacccaagcacacgagaaatagccacgaccgacacacctttgtctcttcattgcaacacaggcagttcttccagcaccttggcttcaacaaacaggccccttctttccataccaccacagtcacctgaccaaataaacggagaaagcttccagaacgtgagcaaaaatgctagttctgcagcgaatgcccaacctcataaactgtctgaaaccccaggcagtaaagcagagtttcatccctgtctttaaactgggggtatgtccactctagcaagtaaaaaaactactgttacacgttccagtaactctgtcaatattttcttgtatcagaattgttattatgcagccttcatttgggctggtttcatcattttgcactgtgaaatagctttacagtgcattactacagccagaagaacatatatatatatatatatatttaaaaatatatcggatagttgtatacaaatgagcaaggtatttgttgcaacttactacatagcatatacccaaaatcactgaagaaaatcgctggcatcagtgtgcagcaaatttgttcttttggtttcatcactaacaaaagtgcctcatcataaaaatacagttggtttttagggtgccatattgttaaaattagataacttacttacattgaataaacgaatgcgttttattggtaacagatatcattacatttaccagttttaacacaggtggatacagaacttccattctttagtcattccaggtggatctgagttttatattcaaacttttaatacagtttttgagttttgtgtgacttgaatttttaatctttctgtaaaatacgtaacttaaatgaacatattaaatgtgtatcttttcttcagataccagatttgatataatgttgtaacata

SEQ ID NO: 60267 - DNA, 1172 bp, Homo sapiens
gttccctaggctgatctcgaacttctgggctcgagcaatctgcccgcctcagcctcccaaagtgctgggattacaggcatgagccaccacacctggcctgttttttgaatattctaattccattgttaccttgagataaatgaagacattaccaacctgatttacttaaggcagatccttgaagatcctgcctgaatgaactaatggaagaccagagttcccttatctcaatgagcttatctgatacagtatctatatcatgtggtacctgtaattagaaaaatcaaagtcagtcataaacatttaataacctatatcagaatgtgatgtttaataacctatatcagaatatgatgtttgaccgtgtcacaatattgttttacctatcccatgcctctattccaaatgaaggaagtgaagaatgcctgggcactgtggaaggagggaaggtcaggtgtttgggggattttgataggaatcagcactaagcacagactattttcctgaaaggcagatgtgtatgagctgtggcttggcagttaaataccacgaggcaagaaattggactcattaaataaaaatttgactttggttcaaggtaaaaagaggtattaaaaaaaaagctaattgcactgttaatgcttccagagctttagtagatataatttgataagaaatatttgggagacaagcttgtcagaaaatgaactcagctgcattcttatgctcagagtctttcttctctcttgcttcccagggttcttggggatctggaaaggatcagtatagcagggaactgcttgtgtcctccatctttgcagctgctagtcgcaagaggaagaagccgaaagaaaaagcacagcctagcagctcagaagatgaactggacaatgtattttttaagaaagaaaatgtggaacagtgtcacaatgatactaaagaggagtccaaaaaagaaagtgagacactgggcagaaaacagaagatcatcattgccaaagaaaacagcactaggaaagaccccagcacgacaaaagatgaaaagatatcactaggaaaagagagcacgccttctgaagaaccctcaccaccacacaactcaaaacacaacaagtcaccaactctcagctgtcgctttgccatcctgaaagagagccccaggtcacttctgg

SEQ ID NO: 60268 - DNA, 1044 bp, Homo sapiens
agaaacctagcaatagtgtttggtcccacccttgttcgaacatcagaagacaacatgacccacatggtcacccacatgcctgaccagtacaagattgtagaaacgctcatccagcacgtaagttcatgcttcatctctgtaagttcatgcttcatctctgcaagaaaattcattttcacgggcagccgctatttggtcagacagaggttggttgtaatatctttccctaagaaaattaccctttttctatactatcctccaagatctcagtatatttaaaggcttgtttaatttctcttctcaccttttttaaattttagcatgactggtttttcacagaagaaggtgctgaagagcctcttgtaagtattgtctgtcagcatttgtactcagtagtttcatttgggacacaagatcctggcgcgccaacaatgtcaacttcctgctttgctattgtccgctttgcgccccggaagcaggtctctagctcagtttctgatctaatgaatatacaagtacggtgcttattttgcagttaattatgcgtaaacaatgtaaacacattaagcacaggtgctttacttagtaatgtgtcttttactaaatgttgtttaaattttaaagaaagtatctttgaagagatgatgaagagatctttgtttattaaccatagacaacagtgcaggaggaaagcacagtagactcccagccagtgccaaacatagatcatttactcaccaacattggaaggacaggagtctccccaggagatgtatcaggtaactcttgcctgggcagtcttgacctctaggctgaaagctacattcttacaatatgaaagagcaaatcaatcatagtgaattgttacttatgatttttttctttttctcttcctttctactaataaaaaaccttaatcttccttttccaattgatctgaattatcttccagtgactctaatgccattggcagtgcatgcagttgtaatgtttgtcagaatggaactatgagggaaatgagcatgcaaaccactgttttgttct

SEQ ID NO: 60269 - DNA, 1081 bp, Homo sapiens
tagcattttaaaacaaggatgagaacaaggacctgattaagaaagtataatacatgtaaatgtatgtgcatatatttaaaacacccatgctaggattcgtatcatgaattgatattactctctcctcctcttttcttgactctttattcagcggaacggtttccacattctctttacctgttgttacttcctttttagaatgttatctctctgggggtccctctctttctttcagtctctttgttctcttcttactgtctcaaatatctcttgcaggttttatctattcccagatctataatgtctgtattctttatattacataacagcaatttatgtttccttttggatgaaaggggcattttagctgtgatatacaactactaaacatttgtgctgcattaaataaaatgtttatttcttgttttgcagtatattccattaatagttgacatatgttgcaaattagttgaagaaagaggtcttgaatatacaggtatttatagagttcctggaaataatgcagccatctcaagtatgcaagaagaactcaacaagggaatggctgatattgatatacaagatgatgtaagtttgcttatttgaataactgatccttttttttccccctttggtggaactggatatgaaaatactatatttctattttgtacacctagaaatggcgagatttgaatgtgataagcagtttactaaaatccttcttcagaaaactccctgagcctctcttcacaaatggtgagttaactcccgtgaaagataccagatgaaatggttcaagttacaattggaaaaccatagaatattaaattgaacaaggacaaaatgtcttggtcaaaggaagcaggaggctttatttagttctccctcatatattaaaaacataaaagttatttaggttcagtgaaatatgtattatcttgttcatacatgtttgcagccaaattaatattattgtttccagtcaaatggcttctgacatcataaggtacaatgagtagaaaaatgttttttcagtcaagccaagtatttaagtgccatgtaagacactttactagat

SEQ ID NO: 60270 - DNA, 1034 bp, Homo sapiens
atccttggtttcactatccttaaaaattagtcagtcactaacaaattctggcagtctgttttcatcttttatccacctatattatttgtttttctttttgaagaaaaatcacttacacgtatatttcttaaatgctgatcattctttctggtattagagaaaacactggctgcttcctagtcatttattttaaatggacggatcaattcaataagtattgaacacatgttacttgctggtactatcctaggtatcgcatggatacagaaaagaagcaaaaccctttggcaatgttgggaggcacttggaaaatctttcacacagtgatgttgaatagaagctttgaaacagctccactgagaacagatgatagtagtgtttgtgttaaataagcaaagcagtacaatagaaagcctcaaaaaagtaaggatcacttatttatgtttagaattgattttctaattttactttattctgtaggacactggagtcactaacagggatctaattagtcgaagaataaaagaatacaacaatctgatgaggtgagaatcccaccttgcctgcagttaatttggatataaaatcagtacagtcatcccccttatttgcaaggatacattccaagacccccagtggatgcttgaaaccgcagatagtaccaaatcctctctacgctatattttttcccatatagtaatgggcgggtagtgtatacagtgtggctactcgggatgaaaggatgattcttattctgggcaggactacaaaattgaaagcttatgaattgtttattccaagaattttccagttaatattttcagaccatggctcaccacgggtaactgaaaccatagatagagggggattactgtaattgttaacaaatgtcatttccttcaacagcaaagcagaacagttgccaaaaacacctcgccagagtctcagcatcaggcaaactttgcttggtgctaaatcagagccaaagactcaaagcccacactctccgaaggaagagtcggaaaggaaacttc

SEQ ID NO: 60271 - DNA, 1037 bp, Homo sapiens
tcttttctatagatcgcagacagccaaaagtcatcagaagactctgggtccagaaaagattcttcctcagaggtcttcagtgatgctgccaaggaagggtggcttcatttccgaccccttgtcaccgataagggcaaggtagtgtgttttctaagccaccctgagtgtcagaaatgcagaccctgacaaataaaccataaagcctgtatacataaaatggcatgatatccagattaaagagtgaaaaaaaaaaccatttataaatagatttttctacattaaaaaaagtattccttaaaaaaattctaattattgcattaatttggtactttttgtcctgtgtatcagctacatgtagaatatattgtcttacgttttggcaatgtaaaaaggaaatctaagtatttaaaaaggaactctgcttttcttattagtttattagcaatgggttattccgttgtcctttaggaagtggcaaatcagttttaaatttttatgtctcttttcttagtttattttaaattacctttataactttgtttcattttattttaaaaatattaagttaaacaaatataaaaatatcaatatatgcatccagtagatttcaacagaaaaagactttgccataaaaattttctataatatttggacagcttatatataagaacattttaatgctgtcagaagagtttaaaaattttaagaaagctcactttggatgtggatagagttgcttagccatataaagttgatgaactctgttaattagttatgtatacaattgttggagaactcctgcagtatctgtcatttgtgtgctctaagacgtaagtctttcactcaacaggttttttggaccgatttttaaattttctattccgttactgtttttgatatgttttgctacatttattttatttgattagctttgttcatattgccttcccaactaaagttgggatttcacagtccttgactttgatatgaatacactgcctaactcagtttatgctccacaatttttatccttcctc

SEQ ID NO: 60272 - DNA, 1015 bp, Homo sapiens
tgttaattgctgtccataaaaattataccaaaccacattcccaccaacaatatagaaaagcctctgctgttacactctaacacagtgtattgtttgatacatatatttttaattattataatggcatattgcagttttaatttgacacttagcagttgaacaccatttcgtatatttaagatatttatatttttctgtgaactgattttttatattttttgactattttctatggattcttctgacttctgcatcctttttatataaagaaagctaacatttttctgtgatgtgttgcaagtctttcctaattcaatatttttcattttttttaaaccatgcaaaaatatttaaaattttttctgtggctaaatttaggaaatatttgtggactttgaattttgagtcatattgtatcaaaaaattctgtcactactccagaattataacaaaatttatgtttactttttatttttttgtaaactttgactcatctggaattaatttattcaaattagataaagagacaactttacattttctaatatctctattgtcccaaaagtacctgttgaatgtcatccttttcccaccgatgatacatcatctttattatatactaagtcatatgtatttaattttattgtggggctctattctattcagttgatttatctgtgtattaatgtacacgaggttctattaattatggtagttttataatgtctgtcttacctggtaaggctattattttatgttttttcagaattctcctggctatttttattttagtatttgaaccttaaaatcagattttctagttcttgaattcttatgtacattttcattgatacaatgattaatttataaattaacttggggagtactcacatctttatgatactgaaccttatgttaaagaactatttgtcttttttgttatctttgcatacagtcctctgagggttccatttggttattctttatattccaataaaagtagttctttctggag

SEQ ID NO: 60273 - DNA, 1033 bp, Homo sapiens
ggaattaatgctttgaaaactgagcctcagccaatcaccttaatttcctgaagtgataatctgtggtacatttaaaatttgaaaagtaattctttcagggtgttacatgattattgctctggtttgatgggtttaggttcgaggtacctataaactttagtaccttgacaatcagttagtgaaggcattaattggttggtagagcagctcatttaatttcttacaccatattctcagaattatttagaattactagagtaataactgtaaatcaatttttagcagactgaataggtcatttagtgatgtgctttggtggtgaagtgttaaaatccttatctgacccccttaataatgattattgactgagttttattattaataacaattaggtcattgaacattctgattttccttttttcttacagatgaaccaactagccctagcattgatcatgatattgcacatatccctgcctctgctgttatatcagcctctacctctcaggtcccctccatagcaacagttcctccttgcctcacaacttcagctccattaattcgccgtcagctctcacatgaccacggtacgtctaaagggtggttttgtaaaccgtatctcatgctctgttttccacttagaatagtatgataaactgatgtttccaccgttaaaagaatctgggaaccacttgtgaatgtctaaatattggattttaattaattacagaatctgttggccctcctagcctggatgctcagcccaactcaaagacagaaagatcaaaatcatatgatgagggtctggatgattacagagaagatgcaaaattgtaagtctcgggtgtattattttaaatatttgtatgtgggtgggtgttcagcatgaccttgacacataagttcagaatttaatgatgtcttatgttttctaactttgacattagaaatgcaaataaataaagttgttaatggtaacattaaattgaattttaaaaatcagtaacacacaaacatggtagaaaaatatgtt

SEQ ID NO: 60274 - DNA, 2442 bp, Homo sapiens
caagatgcttcaaataaattagacttaatttattatagtagtagtacttaaaatgcatttaagatttttaatattttcaccttttctctggcaaaatacatgaatcttcctttgctgggatttatttggcagccatttaacctgtcaactgctgaaactcagaaggcttgaatggggagaattttagaagtaatgtgggtacatctaattggttgggtagaaatttgatgagtttcacatgttttgagcaaagaggtgattgtaatttgtatgtgttgcagattctacagtttatttgatttctgagagactagctctttctagatttgtagagtacccttatgttgtgtttgcatgcatgctatagtgaatgtcactcaggaacgaggtaggacatagataaaatagtgcactgtaaaaatggaaattattattctttttatgaatttccagtgacaccttcctctcatttctatacaggcatattctcaagatgcctacctgaaaggcaacgaagcttatagcggcaatgcccgcaatatacctgaacctccaccaatctgctatccctggctgccatctgccccatcagccatggcacagccagttgaaatatctcctcctgactcatcattgagcaaacagcaaaccagtacaccagtactgacacaacctggtagggcctatagaatggaaatacaagtgcctccatcaccaacagatgttgcaaaatcaaacacagcagtgtgtgtttgcaatgaaagtgtaaggactgtcattgtgccttctgagaaggttgtagatttgttatccaatagaaacaaccatacaggtccttcacatagaactgaagaagtgaggtatggcgtgagtgagcagacctctttaaaaacagtgtcaagaaccacatcaccaccattatcaattcccaccactcatctaattcatcagcctgcaggctccagatcactggaaccttctggaattttacttaagtctggaaattacagtggacattctgatggaatctcaagcagcagatctcaagctgtggaggctccctctgtatctgttaatcactattcgccaaattcccatcagcacatagactggaaaaactataaaacttacaaagagtatattgataacagacgattgcacataggttgtcggacaatacaagaaagattagatagtttaagagcagcatctcaaagcacgacagattataaccaggtcgtccccaaccgcactactttgcagggacgacgtcgaagcacctctcatgatcgagtgccccagtctgtccagatacggcaacgcagtgtgtcccaagaaagactggaagattctgtgctaatgaagtattgtccaagaagtgcatctcaaggagcactgacgtctccatctgttagttttagtaatcatagaactcgttcatgggattatattgagggacaggatgaaaccttagaaaatgtcaattctggaactccaatacctgattccaatggagagaaaaaacagacttacaagtggagtgggtttactgaacaggatgatagacgaggtatttgtgaaagacctaggcagcaagaaattcataaatcttttcgaggttccaattttactgtggctccaagcgttgttaattctgataacaggcgaatgagtggtagaggagtgggatctgtgtcgcagtttaaaaaaattccaccagatctaaaaacattgcagtcaaacagaaattttcagactacttgtggaatgtcactgcctcggggtatttcacaagacaggtcacctcttgtgaaagtccgaagtaattctctgaaagctccttccacgcatgtcacaaaaccatcatttagccagaaatcatttgtttctatcaaagaccaaagaccagtaaatcacttgcatcagaacagtctgttgaatcagcagacatgggtaaggactgacagtgcccccgatcagcaagtggagactgggaaatccccctctttatctggagcctctgccaagcctgcccctcagtcgagtgaaaacgctggtacttcagatttagaactacctgtcagtcaaaggaatcaagatttaagtttacaagaggctgaaactgagcaatcagatactttagataataaagaagctgtcatcctaagggaaaaacctccatctggacgccagacaccgcagcctttaaggcatcagtcttacatcttggcagtaaatgaccaggagaccgggtcagacactacctgctggctgcccaatgatgcacgtcgagaggtccacataaaaagaatggaggaaagaaaagcctcgagtaccagtccgcctggcgattctttggcttccatcccatttataggtgagctcatttagagtcattggctaatatgccaaatgtataagaaatctttccagaaaagtatt

SEQ ID NO: 60275 - DNA, 1052 bp, Homo sapiens
tttcatgtgttctattatcagtacaatatcctatttaagtagccatttgtcaagtgtacatgtaggtggtccggcctagagtgagggaagcaagagtatgaattctggagggttctttcatattttgcaggttagcagcagtttactttgtaattttttaaaatctatttttaaataattacaagaatagtatgtgctggttgaaaatatttgaaataatgcagaaaggtataataaaaagaaagtccttctccatctacaccatccccttctcccattccctatgctggcatggttggcatctaccaacaaacatgaagttactcttgcttttatcataggtaaaggcattaaattaataacctgttaaaggtgaactgaaaggcaggaattttaatcttaccaccttatttattcttcaggttttttttttttttttttttttttctctgtttcattttgtttaccatttatcataggtatggtcatggtgattttgatgtgactgtataaaaaatgaactagagattattttagggttatttagttactattaggcattgtacatataatcaagatccaggctgttaatattaagttgtatttaacatactgtttggagttctaattacaaagaaagaattctttgggtcatctttcttattttcttcctcctcctcctccccccccccccccactttttagagctttttgtatctaataggcaaaacagggctgttagggaaggcttcagtttttaaaatacaagctgttaaactccaaaaggtgtaatacttaagtacaagggtaaagaaagctcaagaaggaatgtgaagtggtatacaaaaaggctgagtggaaaaaatggctaaaaatgttttgtcatattctgttgaattcacaagagctagtaaattgggaaaaatttaaatgttgtctgattctatcaaaacactttcatatgttgtaaagtatccatttgggcttaaagcctaactaaaattcaaaattgttaatactgaatatgtaattcttatgacattggtttcaaa

SEQ ID NO: 60276 - DNA, 1047 bp, Homo sapiens
gcactccagcctgggtgacagagtgagactccatctcaaaaaaacaaaacaaaacaaaacaaaacaaaaaacaaaagccatggagtgagtaccgcctgtgtaatcatctttggcacttgttagctgtttgaccttggagactttatttaatccctctaagcttcagtttcctcttttatgaatggtagtagtagtacttacttgctgtggaaattagctctgagatacagtatttagtgtggcaactgacatacggaatgtagccagtaaatggaaagcattacagtgttgtggttgtcattatgttatggaagaagcaaaataaatgtttgaattaaatgaaaacccctacattataattttagcatccaaattcaggatatgtatttaatatttcattaaaaagctttgcttaattctctcaaatactattttatatttaggtattttagtaaagtattgtgaagtaaaatcatgctttgggcttctctgtaacaggaaaacaaagaaaccgcttggaaccaatggataccatatttgttaagcaagttaaagaaggaggacctgcttttgaagctggattatgtacaggtgctgatattcttctttaaacaatacgttttaatttctttttcactttatttcttccatatttcatgttcgatattttttccttttgtatctttctgtatgcttcttccttttccttcacatctgttgttactaattttgagaactaattatgtttcttggtgcccatatgaatgggtttgaacagaaataacaatataaattgatacactgtgagcacttttaattaccacacagatgatagactcttagaggctctttaaaggaacaaattttgcatgcattgaattttgacaaaggattacaaagtagcaaaatgatgaaggtatttatttgatataagtgaaataatcttggattttcaagttctggaagtgcctgatctgacagagttgagttaattaatttgcagcacaaagtggcttaagtctccaatgcggaacataagcctggctt

SEQ ID NO: 60277 - DNA, 1103 bp, Homo sapiens
attttttagaatgtccttcattttcagtttatctgatgttttctccctagttcaaggtcatacgtgtttagcaagaataccacatttgcatctattgtaagtgtatagtttggtaagttttgatgactgtataacccgtgaaatcactatcccaattaagatgtgatatcaaaacaacctttccatcactccataaagttcccttgtgctcctttttattctgctgtctttagacaatcactgatctgatttttatcactgtataggttaatttttgcctcttctagattttttttataaatgaaataatacagcatgtactcttttgtcaggcataatatttttgaccttcactgtattatatgtatgggtactgatagtactactgttttttcgtttgtatgaatataccacaaattgtttaaccactcaacctgttgatggagctttgtaataaccatttgaggtcttgaaaaggttatgagttaaaatgagaaggaaatggccttttttttttttgcactatcaaaagtaatctgaaggtgtaaggccaggcaggactcttcatagttgtcactggtacaagatgagccactcctgcattaccatctgtcatgcaccagggttaggatgaattccaaatgctacttggcatgggttagaaataagccttagtggggaaagggaaaactcacgaagctggcatcagcaagagaaaggaggatgtaggtactccatcttcccatcatcctaaaggctgatgtgctgatacctggacaacctactggacacacagcatctagaattcatgcttcttatgggggggaatatatttctaataaatatagaaagacattgttataaaacttcatgcagatcattatgtgtctgacgtagttcgctgaagagaatggatttagttttgtgctttggctagggagaataaacttgaatatttataagggaaaactagaagatctattatagattcagcagaaggagatttgaagaggaataatagagtgagcctaaagggtataatctgctggagaagataacagtttgcctattttaattattaatttatgcttaatttcactcaa

SEQ ID NO: 60278 - DNA, 1019 bp, Homo sapiens
aaaatatatattggaatcttttccattttaattatgaaattttataaattcacttcaaacgaattaaaaattttaatattgtatagcttttagaaaatgtgtaattaatataacagtgtccttattttgtcacttaactggcaacctcagtctcagactagatcttataatcagaagaagaaaaaaaaaaaacattgggcagccaaaataaaggtcaaaaaattatgtaataaattatcagcccttcaccgaacgtctgtttttctttctaaggtacatggtagctccagtatggtagaggctcagcaaatatttgaaaatgtatttttagactagtttttaaaggtttcttttctaattttccagctagaggtagataacatggcagcaagacagcttggtaacaatgaaagagaccaagtagataaacttcaaaattgaatacaagaacttaaatatgtagcaatttgggaccaatccatttatatagacagctctgggtcctgtaatatcccttaaaggcacatttaagtatagtacagtaagtgatgacctgacctttccatctgtccaactgcctacttgacaacttcacttggatatctccattagaaatctcgcactcaaatgccaaaaactgaactcctgatgtcttacccctaaattggcttcacccacagcctgcttatctctatttgtgaaaactctatctttccagtaaaaggtacttcctatactgttattgaagatgggctatacgtttgcttttgagcttgccagtggctatagaagagaatgtgatcattaagaatattgttagtgagattgtaattggcacaatctggggaggtcgatttgaattaaattgagccttgctgtgattaacaagagtttataaatatgtactcatatatgtatatatatattttcatttgtaggatgaagaaaatggaaacagaggaggtatgctataaacattttaatttatctctgaatgtttttctacccatttctttctg

SEQ ID NO: 60279 - DNA, 1035 bp, Homo sapiens
gaccttttctgttattttctaatgtcctttgttgctgttggactatctgataaggtttaggtttatttcttcgtcagagttttatatctgttctttcatgctttctgtttcttaatccatagtgctctttaaaatttctttggtattatctttcattccttctattgcatttctaattttaggaattatatttctattttctgagagttctttcttctgactaattttttatggcattattttctagaaaaaaattctaggttttgataattgcttgctttgttataataatataataaattttagtttttgataattgcatgctttgtgtagtttatgcatcagaaaatagttcatatcggcgctcaggtattaacatttttacatagaatttttttagatgaggaagtatattgtgttatgtagttaacttttaaatatcttttcactttaggtctcaaaaaataaagatggaaaagaacaaagtgaaactgtatcactgtctgaagatgaaacattctcctggccaggtcccaaaacagttacgttgaaaagaacatctcaaggctttggttttacattaagacattttattgtttatcccccagagtctgcaattcaattttcatataaggtaagagaaatagttaccgcaacttgaaaaaaaaaccacaaggccattcctatccccttctagtcttcctcttacccttccctatggccttttttctgtcttaaaagaatcaagcattacatttgaatttttattatattatttttctccttttaggtattttcccaccttcaagaacaaaacagaaactttagtcttctctgaaagatcatagtgattctaaactccaaatctgcattttttaaggacttctaattccagatttctttctactttttctaatatgtaactgtttattatctagaaaggtagtgagttttctgggcagactatgcaaaggaaatggttcactgaaatattctagcagttatagaaaattagtagaattagaacaatactta

SEQ ID NO: 60280 - DNA, 1075 bp, Homo sapiens
gtatttttagtagagatgaggtttcaccatgttggccaggctggtctcgaactcctggcctcaagtgatctgcctgcctcggcctcccaaagtgctgggattacaggcgtgagccaccacggccggcctaggtgtatgatcatttgagttaatttttgtttgtgatacgagttacagatcaaagttcttttcttttcttgcacacagcctccacacagttgttccagggcgatttgtgtttacaagtatttgtattatacttgtacaatattgacatgggttcatgtttcttttggataaatacctaggagtagaatggcagcatcatgtggttgtgggtctagagcaggactccatattctgttctgtgaatctgtgtttcttgatgccaatactgtactgtgttgataactgtagctttgtaagtcttgaagtctgagtgttccaactttgttcttatttgaagttgttttggttattttaggttctttgcattataaagtggattttagaaatatcatagcagcttgcacacaaaaatctgctgagattttgattgggattgcaatggatttatagatcactttggggagagttaacattgtaacagtactgcgtcttctaaatcatgaacatggtatatctctctatttattctttaatatctcttaatgttttggagcttcagtttgtagatcttacaaatcttttgtcagatttatccctaaatatttcatattttaatgtaattataaatggtattttaaaaagttttaaatttccagttgcttattgctagtatatggaaatgctgtttttttttgtttttgtttttgtttttggtatactgtattattactttcattaacattccatttactagaactcaatcatatggccacccctactgcaagtttggctgggcaatgttaccacctagttatcttttcacctttatatgaggcaaattattgtggcagagtgggtagactcactggtggaagataataaaaaatataatagaagcaagactattcaagcatttgcaattcaataaaggtgaccttttcaaaat

SEQ ID NO: 60281 - DNA, 1046 bp, Homo sapiens
ttcaccctctttgagtttgctttgtctagttgttatatctaatttttatggaattagtttttaaatctttattttggtttcttttaaccttgagttattattcaatcaaatgaccttgttatgaagtcttttaagggagtcaaatgacagttcttagtccacaggaatttaactgctattattccagtcacttcttggcttcttgcactctgatacatgaattggcactcacattagggaaataagatgtgtgtagagggatatttcttaggtggagaaacccatgactgctggctccttcactgtgtgtgcctatagcttgcccttgttataagatctaacagatcagcggcaatgtgggtgagtagaaggagtgaagagggcacatatgtatattttttttatcttccgcttctgtgaaggcccatagaaatgtaaccctctaggagactagaggagctacagtgttatgttctgggtgggtggaatgactgagacacctgagctatgtcacattcagaaatcttaattagtttgcagagagcaagaaagaaattgcctactctgcatcccatcttctctgtttgtgtaaagagcccagtaaaacaagacatagcagctcaattcagaaatgtgaagcatgtaaccatgatccaagagttacctatatgattttcaacaaaagaaaacttggatatatttgggagctgtgaggccaagtcataataatacattagaaataaatttaatactgtatagtttttaaagtgttgaaatatgagtcccacaggaaaaggaaaatataaaagataataaattagatcaaaaagctgttacggggaagaatatgtagattatgaaataaaagagatgatgaaaaacaatttaacatagagaaaatattctagcatcgaattcaggagaccattattttaattcttactgtgatgtaaaccagccacaatcttggataaatcacttagcaaatctggacatcatgtgtgaagggttcacttatttagattaaatctttttttttcttttct

SEQ ID NO: 60282 - DNA, 1036 bp, Homo sapiens
gctgtccttttcctctggatggtttcccttggcttaatgagttttgccccatctgggtcatcactttcacctttccctggggtggatgagagccagggaagggccacccctaggaacatgttttgttacccatctctagagattctgggtcgggcctctggatgctatcttgattttgatactcattcctacgtttcattgacttggaatgttaaatgctgctacctggcctctgctgttctgtgatcctaacatcctccctggtccttaagaagcccagacctatagcaatatcttctactgtcagtgctggccagaaggggacagagaactggcactgcctccatcagcacattcagtattgccgtggtacacggagtgtcctgtgggccctcccgagggtcgctgttagctggttggttttctgatgtaacacatagcacatagacgtgtttagcaggcccgattctctgagccttcagatcccttctgtcatggtctgtcatagcagttctggcatctctacttcatttaatgtgggccatcattttttccaaacttcctagagccatcccagtagtatatttgagcctccactgagcccacgcctcagtgttaatcctatgttaggtcatagtgcctcatttcagccttcatccagcgtcacattttactgcctcgagttaacattctcagaaccactctgccccactacagaggcacagtacacttctgagtactttacctactgcccctgaatgctgaggtttttcccactcattggcgaaaacgggctctcttcttcgtcctgtgtgagttttgagggttggtgcctgtaatttcttcaggagattcttttccctcatcattgctcagctgaagactggggtcggggaggaccccctgcagattctcagagctttctgtctctctgggccactttcttctccaggactctgtgctgtgaacttgagccgccctgcctggttcccctgccctgtgccaaagccctgaaactttctgtgtagtaagctag

SEQ ID NO: 60283 - DNA, 1135 bp, Homo sapiens
tttttctttaaatattactttacattgtatcatccttttaaaaattaggacaaatgcaaagtattatggtgttaccacttaccatattatttaaataattatgtagaaaaattctaagtggctaaatggtacttcttttttgcaaccactggataagatcctaaattaatccagaatacctaatcataaagaaaagcctcaatttttcatgttttatatttcattgttaacataaatggaaaaatcgaaaccatctttaattcttattattttaatcagttagggagcctggaaattggactttaggctgagaactccgagggttttgccttgcctaggtgtaatactttaaattggcttttttcctggcttgacctccaggccagcctctctgtagcgttgtgggtgtgctgtgtgagtgctctctctgcacgtgcttgcggcgcacttccacactcatcaccttgtgtataagacatcagctggaaatggcacagggaaaccttgctggtgggcagggtgcatatgggatgagcagagacactaatatgtgcagggacacaacgggcattgccaaaatgcacagatggctggttttccacaggtggatcttgcaggtgagagcaaggggacgggaattaaaggacagaggcctattaaccattgttaggagaaatccagccagaccgcttctgtatttcaccagcagtattggagaaccattgacctaagcttcagaattgcagctatcacagctattggccttcagcaggggaggaaaaaaaacacctctctctgcccctcacagcaagcttctaaaatgatgaaaaatgccgcaggaacgttagttgaatattttgtgagtgatgaagaataggtaatatttagtgagtacttaactatgtgtcagactatttaaccaactctacagagatgctatgaatatcacattcccattttacagacgaagaagctgataaacaagggcttaagtctcttgtcggggccacatagctaagaaggtgcagagcagcacgcaggcccagggagtgagactccaaagtctgggtgcttgatgccttctctttaccgaaggatataatgtagtgttctagtcatcagcttttaaaactag

SEQ ID NO: 60284 - DNA, 1044 bp, Homo sapiens
gtagataatattgtacaaattcagcataatggcttcttttacagaatagaaagcaacgtgaatgatagcttttgttccagttatcagtgaatctttaaaaactatgaattatttacctcgtaggttattcatcactttgtgggtatttgtcttccttactaaaaacaagttatttaatattgtttgaaatttaaaaggaaaacagttgaaaatgtaattgaaagcaatgaatgataaataaagcacactgaccatgcttgccccagccccaaccatttctcagttcttccataactgtgatgtgagcttcttcgtttatgatatggaattagttcccagtggtactttggggtgtccaatacttttctttatgtactgttttctctattctggaatggtgaaaaaatattttcatagtttaggctgggcataatagactaatgtatcagagaaatcagagatggagaaggtcatttagtctctgtttgtttcaccgtaagattgatccctcaatgcactttctagtctgtgcctaatggatttacattaccgtaaaaaatatggattttgaatggctgctaagaggataaaagaagatagatactggaattatcttaacatgtaaaattcataataccaggagcctaacgaagctgaaacttaaaattttttagcgtttagtgactagtttacagcaattactaaactcattagttagtctcatcatcagaaaactttctagtttgaggtctgagacctttttaagacgtcttcattctgggtaatcccaaaggaatttaatttgagttgcaatagaatctaggggtgcattgatccagtaagccagcgatatcaaaagtgcttttttggatgtgccttggcctggggttttttgctaggattgttgttgctaccatccttgtggtttaggtctgataatcagccatttagttgccaatgtctctgagaagaagagtttttaggccaggcataatggctcatgcctgtaataccagcaccttgggaggatcacttgagcccagg

SEQ ID NO: 60285 - DNA, 1049 bp, Homo sapiens
ctgtgtggcgctactgagaggttaagaaaggacggagtaccctttggtacccttgggatcaagtcagtgtgagcgtcattgatgatggcacagccttgtgttggaatttgtttgctgtggaccggagccagcatagttgattgatttatataccacctccccaggttgtgttttcattgaatgactaaagatgcccagaaaagaaggaaaaagcaataaccttttacaaattaaataatgttaaatactcagtaagaattttatgaaaactttccttcatgatctaataatttaaatgtactggtgggaactacatttgggaagatgatgtcgttctgccagttagctattgctgcttagacaggaaagggaggggaagatcttatttgtggaccacatcactgcagagctctcgtaaccccgctgctctgctgacagaagctgagtcagagaagagatgcagactgtgctataggcagtcatggcccagttcaggattttagactgcatgatcaaccacaattggagtttgttgtgcaatctgtattgtgcatggagtggtcaggtttgtttcataagtgtgtatgtatatatttgctttttaattcaaaactgctatgatgtataaagcaaaagtaaatcaggatataaaaacactgtcttcttgtaagagtaggaaagtaatcttttagaattttttttttgtcaaaatacctgtttaatgtgataaatctaatgatctgaattactttaaaagaattaagttaattcttaagtagcacagatgagactatttgcagagctttaagtggtggaggaggggaagttagaatgaattacttaaaagtggccaacaattaaagcaatataattgtaacataaatgttacatatttttgaaggcatctgacattgtatttattagaaagtaggcaagattttggagtgagttgctttttagctagtttttcagttttagtgaaatatggttcttgagttctttcacagtgggattaaatggaagtactttttaaaacttttttgattact

SEQ ID NO: 60286 - DNA, 2794 bp, Homo sapiens
tttacattttctcttttttattaccaaaatgacaataaaagaacactatgtatagactttaaaaataggtaatatgtattcagtcttgtgaaaatttggtttgtggcaaacctacactgcttaaaacaatactaaaaagcatacacactgctcaaagcaacacttaaaaaacaattttttctttttcttttcttttcttttctttttttttttgagatggactctcactctgtcgcccaggctggagtgcagtggcgtgatcttggctcactgaaagctctgcctcgcgggctcatgcctttctcctgcctcagcctcccgagtagctgggactacaggcgcccgccaccatgcctggctaattttttgtatttttagtagagacggggtttcaccgtgttaggatggtctcgatctcctgaccttgtgatctgcctactgtggcctcccaaagtgctaggattacaggcgtgaaccaccgtgcccggccaaaaaacaatttttaaaaagcaagtttcttcattggaggcataggattcattctagactagttacagtatggtataactctattatttaattttaattttgtgtttcttcatacacctgaatttaagtgtcagaatactgttccatgccaaaagttttatgctgcaagttagggttaaagctaaaacctgttagaattgagaatgatggcagtagcagcagcagggatcattaagtggcatttcggcagaagcctggattttaatgtattgagtggggcctatcactagataagagccatcagcaaagtgagtacccagatctaaagaatttctccgtaaattgttagtgttccttcccattcatttcttccaggttaagcgttttatgaagttcattgtgccttgatgttcttcatttctttagttactaccaggtcaagtaatctagcacaaaggtaatattcagtttcttttgttctttgctttgtgaagggtcctgtcttcttattatagttaacaatatgctgatttaagtatgggcaatgctagcgttgataagatgcacagatgctgttattcaatgcagctattttctgttacagaaagaccatatggtaggcacttgtttttctgtctagttgatgtgattagattactaaaacgaaaggttattggacttaaagattgtcctactattttatctaattttaattgactgtaagtaattaaatgtgttaaaatattgtaagccttccatatcttccctggtttgaagtagaaagatatctaaatgcaaaaaactcaattttggattgctttcactaaaatagttttatggtttaagttgccatgttcttataaaattgggtattgtgcaaattatttcacaatctaatctggatgatggcattttgtgcttctcaaataatccaaaagacaaatggatatattgtactataggtttgagaaacttgatgtgggctggacgtggtggctaatgcctgtcatcccagtactttgggaggtagagtcgggaggattgcttgagcccaggagtttgagaccagcctggaccaaatagggagacccccatcacttaaaaaaaaaaaaaaagaaaaaaagaaacttgatgtgatggaaatgttttataagtcctcttctagttatctatttaatgtgcaagaatttccactatgtagatttgtgaataaaagaatagattgagaacccaaatttgatatttctgactattcatctgtttcggggtaagtagacagatcagaagaaactgtttattattgtaaaaaataaaaataaaaaaacagggaagttaaagactttatttacttttccctggtgactagctgctgagttttctatttgatattgggtgtgtttttgattcagaattggttacttactatgttttcccctgttgcttatctctgttctgaagagggctctggcatagtcaggagtagtgctatgtatgcagcactgtttataatcccacaacttctttgcccttcgtacaacctaaggaagacactctcttgagttctatttttttgttcattgcactactcattaatatattgagaagacttatattcttgagtatatgtcctgattttctccttactcacaatgtggagactgtccttgaatatcagtagatacaaagctggatttatgattatatttagacattcttctgaatgtggcatagctagtgtgatcttgggaattcatcagcgccgtttttttttttaaccttgaggtaatacctctgtaatacccagtatttgcctagtaaatacagattgtatatttaaaagaatttgtataaggcagatcagtgagacttactttcttctctgggttctgcatattggcttctggaaacattatgtgctagtagtggatgtgaggggaaggaaaggctctgggcaccccgttcatatcagattgttattctaatccttttaggaaattgtttttgtttactttttttttatttaatcatatagacacccttctttgtccatagattgtataaacagccctctgtatccatggggttgcacattcgtggattcaactaactgtggatcaaaaatattggggaaaaaaattgtgtctgtgctgaacaagtacagagtttttgttcttgtcattattcccaaaaccacagtataacaaccgtttatgtggtattcacattgtattaggtattgtaagtaatttagagatgatttactgcaggaggtgtgttaggttatatgcaaatattgcttcatttt

SEQ ID NO: 60287 - DNA, 1978 bp, Homo sapiens
tgtcgaattagaaagtttatgcagaaaacgttgtgaggtacagtgtgctattactgtacaatttattaggcagaactgtaggtttacatttagaatcagtgttttactttttgacatctgtaaacacctgcttgcaggcaaaagcatgattaagtggaacaccacaatcctctgatcacggtaaaccataataactccttttggaaggcctacctgcaacctggtgattgcttaatgtgtattgcagttacataataatatgtattgtggtcctgaagccttatttgtcattgtcttgtgaatactttaattagcattgtatttgcattctgtttgcaagaactaatgttatttgatttttttttttttttttggtcatttaagagatgtcctgaaaccaagaatttagacacatcttgtccttggctagcaagcagtatttccagtttgttgcacacttggcttttattaacaatgacagttatgtattttttaacggctgtgaaatttgttttcatttggaccttactgctggcagcatggctatcttgtttttaagtttagcaatgaagaaaacacaatatcacctgtgttttgcttatgtgaaatatatatacagtatttaggtttggtattaaactacaatattatttgactttctaaagaataggtattttgcctagattctatgtggaagtggaaataaaggggatatatgttgtcagaaaacattttaaaacctcagggttgggagtgaagagaacttgtgtaattattgcctgtatttagttgtgacgtgttttaatctgtgattgatgcttctgatacacattaaatcttgtgaatattttttagtaatagggagttagttgctaatgaaatactttgggctgatatttaggtttttgaacattgcatttaatttttgtcgtcaattttattagaagcactacattccacagtggtactatcactctttaaaaaattttaaaaatcaataatgtgtttggatactacatttattattgtgtttttaactaacaaagagatgagcatgtgtgtcttaatagtaatgctgttaatcagccaagaaaacctaactttataggacagaagaaatcaatgtaatgaattaacaggagtctctgtttcatgctttatctaattagccaactccaccttctctgaataaggccttgtgctttgttgaaaaacaatcagagatttcttgttcatcttaagcattgcaattttattgtgttgatatatgatatacatttaggcctccccacccccaggatatattggaagcctcaaaacaaataaacagccctcttcaaataagaaattaggacagttcagtagaatatgtcttggcattatacagtaaggatggtccagatggtactcacacgaatttatatacttttatacatctcaaggtgtatttttaaaacttgaaatcactcactctgaacctcttaagtgatttttggggtgtgtgtgtgtgtgtgtgtgtgtgtgtgtgtagtccgtgaagtcttctgacaccaatccttgagtaactttgctcacaaaatcactttatatagattcttctgttgaatcctctatgatattatcaccccttttcatatccatatagcttcatctttcaaggtttaactttttttttaagccaaagaagagaaaactttccctcagctttcttaaccacatgattttttttccatttctaacatttatttcattttttatctgtagtccatactcttgtccagtaatagaatttttgtcactttattattaaactttttactaatgcaaatgaacttatttttgttttgcttcttgacctaggctaagattattctatgactgaaatgtattatggctgatgaaatacacttgttggttgattttgaaatactgtaaacaatacaataagacatttttctgggtacgagtttgtatgaat

SEQ ID NO: 60288 - DNA, 1871 bp, Homo sapiens
cccatttcagcctcgtgggggagaaaacttcaccgaagtgtccctgtctgggtgatgcagaaaacaacatgcacagccctctgctctacccaggaaagacatgaattaaaatgcacttgaatggggaacattttttcttgaaggctgcataacagccaggtgtgtttgacgcaaccgctgggcagtttcgagatttctcttttttaaacaccccctcgaatttataggctttttgtttgtttacgttaaaatttttttttgtttgttttgctcgggaggaaacgcgaacttggtgtggacatgtgggcaagacagtgataggcgcctggagaaagttcatgacctttaacttctcgttttcctaggatctctctaggagctgacactcgaaccttcacgacccattcggatttttccaggactcaggagtggcactgggaagaaggggaccgctttctgcaattggcctcgacactggctgccaagaagacctgtcgcctttgtttttaagtctccagaaatggaagaagaaggcgaagtcagttgaagtcacgagaaatcagcgaggcatttgaaggcgcttcctgaaaacctttattccctggcacgttgtctgtttcaacagccctgcccctcctcggagcctgcttgtggaattcttccccttcgggtgtgtggtggcattccccgccacgtccaatgtggactccaaaggatttgtcccttctttgtcatttgaaatgaaatgatggccacgcgtcggactggtctgtctgagggagatggtgacaagctcaaggcctgcgaggtaagcgcggagccagcgttcctggccggcagggcggtggcctgtgtcttgagcgtcctgcaagttgggggttaccggccacggggcctcactaggggcttcccggggctttgagcctgttggcgggagcgccccagcttaaccagtagcgaggagaagcctggcccacgtctgtttccagggactcccgtgtttcttttgcaagaacatgtcccgcagtttggaatgtcctcatcttggtcaccccttctcagagccaggaattctcccgtctctgtggctgtggatgctacaagcctgagaatgggcacctcagtatccgttttccttcagtccccttccgagatatttggagttgagctggttgggggtggctttcagcatttgtgtctgctccaaggtgcagagagggcagctagtatgcttgttgcacctggaacttagtctttctttggtactgacgaggggagtctggctgctgttgctgcagatctctgctttaggtagaaaaagaagtgtttttccgtgaatagtttaagcacagccttggaaaacgaccttacagagtcgtaattccaactcccggaaaaatctcctgcctttactgttctcttatttataccctccctttcactactctgaagttctgtgagctgctctggggtgtcaggtgggttgcgttgctggttagggtagcatctagcatctaacatcttcccaagggcccagagattttactccagacttcctgaaaatttttgagcaggcaggacagaaatcatagaaaatacattgatttatgacacgcatatactctgttgcctctcaccttttttttttttcctcgtgtttggagattgaagtattcggaatttacttctattatgaatatactatgtttatcattggcggttcctgtaatttgttctttaaatagactgaatattgttatcctttaaattttacttttgagatgcctatgttttcattgaagggttgaggattactttagacaataacatacccaaatgaaccctcattcactgtctcactttcttttgca

SEQ ID NO: 60289 - DNA, 1076 bp, Homo sapiens
tattttattttttgagacaaagtcttgctctgtcgcccaggctggagtgcaatggtgcgatctcagctcactgcaacctctgcctcccgagttcaagtgattctcaagcctcagcctcccaagaagctgggattacaggcacatgccatcacacccggctaatttttgcatttttagtagagatggggtttcaccacggtagtgtctaactcctgtcctcaaacaatccacccgccttggcctcccaaagtgctgggattacaggcatgagccaccgcgcctagtcaaaagcctatatattttagatgttttggttgttatctttattgttttctgccttgtgtgctaatctacatatatcttttttaaaaaaaaaaaactccaaccacatatttcactctgtcactgccagaagcaacagtacagtattatactctccaatttctctaccagattcaagggttatggcctctttggcagggagagagttactgtcaggaaaatcttactgttggatccaggacaaaccattaaacagttgcataagtctttgtcagcttggagttgttgttctgcaggtgttttgctatgttgacacagctcatgtttgccctgttttacttattgctctttcttttggaggaaatcatagagaaaacaggactcaaaccacaaacggaaacagtttatctgtttagctgttgaactccccgggaaagaagaaagaaatcagttaagagatgcatgagtgaatctttttaaaaatccatcttcaaaacacaccagagagagtaatgaaagtgattgattgattagaggcatttgcaccagagagacacaaatgcctctaattgaggcattaaggttaataattgtgaaagtcccgtcatgctgaaggctctgcagaagggacgcaggtaagtaaaacaagcctctgccctcatggagcttcttgctcaacagagaaaaagagcaggcaagtgactctaacatacagcaaaccgtaaaaatgtggccgtcatcctcgtgacaccccccatttcagcagatcttaataattattcataatcaattat

SEQ ID NO: 60290 - DNA, 1050 bp, Homo sapiens
atctcctcaggctcctcccctccctcgtctccctggcggcgctggccttgcgtcctcgtggtctcagccgctcgctccgcccacaccgcgattggggcctgctcacaaaaaccttattgggtgacgcctgcgcaccagctgcgctttgccgtctctactaggatttttcttttttccccagatacacagaaatagaaaagagcacagtttttaaggggacatcattttcaccccgttaactttcaaaggcacgtaaaaacagtggcttccaaatgagcttctctagcagaaggcgctgcagaaagagggaagaggggagacctagtttgcggtgctgcctgccacttcctcgttgcctagtaacggtttccacggcaaccgcacagtcaacgacgcttagcaatccggagagaaatagggtgttttcttcccgagagaggactgctaagagggggttaaagggggacgatgtgaaggagagaacctgtggtccttcagaaggcgaagaagaaagaaaggggaagcagtgaagaaagggacggagatactgggacagggagaaaaaagttgtggagagtagcttttaaggagtcatttggtggccatggatccaacgtgctcttctgagtgcatttataacctcatacccagtgacttgaaggagcctccccagcctcctaggtatgtggataagcaaagactatcacttgaaacaagaatggggaatactcagtattaattaagcatacatatactggaatttttaataataaataaaatgtatttttgcctcgatgaagtagccttggaggataacttgttagagaaaaggtcgaaatatctaggtattcagcatctcacagttttacagagagggcagtctggcgctgtgagatgaccattttattatattacacttaacctcttattaatacggtatgtgattattgtgtaatttaattatatgtgatatacagcatagtatgaagtttcatgttgaaaagaaaaaaatcacaattctattatcttgtttaaggatacttgatgttt

SEQ ID NO: 60291 - DNA, 1035 bp, Homo sapiens
agaggtgagagcacagactttggctgttggcctcagtttcttcctctgcagtttggtgtgaagctcagagatggtgcatggagcccccagagatagtagctggcacctggagacccatgccctgcttgggccacacctctgctggtgcagggaaacctgggcaacccgaggtggacagaccagttctactggaagctggtccccatcacctgtacttttcccacaaaagactcccttccttatccccttcctcactcacccacaaaagaaccctttccttatccatgacctgtactttacccacaagaaacccccttccttacccactcccttccttactcaatctggcagggctcagattgcaataaagaagggtcagtaatccacaaatccaaatattcagtttcctggcagacgtagaatcattcatattcttgaatcaaaaggatctgttcacgattagaaaaaaaaattcatctaactgcgtttttcattaatagaaactgcatatagaaatcctctagaacaacatcatacaccatggagttgacaattcatcatgctctattctaggctcggcttcagcatatttgaaatcagctaggaggcttctgttgatacaaaatacagtatttgtagactgatctagtcctgcagcaggtggtaaagaagtatgaactgaaactgccatatggcggtgtgaaggaaatgtttctctccagagaaatacttgaaagtgtcataaaaacagtaaaaacatttaacagctcaaaaggcttaaattcagtatgtacagaaactgtgtcaactttggagtcaggctgctttcattaaaatctcagcagatagatgataactttcactcgcgtccatgtgaagagaccactaaacaggctttgtgtgagcaataaagcttttaatcacctgggtgtgggtggggtgagtccgaaaagagagtcaacgaagggagataggggtgggtccattttataagatttgggtaggtaaaggaaaattatagtcaaagggggggtt

SEQ ID NO: 60292 - DNA, 2914 bp, Homo sapiens
cagcctgagtgagagagcaagacattttttctgtctttagaaaaaaattggctgggcacggtggatcacacctataatcctagcactttgagaggacaccacttcctgtttcacagacagtaggggctgtggaggaagaactccttcagctcctgctctgtcgcaattggccagcttgcctgcgccttctctggcgattgcctgctctcctcccacccgtggaagtcatgtcccttccctctctaggggcagtcccttagccaacctccctagtttcttaggaactcccccagacatggcctctccctctgtctgcaaactttcattggcatggtcttccatatccattgggtgttcagtttcttcacctgcatttttaaaaggcccatccactgacccagtgcttcactccctcccttccctcacagtatcccctgccctctgccttcctccagtgccttcatgttccctccactattgcactggggccccctttccagcctctcctctgaagctggttttgcttgggtcactgatagcttccctgtgctaaatccaatggatgtgttaccagcagcaaatttgtacaggtctgcagcaacctcaattcttgcctcctcagaagaaagaattcgactgaggggcctaaggcagaaggagagacggaggcaagttttagagcaggagagaaagtttattattaagtgtagagtaggaagggaaggaagtaaagtacacttgtaagagggccaagctggtgacctgagagaaagtgtgtggtttgaccttggaatttgggttttagatgttggcatacttccagggacttgcatcccgtctccccggattcttcccttggggtgggctgcccgcatgcgcagtggcccgccagtgttggggaggggagcatgctcagtgtgtttaccggagttttgcgcatgctcacgtgaggcattcttcccataccagtcccagttttcctagaaggacatacaccaattaagctctgccattttgcctcttagtgtgcatggttgagccgactcacccaactcccgagatcttattgggaagctgatcaccagtttcaggtttttgtatctattgagagactgccgtcccttggcaccagctgtgaccaattagtattttagcgacacagttaacaactgcttgaccatcacgtgatggtcgccttcctgttgtgggtcggggagccctctcctgccctgctcatgcctgactagctatctactgtaacggacacttcctggttttctgaccattgggcactattgactgtaacccctccttgaaacatggttcccttcactctgcactttgttccccctccttatcctgaggcttttcttcggttcatcacctccagctcacttcctttaattttgccattccctggggttccgtgggccccctcctctctctcttccttatatatctgtgtccatacttacgtctctcaaataatatcactactccaggttgaatcacatctcccacacccaggtagctaactactcaccgggaacgccatggggcggccatgacggtctcaggcttaactcagctgagactctacttttcccccacgagttgtttgttctgctgttttcctgttccttgggaacctgggaagaacccaggacttgtccctctccttcccctctatgtccttctagtctgcctcttgtcagtccccactgccccaggccaggcaattccatgcccctggtcctttcattcgtgctcttctcctccctgtctcagcttccgaggtgacagcttacctgggtgacagcaccacacccatcacactgtgttgtgtcaacggcagtgatcgttttacttctccccatctagaccctgagctccttgtaggcaaggcttgtcttactttacctttgtgacctctgtgtctgttacagtgcctggcactaagtcggtaatttactgaatgaacgatgggcccactttgttgtgttcacctgtgccgagctgaggttcattgactcccactgcatccaggggataaactctgacttagtcttggagtggcagatacaagcgacacacacccgtcagccggaaggctcttgtcctctttgtgaatcagaaccctgtttaggcttctaatcccacatcaaagcccatctcctccatgaaatactcagtttttctagcctgcactgatctcttccttccctgaactttcaatgtatttaatgtacagcattgttcacgctaccactgtattcgtcattgattgtttcatatttgcaaaatgtttctctccccagttcagttgtaggctccttgtaatccggcagcccatgccttatatgggctctatgcgcttacgtgggcctctatgaaccctcaaaatgtcttttgccaaataaaggccaagccagatggactgagccctgtttcttctccttggctgtggccttactatcttcctgcccctcgtaaacagctttgcccctgggagtttgaggctgcagtgagttatgatcgtgccactgccctgaggcctgggtgacagagcaagaccttgtctctaaaaaaattaaaataaaaaatttaaaaaaacaactttgccaccctacccatcacaccccacccgcctgacctgcttcacaggctcccgacggccactggcttccaccttccccatctttctcttcccgcctccatctttcaagctgcgaaccagcccctgttcctttcgctgtccggctgtcaatgagcccagagtcccttagccacctagtgctttcttccacctcctgctgtctcttggggtcttctggtgtctgattctgtcagcggggcaggtggcagtacctgttctagcattcaggccacttggggctgatccacgcattgttta

SEQ ID NO: 60293 - DNA, 1527 bp, Homo sapiens
ggagccttgcccacggagtgttgaatttctcaattgaaatgaatacacttaaattaaaccaaagttttgtagaagaaatcctggccaggcacggtggctcacgcctgtaatcccaacactttgggaggccgaggcgggtggatcacctgatgtcaggagtttaagaccagcctggccaacgtggtgaaatcccgtctctactaaaaatacaaaaaattagccaggcattgtggcgggtgcttgtaatcccagctgcttgcggggctgaggcaggagaatcgcatgaacccgggaggcggaggttacaatgagctgagatcgttccattgcactccagtctgggcaacaagagcgaaactccgtctcaaaaaaaaaaagaaatcctgttggctttctgtgcagttttttgatgccattgtgacacagagaaactttatttcaggaactgcttatatcaacatcagaacttaaggaaatgtctgagtactactttgatgggaaagggaaagcctttcgaccaattattgtggcgctaatggcccgagcatgcaatattcatcataacaactcccggtgagctctttttttcattcctttcttgtttttatatttgggaagtctttcttcccggggttacttactgtttcatttcccatttaagaattagcatataccggctgggcatggtggctcatgcctataatcccagcattctgggagcctgaggcgggtggatcgtgagatcaggagtttgagaccagcctggccaacatggtgagaccccgtctctactaaaaatacaaaaaaaattagccgggcgtggtggcaggtgcctgtaatcccagctacttgggaggctgaggcaggagaatcgtttgaatctgggaggcggaggttgcagtgagctgagatcacgccattgcactccagcctgggcgacagagcgagactcttgtcttaaaaaaaaaaaagtagcatgtacctaaaaattcactttgtgatgtttagattctgactttaagtcactaaagtcactcaggaatctagtctggcatcttttttttttttgagacggagtcttgctctgtcgcccaggctggagtgcagtggtgtgatctcggctcactggaagctctgcctcctgggttcacaccattctcctgcctcagcctcccaagtagctgggactacaggcgcctgccactgtgccccgctaattttttgtatttttagtagagacagggtttcaccgtgttagccaggatgtggtctcaaggtatgagccaccatgcccggctaattttttttttttttttgtatttttagtagagatggggtttcaccatgttggccaggctggtctcaaactcctgaactcatgtgatccacccaccttggcctcccaaagtgctgggattacaggcgtgagccactgtgcccagcccataaagctcttttttgatctgggttctttaataaaatgagcttgggttttgctgagctctgttgcaagttaggttctccagg

SEQ ID NO: 60294 - DNA, 1027 bp, Homo sapiens
aatataatatttactcaggaaaagatatctgttagattgtactagcattctatgaacttttttttgtttttttgttttttgtgtttttttgagacagagtcttttgctgtgtggcccaggctacaaagcagtggtgtgatcttggctcactacaacctccacctcccaggttcaggcaattctcctgcctcagcttccctagtagctgggaccacaggtgtgcgccatcacacccagctaatttttgtatttttcatagggatgggggtttgccatgttggccgggctggtctcaaactcctgccctcaagtgatccacccaccttggccctgcaaagtactgggattacaggcatgagccattgcacctggccaatacattgcacctggccaatccttctaatatttttacatgaaatataaacaagtcctatttcttcagagtacaaattgagtataagccataactgtttttccccttgctttctccctccctccgctgtgcatacacatgtatacattttttttttaatgagtaatacctttaatccgtagacaaatgtgtggtattcatcgttagtccaagaatgaaaagcagtctctccatagaattgtttatctgcccatctctaagcctgacagatacacagagacaaaacctggacaaatgacattcccatgtaattacagccacaaaataaggaagacctgtaagggtcgcatgtcaattgctgtcatgatagactcctaacataattaacaggtaaagagagcttttgctcagacctctcagatgaaaaagtctcttgctgttagtgtctctgttttgaaaagtgtcaagaaatgtataattgcaaggcagaaaagaatgaggacaatcttttcttcctaaaaagacctaatagaaactttaaggaatgtgaattatgtagaacatgctagccacagtctcgaccacttttgtctttttattaaaagggctattatgtttttatttccaagaaattatgtgggttttttttttaaa

SEQ ID NO: 60295 - DNA, 1075 bp, Homo sapiens
attgcaaaatgtattgagaattggagggaaacttacaagctgcattctactaaggataccatttcttcatctcccttcctttttttagtgaaaataatattaaaatctaagagagggctgtctagggggattgttttgtgattgactgatattaaaatagaatccattttaggccgggcacggtggctcacacctgtaatcctaacactttaggaggccgaggcgagtggatcactttagtccaggatttcaagaccagcctggccaacatggcaaaaccccgtctgtactaaaaatacaaaaattagccgggcgtggtggtgcacgcctgtaatgccagctacttgggaagctgaggcaggagaaccgcttgaacccgggaggtggaggttgcagtgagccaagatcactccactgcattccagcctgggcaatagagcgagagtctctcaaaaaaaaaacaaacaaaccagaattcatgttattatcaaaagatgacttatttatttacatacttactcacttgcaaaatacattttgtactcatgcaaaatacattttgtagtttactaataaagacagtggcttgtttcccaggaaatctggtggaaatgagacctgagaggtcagagggcctgtccagttgttgttaagccagacagtagctgagttgagacttgaacccagagctgggtatggtaatcctgccttgtttctctctctctctctctctttttttttttttttctgaatttctattttctccagggctgcttgtggcctggaattaatgggctctcttcctattacttgattttcaaagcctcagagtaccactacagaattgcatattgtgggtcacattagcagaacactctttttttttttttttaattcatttttttgagatggagtctcgctctgttgcccaggctggagcgcagtggcatgatctcagctcactgcaacctccacctcccaggttcaagtgattctcccacctcagcctcccgagtagctgggattacaggtgcacaccaccacatgccacacctggcctcttttttttttacaa

SEQ ID NO: 60296 - DNA, 1026 bp, Homo sapiens
agaaggagaattttcttagaatttaacaacacaatctgagactgaaattcttgactggaaatgcggttttgtacatgcttggtgtccctctgatgtcagcatctcctgagtgtgtataatctagccccgctgcctcctattttaaggaattccttcagccaggggtcagctgctttgttgctgcctggaagcagcttatctcagaatgctctttctgtttcaggtctctgttctaggatgtcccgacccagtggtgcatgagatcgcctatcagtacggaaaaaatgtaggaatagcttttcaggttagtatgctttttatttgtaagaatggtggcgtagtgatacagtcagcattctcccctagtgtgtaatcgtcaaaatagtaagaacgatggcagcagtgttggcatggcggtgctccttacatcccatttttccttttgccagctaatagatgatgtattggacttcacctcgtgttctgaccagatgggcaaaccaacatcagctgatctgaagctcgggttagccactggtcctgtcctgtttgcctgtcagcaggtaggttttacaaactccctttgacacatcactgcatagccccacagaactgatgtcccgcggcacagctgatgggaagattgcataaaggaatagatgggaaggcattcagataagagatcacaggtctgcatttgatcctggctgagtgagatgttggggctggtcatttcaccttgctaagactgtttccttatctgtgaaattgagaagatcacctttctcccagggtggttgtgaggattagctaagatcctatttgagatctttgtgtcttgtggtgtgccataggcatttgaggtagcatcgtgattatttccatatattttggccactggcaaagtgaacggtttctaagtcttgattataggactggactttggtggtcctcagagccccttaaaaggcataggaagcatcaagggcctccaagcataagaaattctccggttctagaagttta

SEQ ID NO: 60297 - DNA, 1049 bp, Homo sapiens
cagtagacccacatagttccttctttctccggattgagggactgagtcccccttaatgtgaatgaaaggcttaggaagcttcaaagatgttccctcgactgacaaagcagacattctcacagcctcctccagaccctgccacatggcttgtggctgtactgaatgttacttgaaataagtgagacattagctggtgttggaacatctcgttaatagattttcatcttagtagtatttaatttgttatgttgcaaagcagtaagatgttcatcaccgtgccatgaaattcaacattagctctttggtgtaaaattatagtaacttttggtctttcagagattttgcctctattctgtcttcacgtttacaaaggtcagtcatgtcctccataaaattcagtgattccactgtgatacagaaaccacggcccttgcttttggtgggtttctgattggagagaggaaaggtcatctttcacccactatctagcatagccattggcagcatgattcttcccaggggaggctgacgttctgggtggctggaccaggctactttggcagcttgctaaggctatgaatggagatgttggggtactcggtaggaacacccaccctcattattacaaggcttccatcctctcaaactttggaggctgaggtaagaagtgaaaggtatgctgtaaataggtcctctctcccaatgaggcttacttgccagcccaaaatcaaagagtataatacatgtgcccagttttgacaaaaatttataaaacctccttttgtacattaaggcaagagtgaggaacatttgagccatgtaggtgttatgctggggattagaaaaatgaggcactggctaccagtaacctatataactgcgaacattacttctcagatacttgttagtaaacatgagtgaaggaaagcaagatggactgagtgtgctgaaatccagctagcttggtaaagattcctttacctaggctcagattatcaggataaaaggaaaaagcctttttccctggagaagtctatgagaaagttttg

SEQ ID NO: 60298 - DNA, 1061 bp, Homo sapiens
tagattactgacagatactatgcagaggtccatttcccctttcccccactatatatgaaagcagagatagccattactcctttgtgtgtgtaggggaaagtaagttagtttcttctgaaatatattcagagtgaaacacagtccgaagaggccagcctcctctcacccagtcaccttaaggtttaagtaggactcaaccggtaacttagtatcctggggttcataacaagtacttaacaatttgaagatttttacaaatagagcaaccaaaactttctcatagacttctccagggaaaaaggctttttccttttatcctgataatctgagcctaggtaaaggaatctttaccaagctagctggatttcagcacactcagtccatcttgctttccttcactcatgtttactaacaagtatctgagaagtaatgttcgcagttatataggttactggtagccagtgcctcatttttctaatccccagcataacacctacatggctcaaatgttcctcactcttgccttaatgtacaaaaggaggttttataaatttttgtcaaaactgggcacatgtattatactctttgattttgggctggcaagtaagcctcattgggagagaggacctatttacagcatacctttcacttcttacctcagcctccaaagtttgagaggatggaagccttgtaataatgagggtgggtgttcctaccgagtaccccaacatctccattcatagccttagcaagctgccaaagtagcctggtccagccacccagaacgtcagcctcccctgggaagaatcatgctgccaatggctatgctagatagtgggtgaaagatgacctttcctctctccaatcagaaacccaccaaaagcaagggccgtggtttctgtatcacagtggaatcactgaattttatggaggacatgactgacctttgtaaacgtgaagacagaatagaggcaaaatctctgaaagaccaaaagttactataattttacaccaaagagctaatgttgaatttcatggcacggtgatgaacatcttactgc

SEQ ID NO: 60299 - DNA, 1058 bp, Homo sapiens
tacactgtaaaacaagagattcttagcaagaaatgtgtcaaaagatatatgggactaagattaattcaggtaaaaacaagttccaaaaataacgtaagaatatgcaatatctccacttaatgaaaatgtgtttttagtttacaaaggattctttcatacattatctctaatctcacaactcctctttgtggtagatattatggtgtttattctgcaagtaagaaactgatgcccaaacctcgccaaaattaaacatctggtaaatggcacagcagggaactgaacaagtctaagaccagtattcattttattacatcatacatagtgttattgccactggtaatgctgagaagttagtagctatgataccacacaggccttcccacagagcaggtaactaacccacctgggcactgacgatactcaaagaatcatctctgtgtcatgtctttgctattgtaaacaacatacctacttggtggagtagttctaagacgtctgtaatcctttccctttggtaggtgagttttgtttgctgatgagatggtctttgaacttttccatttgtgaacactggaccaggacaagcattcttgggaaaccaccttttcctttttaatttggtgtggtgggttgtcttggagtttactccagccagcacttgacagaaactccctgtcttttggaattcctttatttttaacatctctcttaaggggtttcctgataacagttggttcagaggatttaaaaagagttttggggatttctggagaagtcccaggggatgacagcgtcctcccatgtacgtatgtgtacatattctctttaagaataaaaacctcatgttaattggattttgaaagcttcagaaacaaaatggaagtgttttactttctctggtgaaacttttttaattttcaaatatcttttttaaaaaaaccaaatctttcctttcttctgcttctcttccttatttgataagtcactagacccaaacgtcagttgtagccacgtttccaaatgccatcaccagcccctgcaccagctgcacaggc

SEQ ID NO: 60300 - DNA, 1120 bp, Homo sapiens
gtggcacgcgcctgtagtcccagctacttgggaggctgaggcaggacaatcgcttgagcccgggaggtgaaggttgcagtgagccaagatcatgtcatgcactctagcttgggtgacagagtgagaccctgtctcaaaaaaaaagaaaaaagaaaaaaaaaactattggataaagtgagtgcctttggaagaaaggaagctgattttcatcataaaccctctgtactttcattttgttatgtctttattctttattttttaagtaagttttacttgtgttttttttacatttaaaaatgttgtataaagatactttgtacatagaacttctgagaaattctaataagtaaaaattaggggaaaacgaatgactatgtaatattgatgagctagttgctttgcatgctaatagaataaaaatttgcttcaatatgagaaaaaggcctaaaggaagttagcactatgagtcgggaaaagaacattagagatgtagtttgactgttaactgtaatcctcagctcatctgatctcaaaactatgtgttcatttattatagcaggaagttaaaacgctgattcagtcagtgacaggcatctgttctgttttgttctgtatcttatagagtgatggtgtgcaacaaacaacctacctcgcccagcagtactgccatgaagcaataagagagatcagtaaacttcgaccatccccagaaagagatgccctcattcagctttcagaaattgtactcacaagagataaatgacaactctttctgttctttctggcagctatcttaccagactgtgcctaaagaattttgtggaatacactttgtttgcttcatgtgcagataaccaaaaatcattttaaaagatatcaaacttattgatgggcaatttatttttttttattgcaaaagttttttcagaaaactttttaaatgtaattaataaaccacctgaatctgtcattctagtcctataaattataatcaaggtatcttgatggttatatgtggtattgtttacactgttaatatccacatgtaaggccattacacaaataaataaccaatgttaaaattcaaatggtttgtcttgatttaccgtaggagtaaagg

SEQ ID NO: 60301 - DNA, 1641 bp, Homo sapiens
tgatttattgcagaattatgattctattttctcaatatgttaacttggaaaaaaattttagccttatcttaatctgtcccaacagcaatgtgacggatttttgcagattcaaaatctgcaatggttatttacaagtcaatctactgaattccttttttaaataatcttttgaaactaagaaaatgtgtcaaattgtgtgcattcattctgtaggtaaaattcttaaggattgccatgtcagtccttcagttgtacagtgaactgttgtacactggttcaatgaaaggaagttaaaagtaccttttacatattgtaaaagtggatacagttgatttgtgagtaggcactctttaatccattacctggcactagcaacattagaattttaaaataaaataattgggaaagaaggtgggtcatgtattaatcagtgaacagagatttacctaaccaacagacttggattgtcttttgacataatcaaaatgcaacacatgcactttgtgtgtctcctcttaattgaagggagggctgagggatgttttctcttcttgtcttgtgtataattctctattgcttaggatattaaagtagagcactcaagtgtgggtttctgtgttattgaggatttgtttggaattcaaattacagttatgtactggatgctacagacttataacagcatagtgaatggtaagactagtgcaaaacagttatttctgaaaattaaagaccattattgctaccaaatcaatgtgactatttcatatgcattttgcctttgttaattttaaacaaacaaagtatcattagtgatcagctagctaccttctactttccatttttcaagtggattgttctcttaatttgtatataacctgttgtctaaattttatgtacagtcttttataataaaccattctcctatatgaaattttggatactgttaaaatataactcatgtggacttcaatgcagacttcacatttttctgacctttactcctacggtaaatcaagacaaaccatttgaattttaacattggttatttatttgtgtaatggccttacatgtggatattaacagtgtaaacaataccacatataaccatcaagataccttgattataatttataggactagaatgacagattcaggtggtttattaattacatttaaaaagttttctgaaaaaacttttgcaataaaaaaaaataaattgcccatcaataagtttgatatcttttaaaatgatttttggttatctgcacatgaagcaaacaaagtgtattccacaaaattctttaggcacagtctggtaagatagctgccagaaagaacagaaagagttgtcatttatctcttgtgagtacaatttctgaaagctgaatgagggcatctctttctggggatggtcgaagtttactgatctctcttattgcttcatggcagtactgctgggcgaggtaggttgtttgttgcacaccatcactctataagatacagaacaaaacagaacagatgcctgtcactgactgaatcagcgttttaacttcctgctataataaatgaacacatagttttgagatcagatgagctgaggattacagttaacagtcaaactacatctctaatgttctt

SEQ ID NO: 60302 - DNA, 1221 bp, Homo sapiens
aatctggggacagtcccttaaattagcatgggtccttgaatgagtaggatgtgatttaccttccagtaactgtgttttttcaaattagatagcttggattgttacctggtttactgaatggctatgcagctttctttgcctgataattattttgaaaagccggtgctttgcatatgataggcacttggtatttgaatgaattgaaacatctaataaattctaaaattcagagagctttcttaaagtgattgacagaacctattgatgtattcagtctaatcagattgtcatttggctctaagattaagccaatgatttaagtacatggttggccactgacctacttatattgatagatacaaaaattaagaaatcttcataaaaatagttttgctgtgctatatatttaattgtctttgtcttaaaattcaagtaaattttggatatagtgcactcatgtgatatttcaactgttttttccatagttgttgcaatatatgattatacaaaagacaaggatgatgagctgtcatttatggagggtgcaatcatttatgttataaagaagaatgatgatggctggtatgaaggagtctgcaatcgagtgactggtctgttccctgggaactatgttgaatcaatcatgcactatactgattaatttttttttttcttttgaagtagattcttattactcagtcatactgtgggactattatggttaacagaactgtcttaatatgttttaaaatgtgcccatattttcagaacatgctgttttattggtaaattgaatgtctacctgtaagcataaatctttgaggcagtttatgtattgctgaatagcaatttatacaagaagctgtccataactgattatgcttatgtacttacttacacatttttaactttatgaccagcctaaatattctgggggaagtggggtataatatttaacgaatcatgattcagattgtaccattacatgtttcagtgcagcatggttactaacgctatgtcagactaatattaaaatcagaaaatttaaatgctggtgctggtcagactttttttgttagattctctcatttaaaaaaaatactgtttgtttaaagcatgcataaaaatttatgtattgaaatatacttaaaaattcaagatgcttcccatttgtgtaatatttacctggaggactcgtacttaggtgtcttaacgtgaatt

SEQ ID NO: 60303 - DNA, 1046 bp, Homo sapiens
tttacctgatattatactagttcattgaacagagctctagcctgacattttcccatttccctgtttacacctttgactgtgtaaagcacacacatatatactgaccacgaccatctagagtttgaggtatgagtcatttttattgttttgtttactgtaagttcctttttgtttgttttttttaattacatcttcaacactttatgtttaaatcttaattgttgatgtattcttagaaaatcgaatctttaggatctaggctttccctcatcccgtgcttatgttttactagcaataatgcaaaattttagcttgctttctacattaaaaaactaattatgaatataaacctttttaaaaatactcaattagattttctactggttggggattctttttccattttttcaacttgtaaaatgtaaataacagagtagaaaatctgcacacagaagcagacctaatactaccaactttacttttctcttcatcaaaacaaacaataatcaacaaagaaacaaaaatctgtccacaggagactgaatttttagggaaccaaagctgtttcaagccaaaatcaggggcatgaatgagcagagtgaagagtgatcaaaccattaacgtaatgttactcatatcattactgcagtccaaatgacaaaagtgacatagatttattttagattgttaacatttgtcccgatctgaaccttggaataaggaaactactcctataatccttataaaaagagacattgtctcctaacaccctgcattcattaatttgtagtacttccagatacccttatttttagctcattttgttatttttaaatgattcttgagtagcataaactttaacacaccaagcttttatttctaatcattgcatgttttattatagtgcatgctgtacttaagttagagctttcttaaattctgttaacttataagtttccatctagacttatttttgattcaaatcaatcatatgaatctttttagttgctgatagtccaactccaccgccaccacctccaccagat

SEQ ID NO: 60304 - DNA, 1053 bp, Homo sapiens
acacaaacattgtcaaagttttccttcaaattaatataatgaaattgctggctatcacttttaaggtcattaacgtgttcagaaatgagttcaaaaccgattaaaactgtttgtgatgcctgcttaattactctgtctttgaataattctaatggtgggaatttcttttgatttctttctgtttacctcaaattgcacatctcaacactaattgcagtcagtgtttaaaagctggtaagaaaagaaaatagttttagcatataatgttaggaagttagaatagtgtagggtagtcattaatatcactttccatattaagatgttcaatgcaaaaaggaaaaaaaacaaaattagaaatgaacctgttgtccactgtttgcttttagcttaaaaagttgtgcccactgggcatagaatgagacaagctttcctacatggcttttgtggctctttctagagccacatgttatttttgtttatataaaaacacttaatactcagtgaattctccatatttacataggaggttgctttaagttctttttatttataatgaatgacctgtatatgtattttaaagcagagctaggggaaagttttttttttttttttttttttttttgagacagagtttcactcttgtcgcccaggctggagtgcagtggcgcgatctcggtccactgcaacctcaccctcccaggatcaagcgattctcctgcctcagccacctgagtagctgggattacaggcgcctgccactacacctagccaatttttgtatttttagaagggacagcatttcaccatgttggccaggctggtctcgaactcctgatctcaggtgatccacccacctcagcctcccaaagtggtgggattacaggcgtgagccactgaaagttctcattagttttttgtttaaattttaaacataaattatgttatagcaaaaattcctaagaattgaaaaccactttatcagaaatatcaaaattcacaaataatcccaaaatttatatagctttttttccagactaaaatattaaagctact

SEQ ID NO: 60305 - DNA, 1018 bp, Homo sapiens
tcaaaatgttgagttttcttttcttgtactctgacctgaattataaactattttattagaaaacatttctgtccctcctccttctggagctccaccagcaccacctctggcaccacttctcccagtgagcactgtgataggtgagattgcatagccattggagccattgaactcactttacataattcataataaactcctctgtgctagtagagtgctggcttttatagttattaggttgcaggtgataatacaaagtttaaagtattaaatctaatatcactaacttctggtgaaaggcttctgcacttatacagtaaacaaatataaaacaactttttctataatatgaaatgcttggtttataaccaacttaatgtgtttttaatttgttgtttgtttagatttttctagtctaatcccccctgccccgcacaagtgaaacttaatttggaactctctggtatatacaacagtcaaaggatcagggtgaaggtggggacaggaggagaaaaattgaaaggcaaacgatatgtgtgggatggggtactctgaggctttcctgtggatcatagtttgaaaaactctgatatggcccagtttttatgacatctcaggatgccatgaaatagttttctcgataaaatgcatttaaattgttcacaagttggggatgactgaactgagcatataaggaattttaaatatattttaaatgtcaatgtaaaaaccattgagtctagaaatacacaatcacagtaatctgggtagaaatggataatgaggtgtttcaaataatgagagctgagtttcaggttaagtgaaataaagctgtctaacaacatcttttccaaacatttgcacataccaaggaaaagggagaaaggaggtagtaaaatgaagaccctaagaatagaaattgttggtagaaaatctgtgagaaaaaaatagcctcaacccaattaataaccagaagaattaaaattaaaaccacagtgagatactattttatatccag

SEQ ID NO: 60306 - DNA, 1102 bp, Homo sapiens
gcttcctatgtaaataaatttagcttcctgtttaaagaacagtggcttatgggtgactgtactgagaaaaatgtacattttaaagtttgctattattgagcatttaaaaaattataaccataatttttagaaataaggttaggactttaaattaccctttcctatgtttttcctaggaaaaggtaacaaattttagttttcatgttaaagtaacaaaattcatatatcccagtgaagaatattttttaaaattacaaactttgtcatatatatttttaaatcctggtatacatggtcacaaagggagactcacatatttttgggaaaaatacaattttatcttttttattcattattcctttctccactatgctcctttagacggaatactccttataaaaccctggaacctgttaaacccccaacagttcctaatgactatatgaccagtcctgctaggcttggaagtcagcatagtccaggcaggacagcatctttaaatcagagaccaaggacacacaggtaagcctttaggttgagtatctcaacatctctaaagtgggtgtaactgactggcgacaaactcctatggaggtgctgagtaaaggtgaggtgccactctaatgctaatataaaatgtaaaagttgggggaataatattatatatgttcctgtaagtttgtgttataacttctgttttgttttgtttttttaactttttaaaacatctatttgtactattaatggattgtttgtatttcctccttttgatagaggtacagactctatcagactctacgggttaagactaaagaatttttttctttttttttttgtgacggagttttgctctcgttgcccaggctggagtgtagtggtgcgatctcggctcactgcaacctctgcctcccaggttcaagcgattttcctgcctcagcctcccaagtagctgggattacaggcctgagccaccacgcctggctaattttgagttgagacggggtttctgcatgttggtcaggctggtttccaactcccaacctcaggtgatcctcctgcctcggcctcccaaagtgctgggattacaggtgtgagccactgt

SEQ ID NO: 60307 - DNA, 1055 bp, Homo sapiens
attcattatccagtaaagtgttaggtctcatgcaccgatatgttaaaatagcttcacatctaatgtgttatggtgtttgtatttaaatgagcgtatttttaaaatcatctgttactcggttggattagttccataggacaaaatactgacttaaaaaatcattgagcctgcatgagattggaataattaagtggtggtttccttatgaatataattcttttgaaaaatacatgaaacacatgagtatttccccagtacgtatggatctctttttctttacaaagtagttgaaacatggctggaaaaaagcttattaacatgaattgagtaactgtaaatgtaaacctgtcctatcggatataacttacctagcattaatgtctactttttccccccctttttttgccaacgtaaagtggctaaaagccaaggtaagagccattacttatcatttgatccacagtatttcctctgtattgatagaggctgcagagccactaaaatttgaaaactcttcttatgtctgtctgcttttccctgtaggatttatgtagattatttaatactcaagttcagttcaaataagcaacatttagcttggctgtgttaatatatcaatgatatattgacatctgtgtttatataggaacattaattttgctaacatttattgctttgctcatttttcgatagttgccttgctttcattgacttacaattaggaggtttcccagacatcatatgtgactttgttactgaattgttaggatgaagatgatttttcagatgcgtatttgagcaaattgacaagtaagatctatagtttgtgttcatgcacacatttcaaaaattttaggaaacccagtgtttgaatgcagataagtttgatctcagtgaacatgtttaacaataaaataagatattaaatccagtcatctcacctgtatttggctacaatgtgatataaatggcataaaataataggaagaccaagtgcaagtggttccttgactttttaaactgtagtaccaaagtctttattcaaactgtctggg

SEQ ID NO: 60308 - DNA, 1027 bp, Homo sapiens
ggtaaatgttaaggaaacaaagtgagatttttttaaaaagagacagggtctcactgaagtgcaatagctcaatcacagctcacaactttctaggctcaagtgatcctccctcctcagccatccaagtagctgggactacaggtgtgcgccactatgcctggctaattttttatttttttttttcaagagaaggggtttcgccttgttgcccaggctggtctcaaactcttgggctcaagcagtccacctgccttggcctcccaaagtgttgggagttacaggtgtgagccaccgtgcctagcctgaaatgagatcttaaggaaataaaaaagtttcattttggatatattttggggatatttaaataaaaaattttatagatttctaacaaaaatattagtattttgaggtgtaagatgtagaggttatttcctactaacacttgccaacattgacacatctgcatgtctaataacacttaatagaggaggccgaacttcataagaggttaaagcttataccattgcatagtagcacagagttcaagtagaattttcattcccaatctaattcttcttttattctttccatttgggaccagcttatacttgaatgctaatttttttgtttcttatccacttgaaatgacaaatgaaggaagatatgtggacatatttagaatattttcttggttattttaggatagtatttagtattatgtatatacattataagatatacattgctatgtaagtatatactatacatgtatagtatatatcataatacagatactgaagtatacattagtgtattttatcttcaaggatcctaataatgttatactcaaaatttattctctagatgtgaaatgtcatggttaggtagggtaccagatgttgtttccagatagaagtaagcagtatcattttaaacaaatattgaagtgtaccaaatttctcgcacagtttctataaatgagaatgtatccaaaagacaccaaatctctcctttggatgatttcctt

SEQ ID NO: 60309 - DNA, 1783 bp, Homo sapiens
cagcctcgacctccccggttgaagcaatcctctcacttcatgtccccagtagctgggaccacaggcacatgccaccatgcctggctgttttgtactttttgtagagacagggttttgccatgttgcccaggctgatcttgaactcctgaactcaagcaatccacctgtcttggcctaaagtgctgatattacaggcatgagccaccatgcccggcccacataccaaattgttaggaaagaaaactgctttccagagaattgttttagaatcaaatccattacattagttggtgctttaaaccaccactaaatattctctgcttttagcctagtataatttaatagtattcactggaaaatagacatatggtgtacagccctgtggtctgtcctaaatatggtccagtgtatatggatagcaaacatattatgtcaaataatattttcttgttttgttcaaattaaaatatagactgtggatattcataaggagaaagtggcacgaagagagattggtattttgacaacaaataagaatacatcaagaactcacaaaataatagcacctgcgaatatggagcgccctgtaaggtatattcggaaacctatcgattacacagttctggatgatgtgggccatggtgtcaaggtaagcattttatattacattaacaagctaatttgcatatccagtaaatattttggataggaaatattgtcataaagatgattttaatagattctctttagcagctggcattataattttcatacaatatttaatatgaattttactaaggttggggtgcaattttatcagttgaataggctgtattaaaaagatattaaaattagaaatggttattaagccataaatcctagacaaatattacccatttgtgttgtgaattctatgtctttctttcactactgaacatttaaaaataaaagtctacatgcttttcaaaattactttagaaaataatttataaatacttttatcgtttcatttctaaatatgtatatatatttgtatacctgtgtgtgtatctataatgccagcaacttattaaaaaatgaaaattgtatgtaattttgtcttaatgccccccaatctcccccacaaaaaaacccccaacagattttcaggagagatatgatgtgttgcctgtgttcatttctaagcatgggaaattagctgatcttgaaggatacctgtagtgtgtcagctttttggtatttatgggtcattttgcaagcatttggaatgaccaaaattctttcgctgtctctgctcaggataaactattcctttgaaatttggtagttcctttccaagaggactatttgatttggattctggtcttcagaatattttataagtttttaaggggtcagctagaatcttgaagcttgtcctagctgattgatctgactggtgctgttgctagatctgttacattctggattttctggggttcctggtcgagagaggagtatagctgacagcattgacctttattctgcccctctctgagactattggaatctcctcttcactttttatgtctggaaattgtatgtaaaattggaacacattgcaaatgcagaggtgactgcttgtttatttcttgtgtttttatccagggatgtggctaggattgtataagagctgaaattcagttttaattcaaggtgctttaaactagactgatctctgggattggagtttcgagaatctggggaaaatgtcttttgtgttactatccaccttgggatttaa

SEQ ID NO: 60310 - DNA, 1069 bp, Homo sapiens
ggtgaaaggggccgagtgatggcatgtggtgatgcctctcctgtaatgcactgcactctgttacaggagagggaccaccagtttagggaacccaaactttgataataggtagtaagccttgtaagcctacctgaacttcaccctggagggagatgacttttttttttttttcccagacagagtctgactctgtcgcccaggctagagtgcagtggcttgatcttggttcactgcaacctccatctcctgggttcaagcgattctcatgcctcagcacccccgcaagtaactgagactacaggcatgtgccaccgtgcccggctaatttttgtatttctagtaaagacggaatttcaccatgttggccaggctggtctctaactcctgacctcaggtgatctgccctactcggcctcccaaagtgctgggattacaggcatgagccaccacacccaactggagatgatatctttattgtactagacagcaaacaaacctgccttttactcctgagggagacactgtttcttgatccctcaagaccattccttatataatacaaacatatgtagcaagttggtatggaacaaaatgagtcagtccctctactcacaacaggtacagaaacatgaaagactcaagtataattgccttccaacagtattcacccttcatttctataccttcttggcttctggtaagatttctttcccatgattatgcaacttcatttgtcactctgattaatcttaccgacagaggctgggaccagatccattcagtttttcttataacacatttcattacagttactgtcaacaggatagcaggatgaggccagactgcaatattgacttcaattatgctccccagggtccaagacccagccaacagaacaaatgcaataaacctttagggtctacctaagagagccaggtggctttctctttgtttctgtgctgactttactcttggcccaaggcattaatctagttactgcagaatatagagcacagatttggccttggtctacaaagaggaagcgtagggctattcttctatctgtaac

SEQ ID NO: 60311 - DNA, 2173 bp, Homo sapiens
ggtgatggtttttctaaaatcttttttttttttttgagacggagtctcactctgtcgcccagactggagtgcagtggtgtgatctcagctcactgcaacctctacctcccaggttcaagcaagtctctctgcctcagcctcagtagctgggattacaggtacccaccaccgtgcctggctactttttgtatttttttgtagagacggggtttcaccatgttggccaggctggtattgaactcctgacctcaggtgctctgcctgcctcggcctcccaaagtgctgggattacaggcatgagccactgtgcttgtccattttttctaaaatcttcagtgcctgaactcatcatggtagactgtgactattatttttcttttctaaaaagaggagtatttgaggctattgggatttgttgaactgaaatagagaaagattcattcaacaaatagttaattgcctactctatggaagactgtctgttaggtattatgatgtggtggtatgatgtctatattattattattatttttgagacagagtttcgctcttgttgtccaggatggagtgcaatggcacgatcttggttcactgcaacctccacctcccgggttcaagtgattttcctgtctcagcctcccaagtagctgggattacaggcacatgccaccatacccagctagtatttgtagctttagtagagatggggtttcatcatattggtcaggctggtctcgaactcctgacctcaggtgatccgcccgcctcagcctcccaaagtgctgcgattataggtgtgagccatcatgccctgctttgtgtctatattatttataagctatgtagaaatcactgaaaagccttaaatctaagaaaaagaaaattggtctatagtatgtatagttaaatgaggaaatgttctgtatggaagaaaaataattgttatttttgaaagggttttgattttagtttgggcagtcagaagtttgcttatggaaagagaatatgtcaagcagctttttttttttttaaagcatttaggtaatatgttcctataaaagggtcaatacagttgtattaaaagtcaaacctaaaatgtctcttcttcttctccccatactgctattatcctctcccctcaaactgtatgcttgttttctgcctttccagtttttgtacaaaggatgtgctttgggaagattcatcttacattggtacgggatggattggagaagggagagactggatggacagtgaccagttagaggactgtcacatttgtctcactgtaaagagtatttcatgaattgagatagctgtagtaagattgaaaaggaagataagaatcagcaagccttggtgaaggagatatgggtggctgcgggaaaaggagaacccaaagaaggcttatttaaccggtatctattttcccctagcataaagctaatgcgcctacagaaggtaatttgcagtcacagaagtgaatctatagaccccctctttttcagctgttagtacacagttggtttctgacactttccagcttttactcctccacaattgaattgattggcagagcagtgggttggagaataggaataaagcttgactgctagctggctgcgtgggcagaacagggaagggaagagggaagaggagaggaaagggattccagtttctctggctatatactgttgtggcatgaggtgcatgtcttttgatgttaattttgatgttctatcataaccttctgcattacagattgttggtatttttatatgtgtagtctttataaatttcaaatacatatgacgtgggttgaaaatgatctctttttgaaaggaacttttagagagaattctaaggaacagtagtgtttgggggttctcaggcaaagtttctcctaaagaatgagtttagccgagtcattaatttaaagagttgaggggaagggggattgggaggcaagggatatatataggtagtaggaacagaaagatagcaaggcatgtttgggagagctgtgagtagtgtcaagtgccagggaaggtggaggagatgaagtcttagtcaaaaacatacttgaactgctgtcactaaactgtagaagatcggatcagtgtttcccagatttgaaaatagaaaccgtgttttaaatttaacactggtaaga

SEQ ID NO: 60312 - DNA, 1012 bp, Homo sapiens
ggaggcggagcttgcagtgagctgagattgtgccactgaactccagcctggcagcctgggtgacagagcgagactccgtctcaaaaaaaaaaaaaaaaaaaagtaaggtaaaattgatagttaatgctaattttgaagcatttacaaagttttgattgggaggttgtatatttttcctaatatcatcttgtgttgattgtaatatttattgaaattatggtttgattgtagaagaaataatagtcaaaccccagaactacaaactttgtagatcttaatatttactaagacatcatgttagaaaaaagggattttttttaaaaaaaaaaaagggcattgttgagaaataagacaataggaaagtagcaattactggattttttttttttttttttttgagatggagtctcgctctgtcacccaggccggagtgcagtggtgtgatctcggctcactgcaagctccgcctcccgggttcacgccatcgattttgtttttaaaggaaatagttgacgtggtcattttaacagtaaatatccatcccttagaatggagacttgagatttgactactgtgtgtcaatccaaataagtacttttaactttggatctactaattttctccatctacaaaataaaactttctcagacatagttggtagtgaacccgtgtttatgaagaaaatctgttaatgagggaccacacccagctaattttttgtaatttttgtagagatgggattttgccgtgttgcccaggtttgtcctgaactcctggactcaagtgatcctcctgccttggcctcccgaagtgttgggattacaggcgtgagccaccatgcccgaccagcaaaaacacatttttgaaaaacttcaatttacctttaattcactcatttcctgaatgctttatcattaatttttattaataatttctacattctttgacaaaattgtatttggtacattttatttttccttctatggaaaggcaagtgtggcactttttcaga

SEQ ID NO: 60313 - DNA, 1043 bp, Homo sapiens
tagggctgctatcattaattatcaaacacgaattgttcttaactccttggaaaaacggcttaccctcccttctcccaaaagttcttgagctgtaggcttcataagtaacttaaaatagactggtgtcatcgccggttgcttattttctgaggtttctctcttaacaagctaagtaaatgtatagtatgtgaatccaaatacagaaacgaacagaggtagcctctgaactacaacgtaaaaatatctgttattgtaaattagaaaactcttgggactttgtgacagatgcttgtttgttcgtttctctttggatgattggaagtgaattgtgtgtggtagtttgttttgaagatctttaactgtgtaaaccaacagtttgcgctagaaacaaagtagcacagtcctttgtataaatataaaggcaccaggaatgctcttgcttttggtaaggcaaggccaaaacgtgctttgaaaggttagggttattgcaattcagaactaaattgtttatagaaatgtctcccatgtgattataatttttaagaaccgatgtttctgtgttggcaaatgcttcccctctttatttttagagggagatgctgttttcagaatgttttgaatatttctcagttttcatgttagtaacattgtatcttcagtagcactactcggaatttatcttcacaatttttttttcaagctttcactttaggaattctcctgataagtgaacttgttgaatgcctgccacatctactgtatcactttgtgcaaactttatatttagcccttcgaaaaacttttaaaaatctagtagggatgtggatatggtttgcaaatataaaagtgatctcgtagtttatcgatattaaaaataggcaacttttattcaacttaacatgaaaagccttgaaattgaggagaaccttaatttgctgaaagttttaaagatttttgaaagccaaaaggagagcacagtaagtttaatttctcgctttccagaaaagttatgtgttctctgtagaagtcagtagataagtgct

SEQ ID NO: 60314 - DNA, 1188 bp, Homo sapiens
ggaagtaaaaatctagttttccgtactctgtcccctttttaatccttctctgaatgggtgtccttgattcactgacatttcctaattaaccaagttctgccaagtttcacatgaaacttggggaaccgatttcattcccccagtatcaccctgtggcgccaccttccggagctgtgaggaaactccggacttccccccaacaccgccccctccctccaccctcggtctccgctttctgcgctctgccgcgttggttttcggaggtgtctgggcgcatgcgctttggacgggccgcctagcctaggagagactacaattcccagaagacagtgcgaaagaaaaaaaaaatcccgcggtccgtgggggtgggagaaataaacgctcgcgagagaacgaggttcaggcggctgcacgaagggggtggaggggggctggagagagtgaggaggaaggggaggaggtgccgtcccacaataccaggcgggagggcgggtaggcggtttgtatccgggctgtgaggtgctcggagcctcggcggaccttgctgcctctgtctctttaacgcgagaggaagcgatgcagaggggtggaaaatggcagagctgcagatgttactagaggaggagatcccgtctggcaagagggcgctgatcgagagttaccagaacctgactcgggtggcagactactgtgaaaacaactacatacaggtgaggcgctctggcggccggcgggcgctggccgggtcgaggacccgccggagtgaccagcccactgggcggggtggggaactgccctgacctcagcggctgccaccaacccgagcccctaccgcagccccaaccccagccccaaccggggacagagcgagtggccgggctgagggagtcgggctgcgatacaggaagtggctgtggtggtggaaaccgatagaaggggagagagaaaatgggcgagggagccgggagcccgccgctgccgcagcccggcgcccccctcgcgtccgcttcccccagggcccggccaccggggtcgcgcgccccccaggtagcctccagtccgcagggctggagtcccggaatacccccgagctgccgccgcgccgcctctctgcgccgggagaggaggtccaggacgggagaggggagaggagagggcagggacgaggctgaagccgcagaagggaga

SEQ ID NO: 60315 - DNA, 1833 bp, Homo sapiens
gttaactatgaaatcttttaggtaaggaatataattctttctttttcattctagctgctgctgaattggaatctggatcaatagcttcccctctagggtctactgatgagtcaaatctaaatcaagatctagtttggaaagcatcaagagaatatgtacaggttttaaagaaaaattatatgatctgaaagataagattttattactgggctgtttatgtgacattttgtttctcattaaatattaatatatgacatgtaaaaatattaaaggaacgtatttttgtatcatatatgtcagatcaaaatttatatagtattttaaacaatgttacttggcttctttaacttttaagtggattttgccaatgaaaaccaggaatattgagttttacatactcaaactgcccaaatgtgagctgtttaaacagccaaaccactaagttgtcattaatactttagtgcagttaattgatggcttatttgtattttgtaatttttatcactatatgtagtggtagatgtctaattggacttagacatcattttgttgtgcaggaactgtggtcattgttcatgtttggatgtattacaattgttacagtgccatcaaatttacataattttaattttaagcactgatttatatagctgttctcagggagaaacaagatttgcctgattcaccttttctgtttgtttatttatttttaattaaccttttggaaatagccttcagtttagagaaaatttcgaagttttagtacaaagactttctcctccgaacaatttgagagtaaattgctgacattatgtcatcacccctgattactttagtgggcattcctacaagtcaggacattctacataactacagtgcaaaccttgcaatcagaaagtcaacattaatacattctagtttgttacttctctgtaatgtcctttatagcaaaaggatcccattctaatccatggcttgtatttagttgttgtatctgttagatctttcagtctggaacagttcctcagtctttccttgaccttcatgaccttgaatattttgaagagtaaagtctggtaatataagaatgtccctcaattgggtttcatggtgattagatttagattatatgattttttggcaggagtatcacagaagtgacccagtgatcttctcattgcatcttacctgtgaccctacagttttgatttgccctgttactggtaatgttagcattgatcactaacagtggtatctgctgaatttctcctctgtaatgttattttttcaccttgtggttaattagtattttacagggaggtaatttgagactatgtacatatctctactccccatcgaaccctcaatttattcatttgcttgtatcaaataaaccatggattcatggtttattttattcagtgagttataattcattaatattgttattaaaaatttgtttttcttttaagaaatgttatattttgacaacttcagacttacagaaagattataagaggtagtacaaataatttttggatattattccccaaatgttaacattttactgcatttactttatcctttctcccccttctcctcctgtctttctagatgaatatgaatataggtacttaatacagattttttttctaaactgtttgtaggttgcagacacgatgcctctttatttctaaataatgtgtatttcctaaataaaaggaattaccttacataactgtagtataatggtcaaaatcaggatattaacactggttcaatgttaatatctaatctatagaccttacgcagattttgccaattgtctccaaa

SEQ ID NO: 60316 - DNA, 1058 bp, Homo sapiens
tttaatatctaaaaacctatctgtgtcatcctttggaagcatcaaaaattatcttgatttagcttatgctttctttctgcctctttgtgtgtgtgtgtgtgtgtgtgtgtgtgtagtaataaaatatatcatgaaaatttactcatttcccatggatatcccccatgtatacctgaggtatacatgttattaaacttctgtttgttttaaaacatatatgcctcatacatatacaaaagtatgtatgatttaagagtgaaatgagcaatcatgtttctactatccagatttaaaaatggaatgttacccattgccttggaagcccctaacatggctgcttttctgtttatttgctgagtacttacgtttgttctgattctaattactatttttctctcattgtctttctctaacgtggtttggcatcccttttactttgttaacgttgtgctagtaaagatttctggatctcttctgaaagcagcctttgtgtctttatacatgctttctctgctcatttcctttcttctaaaactctgcctgtttccttttccccttaactcagacgtcaaaaatgtttctttcctgtctcttatctactttgaatgatcttgatgttttttgtgtgtactttctttttttttttgtacttttcttcttataaacagtggtcaacggatatcaaatgtatttttgtgtctttttcaaccattcatgtataagtatgtgtatgcttttcttttctttttttttttccctggaatctctctgttgcccaagctggagtgtggtggtgcagtctcggcccactgcaacctccacctcctgggttcaagccattctcctggctccgcctcccaactcagcctcctgaatagctgggattacagacatgcaccaccacgcctggctaatttttgtatttttagtagagacagggtttcaccatgttggccaggctggtcttgaactcctgagctcaagtgatccgcctggctcggtctcccaaagtgctggaattttaggcatgagccactggtccagcctaagtatgattt

SEQ ID NO: 60317 - DNA, 1059 bp, Homo sapiens
aacaaaatattttcaattacttttaaaactctggaaacactttttttcttaaaactattatttcttatgagttcatgagtaacatatgtttaggcatataaaatgcagtttataaacctaatggcaataagaacggatttgaaaaaatgacttttcttaaaacagctcatatctcttttctggaatttaaattaccaaaatttgttaaaaatagaagtttttacatataaaatactaagtgttaatgaaaattcctttttaaaaagttattttagatgtacgttctcatttctgaagttgctctagaaacactgtcatcagtagttcaagatattccagtttttgttaaatcaaatcttactaagacaatttttagaaaactttcatctggttcccgttacattttttatactcacctgacttcaagatgagctatctctcattctctataaacattcttctatgggtttcaatttttcctgttctattaaccatttctctttaaataaagtttttcttctccacaataaacaaaaacataacttttgcctgattcttgtggcttttttaatcaacctgtttttccattggactctcttttttgtttgtttgtttgtttgtctgtgacagggtctcactctgtcaaccaagctggagtgtaatggtgcaatcatagttcactgcagccttgaactccagggctcaagcaatcctcccacctcagcctcctcagtagctaggataacaggcatgcaccaccacatcggctaatttatttcatattttttagagacagagttttgctatgctgcccaggctggtcttgattcctagtctgaagcgattctcctgcctcagcctcctaaagcactggaattacaggtgtcagccactgtgctcatcaggctctaatattttttaatacacggtctcatctagagatctacttcttcatcacttgtcttcttttatactaaaatctaattttcagtcttataattctcattttaaaattctgaaagtcatcaaggccctattttttagtctttaatctgcttt

SEQ ID NO: 60318 - DNA, 1029 bp, Homo sapiens
atctagttgtcacctaacatgtcatcatgttaatttttataatcactggcattgccatggtcattcacatctataaatatttaaacttatagttcatgtggtggtgcttggaatgcaaaaatataaatgcttatcgtaaggtaatttcctatctttctacattttaccaagtttgtaaatttgagtatttatctgataaaatatagtttgaaaacaagagtaatatgttttagttctagaacgcaggttgataaacttttctgtaaagggccagatagtattattttaggctttgggagccgtagataccacctgctgcaacagatcagctctacagtcacagcacaaaagtagccataaacaatatgcatattgaaggggtatgactgtgttccgataaggtttagttacaaaaacaggtaatggacagatgtgtactagattattagtaaagtgggttttttttattctttgttttagttgcaagaagcacaggatcgacatacagaagctgtcagatgtgctgagaagatgcaagatcacaagcaaaagtaaaatttaaagcagcacacagaaaaacatgattatttatagagcaaataagcagtgtagtatgagaattatatcagctatgatcataagtacatctgtgtgaagtcaaggaaaaatttcagcattaagcaattttgaaatgcggatttttttatattatcctagaattttgtgcattatccacaaaccacaactagaaaaacgatagagttgccaaatcacctacttttgaaatctttaagaatttatgtaattatgccttcaggtgtttgctaagaaattacacagtattttaaaaatttatctgtgagaataattattttaaaatatacatttcaggcttgaaaaagataatgccaagttaaaagttacagtcaaaaagcaaatggacaaaattgaggagcttcagaaaaacctgttaaatgcaaatttggtaagtcagccacttaatttctgtcgtactgaaaaggaatttta

SEQ ID NO: 60319 - DNA, 1105 bp, Homo sapiens
agttagtacctgaagcagactgcagtagagcctcagcacacgctgcagactgcctggaatgcttttcttccccatttgcttaactgctgccttctcgtccttcatttctcagtgtagccacctctccctcagggaaatcttccctggacccagtatagatcaaattctcttttgtggtcatagaactctgtttccttacagcatctatctgaattcataattgtcactttttttgtattttgtcactttttttgtcttcactatactttaagctaagcaagtgcagaggtcttgcctgttttatcttcagagcttagtttaatgtcttccacattgtaggccctcaatatgtaattggtcagtgtcttaatgagtgaatgttatagtgcacagtgtgttatatggaaaaatgctcatatatttctatcttgttttcttcctgatacagattctgttagcctattgaaaatccaggatgcagctctttcatgtgaaagattattagaacttaaaaaaaatcactgtgaactacttacagtaaaaattaaaaaaatggaagacaaggttaatgtactacaaagggagctatctgaaacaaaagaaataaaatcacagttagagcatcaaaaagttgaatgggaacgagaactgtgctctttgaggtatgatagcctagttttaaagaaatgtttaactatttgtactaaagatatatagaattcttgtaattgctgacttatcttctggggcttagcagggaagaaaacttcttagtcttgtggagtgtgaaattcttggaaataatataactagttcttaactatgaacttctactaaatatatattcttttaaatcactttaatggctatgtagaagtttgtcgtatggaagactcattatttaatacagtaagttttgggtttacagtttttttgtattatagttaatgctggaaggaatacctttttataaatctttttctacatttctaattatttactttgaataaattcttcaatatagaattattcgtttaaagtataggaattttttttaaaaaggcctttggtccagatttttaaattgttctcaggaaagtttagt

SEQ ID NO: 60320 - DNA, 1067 bp, Homo sapiens
ccaaggcttaaaaagtaaattctgaacatagtggtacgttgaggaaagagcatttcattgtaataagtttttatttaaagtttatttattaaatgtttttgtctttagaacacacacacaaacacacacacacaatactgtcatccatatttaaacctaaaatggttagacataaagtttgttcataaaaaaattcatatccctgaagaatcttaattattaataaacaaatctcttatggaaaacaaaataggtaacagacattgctgagtgaatcaaagtaaataagtaatactgaaaaataaaaacagaaaaaaatccgagagatgacagtcagttaaacttctgtgagcaaatggcaagtaaaggacatgtaaaatacaattcaccatggaggagtagtgtgtttgtagcatagaggttgacatgggacttcttctatgaagaaagttagtcaaacctatattatttacattctaataagtgaaaactttattttcagagttttcagattgggactctactagtttgaccctcagtaataagacttgccaaagacctgggactttgaaaatcaatgataaatatctatctgtatcacagtcagtgaccaaaaatcagtcagcatccgcagaactgggacaaacagctaaaggaaagattactattggagcttagtttctattagagaataatactctccatgacctttgtgaatcacagctaccagaaaacaaaaagcaaagaaggtaacacagaagcacagagaattcagtcctagagtacctttgcttggcttcataatatcatagttatgacttttattttttattttattttttgagacagaattttgttcttgctgcccaagctggagtgcaatggcatgatctcagctcactacaacctctgcctcccgggttcaagcgattctccttcctcagcctcccaagtagctgggattacaggcatgcaccatcatacctggctaattttgtatttttagtagagacagggtttcaccatgttggtcaggctggtcttgaactcctgacctcaggtaatcc

SEQ ID NO: 60321 - DNA, 1144 bp, Homo sapiens
tggcttttttcttaaagttgctttttgataacgatagctgtttcataaaatcctttagaggataacattttagaaatgaaaaaattacagttaataattccttgaatactaaaattgttattttaaataaacactgcattgattttaaaaaactgcactaattttgaaatataaaatgttattaatatctaattctgtggcaattaaattttttccttttgataaatattacaatattgaaagcttattatgtattatttcttagatgtgttttatataccttcttgcatgagtggatcaagaaactttaagatggctaaactagaggatacaagaaatgtaggcatgccagtagcccacatgggtatggaaaaaaaatgcgtatttttgttaactgttattctacaagtgtatatccaagctgatcaattcagaacactttctctgatgagaaataagttatatatccaagtaaagtggcatcataactgtgtgcttcctaaattacaggacaagttgaagaacatgataaatacttgtagtataatggtataaatgattctgatgtgttgcattaaagatatgctgtcgcattttaccatcagccttgacatttctcctctcagggtcatgatttgctcctctaattaaagattacttttctccacatcgaccagcatgctcacattggtatatgtgcacttttctattttagttatagtcacttggaacataatcttacattcaaatcataactgcatgttttattaaacctatattcctgtttttttctccagtatacttctgtcatgttgctgtcctaaccaaaataaaaaacatcccaaaaattaacataatcattttcaaaccaagcgtgatgattctggtcatactaacactgcatgaatttatgattgactttgtcatatttatgtataattgattatatgtcccttttggtttttagagtctcctgagagatatcttcacttgaaggtaataagttttatatttttatcttgaattattaagtgcatattgtataaagtatacattatttattaatcattttgtttcaaaacccattcagcctaccattgaaatgaaagattctgttccaaataaagcaggaggaatgaaggat

SEQ ID NO: 60322 - DNA, 1022 bp, Homo sapiens
taattagaaatattttaaatgtttaacgctgtactatagcaagtgtattctattttttaaaatacacttttttttccctcttaatcaggcatcccccgaaccggaataagttcagagaagctcccctcttatttttggtggggaatacaaagtagagttaggtcttttgatattagttccttgttgaactgtgcgcgtaagttaatattttgtctgttaatatgtgtccttgggacttccatgtttggtttgcagagtcaatagccatctgaagatgaaaagataagcttaatctagtgagcatatatgaggttctttattgaaatgttttggttttcaatacatgcttatcttatttttaagcctaattgcttttaaaataggaaattcatattatatttgaaagtgattagaaaatctttagcaattcattctttttgtaaaattgaaactcattattgatactaattttaacagagtatctctgagaattttccacagaagtatgttgatcctttagctggggctgcagacggaaaagaaaaaaatataggaaatgaacaagcagaaggtaagagctatatttcatttttaaaaagccattggacagagtgtttatttaaaaacatgactgttgatatattctaatagccgaagaaaatcacctattaaatgcatagtaagaataaagagaggtaaaattgtgataagttgtatatcttaggtgtcagcaacagattaaattgctagtgccactaagggaactgaattattagatccatttcaaaatacattaagacctgagggagccaggaaataaggaagaggagaggagtaaaagaggacatgagagtgaggaaggcagagagtacagggagtgaatgaagggcaaagaagcaagtgtatgtaatggagagtggtaaaataaaataattctagggccaggcgcgtggcttatgcctgtaatcccaacactttgggaggccgaggcgggcagatcacttgaggtcaggagtccgaga

SEQ ID NO: 60323 - DNA, 1027 bp, Homo sapiens
ctaagacaaccaattaacatatgcagacccaaatattatattcattttaaaaatatttttcttttgctgtctttcttcatattaccaattttttcctgagactgcatcaaccttgtgaaattctttttttgctattatttttattttattgaaatattcatgaatggagatagacttgtatatgtatttaattatgtatttaaaatttacaatagtaaatgttctcatgaatatatctgtgtatcacatttgatagatatgatgtccgcattaggattaggacaagaggaagatatagaatcaccttgggattctgaggtactttctatggttgttactattattttaaaatataagcattgagtgatgttaaaacataaagagatgctttgacttgacttttttacctctgcatacatccataaggaactactttcttatatttttcagttcataattaataaagtatgtgctaagtatattactgctgcatagtataattctgctaatttgcaggattcatttaagaatccagtgaaggatagtgcaaaaaaaaaaagaaaagaaaaggcttagaagtcacatggaatcagtatgggttctgaagttaagtttatctaaaaactaaagaattatttcaggtcggccaggcaaggtggctcatgcctgtaatcccagcactttgggaggccgaggctggcggatcatgaggtcaggatatggagaccatcctggccaacatggtgaagtcccatctctacaaaaatacaaaaaattagttgggtgtggtggcgtgtgcctgtagtcactactcgggaggctgaggcaggggaatcgcttgaacccgggaggcagaggttgtagtgagctgagatcgcgctgctgcactccatcctggcaacagagcaagactgcatctcaaaaaaaaaaaaaaaaaaaaaaaaagaaagaattatttcaggttagcctatggccaagtgtatgattctgtgttatgtatggatgagtaaacggcctaatgagattc

SEQ ID NO: 60324 - DNA, 2236 bp, Homo sapiens
gccaccgtgcccagcctatttatttatttttatttttttgagacagtgtcttgctgtgtcacccaggctggagtgcagtggcatgatctcggctcactgcaatctctgcctcccgggttcaagcaattctcttgccccagcctccttagtagctgggattacaggcacatgccaccacgcctggttaatttttgtattttagtagagacagggtttcgccatgttggccaggctgatctcgaactcctgggctcaagttatcttcctgcctccgcctcccaaagttctgggattacaggcacgagccaccgcatctgatctccaccttgttttagattatcaggtttgtgctggttcaggtaacgaaagttatatcagccattaattggattttcagttcagccttcgggacaatttgtgaagacaaagtattcccaggttctgccattatcttggctgtcactattagttatagaactaaggttgagtctttatcgaatattttatagtttcggagaggtagaggcagcaattggtaactaaaatatttttcaaaaacaagatcaaattttaattagatcaagaaacatcatttaatatgcagacagttgacctttcaccaggtttttgtttttttggagggggcatccagattgaaaattgtaagctggtttttgttttgtttttaaagaaatgaattcactcatttttctatatttttgttctaaaggctttctggcaaaccgggtgttgatgattcatggcctacctcagatgacgaagacctcaattttgatactaaggtaaagtgctctctcatgaacttaattttcttactctgaatctagtttcgtatagtattctcttaaaattttgcagtggtctacttatcattgttttctgtttgtaatggaaaggtggtcaggggaagccattttatagaaatatggccagttgaattctttttttttttttttttttactttggtaaataacaaaggattgataagtactttgagggagtggggattgcaaaaaaaagaatatactggaaaatacatagtgacaggaaaattatattgggaaaagttttcctacaatagaggaaatatgaaatttggtcaaagtttatatggataagcactcctactatgattttaaaatctttttccatttttctctctctgtagtaagaatgttacagctttcaggtagtagtagatgatcatttttaactaattggatgacttaaaattaaactgtttactacagaagtattttttaaaaaactggttgtaaatactaatcagtattatcagggatatcctatgaacaaaagtctgttacaggtctgtgtttctcagtgtgccttagtatacttaaagcctttccttttcttccttgacttaagctcacactcgaatggtcatgcctctattttttttctccctactctttcatcttttaaaaatgatttatctcagcctaaatgtttccttgcagaatacatttcttcagttctgttatttcagtccatgtctgtctccatttgcagcatatttaggtgcagctttctatttatgtagttatgtgtggcttttgttcagcaatcattgccccacaaggattatttttgtttttttctctgtttcttgtaaggagctgaatttatacaatcatttatttttagctttttgacagaatagaagcagcctatactatttgcagtgccaacccactttcataaaatatactaagaacaaaatgctcacagtttttctcacaagaggtaattcatgcaaatataaatcatgcatacacatttcagaaaataatatgtaattaatttaaatgttttaatgtttgacttttataatactctacctaggaaaaaattttcattttaggctactgtggttaagaaaataatcgaacagatatcatagtatttatataataatcaattaggggtaaggggagtaacctttggaggatatctgtatcatctctcataatccttaccccatgagaagatgtagcaaagggcagaactgaggtttaaatctacatctgagtgactccaaaatctttgttctttgtgttagatcatgtagtaatggtgactatctattacgattattttatcaaatttgatacttgtttttttaaaacttgttattcttatttttgttttctagaatgtcccaaaaccaagcttagcaaagctaatgactgc

SEQ ID NO: 60325 - DNA, 1024 bp, Homo sapiens
caaaccatatcaacatgctatttaatgtttataattttatgaaccattgtatgttttgagacagtgcactacagtttataaaaagtcctgtcactctcataggacggctctacatttggcctgtgccaatggtcatccagaagtagtaactctcctggtggacagaaaatgccagctcaatgtctgtgacaacgaaaacaggacagctctgatgaaggtatatagtagccagctctttcagcatcagatggatttgacttaaatacatagaatgaaaatgaatttatctcattaaaatataactaattggtgaaacctgtggagtgtttattttgcattcctagaatttatgatctgtttcttggtctaatactcccaggctgtacaatgccaggaagagaaatgtgcaactattctgctagaacatggtgctgatccaaatcttgcggatgtccatggcaacactgctcttcactatgctgtctataatgaggacatatcagtagcaacaaagctgcttttgtatgatgcaaatattgaagcaaaaaacaaggtatagatcaaccaactttatttttacagtatttgaaatgcgtttgtttcaacagtgacatatgtaagggttagttttctgtatttggaagcgcaagcattccctgactgaaagtattttaaaataacttaattgtctaagattttactttaaatgttgatacttttaaagaagcattaggcagtacacctttcttttatgcatttattgtaaatacttgtgaaaacacaatttgttaaaggcaaatcttttttttttttgagacagagtcttgctctgtctcccagtctaaagtgcagaggcgcgatctcggctcactgcaacctctgcctctgcctcccgggttcaagcaattctcctgcctcagcctcctgagtagctgggattacaggtacccaccaccatgcccagctaatttttgtatttttagtagagatggggttttgccatgttggccaggcgggcctcgaa

SEQ ID NO: 60326 - DNA, 1023 bp, Homo sapiens
ttacctgggcatggtggcaggtgcttataatcccagctactctgggggccaaggcaggagaattgcttgagcctgggagatggaggttgcagtgagctgagatcatgccactgcactccagcctgggcaacagagcaagactctgcctcaaaaaaaaattaaaataaatttaaatacaaaaaaaaatagccaggtgtggggtgcatgcctggaatcccagctacttgagaggctgaggcacgagaattgcttgaacccaggaggtggaggttgcagtgagccaagatcacaggagccactgcactccagcctgggtgacagagtgagactctgtctcaaaaaaaaattaaataaattattataacctttcagaaatgctgtgtgcattttcatgttcttttttttagcattactgtcactctccctaatgaaatgtacttcagagaagcagtattttgttaaataaatacataacctcattctgaataatgtccctcattttgactataactgtgcttggtttcaaaagcaaaattaaacaaaaatctcagtcccctccgaagtgaactttgtgttaccctgcgtcagaaatgccaagttgtgtttacttttcattcagattttgtgaatatgaacatgctgttataggatctacagatgaatatttaactcaatagaaaaattattttagaacacattgtattggtattacaaccagattatattcttgacgttgacttcattaaaattatctacaatttcctaataatttaagctgtatatggtcttcattgaaaaaagatagatattgttacaggaagcttgttacattatattcttgaccttttggttgataatcttaaatcttaatgtaatttcaaactggcagaaatgttgccagcataatacatggatgtctcatataccctgcatccagatttaccagttgttatcattctgcccgttttttattgccccaaacctgttctgtctccctctctgtatgtacatacatacacgtat

SEQ ID NO: 60327 - DNA, 1101 bp, Homo sapiens
tctgaaagaggtaatgggaacaatgagctcagctgtttactgtgaagtaactagggtaaacatgaacaaatagcacttgagagggcttagggaatgcattctccacaggagggaccatgggtttgattatttcaaggaagtagagggaatgctttagagtagttaaggatacagaaagtttgtatgatggaaaggtttagagagtgttatagaagaggtggtctctgccttctcaggtgtttattctcttttccttactatgttataatgcacaaattatctctactgtagaatcaagattctacatgattttataaatataaacagatttcatattttttagggtacataaagtttttctttctcttcccattgactggttttcgcatccctgcatttgctgctgcttacgtatctccttttctgtttcaggactcatatgaacgagcaaaacatatcttgaaaactcatgcaaaggagcataagaatctcgcagaagctttattgacctatgagactttggatgccaaagagattcaaattgttcttgaggggaaaaagttggaagtgagatgataactctcttgatatggatgcttgctggttttattgcaagaatacaagtagcattgcagtagtctacttttacaacgctttcccctcattcttgatgtggtgtaattgaagggtgtgaaatgctttgtcaatcatttgtcacatttatccagtttgggttattctcattatgacacctattgcaaattagcatcccatggcaaatatattttgaaaaaataaagaactatcaggattgaaaacagctcttttgaggaatgtcaattagttattaagttgaaagtaattaatgattttatgtttggttactctactagatttgataaaaattgtgcctttagccttctatatacatcagtggaaacttaagatgcagtaattatgttccagattgaccatgaataaaatattttttaatctaaatgtagagaagttgggattaaaagcagtctcggaaacacagagccaggaatatagccttttggcatggtgccatggctcacatctgtaatcccagcacttttg

SEQ ID NO: 60328 - DNA, 1618 bp, Homo sapiens
gctgagactacaggtatgagccactgcacccagcctgtatctgaatttctttcattacattttattttattttaatttaatttggttttattttatttattgtattttatttttgagatggagtttcactcttgttgcccaggctagagtgcaatggcatgatctcagctcactgcaacctctgtctcctggcttcaagtgagtcttctgccttagcctcccaagtagttgggattatagccatgcaccaccatgcctgcctaattttgtatttttagtagagacaggatttctccatgttggtcaggctggtctcgaactcccaacctcaggtgatccacccacctcgcctgccaaagtgctgggattcaggcgtgagccaccgcacccagcctctttgcttattttttatctgattaatttttaattgtctaggtgtccctgttacctgagaatgacagatggaatgaaactagagcccagctgcttgcacaaatggatgttagtatgggaggaagagtggcagaggagcttatatttggaaccgaccatattacaacaggttagctttaaagaatggctttagttcaaattatatgtggtcttaaagatatgttttaaaatggtatgtttttattttattttaggtgcttccagtgattttgataatgccactaaaatagcaaagcggatggttaccaaatttggaatgagtgaaaaggtaatagattttttaaatccttttcatgtatcaaattatgtgtcaagtgttgatttgagagctggttctgattataaattggtaatattcactttttctctcactccaaatggatttgaggctctttattctgaacattgttattctctgaataaagaaaatggaccttctcttagctgctgagaatgagctgcccagatagtaactattacttcacgagttaattaagtgataaagcaaggtgaattccttagcttttccatgtggcatgaaagagtctactttctaagtttggttactttactgtttccctctatttcatattttcatcttgtcattgttccttgaagcactactatactctgtgaattatggatttctatatttgaagtagctgccaaggtttttcaagaaagtactgagaaccagacttaaaatgattttaggctgggcactgtggctcacatctgtaatcccagcactttgggaggctgaggagactgtattgcttgagcccaggagtgagttctggaccagcctgggcaacatggcacaaccccatctctaaaaaaatacaaaaattagccaggtatggtggtgtgtgcctgtaatcccagctacttgggagtctgaggtgggaggattctctgaacccaggaggtcgaggctacagtgagtccactgcactctaccctgggtgacagagcaagaccctgtctccaaaaaaaaaaaaaaagattttaaatgttctgtcttgctcatacttttactattttgatattagtgtttttttgtttctttgtttttgagacggagtcttgctctgttgcccaggctgtagtgcagtggcgtgatgttggctcactgcagctaccgcctcccgggttcaagcgattc

SEQ ID NO: 60329 - DNA, 1137 bp, Homo sapiens
ggtgggtggattgcttgaggctaagagttcaaggttggagtgagctataataagaatgactttaaggagaatgagttttttgttttataatattaatcccatatcagatacattcacctctcagtatccactgaaggggtggggattggttccaggacccatgtggataccaaaattcagggatgctcaagtgtcttttataaaatggtgtactatttgcatatacctacataattctcctgtatacttcaaatcatctctagattactaatacaatataaatgctctgtaaatagttgttataatgtatttttttcatttgtattattttttattgttcctcttccccatagttttaatccttatttggttgaatctatggatgcagaatctgctgataggaagggtggagtgtatttgatttgcagacaagaatgtgttttgttgatttaaatatacctttctaatggagtatttactcaattaaatttatcttagggcctgaaagaagaagtgtggaaattgataacaaaaacaaaaccatcacagcatatcatgaatctggtcatgccattattgcatattacacaaaagatgcaatgcctatcaacaaagctacaatcatgccacgggggccaacacttggacatgtaagttttttgtagtgtctcgccctgtcacccaggctggagtgcaatggcgcgatctcagctcactgcaacctctgccttccggattcaaacgattctttcacctcagcctcccaagtaactgggattacaggtgcccaccaccacgcccagctaatttttgtaattttagtagagatggggtttcaccatgttggccaggctgctctagaactcctgacctcaggtgatccacctgcctcagtctcccaaagtgctgggattacaggcgtgagccaccatgccctgcctaattcttaaatatctaattactccgctgccccaaaagggaaaacattatgttttgtagtaactgattcagtagtttctctaagatttttatcatttagtacaagtttatcagatctttcaacattgtagacatttaaaaaatttctatgcacctggggagaaaacagtcctattgcagcattatccacctattgtt

SEQ ID NO: 60330 - DNA, 1071 bp, Homo sapiens
taaagtatttccagatgaaattcagagaaaaagtgactaaactatggctcagaatagctagctattttcttttttcccttggaatgtgaggtgttttttttttttggtttttttttgagacaagagttttgccctttttgcctaggctggagtggagtggcacaatcttggcttactgcaacctccacctcccgggttcaagtgattcttctgcctcagccttctgaatagctgggattacaggtgcatgccaccatgcccagctaatttttgtatttttagtagagatggggtttcaccatgttggccaggatggtctccaactcctgtccttaggtgatctgcctgccccagcctcccaaagtgctgggattacaggcatgagccaacgcacccagttggaatgtgagttctttgtgaagagctttcttttacctgttttagacttattagcgttgtgttctctttttacattagccgttgatccagaaattatagctcgaggtactgttggcttttccggagcagagttggagaatcttgtgaaccaggctgcattaaaagcagctgttgatggaaaagaaatggttaccatgaaggagctggagttttccaaagacaaaattctaatgggtaggtttcctttcttttttttctgtcttttacttttcattgtgttagataattcatttaggggcaaatactctattcaaacagctaaagccatggctatgttgaatctaatcttactctaaaacttcagtgtctgggttttcaagatttgtaataaatgattttacaaaattcccaacttaacatcaaacaaatgccattaaactgtaacattttcttgacaataatcttgtcagtgatacagaactgattttatagtgtaccacatttattagttttgtctctttcttagaaaacctttttttctgactggaaagctttaaaaagtgatgggaacatgaaaatatatacttgacaacaccacaatttggcatcttacgaaacaaatatattctagttgcttatgtaattatatagttaaactggtagtggggagat

SEQ ID NO: 60331 - DNA, 1049 bp, Homo sapiens
attggggagaaaagatttaaaaataaataaaaaataaattagtcagatatgttggcatgcacctgtcattccagctacttgagaggttgaggcagaaggttcacttcaacccaggagtttgaggcagcagtgagctatgatcatactggtgcgcttcagcctaggccacaaagcgagtcctagtctcaaaaaaagaaaacaaaccagttttgtgtagagcatttctacatgtgtgctgtgcttcagtgttagtaaaagatactattttttttccaatatagttttaaacccaatgaaggagttatcataataggagccacaaacttcccagaggcattagataagtaagtattaaaagaagatttttgtgaagtactgttacatgctacaaaattgtgctaaaagaagtccgttgcaaaagatcacatcaacactgtatgattccatttatatgcaatatccagaataagcaaattcacagagacaaattgggttagcggttaccagaggttagggagaatggggaatggctgtcattggatatgggatttctttgtgggggatgggaatattctaaaattagattgtggtgatggttgtacaattctgaatgtattaaaaaccactgaagtatccactttaaattatgtgaattacatctcaataaaacttaaaatatttatttgttatatgtcacaaaagttgtatgtagagagggtttttaaaataaattaactgtagtattataactaggtttaaagttactatgaaaaaattttactgtagaagttattcgtattttcatttgatcagtagtttgtcactgcctaagactctagtctaacattctgtacttagcagttgagatggatgtgtggttctcataatagtttgttgtggaattatttgttcctggactgaattacctgcatgcttttgtttctgaggggtaggctacctaggtacacacgtgtatctaaatgaacctttgttctgctttctggttattgacactgttacttgagccatgttttaaaggaactatctga

SEQ ID NO: 60332 - DNA, 1909 bp, Homo sapiens
ccatagaagtattaatagttacactcttcctctttctaatcacaaggagtattttaaatttgtagaaaatttgagtagtataaatttgtagaaaaatcttcagataccaagatgtaatccacagaaattaatatgatttaaaccagttaagtataactaaaacatgacaatactaggatagtcttaaagctatttttgagcttgagctttctttaaaattttttttatgttaaaatgcagcaaacatgtatgtaaagaagttttgttgctttttaaatgtaatatgtatatttataaaaacatataaatcaggtaattctgtttttctaacgtgaaaatctttggtgttatgaaaatttgcaaacatggaaaaccttgaaagaacagtacaattaacatccatatcctatccacttagactcaacaattgttaacattctgtcatatttgctttctgtgttatgtgtgtatttttccccctgaacatttgaaagaaaactataaacgtcaactacttgacatctaaagactttcttgtacatcacctaagaataaggacagtgtcctaaataaacataataaccttatcccaccaaaggaaattatgcctatttccttaatatcatgtactctcagtcttgtttaaatgttttcaccagatgtctctagaattttttgttctttatgaaaaagcatcaaatcaggattcactaattacatttggttgtttagtcttttaatctatttttacatgaattttatcttatttagtgataaatgggtttatatttttttgcctcaagattctccctgtcatgtctcttgttgatatggaaacaatatttatataatacaggaacattaattttggacaagattctgaagtgaaccattagcagagacaagtacggtttgctgtgtttcaaaatattggttattggtgtgacctcagcctgaaaattatataaatgaataattatttattttataggttcatatcgagggattttttaaaaatactttgaatcattctcgttttcattttcttttaggaattcttttagttggacccccagggactggaaagacacttcttgcccgagctgtggcgggagaagctgatgttcctttttattatgcttctggatccgaatttgatgagatgtttgtgggtgtgggagccagccgtatcagaaatctttttagtacgttttggtgtatctttgatgcagtgctaaattttgttaagggaagtgtgtatcttaccctttctttgctaattactttttttcttcctttttttaatttctattttttggggcctccagctttgcatgctaattagttttgattgatagttaaaatagccattgtgggaccttggtttgggtaacttactatatgaattatcggaagagctagtggaagtgcaagatgaagttggaggctaccaaaaatctcttagtgttttttcattttattcatcaattttgtagtatggaattaaggagtaattagcttcaaacctgattgtatatatttgtatagctggaaagaatgaatgaatgcccaactgttttgttttatatcatttctttggtatagttttttcccccctgaagatactatttttaagtcagtaaaaaatgacgtccttttctttcagtgaatattttttgttggcttttgacagttgtataggattttaatatttatctcgttttgttcaaaagtgttgactttctttcagcttatttgaatgttttttgttttcttaggggaagcaaaggcgaatgctccttgtgttatatttattgatgaattagattctgttggtgggaagagaattgaatctccaatgcatccatattcaaggcagaccataaatcaacttcttgctgaaatggat

SEQ ID NO: 60333 - DNA, 1105 bp, Homo sapiens
gggacaatttcctgtctaataccatacatgaattttccctatttttgaattttagataaatgtaatccatatagaatatcctcttttgtatgaggcttcttttattcaacatgtttgtgagatccatctatgttacttggagttgaggtttatttatcctttattgcatagtatcccattataagaatactacaacacggtgcaattacactactttagggtggacatttatttctagtttttggttcaaatacagctggtgtgactatttttatacaagtctcttggtgaacatatgtacacgcttctcctggacctaggaatggacaaagctttgttttgtatttttttaaatactctgaaaagaaaatgctatgtttttaaccattaacttgattaaaacattattacatttttaattatttaatcagaataactttcaaagatcatttcaagtctaacaaaaaaacataactttgttctttaataagtgtaatatttcctggaaatatgcctgggaatttttcttgaaataataagcgaatcttgacattaattggacattttcagaatgccctttggcgtgaagctatgtttcatgttttagaatgctcctctctaggtactttctttttaaccctgtccaatgtacttgacttttgttttctcactgagaaaatgaaagttcagaatgatttttttggggatagtaaggagactttgcataatgggaaataatggtcaggggaaaaccctttgttttataaggggccatttttgtatgctttttttactgaaacagagaaggtcaggttaattccatatccaaattaaatttatgattttcaaaagggaagccttgataatctaaccaaacgtgtccattatctaaagttatttggaaaattgtgtcactttaggtggaggaagctaaacaagaattacaggaagttgttgaattcttgaaaaatccacaaaaatttactattcttggaggtaaacttccaaaaggtaagatatcttttctttatcatgatttgatggaaaaaacaaaaacaaagaaacaaacaaaaaaaacctatattacttatttaattttaactga

SEQ ID NO: 60334 - DNA, 1909 bp, Homo sapiens
gatttaccaccatacataatacttctaacataatatcaaaatgatttaagaaacttagttatttatatatctttttccagtagactgaaaactttaagatcagtggtttatttatctttacatcttcagaacttatataaggccaagtatatgaacggtgcttagtagacatttagtaaattaatgagattttttcctctagcaaagatagagggatatgaacattaagccaatcaaaccctaaaataatatgtgacctgttttcagtgtagtgttcgtgcagagaataatgccactttctttatattattaattgattgatgcaggaatgggatctagtgttagtttcctagttattgattaattcattgctgagtcttaatctgtttcttcacattgacagtaaaaattatacagaattttagtgaatttttttgagtggtcacaatattgttgggaagtatcactgtgttgttaaccagtactgatgtgttgtttgtgtattcaggggtttcttttgcgggacagaggatcagatgttgagagtttggacaaactcatgaaaaccaaaaatatacctgaagctcaccaagatgcatttaaaactggttttgcggaaggttttctgaaagctcaagcactcacacaaaaaaccaatggtaagttgaattgacaccatccgtgtttgagaagagtaactgaaaggaagtcatagtcctacatttaagttttaagtaacttttctaagaccatctattgattaaattccactatatttgtaacttaatctatgtagaaatggcgatactgctgatggtttccctttctcaagagagaaaacaaattggagaacaggaagtgtgaatggcttcataaaggtttttgtttctttattttttgtttgtgtttgtttttgagacacggtcttgcttcattgcctaagccagagtgcagtggtgcaatcatggctcattgtagccttaactttctgggctcaagtgatcctctcacctcagcctcctgagtagctaggatcacaggcatgtgccaccacgcccagctaatttttgtggagatggaatcttgccctgttgtccaggctggtcttgaactccagggatcaagtgatcctcctgccttgacctcttaaaatgctaggattacaggcatgagccaccatgcttggccttaagtttttgataatagggtacttacaggaaatcatagcagttgtgagaaagaatgccagattccaaaattggatgtgatgaaatatgattattaacaataacctaatatttgcatttcattgagctgtcatatttcataaatgtgatttcatgtaaagctttttctttctctcctagattccctaaggcgaacccgtctgattctcttcgttctgctgctattcggcatttatggacttctaaaaaacccatttttatctggtaaaagctttttttatttgtctaacttatttcttattcctttaaatacatgattccttttaatgcctaatctaacccttaaagaaagaacatattaatgtttacagtactagaattaggctttcattcctagtagtggttagtttcccagatttttagaaaatgatacctgtccaattataaaatttaaaaattatcctggtcaacagggtgaaaggaaaattaattaattaattttaaaattatgtagaagaattttataatggcaatacaagctgaaatagtcttctatttcaaagataaacaaattcagtttattcataaaatcacattaaatgtttcccttttttttagtttgcttatctgaaattaagcaatagtgtcagacttacgtggttccaattaccttttccactactgtgcagttttcaccctgtgttgcctattctcttaaatat

SEQ ID NO: 60335 - DNA, 1918 bp, Homo sapiens
acttgtaatctgggaaatgcaaagtaaaacaaggtactgttatttttgcccgtcagacttgcacaaatttaaaagattcatattatttagtgtcggcaaggatatgaagaaaaggaaactcataagcattggtgggcacataaattgataacagccttttttagaaagtagtctcttagtgtcaaacaaaatttaaaccttaacagtgtttctttcaggaattcagtctacatctgctgacatacatatataagaatgttcaccacagtattgtttccagcaataaaaaccagaaaacaaataatgttcagggaaatggttgaatgaattgcactgtgataaattggaaaagtgtaaacagccattaaactgaatgcactgttctgttctgaaaaatatgcacgaaaaatgaaaattgcaaaaaattaggtactatttctagagtagtttttatagaaagagcacctgtgtgcatgcatacaagggtagtcagaattgttaacaggttatacttctgggaagtgggattggggcttgagaaattagaagacactaatttgatacacttacccttttttcaaaaacattatgtaattaccaaaaacatgtaaaaatcagttgtgtagattcaatctattttaattacttggttgggtttttttttttttttgaaatcacagtttatcagagttgatactcagttttttaaattatattgtataaccctctgacttctctatttacctttatcccctatcaacataaaaaataggccaggcgcggtggctcacgcctataatcccagcactgtgggaggccaaggcaggtggatcacctgaggttaggaggctgaggcaggatagttgcttgaacccaggaggcggaggttgcagtgagcagcaatgccttgcactccagcctgggcaacaagagtgaaactccatctcaaataaataaataaataaataaataaataaataaataaataaataaagttccttttgaaaaaaggaggatagaaaaaactataagctgggcatgatagatttaagttctcagacctaatcccagctctttgggaggctgaggcaagaggactgcttgagcccaggagttcaaggccagcctgggcaataaaaggagaccccgtctctacaaaaaagaaggaaacaaaggaaaacgtattgaagtgtcaggcaaattagatagactaggatatacaggtagggtgtcagactttagaatcttaggcatttttcttttcctgtaacaatttatagtgacagtgaatggtattgttttatttagttttcatacagtctcggggttttaaaactttgaaatcaaggacacgacgtctccagtctacctccgagagattagctgaaacacagaatatagcgccatcattcgtgaaggtaattagacctttttatgatccaaaaagcaaatattttcaagttgttagagtgaggagcttcaatatctgatttcttttgttggctgatagatattcttccttctttccactaataataagggattagtaacctgtgtaatcattatacctctaactcttctgggcaccagacttgcctctccacttactagatttttttcccacaaacctacacctgtcgaggtgttctctgtattaatgagcagcatccacccaagctaaaaacctggctatcaacctacgtttgtccatgttgccttacctcccacatccattaaccactaaagtcctgttgatccaacctcctaaatatttcttacatctgttccactgccatagataggctataactatttgttgcctaaattactgtaatgaatacttgtttagtctccttgcctctagtcttgctgcgttcagtccagcctccagactgccacccatcaatctttctaaaat

SEQ ID NO: 60336 - DNA, 1034 bp, Homo sapiens
tgggggcttagactaaaagtttgcctctgcctaaagttgccttcttataaaatatttggcccataccaagtgttcaatagaataaaattctttttgttactatgttattatgattattcctactgctcttctagtctgcatatttacatttactcttaagattgttcctcataccaccagctgcttgctaggtttaggcaggcagaggtattaggaagagattttttgactggatgctaagggaccttgaaaaaagtccctaaattctaactgagacacacaaatagatgatagccactgtttgtttctgctgttgctgctgatgatcttttccctaggatcttggatataaaataggatgagacacactagtcaagagaagcagttaggaaggatcagtgaagtattcatggcttgacctttctttttacccaatgactagggaagctttatgagggaaagataatagtagctatgattcacagtgttttattataccattagagcttttgaaattgtctctaagaaacagcagttctttatctctttatgttcttaactaaaagtaattttagcctaaacacagtacatctttttttttttttttttaaagagacgagtcttgctgtgttgcccaggctggagtgcagtggggcaatctcggctcactgtaagctctgccttcccagttcacgccattctcctgcctcagcctcccgagcagctgggactacacgcatccgccaccacgcccggctaatttttgtatttttagtagagacgaggtttcaccatgttagccaggatggtctgtatctcctgacctcgtgatccgcccgcctcagcctcccaaagtgctgggattacaggcgtgaggcaccgcgcctggccttaaacacagtacatcttttatcactggttttgttttgttttgtttttgagactgagtttcactcttgttgcccaggcgggagtgcaatggcgcgatctcagctcaccacaacttctccctcccgggttcaagtgattctcct

SEQ ID NO: 60337 - DNA, 1459 bp, Homo sapiens
tctttcagctcatgtggacaagaaaataatccctatcctgttgtttaaaagtgggtatacacacatttttgtgatttttagacttttttgcctgattttcacacagttttgactttaattttcttctttattagaagatatgggtaactttagaacctctgagttcaaggaaggatctaagcaatgaggccagaggagtgagatgtcctatggtaaccaagcataccatttctttgtcaagtgggcttttgtttatggctgcttaggggcttaaaagctccatggactggtgaggattatcatttgaatggaatttccccaattcaagaaccttactattatcctccaatcagttctacactgttggggaaaatcccctggaccttatataacatactttgtaaccctgcagttagttactcttacactcttgtcattataaatgcttgatcaatagttgatagactagctcttgatcagagtacccttgtatggagagaaggaaaaaatgccatacatttcacttgattctgtgaaccataatgcttaggacagtagtggtttgggtttgatttaaaaaaaaaaaaagtttttctcattcatgctgaaatgtcatctctttatttaaggataccattaggaatataattttttaacctatgtcaaacctcatatgactgatctcagtaaaacgaactgtgaaaatatttgcatcaatttatttttaaatattaaaaaaaggaaatatatttgttagacttttaaaatctgattgttttaactgataatatgtactccttaggttaaatatcttgataatattaatgcatacctggttgacccaatcttttacagccttcacttaacttaagggaccttggattatctgaactaaaaattggacagattgatcagctggtagaaaatctacttcctggattttgtaaaggcaaaaacatttcttcccattggcatacatcccatgtctctgcacaatccttctttgaaaataaatatggtatgttaatgtgttttttgttccaattaaatattttagcactattaataattatagataccatttcttagctttcacagtagcgtttattgtgggctgggttctttcctgaagtgttttttttttgtttttttttttgcaatttttcatattgaaatagtaccagatttacaggaaagttgcaaagatagtacagaattttgcttccactaattttggcatcttacataatcatgttacatttgttaaaactaggaaattaacattggtacaataattttttttttgagacggagtctccttctgtcagccaggctggagtgcagtggcacaatctccgctcactgcaagctccgcctcccgggttcacaccattctcttgcctcggcctcccaagtagctgggactacaggcgcccgccaccacgcccggctaattttt

SEQ ID NO: 60338 - DNA, 2064 bp, Homo sapiens
gattgtctgtcgttgcagtagctgtaggaaggggaggccattttccgtttctgggaggagtgaggggcaacgggtcggagaaaaaggaaaaaagaagggctcagcgcctccccgccgggccgtggacagaggggcacagtttcggcaggcgggtgaggtcgctgagggcccgccggagatgttttccttgtcgagcacggtgcaaccccaggtaagccaggcattcagcccattttttttcctcccgccctgcccgtggctgtttgcaaattgcgctcgtggaagcgatttctcagaagggactctagaaatgaagtgatgtactcaatgcgaatcccaggattgaggagtggatcaggggacgacgctgagagtgggccggagacttcagtgctgacgatgaagctgttgagggcagaggcgggatgtgagctcagtgatagagagagaccctggcttatcgaactgattgcgtggaatttctgctagagaatccgtccggcattgttcagtgtccggcgttctggggtgggaaaatgtctgtaccatacattaaagggagcaggtaatgttcccttttttccgactttccagtggctttagtgttcacagcccctatcccctgctctttatttccttttaaatggaatttaaatttaacccaaacatggtataatatttcggatggccagccatgcaagtttttttctcattttgaccagaagtaactaaaatgtgtatttccgagtcgtaaactgtttgcagttaaaattttgattcagcctcatcctcatcgttttgtaaaacaaaaggtagtgaagagaaaaatgatttcaagggttttcattacgctcttgggcaatcacttgtgacaatgttttattcttgcttcattccagtctctttttttgatggtaacattttaatagattttttgagagttcctacagttttgcaaagaaatagtttttaaaacattgagtttttttaaaacataatttttaagaaaatcgacactcttaggttcttgatttaagcatatgattgtgttcctttgtgtaacttttactccccctcattttaagaatttttaattttttgtgctagtactggctaacaaactgaagcagctgcttgttattgggcatcagttatgtaccaggtgagcaaagcaaatgtggaatcttctcttaatattgatatgaagtaaatatgagtaggacttagcaaggtgaagagtgaacaggtatcacaggcatacagaaaaatacctggaggtcctgagttaggaaagggtttagcaggttgaaggaacaaaaataaggctagtgtggctagaacatagtagttaaagggggtagtgacagaagaggttggagaaaagacttgaggcagatcatacagggagtaaaggatatattatggctgatttcattttaagtgtattgggaaccattgaaagttttaaaacatgattagattttcatttttaagagatgactggcttttgctatatggagaataggagagggcaagagtggaagatgttatcagctaaaaatacccacccaccccccaattaaagctgttgcagtggttatggaaagaagagaatgagatatattttgaagaaagtggaattgcatgagagatcagagagatgatggggagaggtgtttctgggtttgatcagatgaatgcattgaaggtgctatttaccaagatgacagtgtctggagaagtcctagtaattgtttgaaaaagaagtctgacatggcctattgaatatggtattgaagtttttgaaactcaactctttgccttagttcacatcaagaggcctgattttaggagaatttaccatcaactgaatggacagttagtagtatgtgatgttggtagagatgataaagggatttttatgtaccctaggcagtcttaacagggctcaaatatagtgaggactctcaggcatttcttgctttgaaggatggtaacacatttggaattccttgttgcttaattggttgaatacacttgaaattaaatggtaaaaaggaagac

SEQ ID NO: 60339 - DNA, 1045 bp, Homo sapiens
aaaattagccgagtgtggtggtgggtgcctgtaatcccagctactcgggaggctgagacaggagaactgcttgaacccggaaggcggaggttgcagtgagccgagattgtgccattgcactccagcctgggtgacaagagtgaaactccatctcaaaaaaaaaaagaaaagaaaaaaaagaaagtaaatgtaaatttgaactggcttgaggttgattttatctaataaggtttctttattttaatggaatatctaaccaatgataccaaagataatctagtattaatttatcttttttgtagattctgataaacagtacgaaagatgttttgcttttgagagatgttttctgtacttttcaaagccatcaatgagtatctttattttggaggaaataaatagggtttgcctcctttgtaactctttttttctggaaattctaacattaaaactagcccttttttggttatctaatatttgccttttgtgtgtgcagggacttgaaaccggacaatatgcttatttctaatgagggtcatattaaactgacggattttggcctttcaaaagttactttgaatagaggtaagaaaaatatcaagtaagtacttttttaaaacatccaacaggccaggcgtggtggctcacacctgtaatcccagcactttgggaggccaaggcgggcagatcacctgaggtcaggagttagagaccagcctagctaacgtggcaaaaccccatctctactaaaaatacaaaaattagctgggcgtggtggcatgcgcctgtaatcccagctactaaggaggctgaggcagggagaatcacttgaacccaggagatggaggttgcagtgagctgagatcccgccattgcactccagactgggaaacaaagtgaaaatctctctcaaaaaaaaaaaagtccaactaaaaataaatataaaaaattaaaaaaaatgaaaagtctaacaaattatagagactacatttcattaacttccactgttttctttgttagtttacactaaataaaatttgttatt

SEQ ID NO: 60340 - DNA, 1307 bp, Homo sapiens
taatattgattccataccatctccttatttatttatttagtttttgagatagagttttgctctgtcgccctggtcggagtgcagtagcgcgatctcggctcactgcaacctccgcctcccgtgttcaagtgattctcctgcctcagcctcccgagtacctgagattacaggcgcccaccaccaagaccagctactttttgtatttttagtagagacagtgtttcaccatgttggccaggctggtctcgaactcctgacctcaagtgatccatctgcctcagcctcccaaggtgctggcattataggtgtgagccaccgtgcccagccactgtctccttttttaacatttggtttacaaaaaattgttttgttgtcatatacataacattcatttttagtcaatgggaggtaaaggttttaaatacatttatatacttttctttgcatacatagatattaatatgatggatatccttacaacaccatcaatggcaaaacctagacaagattattcaagaaccccaggacaagtgttatcgcttatcagctcgttgggatttgtaagtacttgagaagaaaattaacatgacataccccttcatgatcaccacttaaaatttaaaatcacctttaaaaaaaaagatcaaaatagatttaaatatcaagcatttggatttactttaacagtttgtctacttaggtggtataacagtctatgtacttaggtggtgttttggggaaggtaaacctgttgtttttatttttctctttttaatagaacacaccaattgcagaaaaaaatcaagaccctgcaaacatcctttcagcctgtctgtctgaaacatcacagctttctcaaggactcgtatgccctatgtctgtagatcaaaaggacactacgccttattctagcaaattactaaaatcatgtgagtataaaagaaaaggtaggccaggcgcagaggcttacacctgtaatactaccacattgggaggctgaggcaggatttctttctttttgagacggagtcttactctgtcatccaggctggagtgcaatggcgcgatctcggcggctcactgcaacccaggagttcaagaccagcctgggcaacaaagtgagacttcatctctacaaaaattagctgggcatgttggtgcacacttgtggtcccagctacattggaggctgaggcaggaggatcgcttgagcccaggaggttgaggctgcagtgagccttaatagcgccattgcactccagccttggtgacagagtgagacccttcctcaaaaaaacaaaaaatgc

SEQ ID NO: 60341 - DNA, 1074 bp, Homo sapiens
ttgcttgccaaatgaatggacttacttaaagtcactttacttaacttacatattgtttttgcctttttaaacagttattagagctaagcccttaaagtgtctgttctgaggatattgcttgccaaatgaatggatttacttaaagtcactttacttaacttacatattgtttttgcctttttaaacagttattagagctaagagatactaaaggtggtaggaactaaaatttaaaatcataataaggtttccttcatagaaggctgataaaataatgatagattaggataacactaatatccaaagaataaaccttttatttgctaaaataattttgattctatttgctgcttattctcagcaatagaattttattattattggatatttgtattctataagcaagatcaaattaacgtttaactaaggcagagtttcttaatcttttttccttctgtctttataaagtaaaggtactatatgctgcaagataaacagatttccattcccagtactattactgcactcctttcctattgaagaaaacatattgtttactatttcaaattatacacagctttactatcctcccacttctgcatccctgagggatgcaccgatgggattatagtggtgcttctcaagttatgatcagaggaatgataaggcaccctctgaaaaaccttacactgatccccacatgcatcattttctgtgcttacagatcagtgagatataattcaagaatatccttttttaggccaggcgcggtggctcacgcctgtaatcccagcactttgagaggctaaagtgggtagatcacctgaggtcaggagtttgagaccagcctggccaacatggcaaaaccccgtctctactaaaaatacaaaaattaactgggcgtggtggtgggcgcctgtaatcccagctactcaggaggctgaggcaggagaattgcttgaacccgggaggcagaggttgcagtgagcggacatcatgcctccagactgggcaacgagcaaaactccatcttcaaaaaaaaatatcctttttgcttgagactaaatgctcatt

SEQ ID NO: 60342 - DNA, 2027 bp, Homo sapiens
aattagccaggtgtggtggtgtgcccctgtaatcccagctacttgggaggctgaggtgggagaattgcttgaacccaggaggcagaggctgcagtgagctgagatcgcaccactgcacttcagcctggacgacagcaagaccccatttcaaaaaaaaaaaaaacagaatcatccatatacctattgcaaaatagatatgtacgtaatgcagccttaccccaaaatgtgcctgaatatgttgcctgttaatttgtcctgtttaagtagcctgtgatatacaatcaaaataagtattatagaataatttatttaaagtttagaccgtttcattcagaataatgtatataagcttataattgcttacattgctttttaattctctgttgtttattttttccatttgaaagtggcaacaggtagcataatagtttatggggtcatttatcctaccttaacggaccatagttaaaaggtcaatgaatctcagctttatataactaaaacaaatatttttttccctcttaggaaagtgatgaagcattgggcccaacaatgatgagttggaatgcagttgaaaagttatgcgcaaaatctgcaaatgccattgagacgaaaggtttcaataaaaaggatctggagttagctctttctcccattcataacagcagtgcccttcccaccactggacgctcttgtgtaaaccttgctaaaaaatgcttctctggggaagtttcttgggaagcagtagaactggatgtaaataatataaatatggacactgacacaagtcagttaggtttccatcagtcaaatcagtgggctgtggattctggtgggatatctgaagagcaccttgggaaaagaagtttaaaaagaaattttgagttggttgactccagtccttgtaaaaaaattatacagaataaaaaaacttgtgtagagtataagcataacgaaatgacaaattgttatacaaatcaaaatacaggcttaacagttgaagtgcaggaccttaagctatcagtgcacaaaagtcaacaaaatgactgtgctaataaggagaacattgtcaattcttttactgataaacaacaaacaccagaaaaattacctataccaatgatagcaaaaaaccttatgtgtgaactcgatgaagactgtgaaaagaatagtaagagggactacttaagttctagttttctatgttctgatgatgatagagcttctaaaaatatttctatgaactctgattcatcttttcctggaatttctataatggaaagtccattagaaagtcagcccttagattcagatagaagcatcaaagaatcctcttttgaagaatcaaatattgaagatccacttattgtaacaccagattgccaagaaaagacctcaccaaaaggtgtcgagaaccctgctgtacaagagagtaaccaaaaaatgttaggtcctcctttggaggtgctgaaaacgttagcctctaaaagaaatgctgttgcttttcgaagttttaacagtcatattaatgcatccaataactcagaaccatccagaatgaacatgacttctttagatgcaatggatatttcgtgtgcctacagtggttcatatcccatggctataacccctactcaaaaaagaagatcctgtatgccacatcaggtatatttataactttctaatactgttttttggattttagaaaaactatgaagacagacatttgcctctaagctagactatgcggtattaatcatatagttctgttcttcttgttgagaatctgtgggctgttggaagttttcacccagaaaagtaaagctggtagaaatcatgtttattatttttagctgtaatgcctccttccatttgtgtcgttttatgtactttcctaagaaaatacaatcacatattttcacttgatccccacagtactatgagttacaaaattaattttcacttgatccccacagtactatgagttacaaaattattattattattattattattattattattat

SEQ ID NO: 60343 - DNA, 1113 bp, Homo sapiens
agagcgaaactccatctcaaaaaaaaaaacttgttgtgaaataacaaattatcctaaaaatttttaaatgctatttagtacaataggttatatgtagttctgtcttacgtgttgtcttaatcatttgttagccatagccttcctcagtggctcttcttaagcttgtattagtccatgctatcagtcttcttgcagattttttcactgaacatttttcttgcagattttttttattgtttcttatctagatcttattggaataatcagtgttgtctaagcttttgaacttcaccagataaaaggactttttcataattataactaattatgcattcattttcaaaacttatcaaaaatttgactacatcctttacgcctagtagcctatgagctagttatttggcttgtgtgtttcaccattttctattcggtgtaaaaggaattaagatatttgttatctcttaaaccctttttgaattagcagaccccaaatcagatcaagtcgggaactccataccgaactccgaagagtgtgagaagaggggtggcccccgttgatgatgggcgaattctaggaaccccagactaccttgcacctgagctgttactaggcagggcccatggtaaggcatgcatgtcttgagtttttgaagtgttatctatcactacattatctttcaaggttaaattttaaaaaatttcttcagtacttacgttacctaaagtaaaagaaaatgaactcatctagtatatatatggcatttgtcataggaaaataaactagcagtagccatggctgtcccactctctgaatgtaaaagaccagatgctggagtacatgtagtcatttgtcctttgccttctggttcagtctcaatgttccagagaagccccacctgccacccttgatattatcttatctctttttttatttttttatttatttttatttttattttttgagacagagtttctcttttgtcacccaggctggagtgcaatggtgcaatctcggctcactgcaatctctgcctcccaggttcaagtgattctctggcctcagcctcctgagtagctgggattacaggcatccaccatcatgcccgcctaatt

SEQ ID NO: 60344 - DNA, 1106 bp, Homo sapiens
tagcacttcgggaggccaaggcaggtggatcacttgaggccaggagttcgagaccaagctggccaacatggtgaaacctcacctctactaaaaacacaaaaattagctgggcatggtggtgcatgcctgtaattccagctattcgggaggctggggcatgagaattgcttgaacctgggaggccgaggttgcagtgagccaagatcgtgccactacactcgagcctgggcaacagagcaagactctgtctaaaaaaaaataaaaataaaaataaaaagatgacattttcacctatcttcttttcttccctttctctctgaaaactgttcccttcctgcattctgaaatgaactgtattcatcttcctagggatgctgtagcacaaactgggtgtctcaaaccaataaaaattcattgtttcacagttctggaagctagagttccaaaatcaggtgtccacagggctatactacccctgaaacctgtagggaaatccttctttgcctcttcctggcttctggtggcttgctggcaatcctcagtgttccttgacttgaagatgcctcattccagttctccctctttctgtgatggtgttctccctgtgtctctatcatcatagagctggcttctgagaaggacaccagtcattaggagcccatcttactccagtatgacctcatcttaacctaatcttaacctaattaatcatagttgcaaaaacccatttccaaataaggtcacatttttaggtacgggttaggacttaaacatagcttttttgggagggacacagttcaacccataacatcaacctcttctacatgttgatgttagttacttcccttttctttgagctcttttcatgatcatctgtttcatcctccccaccccacctctcacaccctttcttctgtttgtatttccttgccggcttttatcctcagcctgaaaataagtttccacccttgtctccccaacattgcctaacttctcaaaggtttcctctttgtttgattattttgctctggcaacttatcatctcactatttaactgaaaattcttttatttattatttatttatttatttatttagagatggagt

SEQ ID NO: 60345 - DNA, 1038 bp, Homo sapiens
ctttgagcattatcagataacttttcttcaccttctggccaagggatatctaaaattatacatatacaaataaacttgtttattactgctcaaaataatagtatccagagataaatgactacttttttttgttttttgagatggagtttcactcttgtcacccaggctggagtgcaaaagcgtgatctcagctcactgcaacctccacctcccaggttcaagcgattctcctgcttcagcctcccgagtagctgggattacaggcgcccgtcaacatgcctggctaattttttgtattttttttttagtagagatggggttttaccatgttggccaggctggtctcgaactcctgacctcaggcgatccacccgccttggcctcccaaagtgctgggattacaggcatgggccactatgcccagccagtaaatgactatcttaataggagaaaaagaatcacctcttttcagaatattctggaatacttgttgtggtgtttcatcattgaaagggggaattcctgttagaaattcaaacaagcaaactccaagtgcccaccagtctaccgcaggacctgtaatcgaagaggaaacagctaaagttgcaagcattctctacaaatatttgatgaacagaaatattaattgtggagtcctaattagggaaaacgagttaggctggtaggaccagggggaagcaaaaagaaaaagcagataagctgcaagtctgcctttcctcatggtccaggacgcacagccctcctgtacaaataactcacaattgtcctgtgcccacgtatcaccagacccttgattgatacaaaaatgcaaggtagagctgggcgcggtggcttatgcctgtaatcctggcactttgggtggctggggagggtggattacctgaggtcaggagttcaagaccagcccagccaacatggtgaaaccctgtctgtactaaaaatacaaaaattggccaggcgtggtggcacatgcctataatcccagctactggggagactaaggcaggagaatcgctt

SEQ ID NO: 60346 - DNA, 2592 bp, Homo sapiens
tgactctcctgcctcagcctcccaaatagctgggactgcagctgcatcccaccacacctggctaatttttgtatttttagtagagacggggtttcaccatgttggccaggctggtctcgaactcctgacctcaagtaatccgcccacctcagcctcccaaagtgctgggattacaggcatgagccattactctgcccaaaagagcatacttttattttactaggtagaaggaaataggaacaatgacaggtaatgaaatggcagtaaagaggtgaggaaggctttgaaatcttgtaagcagagcagctcagtgatatagagcttccaatgtagccataagctagaagtcaatatgttgtagagatgcaagtcagtgaaatcaaggaagtcaaagaaccatgaagagaacgtgtcagaactgtcatcagtatctattcttgaagtcaccatgaaggataaggatggagcacagggaagaaagggagaagggggtgagcttcatgctaaagctgtctagggcaatagatactgctaaggagcgtggtgatagaaacaggtggcaaggccttagagtcaaaactggagcattcatcatggaagatcaatggcatggaaggtttatcaaggagcagaaagtaggccacactctcttcccctgagtcagggattctttaacaagatgcaggcagggtgggcgcggtggctcacacctataatcccagcactttgggaggctgaggcgggtggatcccctggggtcgggagttcgagaccagcctggccaacatggtgaaaccccatctctactaaaaatacaaaaattagccaggcttggtggtacacatctgtaatcccagctactcaggaggatgaggtgggagaatcgcttgaacccgggaggcagagtttgcagtgagccgagattgtgccattgcactccagcctaggtgacagacaaaaaaaaaaaaaaaaaaaattagccaggcatggtagcactcacctgtagtcccagctacttgggaggctgaggcacgagaaccactcaacctgggagatggaggttgcagtgagccaagattgcaccactacactccagattgggcactggagagagactccatttcaaaaaaaaaaaaagatgtgagtgccgggcatggtgactcacacctgtaatcccagcactttggaaggccaaggtgggcagatcacctgaggtcaggagttcgagaccaacctgcccaacatggcgaaaccccgtctctactaaaaatacaaaattagcctggtgtggtggcacacacctgtaatcccagctactcgggaggctgaggtaggagaatcgcttgaacccgggaggcggcggttgcagtgagcagagatcgcgccactgcacttcagcctgggcaacggagcgagacctcgtctcaaaaaaaaagctgtgagaaagataggcttctaagttaaggcaaatcattcattctgtcattaaacaaatacaaaccaggcacctgtcatatgccaagtgatattcaaaatggcccatgtagacctttgtgaagtatgtggcctaacagacattaaacaaatgtctgtgaaactgacataataaagtaaggtaagttatatgtgagacattctctttttataataattcctgtaaagcagtacttacttaggtaatgatatcatactgttttgttttatatttttcctaagagctaaaacgtcatcctctcttcagtgatgtggactgggaaaatctgcagcatcagactatgcctttcatcccccagccagatgatgaaacagatacctcctattttgaagccaggaatactgctcagcacctgactgtatctggatttagtctgtagcacaaaaattttccttttagtctagccttgtgttatagaatgaacttgcataattatatactccttaatactagattgatctaagggggaaagatcattatttaacctagttcaatgtgcttttaatgtacgttacagctttcacagagttaaaaggctgaaaggaatatagtcagtaatttatcttaacctcaaaactgtatataaatcttcaaagcttttttcatttatttattttgtttattgcactttatgaaaactgaagcatcaataaaattagaggacactattgagagtgagccactagcttgattttctttctcctctgatttcagttcactgttcagtttagcattaaaataataaaataatcatacagttccatttgattgtaatttacttgcatatgattaccttcaaaagctgtgttcttgagggcaatcatttaaggccatacttgtgacctcagaaatgcagctggaaggccgggcgcagtggctcacgcatgtaatcccagcactgtgggaggccgaggcaggctgatcttgaggtcaggagttcaagaccatcctggccaacataatgaaaccccatctctactgtaaatacacaaattagccgggcatgttggtgggcgcctgtagtcccagctactctggaggctgaggcaggagaatcgctggaacccaggaggaggaggttgtggtgagccaagatc

SEQ ID NO: 60347 - DNA, 1032 bp, Homo sapiens
tgtcaacatcattcttttcaacaaagcgagaccccatttccgggggaaaaaaaacttgttccttttgcacatcgggtttagtgtttttactttccattaccatcccaatcaacagccctgttgcaatgtagttgacaaaatgtacaaatttaaaatggttacagtgaaagatacaccattataattagtgctatataactgaatccatgggttaatggttttactgagcttgttttagtaataactacttagatttaatggtcacttctagtaaaatgttcaaaatacagttgttcaaaactttgaattacatctttcccttaaattaggcaaaagcatagaattatctattatccttttatggtatttgccagtagtagaaagaaaaaaagtttgggaatcaaacacaaattgttgaaatcactgctctgccacaataaaaggcctctggcaggttaaactgagctattgatgactcactgtatagtggggattaatagtgattaatttggagagttggaatgaacagagtagattgaggaacaagccaatttagttgctacccaggatattaaccttaacagggacttgaaacattactgaataatcggggaaatgttctctgagcatattcccaatgcacaagacaatggccttgagtggaaagttacactgtttactaacagacctagcatgtgaagctatagtcacttgaaattcagccacaggtaaggcatgctgtaatggtatttattgggaacaggtgacttattatctaaatttatacctgtcaagatgtagattcagacacttgctagggaaaaacctaagaggaaagaacaatgggaaaaaggggatggttttgacagctgatgtatatgtgtgcatgcacgtctttaaaaaacaccaacggccaccaatagaaatccactcatcttttgctatgaaggaaatcagaacatatcatcctaaaatgcctctttgacataaaaatatttttgagctaaaggcagttaagaagcagcaaactga

SEQ ID NO: 60348 - DNA, 2581 bp, Homo sapiens
gcaagactttgccccagtaaataaataaataaataatttaaaactgtttggtaatttcagcacttgtaattggatctttcctatcaggctgcaagtcatatgatgtagttctataaagactgttggtaatattatggttttattttgaatttgtatgttattattattatgttaccatccagagaattatttgcattcatactcacaggaaattggtttttattttctttttaaagaaaactgaactgaggaaaatggtgttttcctcaagaagactactggaactggatgacctcagaatgaactggattgtggtgttcacaagaaaatcttagtttgtgatgattacattgctttttgttgtccagtagtttagtttgtgtacatatatacacatatatattttgcactacacaaacgataacattttaaggactaatattgctgatacttgaataatcaatctctactaggttataagtagtatacacagatttaccctgcccttgaacttgaaggacattaaattattaatgatcatttggtaacatgtttacctgattatcttccatagagtaacataagctgcttttcaaaggtaccattgtgataatgagatcaaatttataagttattatttttaattttctaaattaaataaaagaaagaatgcaaaccaggagtgaatttcaaatgagatgtaatcgactttatatcttagtcacggagttgccatggcatgtagtagaaaaccacaggaagaatggtcatattcactttgtgggctgcccataatctttcttgggcattcacaactcttgagtttggtgttcaggcatcattattaaaaagtggagtcctatgtaccagactgagtttttacaaatgatttgcaggctagacataacccactgatggaaatggtgaagaatgagcttcatgtaggtttaaaagtgtattctgagcctgtagatgattaatcaggtttttattcaatcatataaatgtattcctttgtaatcatttttgtttaactgaggatatctagtgtctgcttcatagggtgctttgaaatataaaatgaaaacttatttatactgtttttacaacagtcaaaaaggaaacacacgaaaatcacttttctgcaactgatgaactatatagactggactcttaacctcttagtgcctcagtttttccttcggggtatactattttagatacacctacttcacaggagtactggagggatttgcaagctaacgggccaaatgcttccataggaataaggcatgcccagctaacagaaatttaagtccctcttccccacctctctcatctagaccaaaaagaagactacaatttagatccttggagacttttcctgtatgccttccaaaacttcctgctcacttagatgtaccttgtgctttgaagatttctttgatgcagtctttgtaacaaataatttttttttttaaatggagtttctctcttgttgcccaggctggagggcaatggcgtgatcttggctcactgcaacttccacctcctgggttcaagtgattctcctgcctcactcccaagtagctgggattacaggcatgcaccaccatgcctggctaattttgtatttttagtagagacggggtttctccatgttggtaaggctgatctcaaactcccaacctcaggtgatctgcctgcctcggcctcccaaagtgctgggattagaggcgtgagccactgcacctggcctgtagcaaataatttttaagcattctcaagatgtatgatgttgggtttaacatcatatgttcacagtgttttaaataagaaataatctgtctttagtatacagaatggttctttgtttgcctgaaaagtataagaatacaatttacttttcccaaactctttttccttatttttttctttcaaataactttaattatttaatcccatactgattaaaatatgtctgtctaaagggatctactactatttgcttttaaaaaagtgttccctatttatttaggaaaaagtgaagcaagcaactgaatttatatgtaaaaataacatttagacctgtggatcaaagattattttcaaaaatgagatatcaatttggtatcagtaaaaagtgtcttttctcttagtatataaataaataaaatgcaaattaagagtgtaagcagttgtgaatcattacaagcagtctgggataactaactcctagggataaccatttctatcctgttccaaagtcttattttatagtttgaaaagcactttgcacacagttcttgtatataaaagtaaagatgtaattataggatatagtgttcctgctttgtttaataagaacctcatttaaacttgacagctatggtatttttttaatgataacttcttttctgtttattgtaaaactaagttaaaaataaaaggttaatgagaaatgatatggcttttattacttgttactattagcccattgattaggtaagaattcaatgagagtaagtagtagtcgcacataaagtaattatgactctcaaaataaagccatgctattcca

SEQ ID NO: 60349 - DNA, 1064 bp, Homo sapiens
caatggtacctttgaaaagcagcttatgttactctatggaagataatcaggtaaacatgttaccaaatgatcattaataatttaatgtccttcaagttcaagggcagggtaaatctgtgtatactacttataacctagtagagattgattattcaagtatcagcaatattagtccttaaaatgttatcgtttgtgtagtgcaaaatatatatgtgtatatatgtacacaaactaaactactggacaacaaaaagcaatgtaatcatcacaaactaagattttcttgtgaacaccacaatccagttcattctgaggtcatccagttccagtagtcttcttgaggaaaacaccattttcctcagttcagttttctttaaaaagaaaataaaaaccaatttcctgtgagtatgaatgcaaataattctctggatggtaacataataataataacatacaaattcaaaataaaaccataatattaccaacagtctttatagaactacatcatatgacttgcagcctgataggaaagatccaattacaagtgctgaaattaccaaacagttttaaattatttatttatttatttactggggcaaagtcttgctctgtcgtccaggctggactgcaatggtgccatcttggctcactgcaaccctccgcctcccgggtacaagcgattctcctgcctcagccttgcaagtagctggcattacaggtgtgtgccaccacacctgggtaatttctgtatttttaatagagacgaggtttcgccatttgaactcctgacctcaggtgatctacccacctcagcctcccaaagtgttgggattacaggcgttagctatggcgcccagccatcctggccagtttttaataaataatttaaatgtacattcatcctctcttactttctagattcttacccttttctaattggctattacacaattaagatttgtggaaatgatttcataattttatcaaaatggaaaagttatgaaacaaatgcgtaacaaaactgtaagaggataatagatgtacgacctggagtattcacttaa

SEQ ID NO: 60350 - DNA, 1359 bp, Homo sapiens
aacagtattttgggaggccaaggtgggtggatcatctgagctcaggagtttgagaccagccgcaccaatatggagaaaccctgtctctactaaaaatgcaaaattagccaggtgtgttggcccatacctgtaatcccagctactcgggaggctgaggcgggagaatcacttgaatccgggaggcggaggttgctgtgagccgagatcgcaccactgcactccagcctgggccacaagagcaaaactccgtctcaaaacaaaaccaaatgaaacaaaaattagctgggcatggtggtgggcacctgtaatcccagctacttgggaggctgaggcaggagaatcacttgaacccgagaggtagaagttgcagtgagccgagatcacaccactgcactccagcctgggcaacagagcaagactccatctcaaaaaaacaaaggaataaatttgtttttcttctactatagtataattaccctatctgcacttttgttcatatttagatataaatgatgatcatgttgaagatgttacaggaattcagcatttgacaagcgattcagacagtgaagtttactgtgattctatggaacaatttggacaagaagaggtaaaaatgacattttctgattggtgtattttcaaagtggtgtattagaattcaatgcgtaacttctgttagtagcaaatatacatgctatttttcattttgaaaagatactcctaaaatgtttaaacatttgtattttaaactattttttatgaattcaaaaataggtaaaattctggaaaagtcaaagaaaaattaataatattaactactccattataactaataatatacatatatttataaatattctaggagacgtgggatggggatgcagagaaaacactttttatgctagtcccaatgtttgaaacatttattaatgttcaggaaaattgaatgatcttctttgttgttttttttgttttttagagatggggtctctgtctgtcacccaggctggagtgcagtggcgcaatctcgggtcactgcaacctccgcctcctaggttcaagcaattctcctgcctcagcctcccaagtagctgggattacaggcatgtgccaccacacctggctaatttttgtattttcagtagagacagagtttcaccatgttggccaggttggtttcaaactcctgacctcaagtgatctgcccacctcagcctctcaaagtgctgggattatggacgtgaggcattgtgcccaacctaaaaatgggttcttgatatgttgcctaggctggtctcaaactcttggcctcaatcagtgctcccacctcagcctcccaaaatgccgggattacag

SEQ ID NO: 60351 - DNA, 1008 bp, Homo sapiens
aggtctcatagagcaatttgcttatgcctaagggagtaaaaagactttgagagattactttttaaaagaaattctagaagattgacagggaactgaaacagttttgaagccaacatagtttgggtgagctctcagcgtatagtaaaccccatttcaaggagcacgccttctctttgatccaagtaggaaacccttcaaagggattgtggtaggttagggaaataacagctggatattaaaacatggtatgcagaaggtgacctactgtgaacttttatgaatctttcccattttctcgtaaaagataagaaaatgatgaagaagtcagcagaccataagaatttggaagtcattgtcactaatggctatgataaagatggctttgttcaggatatacagaatgacattcatgccagttcttccctgaatggcagaagcactgaagaagtaaagcccattgatgaaaacttggggcaaactggaaaatctgctgtttgcattcaccaaggtattgtccccaaataattctgtgtccagcctctttcctatgaatagtcttttagtaattataggatctttaggatcagtttaatttaaaaatctcttatttaataatatcttagggcttattaatattataagcatttatagttttgaaaaagagtgaattagggccaaggttatatatgtatctctttctgttgcccaggctggagtgcagtggcatagtcatggctcactgcagccttgaactcctgggcaattctgcctcagcctcctaagtagctgggattacaggcatgtaccatcatgcccagttaatgtttaaattttttgtagagacagggttttgccaggtagcccaggctggtctggaattcctgggttcaagtgatctgcctgccttggcctcccaaagtgctaggattacaggtttgagccatgcactggcttattttttaatttttagggatacataatagtacatgtgagaaacatcatttcttt

SEQ ID NO: 60352 - DNA, 1094 bp, Homo sapiens
gtgcagtggcaggatctcggctcactgcagcctctgcctcctgggttcaagtgattctcctgcctcatcttcctgagtaggtgggattacaggtgcgcgccaccacacccagctaatttttgtatttttagtagagacagggtttcactatgttggccacgctggtctcgaactgctgggttcaggtggtccgcccacctcggcctcccgaagtgctgggattacaggcgtgagccaccatgcccagccttcccaggtgctcttagtacaattttacacaaataggaaaatcttggggaggagaggaaaacagtaaaaccaaaagggataggtgcatcaaagataaagaagcattatcagttaatctttactttcatggagttttccctttttttttttttttttttaaggcaagagcaactcccaacctaagttaaataaacaaacttttaactgcctcttttgcctgcaagaaaaataatggcttttccttgtttgtactgagccttgaagataataaataactaggaatatgactcaggtactgccatgctaactttttatctaagctgtcacttctgacctactgtaattgaatagaaatttgatcttttatatacttaaaagaattctaaactaaaaagtatacttaaatgaattataaactataaactaaaagaattatagatacaggtacctgtactcatccgtgctgttttcccagttgactaacagttgatactctaatacaattgaagccttcacaaatgtctgagaaaagtcaattttagactgtacgttatgaacagaatatgctaattggtgaagcatgttttatttatttatttatttttgagatggagtttcactcttgttgcccaggctggagtgcaatggcgtgacctcagctcaccgcaacctctgcctcccaggttcaagcgattctcctgcctcagcctcctgagtagctaggattacaggcatgcgccaccacgcctagctaattttgtatttttagtagagacagggtttctccatgttggtcaggctggtcttgaactcccgacatcaggtgatctgcccgcctcggcctc

SEQ ID NO: 60353 - DNA, 1053 bp, Homo sapiens
taacaataagaagcagatgttctaagaagtgttactgtgtctctcagagatggagaaaggctaagaaagctgggtagtatgacaaggcagttataaggtagagctggacctaaatttaagataatctgcttcaagcacagtgcttttcccaccgcagtgcagctgttatgagcagctgccgaaataaaacagcttgatattctcctgactgagtcctcccactgactcaaaaggagggttaggttgaggctggggcggagctagacctcaagaagaagccaacaaagtcacacacagcgctccccacctgcgcttgcgcaggggaggaacacgcagtccggaaaaacgccggggattctgggtcgcgcagccgtggagctacctcaaggcggaactggggagtccagggcttcggcagcctgaacacccggtgtgaaaggaaggtggcagacgtggagcggcgcgcatgcgcagcagctcactctgctgaagggctgagaggcgcacccgggcggccagctgggctcggagcggaacggggtcaggatggacgaggacgtgctaaccaccctgaagatcctcatcatcggcgagagtggggtgggcaagtccaggtgaggcggaggtgcgggtcgtgacgagggtggctgggctctttctgccccggtggctgctgtctcctgggccgcgacgggaactgtaaactgcagcggcgggctcgggccggctccgctcgcgccctcctcggcctctgggccgcgctctcccgcgacgtttgctttcctctccccacccgcgcctgcctggttcccggcctttgccaggcccaagttctctgggtcgctctccctcctgtagcgccgagaaaacaccattccgagggccgccgctcggccggcaggtttgctgcgcggagctcagggcgtggcgggctggtttgggcccgaatccggccgggggcgccttgcctcgaacctctcggggttcaggctgcctgccaccccgagacccgggagacatagctttcccacttgagggtttctgtggggcctt

SEQ ID NO: 60354 - DNA, 1117 bp, Homo sapiens
cacccaaccgaggttctccttgtagagtaaggcctgttaagtggatttatcagtctccctagttcatgccaccgaaacaaagaaacaaatttaccgtgggcctaatctgttttaaactttttcctcaatacgtagcaatggattatcaactgctcgatgcaggattttgtcactttatttcttttgtgaaaggattacatatagtgagaaagttgtcttatttgtctagctagatatacattattggcctgtgtgatatgctgtggaaaacaatcttaaacactctggataagatgagaataaatgactccactgaaatagaagtctatgccttttaaagtgaattagtacaaaaacatttgctgtggatatgatcttaaaggattgttttaaccaagtttgtttctatttcattacagagctggagctagtggaagtgagatagcacttgtgctgttggggaaaacaaaggatatgtttaatccgaattagtggattactttctagtgatttcatagtgttagagtctaaagggtatgtgatagtagtcaggagatcaggattatgaaactggggctgccacttgtgtgaccttgtgtgtgatacttgaatgctgtaggccttcatttcaaaagcgagggggttggaatagaaacctctcagaccctaaatgtgtaagactccaattctgtggctaggcctggtaaggtaaagagtagcagaatatatcaagaactggaagggattagagagacctattatctaaattgctgtccctcctttgccccttgccttcccttttttttttttttttggtgaatttcatatgtaaatttaaaaaatgcagattagttataatcacactctgtttattataaatttggtcacatctaagtgccatggtggtagttactccttccatctctacttctgcatgggaaacattttgctcctttaactttgaaaatatgagggtgtaaatatacaatactataagaatggtgcttctgccaggtgcagtggctcatcctgtaatcctagctactcgggaggctgagacaggaggatctcttgaggccaggagtccgagaccagcttgggcaacataacgagacca

SEQ ID NO: 60355 - DNA, 1033 bp, Homo sapiens
acttgtctatattgcttagtaatgctaactcctagctacatatcagaaatacgccattgcttctttctttaatgcttatttaacaaatgactccttttatttcagtttatgatgtcacaagaagagatacatttgttaaactggataattggttaaatgaattggaaacatactgtacaagaaatgacatagtaaacatgctagttggaaataaaatcgataaggtaagaaggcagacacttggcattttggttctatattttggtagcctttcttaatcattgcatttatattttaggaaaatcgtgaagtcgatagaaatgaaggcctgaaatttgcacgaaagcattccatgttatttataggtaggtgtgtgaatgaatatctgtcctttcattattaatgaggaatttttgaatggagtttttgccaagtttatttctttatgaaccataaaatgtgtttagagtattgttcctagttgccttgtgttacaaaatctaactatataacaaggttctttattcttcttcctgtaaaatgtatgatcatattatgtgaaatcatattaaaaaacagtcaaatcattcctcacaggatatagtggcattcagtaaagtttggcacccagtgctaaagttatgccttgctggtccatatgctgataccatcagcaccacctgggagcttgttagcagtgcttcagctcaggccctaccccagattttctgaattagaatctgcattttaacaagctcttcatatggtttgtatgcacattaatttttgagaaacatggtccagcaagagttgccaaactacagcctggtccaaatctggccccaccatttgtattggtacacagccatgtccatgtgtttacatgttgtctgtagctgcttttgtgccatatggcagagtttagtagttacaacagaggccatacggcccacgaagcctaaatattttctatctggccctttacagaaagagtttgccaacccctcatctagaaaattggatgagctatgtc

SEQ ID NO: 60356 - DNA, 1497 bp, Homo sapiens
tcttaatatattgtaggctgatatttatgccctgatagtttcccagaaaaacatgagaatatggccagaaaggaatatactatgaatgacctttttccttgaatttcagaggcaagtgcaaaaacctgtgatggtgtacaatgtgcctttgaagaacttgttgaaaagatcattcagacccctggactgtgggaaagtgagaaccagaataaaggagtcaaactgtcacacagggaagaaggccaaggaggaggagcctgtggtggttattgctctgtgttataaactctgggaaattccatctcttgcatatttgatcagatagtgacatctttctgtatataaactctttaactgctattttagggaccttgcagtttgcacataattgttttatatcatagcagtaaatatttgcaagaaatcccactcatcgaccccgggtaaaatgttatggtaagcatgcacagtttgcagtctacagtttttttatgtagcacaaaataggtgtacctttataagtacattcaattttatgatttacatttatcatgtaatttttaaaaaaatccatctatctaggatatgttgatacaaagtctgcttttgctattctttttgcttaaatactcctatcattttctgaattacttggtatttagaactcctagcaccacggggaagaatagaggtatcatcaaacgtggcaaattttctttcaggaataataaagagcatgattccacagcttttctgggatgtttgagattcttttttagtactaagcaaaattctcatcacagaatgtagcccaggccaatttataactaaatctctatttgttcagatgatgcttctaaaacagcattgataggttaaagaagcttggtatttttaatttacttcaatgattagctcagttgcttaactggagttttaatcctgtgatatgtacattggattcatgactgtgcagcatttttagttatgtggtgtttggcagaatgacaataaggttttcccccattttggtttcaggaggacatgaatagtgtgtttattgtaactcctcatacacttttaaaaccaacatcttttttcataaatgttggtagtgtttgtccaggtaccttaactgtagcttgtgtaatgttgatgaatatctgtatcttacggcttccataatggctagttgatattcaaaaacctatttctgtgttttgaggggtggggaaaaaaaacactaagtgataatttgaaaaaggcatattgcttccagattctgatgtgtgagggaaaatactgtcacaatgaaaatcttgacaatttacttaacaagtaaccagtagttcatcaaaaccaacttgtacagactaataaatctttttcacagtattcagttttctcacctcttgctattgtatattgtagatttttttcattcatgtgttatttaatttacactgatctctgctattttaaccccccaaataagtt

SEQ ID NO: 60357 - DNA, 1057 bp, Homo sapiens
agtagtcagtgaaaggagaccaaaggaactaacacttgttgttccattctgggccagacacacatgatctcatgtgttcttcacaacaaccttgccatttgttcactaaatccttttgttttgtttgttcgccttgtttatttaagttccttacgtgaagggttgtgaaaagagctcagagtgacccatgattgtctcgtggtctacaccttaaggcttaactcaggataggtcagcaggctttccccattcttttccttcagagagggcatcgaagcttggctgcctcatgggcatataatttattttctcttgactatctcttcctgggaaattttgccctggttagactatatgacgatcatgttgacgttattcttctcagacctcttctagttctgtgactgtcttagagctcagaattggaaattaggttgcatttcctaactagccttgagcagtgcagagaaaaagaaattgtgagaaatattgggttggcaggggcagggggcgtaaaaggaagggagaggactaagggcaggaaaagacagttttgcaaaggccgtagaactagcagagggccttgcgttttccaggtttcctgtgtgcagcacagtgccaagtgcagtagctccccagtaacattgattattgttgtggatgatgatgacgatgatgatgaagaggggcttacccactatctggttttggagtctcaaccccactcctttgctcggatgccatgccagtagcctctctcctaccaccctacatctttcccttcagtaggtaaatttttgtgttactcataccagattcttttagcctaaggagcttgagaacccattttcgtgggttctttatatttatgtggtgttgggagacattcgtgttctgagtgaagcagcaaatctaaaccaaagatgtgagtgcagaagcaaaagctagcatcctaactttcatttcctgcagcagcaggaggaggcgttgttttggaaattgaggaccaatgcctgcttcttctaataaatatgccaggaaatcctgtattgctatc

SEQ ID NO: 60358 - DNA, 1074 bp, Homo sapiens
cattacactacacggcctctaagtctccctccagaccaccctcgtggtgaataccaagagccaagaatagaaacgagaatacttaacatttccagaccctctttctcatcccccgctgacactggcctccccatagactgcattcaaatcttcaaagtgaaacttcaggctgaacattttaaacttggggaagatggagcctttgagatcacagaggagcaatcttggaaagtgggactatgctgaatgagttagcatcaagaatatttaatgtgcttagtgaaaacgatcactgggtggtggtctgtttattctgaaaagctacttttaagttgcaagtcccgcttcctgcacctccactggcccagactgacgaggccagaagagctgtgcattttaccagaaaaaaataaacatcaggaaatgactaaagagccaccagccagggctgtagctccctaacataaggagccaagcagcactttcccacatcgacccgaggcattggtactcttgtagaaagaaagatgtcctattgttgttattaatggaattataacctagcctgagagcttcgagatatgaaaatatccccattttaactagggagctcttcactgttggttcaaaatagagaagtgtgggctgggcgcaatggctcacgcctgtaatcccagcattttgggagggcgaggcgggtggatcacgaggtcatgtgttcgagaccagcctgaccaacatagtgaaacccgtctctactaaaaatacaaaaattagccgggcgtagtggtgcgtgcctgtaatcccagctactcaggaggctgaggcaggagaatcacttgaacccaggaggcggaggttgcagtgaaccgagatcgtgccacactgcactccagcctgaacaacagagcgagactccgtttcaaaaaaaaaaaaagagagaggtgtggcttttaatttttattctctagcaggagctagttggggggactatgcattgacagaaaggcagttgaaggtgaggaccctgtggatccaggacatctgggtatcattagccatcatgaggggcca

SEQ ID NO: 60359 - DNA, 1017 bp, Homo sapiens
agaatgactatttttagctgcatatgagaataggagaaagtccatacagaaattttatactttctctctcctccatgtgcaagagcaaagatcccatacatttctgatattttcctgttaagaacaagtttaccaacgttaagttttgatcttacaaaggcattctctgtattttggcattatggttctactgatatttatcagcaaattgatcataattgactttctgatactcaatgcatttcagacttgcttcagtggtcagtcacatcccggggcagcttcacagaagtgcttgttcatgtcactatatttaagactgtgtcagtatttccattaagagactttctcattccctagggcttctaaataagtcgtaaaaaatcaagccaaactcaaagctggcataaaggggtccttttctttcttctcctatgtataaggaatataagcacgtaactcccattaattctatatttagttaggtttgtaaatgctttatacactgacgagaccaaatatgatccattgatgcttctgtggcctaagattaaaaagaatttcaagaagtttttactgtctatgaaaataacaagacattctaattaatgaatatggaagtggtttcttttctcccttcttttttttttttgttagttgcagttagttttttcctttctgcctccctactttgtttctaaaattaagaaggtatttttctgtgttaaaatttgtcttgttgatgtaacagaatttttacacagggtaaatatgtgctttcttccagtccagagttttggtacttttaattttggaagcctggtttcttgttttccattataaatgatatcatttataattgtgagttttgaggaagtgaaaaaatataataataaatgtgttcactttgcccaatttccttcacaaaatttgaatatttttctcagttttcagtttaaatgaagggtggtgtgtttaaataacagctgcgtaatgaactttttctctctttcctct

SEQ ID NO: 60360 - DNA, 1048 bp, Homo sapiens
gactcactggagccctgtgtttggtgctggtcactctatccatgaaaccatatttaaacgaaccagaagaaaggtttaaaaagatgccttggcagatctttttgagcagtgaatattccccctgacaatatctgtttccttcatttcagctttcgttttggggggtagcttaaaaaagtcttacggcggcatcaagagccatctgtgttaagggccctgtgtgagtgcctcggtgcacacgcacggtttctcttttgggcttttgttgaccagtaagtctacctcggatacttattttcttattttatttccctttctgtgctgtcactttcttggttttagtgaaagaattaagctttgccttttttggattattccagacattcttttcctggcatgcaaatgactgttgatgtactccagcagagaataataaaagcctctatcaccagtccagcgagtgacatttaaaggatatttgaaaggttgtccaattccttgtcttgtaccttacctaacaaaggccatctgggaatgaggtatttcacataagtccagtttccagatagcagaaatctaaggaccaatttaaaaaatagagaattttcttctcttctaaacttacactattcagcacagctttggagaggtactttaataatctttctattctctaaatgtcctcttccttgtatttcttatatactgttccaccctttcaaatcagtaacctcagggttaatcacaatcggaaacttgcccctcactcctttgaataaagagccttgtcttcctgacagcctttttaaaagagaacttttctaattacttatttctaagcagaatcttttaaaatgagatttatacaaatgctgaccctttgaatatgcatgggattgctatagaattataaaaacttaagcactattcggaataccatagattcttagtaaacatttatgagtgatgattgtagcaaaacacattgacatggattctttctgaagttcaaattaatttgatgtttgaaaattacatttctttctgg

SEQ ID NO: 60361 - DNA, 1042 bp, Homo sapiens
ggaggtcaaagactggagtaagatctggacctgtggtgatgtggtgcttaaaggagggaagaaagaatggttttcatggcactacagcacagaagggattctgggaaaaaggctgtcaaaggggctttcagattctctgatgtgggacacctcttctgtcccacagaagataatgttaaatatctcttctcccttaccaaattgtcaacaacttgcatgttcatcattaacttattttttcagtaaattcttttgagagagctcagccaaaaagacaaaggaccagtaggcatcagcattatagtagtctgactacattgcatttcatttggaaaatcaagacaaaggcaagcaaaacagccatggtcctataacccgaacatagccatgactacaattttatttggttcctggccatccatttattttcctatgcatttttacatagttgtaatcatagtctatatgcaattttgcatcctgctttgtaaatttgttgttcaggtgtatgtgtgtactgataaaacaaaattacaacatggagaaacaaaccttttatattcttatttttcacttttatttgtaggttttattgtggccagaagtaattatagacatatgtatatagtgaatgtttgggattctgttctcagggttgaaagttcagtgcatatgttacacagccttgtttggagataaaaaatgtgacaataaataagttgctgagggctgttgatgtcacttttcagttctaaatatagaaagtggtgttgactgaaacatctactccttcaacttttacagatacaacttttgcagctacactaacaaaagttagtattttggttcttgatcagattgaattaattttcttttctagagctagagtcttgccctgttacacaggttggagtgcagtgatgaaatcatagctcactctaacctctaacccctgggactgagtgatcctcctgcctcagcctcctgagtagctgggactacaggtacatgccgccaccatacccagctcatttaaaacatg

SEQ ID NO: 60362 - DNA, 2027 bp, Homo sapiens
gaatgatgggacatatgtaataattcaggcaatcacctgagtaatttaggcagtccaaattctttaccctgaaatacccacattttaaaaaaattgcagataattgcttcagttatttactttggggacagagatatagtgtaaagtgggagaaactgagtccttttttggtggtggtaataataagatgttataaaaatataacattttaaaaaagaaaggtccagaccttaagcgcagagctagaacaatattttttaaataatggggggaaaagggggcactttggtaattttagaaatcaggtagtatacttttttttttttttttgagacagggtcttgccatgttgctcaggctggtcttgaactcctgggctcaagcaatcctcctgccttggcctcccaaagtgctgggattacaggcatgatccaccgtgcccagccggtagacgtggtcttaaaaacagtgtttacatggccatcttgatgcttagaaagataattgattaaaatttaataaggcagggccaactccgagagttcattgacaacggcagcaaaaaggccctgaattctgtactttcttcccccagcctccttctccagcaaggagaatagcactcctccctccagaagccagctccctaagttggagccactatgtaagagaagaggaacgttcactttttaaaattcatatatttaaaaatcaagaccaaaaagtaaattctgtactcctattattgactgtagtcaatcaaacataaaaaggtgaaagtaaaatttaattttttacccttattttactgaccaatatggaagttcttggtatctttaaggctgaccttcctggtattgtgtaatgattgaatgtatctaaactgtaataatttgaaactgacaaacataaccttctcagacttacaaaactatgttctttctaaagatacagatttttattattttattttgactaggaaggatttataaataaatgtaatgaaaaatctttgatcttaataaagtaccttcaaacagtgtgtgtacttacttgaaaattgtttttgcacttggatattctattttattatactactattgtgatctattccattatactatttcccatggtagaacaaattatattttctactgtgatatgaagtgatgtaattgaacttgccatgtctaaaattaaatttcatatttttttcaatcaaacactgctttcatcgaggctgttggagagatggaattcactagtgttgttcttacccatacattccagcaatttaaaaatgtggagaaccttagtgggaaggaagaattaggaccatcaatgatgggaacacacctcccccactccccacctcctctccctccctcccactaggaatcagtgtcacacatatcctcttcctgagctccagttaggcgaaactcaactttttcaactgtgcatataggaacagattgtcatctgctatgcaaactagctagcattggccttgcttcagtcctcgagccagttagccccagctgtgcatccatagaaaggttgctctgaagagcatttaaaagcatttaagagcatgggatctggagtcagaattcttcagttcacattctgattttgcctgtttccagctctgcagccttgggaaaaacactgaacctctctgtttttcattttctcatcagaaaaaaatagggacaagaacagtgattacctcatgggattggtgtgggcatgaaatgaaagaatccatgtatacttagaacaaaacctgggacagaagtgttcagtaattgtgagctcctgttgtataatggtcattatcatcacatcacacaatttaaaaatagctgtgtaagtattctcaatcaccctacataaacagttttcctattagtaagcccactggaagtttacaataaatcattttttagaagctttatttttttttttgtttatttttttgagatggagtctcactctgttgcccaggttggagtgcagtggcg

SEQ ID NO: 60363 - DNA, 1014 bp, Homo sapiens
caataccgctctatctccaagatgaggctgaaattttcagagagacttagctagaggcttagtatgtatgggagttcagcgcttctgctggtctcaggtgtggctgctgctgtcgagtttgaatgttagctgttgaaggtatcaattcagcagccatgagcagctccagacagacaggtgagctctgctgtttctgggtggatcatcacagatttagccgggcaggcagtaaggtgtcctcttactattcaaaaagtgtagactttcttacatattcgcaatacgttcacagtgtgtgcattttaaaataattcttaaaggagtaactgaaattttaccttgagtgaatggccttcataatatagcttgagaagtccttttgagtacctgtcagtgactcaacaacatttaataagggaaagtagacttttaacagttattatatatgtaacgaaaagcctttcctttgggattaatataagtaagaatggtagccttgtggcaagaaatgattacaaaggatatttttatttgtaattcctcagaagacaatttatgaagtcacccaaaatgttattttagctggttttggatttttccaataaattagaagaaggatttctattctaaaacatgtaaaacctgttttacatattactgatacaattaaagattatttttcatctatgtgcaatagatcacccctctttaaattgctctaagatttattttagaaaacttttcatgtgatgttatttctttgtcatcaaaatgcttgttaacactgtccagacaccatcctaaccttgccattgttaaagaagtttaggaaagactcttatattgtaaatatttagatgggttctctcacttttctttgatactactgattttcagcaagtgaattatataattcaaaatgctagaaatgtctatccgttctataagagagcatatcctgccgttcttgcatgcagtgaagccctgcccgtcgaaaatcattgcatctgtgac

SEQ ID NO: 60364 - DNA, 1015 bp, Homo sapiens
cagttcggtctgtccttgctaaaaacaaagtttgtttgttggatgttcagcctcatgtaagtaaacaatgagctattcaatacccttctgacccatgtcatctacagcacctcatgtgagcatttcagtatgaaataatatgaagtcaactcacttttggcatatatgtggcttttctgagatggcaaaagcatttaaatataattggagacatctttggtggagaaaaagaaaagcccataatattattagaaagagaagtggaggaagctccaagacctgtgtttgtaactcttatttatattcagtttttgtcaagtaaagcaactcttagatgtttctacatattctgtatttttaaaaaatacatcacattgttacatgcataatgcattcttatgtgttatgtattagtaacagtgtctataatttttaacgatggacattttggttccaagtctttgactttggttctgtatatatcctagcaaataaccccccactagaactgaagggcattttgcaggaaatgtactgaatgaaagccccattgcaactgccatgtctgcacctgtcatcctggaaactccattatgaacattctgaactgagaacttcagtggatgaggccattcaattccctatcaaaccatacatcttccagcagatccccagcccacagcattttcctcatcccccagggaccatggtttctccttccactgatggctgtaccctggggtgcaaaacctccaaatgctagaatgacctgcggaagccctttggacctctaaaggaagatgaatctggagtaaaagtgtttcaagaatcaggaaggctgcctcctgacttgggcactgtgttagtcccttgttgcactgctctgaagaaatacctgaaactgggtaatttactaaaaaaaaaaaaaaaaaaaaaaaaaaaaaagaggtttaattggctcactgctctgcagactgtacaggaagcgtgatgctggcatctgctcagctctggg

SEQ ID NO: 60365 - DNA, 1344 bp, Homo sapiens
gtgggatgccgtgtgtcagggaagtgatctttcaaccatgtgttgcagattttcaaccaaagtgtcctgccatcataattgaataaaaacaatcttttctctgtccgtaagaaagaaatcaatgcacagaaaattctcaatttgattttcaacaatactttttacttaggcttactatttgctaaaggaacacactagcaaatagcaacaacacaactgattaagtaatgaatgaatattaagcctaaactccaaagcagggcattatactaattttaatatatctcatgtttttggatattaatcgtgttatataccctcagtagggtatttttctgctgcaaaactttagtgtttgtgatagagtacaatgtaccagtttagaagacagtgcaccagtacttcatgctattcctgtaaagagtgtgacatttcattttaaagactagcactacctcttggtgcaccacctgcagaacaggtatgaaaaactgtttcaagagatctgagcattgtattaaaatattcttgctaactaaataaaagggaattaagctttgggatataacttaaattagttggattttataaattcattactttttctattaagttacattttccgtacttctcagattcttttttataacatcaagatgtaattggaataaactgcacatatttaaaatgtgcaattacatcagttttagcatctgcgtacacatgtgaaaacatcagcacagtcaacataatgaatgtttccatctcaaaaaatttccttgtgcccttggtaatccagtcttccaccctgttcccaggcaacactgatctgcgttctgtcacaatagattatttggaatgatttagtatgttatctaaataggattatacagtatgcatccacttttttctttgccagactttttccactcagcataatgaatgtaagattcacccatgttgtctcctacatcaataattcattctttttcatcccttttcatgctgaatagcattccattgtatagaactactacaatttgtctatccatgcacctgttgatgaggatttaggggtttcttcctctacccctatttttggctattataaataaagttattacaaggtttttgtacaagtcttttgacaaatatgtttttgtttctcttggccaactatgtaggagtggaatgctgaggccatacggtttaattttttgagaaactactaaactgatgtccaaagtggttataccatcttacaaacctctagtagcgtatgtgagctccaggtgcttcacatccttgccaacacttggtgtagtcagtcttctaaacttttgt

SEQ ID NO: 60366 - DNA, 1086 bp, Homo sapiens
gactgggactctccaaagaaatccccaaagtagttatttttcactctgatttacttttagacagatatcaatgtcaaaatgtcttcatatagtaatgtttcactggcttgcctgatgataagattctcatggagttctataaaaagatatgcccaagtatctgtatttatagcatgtttggaaaataccgcatcaaaccagcgtgatttaattaattaaagaagaatatattttaagagtaattttagaatttcaggtagttttgctttgtaaaatactttgggcagaatcttgaatattggagaaaaatgattgctttgcttataccaccagtattgtttgatgtttatttctataattctctttttgaaagcatgtattacatatccaccagaaaaagttatggagcaaaggaactcctgcacattgctgatgggaatgtaaattaacacaatcattttggaaaactaagtagcagtatccactaaagctgagcaaacacatacccttgacccagcaattccgctcctactgcacacccaatggaaatgcataagtacgttcaccaaaagacacgtactgagctattcttagtcattattcataagagctcagaactggaaactactcaaatgcttatcatttgaatgaataagtaaaatggagaagtaaagtatagtatatgcatacaaagtatagtatatgcatacaatggaatactgtaaagcaatgagaatgaacaatcttcaactacatgcaacaataagaatgaatcccgcaaatgtgttgaacaaaaggaggcagacacaagagaatgaatgaggcagcgtgatttcatttttataattgcaataaaggcaacattcatgtgtgctgttagaaatctcaaggatttgggttagaacaggaactcaagaggtgattctggagtgctagcaattttctgcttcttgttagagtgctggctacatgggggtgttaaacacttttatgtgtatatatatcagttattgtataatactcaggctttaaatgttaaaaagaaataatagtttaactgtagtttgctgattttctggttttcct

SEQ ID NO: 60367 - DNA, 1039 bp, Homo sapiens
agctttaagattagaagaatcaaatcacagagagctgaaggagacttaattataatataaacctttcttaattactttttatatgtagtaattggcagatgatgttaaatgggcttttcatggctatatagtttaaatatggtaagcttcttttcagtacacagaattagatttatttttataaaagtggttttcataggcattcttacaaataaaatgtgatgcttgaaacattttgatctgcagaataaaggccatttgactacttaatatgttgataatagaaagctgtctaaaaggctaaattgaaatgttggcttttttcaagcagttttagtactgttttaaaaaatttacttgtatattgcccttagcgatgttctctagttttggaagagttcaactttattttaaaattatagttttctgtgacctcaagttccttctttttacatttttctaaattattgcttgtaatcattttcagtcacaagttataggactgctgctttctaccaacagagatgaaagttaatgaaaatgtggaactagacattttttttgcctgtaattattcacctcaattacaaaagctgaattgcaatatataagttattagaaaattttacaaaataatttttaagcttacaggtgagcaattatagaagagacctagaagatgcaaaaacagattacaaagaaaaaaaaacgaatttttaaacttcctactgtgtattcatctcctttgtttgtcttaatttttgtagccttcccagtcaagtataagatggttgatattatctctatttcacagagaaggagatagggatagaaaggatatgttgacttgagttccatagatgataggtgcacttggattcgaaaccaagttttttttgataccagttctcatgttcttcctcctatattaacactagcaatcctttaaaactacagactatctttgttgtattccagtaagtagtcaaaactgacttcttttgaagatgagaaatatccataagccaatctatcccat

SEQ ID NO: 60368 - DNA, 1026 bp, Homo sapiens
tcagtttgcatccctaaattgcttggaatgtaaatagattttgtattccaaatacaaaccagacaactaaaaatgttgtgaacttaggcctaaccctagaaagaggatacgggacaggatggtgcatctgagctgtggtcttttaaagtcaaggggagactctagaacttctccagtggggatggcagattgatccaagggcctgactgggaaaatgctgtttgtaggcccactggacaatttggcagtaagaatgattgaaattatgtctctatttttaacctttcttgggaggatacttctacctttgaagatgatgacctagaataacctaatttagggaaaattttccaaataaagtcatttgcctctgaatgttcttggcaccctacatgggtgtcgtgagcttgcttgtaagggttagattataaagttagcatattacctaggcccaaaatcgaatatagtcaaaatttaaggatatcacattagagatggcatattttttcccactaattcaaatatacctagtttttttttccctagagagttgattttttttttttttttgtagttagagatttttaagaataagaaaggaagtgctagacctatctcacttggcaaagtatctcacactctagcagtcactccggagctgagaccttctaaggaaatggtgaatttacatcccttcctgtagttctagttgtcttgagggacaaggcaggctgggacactctatttgcatttttttttttttttcagacggagtcttactctgtcacccaggctagatcgcaatggcgccatctcagctcagtgtaacctctgcctcccacgttcaagcaattctcctgcctcagcctcccaagtagctgggattacaggtgtgtgccaccatgcccagctaatttttgtatttttagtagagatggggttttaccatattgaccaggctggtctcaaactcctgacctcaggtgatccgcctgtcttggcctcccaaagtgctgggattacagg

SEQ ID NO: 60369 - DNA, 1623 bp, Homo sapiens
ggagttggaggttgcactgagccgagactgtgccactgagtgacagagcaagactctgtctcaaaaaaaaaaaaaagagaataattttttgcccagtgtttccaaagccattgggaaaagtgacacttgctttgaaaccgtttcataaatattgttgagaaaatacaaaatattatttttctatattatcataatgctatatggtttttattcttatatttaatgatcaagaaataataatagaccaagttgttaccatggcaaaaatacaataatggaggactttgagctgtgatcagaagtattataattttctcttcattttgaaaatgtattcttcttaagcctcattttagccaccaaaacatctcaatgacagtttctgttaaatttccttctgcatttaaaagcattttctagaaagtatgttgaaaccaaatgtcaggcttttaatacattttcctacatgacaagtcttatcttcagtgaaacccaactttttgaaaagtaaagtaataaagtcaaataatgtgtgtgtgggtgagggagggagcagggagaagacttaggtgttaaaaagcaactaaaacacttttcacgtttaagccaaaacaagagcaaaaattcatcttgtggatattcagacaatttgcgacttgttctgtctggctgggaggtacaagagaaactaataataaatctttctgtatatttcacatttttagcttgagcatcagtactattctgctctcctttgtgctgaatcttatgtgctgcccaaagactgcttgcagaggtaatttgaataaacaggcatttattataagactgtcactattttttcataaaactgtggcataacacaaagcctcccacataaagcagagtgcaaagtaagtgctcaaaactaaatgtgttagtgtgtttattagaattctcatatcttttgttgcactttgatggaaggcttgtagaattagagttggctctggaggattttatatagataactgtaaaactgaaagtcataatgaaattcctgagaatgtgatggatttaaaattataacccttgtatgtaaaaggtaaatgtgatcttcactggagtcacagttggctttttatgccgttggccaatcttaaatatttattttcagacttcatttctgggcataaaccacaaatctgttcattcaactgagttttacggtgtaccagctatgccaggcactgttctgagcacacaaacatttttgcccttgtgccatttatgttctaatgggagaagatggaccaaaaccatatttataataaattagtaagaaatgataaaatcacttgtacagttgttagaaggcgataagtctatggaagaaagtaaagtggaatgggataaggggaatggagagttggggacacagacaggatagattttgaattgggagcttggtggccccattctgagcaaactctgaagtaaggcagtttctcatgcccccgtctacttagccacggaacactcagggatgattttattttgacctcttaattttattgcactcttgtcatagttttgaagtagagtgagatgagtattttagtcagtctatataagcgtagagta

SEQ ID NO: 60370 - DNA, 1078 bp, Homo sapiens
gcctgtaatcccagcactttgggaggccaaggcgggtggatctcctgaggtcaggagttcgagaccagcctggccaacatggagaaaccccatctctactaaaaatacaaaaattagctaggtgtggtggcaggcgtctgtagtcccagctactcaggaggctgaggcatgagaatcgcttgaacctgggaggcagaggctgcagtgagctgagattgcaccactgcactccagcctgagccacagaagtgagaccctgtctcaagaaaaaaaaaaaaaaaaaggaaagtaaaaacttaagtgaattttaaaggctcaattaggtaagcacattgaaattcaagatttagctgtgatttgctcatcagaaatttgtcaggtttttacttttggatgttatttcctgtggatgaagcatttatgttcttgttatatccattcctgtgccaaaagtttgtagagacttgacagcaagcctccctccatacagggaataattataaaggaatttatagttctacctgcttattctgtaattgcctctcatgaggcaagagctgtggaaacatgaaattagaatgctgtgaaatatcagcattctaacttttgttgttagagtagctcatgtatcatctttgttctaaaccagaagccgtgctaatactgggctacagtctgggccagcacacatccgtgacagagtaggtgctggggttggtttgggataactaaattctgcaattagaaagagacccttgtctgagaaccactgtgctcaagcacaaggggtagttgtaaagaccttggctacttctggtgtagtgtgttatgtctgtgataggaaggtggctgggttcagtgtctcatgcctataatcccagcacttttggaggctgaggtgggcggatcatttttgctcagggcttcaagaccaacctgggcaacatggcgaaaccttatctcttcaaaaaaaaaaaaaaaaaaaattgagccaggtgtggtggcacatgcctgtggtcccagctactcagggggctgaggtgggaagatggcttgagcctgggaggcagaggattca

SEQ ID NO: 60371 - DNA, 1076 bp, Homo sapiens
gaagagtaatttcttttgtaacattggtcagatttacagactgttttcctctggttaattcattatagaaaacttgttctaatcaattcacaaagcatcacttaccatgcatctcttttctaacatactttcttacaaataatttcctgaaaagtcactctttctctacttttcccttgctctggagtacttcatacattcttttaaaacaagatcagtttggggacttaatgtaagttaagaggggtttgccataaagttaaataaaaatgaaactgtccatttgttgttatttctttcaaatgttattatttacccacatctactcctaggtgttttttcctaatctgtttcttatttctgtctgtcctcctatgttgaagcaacactgatcttcaacaagttatctgcatgttttataaatccagtaaatattccatttattcaatattcaatcattttattaaagaatgtcatgcaaattaagtacagctatgtctaaatatactgccttaatatttttcctaaacattatatttatgcatagggaacacttagaggtattctttcagaagtgacacaggttctttcttgaatatgaaagaacgctgcataatctcagcatgtctggaatactacttggaaatatttttttctgacagaaagaaaccatttgtgtttggagaattttaagttgcacagactcaactgagaaaacatattaaaatttcaaatcagtttttctctctgttcagaaccatatttttatatacaattttacatatgcataactgtattttctcataattttgaaggtataagtaagagcttatttctttattagccggcttacaaaaaattaaattctcatatggtttcttctctctctctccatttttatggtgatgttctgtgctgtactttaaaaacgaattgtaagtggtatcaggaaaacttttaaagacctaagtaatatttttctttgaaaattgcaaattgatatcttttattaacttttgtggtttcattaggtactttgagtttctatttttatttttagcctgagatgagctgaa

SEQ ID NO: 60372 - DNA, 1043 bp, Homo sapiens
acaggcgcctgccaccatggccagctaatttttgtatttttagtagagacagggcttcaccattttggccaggctggtctcgaacttttggcctaagtgatccacctgccttagcctcccagagtgctgagattataggcgtgagtcaccactcccggccaatactgtatgcttctgatggaagtcagcatgaaagtgactatcagagctttggaaatgacaggacgaataactcaaattgaacaagggagtgctgtgggatctgctgtgtcaaggctgtgtggaggctagttcacacttcttgtggttgtgtaaaaaggtatacaggaatacacattctgcataaggaaaacttagtgtcagcatggaatttcacatgatagatttaaacatgtttttgtgggctggcttggaggcctattcaccaccacatttaattatatttctagagcatgtgtttgaagatctaagaaaaaaataagaattacgagcacactttttgtgtaaactctgcttgatttggagtggagggactggataatattcactgaagtgtagtttggaactttaggcctttggttaataatcattaaatgattggatgtgtgagtgtaataatgtatggctgaaggagacaggtaatttctagagagaggacaacgacttccatgattccttcacatcaaattgggaccttttgctgtctgcatcctgttttcttttgagtctagtgatcatttgcttctcattgagtctgtctattcacccttttgtgttgtctcagttatggacagtcaggtatattgagtacttttctgtgcttccagaaactcatgtcccacccttttgcaaagaggcaactgtagtcagaattcagagctggcattgtgagccacattgcttggactcaggttctggctgtgccaagaataagataataacttatattattatcataataatgtaacaatatacaattatatttatcttaatatatcatattatactatattatatcatataacaacataataatttataac

SEQ ID NO: 60373 - DNA, 1051 bp, Homo sapiens
cacccccttgtttagagaaagaatatgaaatagtagcaggaaggtttagactcttttacggtcaacattcatgagctggaatttaacttaaataaatgttcacagcaaaaattagaaggaatctattttctgaggtcaaggatggcagcagttcagtagccacattaatttaaaataatttcctttaacaaagtcaactgaaattctagtaagctgttccttttattggcagaactccattgaagtggtattttgtatataaatacactgaagccgaatgtgagtaaaaacagtttttggagacagttttagtaaagcatcatgccatgaaaatgatcagccagcagaaatcgggtctggccatacagcaacattgggagtgatcagaactcctaaaatagtaaaatgagaacaagaagcttactggaaaatatgccacttgtgcttctggaaatatgaattgcattttctctcatctaactcaagctgaaagaaatttagagtctttctggagtttatgaggaggtagaaaccagtgcctcaatgataactggacctatatttttaaattcagctaactttgttatggctgcctgtcatgataagaggcttttaattgatatagagtattagaaaatgagcaatttctgagttgcaattgcttttcagaacagaattcctatatttcttttgtcaaatttactgaaatttgtgtacttgcagcagtgacaattcttaagaaatggaagtgttgatatgtggcatttccctagcagtacatttaaagaccatgtttatttgttcatttctttattttttcataacagtgtaatttccaaggcatccttgtgctctaaataatagttgccctctggggatttattaggcatggtcttgggattataactgatgacgtttatgacttggtaatacaatcataaaaatatttttaagttgactgtgtggaagttggatagctatgggtttatttagattgagttgaccttttgatagcaggaataaaatatatttgaggtgtcatcatcatcct

SEQ ID NO: 60374 - DNA, 1021 bp, Homo sapiens
gatctgccatctgcaacgtggagaaccaggaaagctggtggcataactcagtctgagtctgaaggcctgagagccaagattatggggtggaagggaaagggctgcagtataagtaagtatcaaagcacaaaggcccaagaaccaggaagcctgatacctgagggcaggagaagatgggtgtcccagctcaataagagtgagggggaatttgcccttcctctgccttttggatctatttggactctcagtgagattggctgatgctgcccatgttggtgagagcagatcttctttcttgagtctaccaattcaaaggataatctctttcggaaacatccgtgcagacatacccagaaataatgtcttaccacctatctggacatctcttagctcagtcaaattaacacataaaattaaccatctcaagactgtttatttgtcatttgttgaacttagaactttggcctagtgctccacctgagctgttggggtcaggcttagcatattgttaagacaggcaaacattgtcaatacaagcctttgatgtaatagtatttccctttcaaatctgtattagaaaaacctttactttcactaatcactaaatatttttcattgtatctccaatgccaaacaacagaaagaacatcgaaaacaaagcagaaagacaatattcctctcccccagaaagagacacacacatagttttttttttttttttggagataggatttcattctgtcactcaggctggagtgcagtggtgcaatcatagctcactgcagccttgaactcctgggctcaaaggatcctccctcctcagcctcccaagtagctggtgctatagaggtgcacaccactatgctcagctaacataaaatttttttttggtagtgatggttctttctaagttgcccaggcttgtcccaggctcctggcctcaagcgatattcctgcctcggcctctgtgttgggtcgttctttgcattgccctagaggaatacttgcgactgggcaattt

SEQ ID NO: 60375 - DNA, 1033 bp, Homo sapiens
aaaggacatatgttggttttatattaatcattgaaccccattggatttgtaaaatgtgagacattttgatccttcataatctttttttcttgaaaactaggaatttttgtttttggttgtataaatcatcttttcttacatacaacatcctaatacttggccagttgtaagtctgtttttaaattctttatgtatagtgacgagtctgagatacttgagatagccaaaattgaaatgcaattttgtttatgattaagaactgaatctttaaaaattttcacagttttgcacaacaaaacaaaatagatttttttaactttctttttgaatgtataaataatgaccagtaaaaatgttactagaaagcatgctacttctagatccttaagtcactagcagataggatgtaaggatatagaatagtggtcagcaaacttggccctcattcatttctggaaatcaagttttatgggaacacagtcatactcatgtacctattgtttaggttgagaccatacggaccacaaagcctaaaatgtttactgtctggccctttacagagaatgtttgccaaaccttggcattagagaagcaattctcaacatttttgggcctcagatctatactcttaaaaattattgaaggctctaaagagttttgattatgtgggttatattggtttaattaatttaaaaataactattaaatttgcttcatgttaacacaaataacatttttatgaaaaataattttaccctcaaaacaaaaacatgagtgaattgcaaatttctttaattcctggctcaacaggagacctttatatttttgtatctgtgtctactttcattttgttgctgtatgttccggttgaaggatatgaagaaaaactgaacttacagagatctgtagttggaaaagggaggagtattttaatagcctattcagttaactgtggatatttgctgttacaccaaagatatatggcagtttcttaaagataagtttcagtgtaaaatctgaaagtatagaaata

SEQ ID NO: 60376 - DNA, 1044 bp, Homo sapiens
aaaaaaaaaagaaaaaggtgggccaggcggtggctcacgcctgttatctcagcactttgggtaggctgagggtggatcatttgaggtcaggagtttgacaccagcctagccaacatggtgaaaccccgtctctactaaaaatacaaaaactagtcaggcgtggtggcgggcacctgtaatctcagctactcgggaggctgaggcaggagaatcacttgaacctgggaggcagaggttgcagtgagctgagatagcaccattacactccagcctgggtgacagaaaagatgagttcctatcccttttctttacatttgttttttcaaagtatgtttgcactatgttagagtgagtgcatacatttagagaacaacaggggaaaatgctagaaattcagtaacttctagtttccattttataacaaatgtatttttattattagcttcctactggaatcctactccccaccattatgtcatcattttcacatccacggtctgtagcgattatgtccatgtggggcctcagtagttttccctttaattttgtgcagatttccttactgcataaactcaactgctctcactgaggtcgtcattaagtcctgtgtgtgtttgggcaggccgacttgatttacagccagcactccactgcgggtgagtaagatggcaagtttctccctgtttttcctctcagcccttcctatctagagtgcagataacataattactcagttaaatatcatctgcccaggttttcattttgagataaatctatattgtggttatctgcattatacttaaaacttacaccgaagataattctgttggataggttttaagtaattatcttcagtatttccttttcatttatgatatgaggcatagcaaatcttggattccttgatattaaaatagataagatcaagctgtgaactcaggatgagtcagtactgttttaagagttggatttgccatgcttttggcaaattagtacttcagagcaggagcccagaggtttcaggtaatcccagtcaccaaaatg

SEQ ID NO: 60377 - DNA, 1075 bp, Homo sapiens
atgatattatttccagttcgtgtcatgacatgaaacgctgaattgcgcttgttgctttttaatactgtgacatctcaactgctgtcattggttttaatctgtgggtgatcttggaaagggataggtttgatgtaggtagcctagaaccttctcagggattgtggaatatgttgaaacttatgctgtttctgagaactatctttctcctttctgtgggtcaggctgacataactcagagcacttgtaatcatgactgtagccaactgtggttacctgcagaggcttagatcaaataggaatttgtctcttcatttactcactcggcatacattgaatgagcatctctgtactgggcatgggggaagatgacttattatttgtcttggttcttaaggaatttatagtctaatggaggagaaagacacacagattctcatataaatggatggcgtacaatgatagattaaataggctttgagacttacagtggaactgtgggccatgattgccatttgaattttaaaaaattaatagaatgtatgatttttctgttcttagttatatacgtaagacttgaataaatactcattgtgaaataagaaaggtagaaagattatagcctaaaaacgagtccaattttatatcccatcctcctccctgtgccacttttcattattattattttttaaaaccattgcctgattgatgaacattttaggtcattacttttttttcctgtctaatgatgcttagtcagtttttttgcacatatatatatttgtttacctgtgtgaattatgtctgcagtgaaattcttagaagtagaatcttggctggagtatttttctgggggtgcatttaatctgttattggaattcatattaatattagaattaataggctttttttttttttttttccctgaaagcaactgaaaatgtatggcaatgtggagttgcagggcagtagtcctaatggtttagctacagcatctgcataggtcttttatatagaaagtgtctgggtagtggtgtttgaccttggtaacttttctctctgccatttgagccgctgc

SEQ ID NO: 60378 - DNA, 1047 bp, Homo sapiens
atatatccttttatctttttctaaatttacttttactatatatgaatatttccttaaggacctatacagtgttacatgttcattaacataaatgatacactgtgtgtttcattctgttacttgcttttaaaaatctatcattttgataatatctagccatgatgatatagagaccagatgacattttagttttttgtggtgtcttcaggtgttttctgtaagtacctggttgctcatgtaaatccatcagtacctctaacatttcctaaaaatctttgtttgtatgccttaaattgattaggaatttaaaaatggataccaccagtaagtcgaaagtctgatgtttggtggaaacttccatatgcaatttagcaggctgtctcaatattttgtgttccaaaaagatgctgcgaagataatgcagtgggtatggaatcgtttgcaaaggacttgagtaggtggcagggagtttttgacttgtactaacatacataggagtgctgttgctagggccactttgggaacttgttattgtgtgggaaagtgttatgctattaaaagctttatttttctttttttggtaacagtgttagttttctatattaaaacaatattctctttggtttaagaaatatgcatggatataaaattgttatttataatattaatctggccctgttcttctaaccaagctttggtctcattgccctggcagcctgttggacaatttcacgtggatagctcttcatgtcactcaaaagatcaaaaatggaaaaatacgtccactttttcatggattccttttctgtttagggtaccattattctttttgtatctaagatttggaaccgtggacttaccttcgaatcccaatacctctttaatttttcactttcagacctgctcttttcccctttgacattctcttgtgcgataatctcttgtattctaatctcatcactatcattctagtctaattatgctcacttctgacctagattactacagctgctgctttgctaagtatatatgcagccttcggtttac

SEQ ID NO: 60379 - DNA, 1546 bp, Homo sapiens
tttgcatttctaataagttctaaggccatgtgctacagccactgcaggggccagccactctagggggaaacgtaagtgtagtggttaacactttgaaagacctgggtttgaatctctgctctgctgctttctagtactttgactttaggcaagtttcttaacctctgttgttccgtctctaaagtggaaataatatagtattttgttgtgaatgtaagtgggctccaatgtgtagaagctcagggaacagggccttgcagattgcaagcatgcaataaatgttttcttttatccataaaaacagtacgtatataaaataaataggatcctgcatcttatacaattgaagcaaagacagaaaatttaatacttaacctcatttcctggcactgtgctggggaaaaaatatgattactcaattactttttaaggagtgaaggaaaagtttgtggatcctagtaattttccagaaacattttttagaggcatagcacattcatatcgatgctgcctcctccctcttccccttcaaaaagtttgcattctttaatcaccgtatgttggactctcacaataacccttatagtttacattttatataacaggtattttgaaggttgcttctgggagctgaatgacaggaagtacctgaaagtcatctttagaacacactgtcgcctgtactatgacaactttgtatttgatgaccttgaacgcagttcttctcgagacggagtcttgctctgtcccccaggctggagtgcagtggtgtgatctcagctcactgcaggttccacctcccggcttcacgccattctcctgcctcagcctccagtttaaaacatatttaaactggactacaggcacccggctaatttttttgtatttttagtagagacagggtttcactgtgttagccaggattgtctggatctcctgatctcatgatccgcccgcctcggcctcccaaagtgctggtattacaggcgtgagccaccacgcccagcccttgaacgcaattctttgggatctcatctctcggcttgctgaatgcctggttcattttctttctgcagacctgcgggatctcacctctggctatcctttcattagtgaaaccctctttccatcactttctgtcactatcactgtcttacttgttagctgttaacactctcttatcattatcttatttgtttcctttttattgtttccttcactaggacataaaccctatgagggtaagggcttgatcttttgctactcggtcgctaggatgggatgcagttcctggtatgtagagactgaatacctgctggttgggtgaagggacctgtgacgcggagctgccccgctccgctccctccccagctcaggggctcggactggagttagcactcacttcatggcacactgtcatgattggtccgtgtagagtctcccaccttattttattgtatctttccccttcatcacctatccccattcatgttcttccttgcccccaggggaccctctctctggcatatgcataattcccttaagt

SEQ ID NO: 60380 - DNA, 1053 bp, Homo sapiens
tctgttgtccaggctggagtgctgtggctcactgtgatctctgcctccctggttcaagtgattctcctgcctcagcctcttgagtagctgggactacaggcgcatgccaccacgcccagctatttttttttttttaatatttttgtagagatggggtttcactatgttggccaggctggtctcgaactcctgacctcaagtgatctgcctgccttggcctcccaaagtgctgggattacaggcgtgagccattgcacccagcctgaatgtaactgttctaatcatgaagttatctcttgttttgtggctaatacctctgtttcacatgtacattttaacatattcatgtaacatataaggcaactcttcttacacaaggctgtcactctagcccagcatttatttacttatttatgttttagtggctttatttaacttttactctcctgtcaaaatttctagcacccaagcaaaaatttccataaaggaacttttatcatctgttgattatacagaaaatgaatcatttattctcataagcccagccctcttgcattgtgggacactggaaagatattttggctgtttgtaaagtatttgcttgtattcttacctgaagctttgacttctccccctcccccaatggttttcagagtttctgtgacttttttctttaaattaattatgacactacctgacttccactagatggtgcactggggggcgcttactggagatttcaaacagatttttgtttttccttgttataaacatttcactgacaaagatacaaaggtactgcagctgtttctctcctaattgcaattcagacaaaattgtaatgaatgacttaagtcttgagttttggccaggcatggtggctcacgcctgtaatcccagcactttgggaggccgaggcgggcggatcacaaggtcaggagattgagaccatcctggctaacacggtgaaaccctgtctctactaaaaaatagaaaaaattagccgggcgtggtggtgggcgcctgtaatcccagctactcgggaggctgagg

SEQ ID NO: 60381 - DNA, 2011 bp, Homo sapiens
gtctgaatccaaaggaagttaaagattacgttattcaccaagttcatactgaaatcagagaatcgcagcggcttaagaaaactcgcatctggcgaatgaacctgcgtatccggggttctcctcagggaggttgctcgtccatgaaacacactccagtctgcagccacctgggagtgggaaccaagggcgagcgaaccgggcgggcaggggtggaacttgcggggactgcgggtatgaggaggagctacagagctgtcaccaatcagagcccagctttgttttctcttgccgaccaatgagggagttctgctggagaggcgtcttcaagtctgagacgcctatcgccttcgcagcctatcagcaggcccctcttacccgcgggcggtgcagccccgccccgcccctccaaccgcggtcccgcccctccgagggtgggggccgtgttggttactagccgggctggaggcgggggccgggctcccactgggctcgtgcgttctgcgcccgccgcggcggtgccgagcccgctggctcccgattgtcctctgcggcggtggcggtcgctgcctccttgcctccgggcccggggctgcaggggccagagcgagtgcgcctcctgcccgcggaccgcggcagcccagagcaggtaatggggcgcctctggggagcgcctgtcggagcccagggctaggctcgggcggtggggtcggcccccgaagctgctccctgcgccggcgaccgggccgagcggtgccgcggtcctccggagcctcctgccggcctctaggcgcctcagcctgggagcccgcggcgggcaccttgtgaggaggtgggggcggggccggggcaggggcggggccgcctcgggcgggaccctgaggacccctggagacccctgttgacgcgcgggactccgggcgggggcggcggcggggcagacccagagcggggagaaccgacaggtggaggaaaaactgcggagttgagtcagagtccggctccccggggaaaagaaccgactgaaagggagcgataagctggctggcttcttttttttctttccctaagccagaaaggcgtcttcacttgggtcgtgttaattacatgttttctgagaacaggcgtttggccgtgtaatctacacgatagcattatttatttacttatttgctatttaaaaaattaaaagcagcatttagcgtgaatctatttgggggctttttcttaagtgacaggtagacccagccgagtaactcagctttgtctgggctgaagtggggagcggtgaggtaggaatgagggggaggagtgttcgtgaggaatgcctgtgcaggtttgaaaggattgtgggggtgggaccttgtttctgtcactgtgccatgggtgggagtagaattgtgatttttttctttttctaatttttaaaagcaatattcacatttaaaaaagggggggctctctaaaaacagtctctgtactcgaggctttggggatgcacctgctagtcaggcagtaatagtttgcaggtaaatcctgggctattaattacgtaatttgatttacttataaagaagtatcttgaattgttgctgcctttcctttgacttgctcaatatattgcttgtttacaagtgaattgatgaaggtcactgagttttagcggtaatgtcacagcgatggcccttggagagttttctatgctcaggttcactctggttctataaaaacagtatttccatttaatcgtgaagctcatagcactctatcaattatatagtatgccatcctcctactcttctgaggcaggctgtgcatagcatgtccattttacaggtatgtcaactgaaagccctagaaatgaaaggaatcctgccccactttactcctactttattttatacctataatggatttaatccaaaatctgggtaagattcccgccatcaagccaacttctgcataccaatttgatcccgtatacacaggtcagaggtggagatggttattttca

SEQ ID NO: 60382 - DNA, 3251 bp, Homo sapiens
gttttcttttgactatcaaaaaatgattctaaatattctcagccaaatttttttattttttgcagaatcagtgtgcaaggtggtttataagataatggagtgggttttttttgtgtttagtgtgatttgttatcaggagtcttattgtaacgcttaagcattaggttttttgtctgagaaactttaaagagtaaagcagaattgaaagtggaaattttaattttgtaagttcataaaatttaatgataatacaccaaagtttatgtttaaattagggagtttaaggtttcaattctttctctctttttttgggggggtgatgttttacaggcacttaagtattcatcgaagagtcaccccagtagcggtgatcacagacatgaaaagatgcgagacgccggagatccttcaccaccaaataaaatgttgcggagatctgatagtcctgaaaacaaatacagtgacagcacaggtcacagtaaggccaaaaatgtgcatactcacagagttagagagagggatggtggtgagtatctttcttgttgaaactttgacatacagttttaacaatagctctatataaaaggcggcagtagtatttctagcttgaagaagttactgttcagttatgtcattaaaatattttaatcctatcattttttttttactctgaacaagttactgtagaaacaagatgctgatgtgagcatctaaaaagtggactcttaaggccaggcgcggtggctcacgcctgtaatctcagcacttgggaggccgaggcgggcagatcacctgaggtcaggagttcaagaccagcctggccagcaggtgaaaacccatctctactaaaaatacaaaagttagttgggcatggtggtggtggcaggcgcctgtagtgccagctcttcaggaagctaaggtaggagaatcacttgaacctggttggtggaggttgcagtcagcctgagatggtgccactgcactccagcctgggtgctagagtgagactccattaaaaaaaaaaaaaaagcggactttagtgtttaataataagggaatgcatttatgaatatagtttaaaacatgctttcttaaggatgggaaaaatgcaggacttttttccaagaaaggaactttgaccttttaaagatttcagtttgagatccttattgttgcttcagtttgttactttttaaggtgttcaaatctgttttctaattacaatgataaactatgaatttaaaaactcattatgttttttcaggatagttcccagatttaaaaaattatttatgacttagaaaatacattcttgctttttgttgtaaacattttcagtattctccagttttggtgatgtgatttttatacctggttcattgaaatattctttttaaaagttagtctgatttcttttgcacagtcctgtaccttcaattataagtttgcctcaagctctttgtggtaggagtctgagaataagtaaacaaaaccaattctcagtaactattttcagacttaatttgcccgaattacatttcatgtcaaaagcatgcattaaggaacaaagcaatttcagtaaagacacctatattctctcctacatgttgcttaagtagataacatatcttaagcagatttacaatattaaaagcttccaaggaaactcagtaaagtaccatgtgactttttgcccctattggcagctagttcttcaatacttggcttactttaaaaaaaataccttgcatcttgccccttttgtccacctaggatagaaatcagctttattcagtgtgatcatatactgagaaacattggcttcctctacataattactggtttgagaaaatacagtcagaagattgcactgggattgaataatttggatgagaagaaagtagttctctattgaatgtagttatagcttagtgctatttatgcagataaaccacatttttgtaacagtagtagcaggtgtatttgattattaaagtgttacaagttattgggttgcaaaattaagcttttagagttatcagttttgtgggtaagttttccatagtattatgtaaagcctgagatggtactctctatcaaccactcttctatagtggatttcatttctaatgttagctcttggagagcaggtactggttgtactatactgtatttattttgaaaaatttggtgattgtaacaaaataggatatggcacctcatcttcttacaaataggctcttattttagtgactatgatccagtttatccccaaatgcaagaagtcagtttttcagttataaatgctttcaatcatttccagcaaaccttgctcagccaattcttttacaggtgaagtaatcccaagaacattctgttgcttattcattcaacaaacctggggcatctactgtgtgccaacatttgtgtgatactcctgggagtcaagatgtgatcctggccttgaagctattcttaaatgctttgactcttgagagctagtggtgttttagccacttactttttctgtacccattttttcttcactttgattttttcatttttctacctgtatgaactccaggtacttgttagcttttcgtttttaaaaatttgcatctttcctgatgtttctttagcttcatttgcaagaaacttgatgtttttctgatctaatcacttgctaagttaggccccactttccaattttctttctagctgattgtcgtcttctggagtcttccagctaatactgtgattccattcctgtctctaccatctctaacatacctggctgccatattcctttatattatatggaaataataatatgaggtatatctccattctggaattgagagtacatctttgatattctctcttcaaaaaacgtaaaatggtgatttttcctcattttatagtgagatatttagtcattataatttgttttctggtgtttattttttattgctaatgatgtgtttggcactaagatgttaaaagtgtatatgtatgatttttattgcaggcattataaactcctttggatttttatccaaaaatgaattcaggccgggtcagtggctcacgccggaatctcagcactttgggaggccgaggcaggcagatcacctgaggtcaggagtttgagaccagcctggccaacgtggtgaaaccctgtctctactacaaatacaaaagttagctggttgcggtggcgagtgcctgtaatcccaactactagggaggct

SEQ ID NO: 60383 - DNA, 1026 bp, Homo sapiens
tgtttcaagagaagtggaataagattgaaggagtagcagtcttaatgtttcaactcttcattgttttttttttaattttagaaaacagtgtctgtgatgtaagcatctgtgcatgtaaattgttaaatttgaacactagtaccaagtcatttgtcttacgcttctcataatcacattttaactttttatatttttagagagatggttattatgtattgtttataatttaatggtatttctattttacaatcagtattttggaatgagttcacttagatccttagatccttaagacagtcttaattgaactgttttctagttgtgcaggaagtatttaaaatttttggtgtaacatacttggggttttggtctgtaattcacagaaaatttatatattctaatttgtgtctattaagcatctgttaccttattctgttgtgcagaattgtttggggggtagtgcatcattttgttatgatgctggaaagagtgaagatggaaataagctgggcatttgggatgctataccaggcactagatataactcattgtcaatttgataattacaaaaccaatttttgtggggttgtgtgtgtgtgtgttttgttttttttttttttttttttttttttaagacagtctcactctgtacctaggctggagtgcagtggcacgatctcgatctcacctcattgcaacctccaccccctggcaaaatcagttatttggttatttggggcttgcaaatatattctatgaacagtccttttcaggatttgtatgatgctttataattttcaaagggtttctatattgtttctcatctgactccacagtagctctttgaaataggctgatcagtattattcctgttgtactgatgaaattataaagtatttagcctactgttgttgaaactggaaaggaagtctcttcacataaaattttatctctgccttcaaattatactccaagtataactaattctcactattttatcattttagttctggctaccaccttttc

SEQ ID NO: 60384 - DNA, 1045 bp, Homo sapiens
gattttttgtaaaattgtttcgcattgtgttccctttattcgcttgtattaatatttgcgtagtggattaaacaaatacttggtgttgactgtcagtcttagaggactgactagaagtagttttcatttggggctcaggaaatacctactttatatttctagctaattaggaaagtcatttttcagttaggttggtgttttggttcaggcactcgctagctagatgacctaacatgctacttaatttctgagtgtttgtgtccatccctgtaggattgttgcggggttaaatgaaattgtgtatatttgtaaagcatttacctcagtgcccagactgtgacagagtagattattaggcttgctcttatttctgtgattaaatttagtgtcagattagcaacctatagctacttctaaagctgctgctgctttctttgtttagggttaggaagaaacatgctggacagtttgccaaatgagagttacatgatgtggcttgtgggaacattctaacttggaacttgcccatttccaggactttgtggttcagagatttttggggatagatgtaagggttaaaaaaacagaaaacggccaggcgcggtggctcacgcctgtaatgccagcactttgggaggccaaggcgggcagatcacctgagctcaggagtttgagaccagcctgtgcaacatagtaaaaccctgtctctactaaaaatacaaaaattagctggggcgtggtggtgcatacctgtaatcccagctactcgagaggccgaagcaggagaatcgcttaaacccaggattgcaccactgcactccagcctgggtgacagagtgagactctgtctcaaaaaaaaaaaaaaaaaaaatggtagtgcaagtttagagtaatggttcccaaattaggctgcttattaggctcccctgagaagcttttaaagttacagcttccttgactccctccccattacccagaatcaaagcaatagttgatggagcctagaaaactgaatttttaggccgggcacagtgggtcatgcacg

SEQ ID NO: 60385 - DNA, 1061 bp, Homo sapiens
agataatacctacttaggtactacatttccaccataacacctcgtctctagcattaagctgtcctgagacacttcagtggtaaatttcatttagcttttatctcagttggaaaaatagcctttctccaagttagtagagtatacttaggctgatcttaggtgttaacaaaagatttcctaaagtttactcttaggagtatttgcattttaaaggaaatttagaatgtatgtggttgatatatttagatagtgttagtctttctgtgtaggctttaattacttctgactttgtatgacagtgccaaaagagcatgacctactattggcgtcttcctaaaggttctgacctgttctgtattcatagaactaatcttttctggtagctaaaaaagcaatgctagtgaattatgttacattggagtactttggttacgatgaagagaggatcatgatgaaatatttctgcatttaataatttgttctaacttcatagaattgtgtgcctgttgattgtgaaaagattcattgtaatggaagaaagctggagaagttggggtacagagtgacaagctgctagaagtactgttctctgctgccttcagccttttctgtggttattggggctggtttctgttctgctgcctgctggctccttgtcagtcttctaagcattcatatttaatatgcacggatacctgaatcgcagttatgatactttgatttttttttaaagaataatgagttaagtcccaaagtagtactttctaaaactaaaataattttatatttttgtgtaattatgagagttccttttttatatagctgttaaataaatgccagtgttaattattttggaaaaacagaatgaactctcccctttgagtttgaccaattttatttatttaaacatgtaaattttgtgaactttgctgctttgttcatattgcataggttttgatggaaagttgaagagttatctcgttttttattcaagcctaaatgtaatttcagttttgatttgtcttttttttttttaacccaaatctattaagggtatttta

SEQ ID NO: 60386 - DNA, 1271 bp, Homo sapiens
tgttatttaaaagggggtttagggtattctatctatataagtagaatactgtacagcaagatgaaatcaaaataagtagaagaacccatcagacttcttaggaaatatcctctatcataccacctacgttgttcttaagtaaccattgtacttaggtaattctctttgatcttttgtgacatcactagctttcttgagtctttgaatctgcatgtagtttccattataagcagacccttatctgagggtaaatcttggccattgccttttttcctgtcatactcttacttcgtccatgaacttttttagtgcctgctgcttacatgcaaagcagttagtcacctctcctacctttgacttctaatagaaaagacttccaaatccacatctacttaacaccttttcttctgaattcctagttctgtattaatcggaccattttcacttggatatctaaaaccttatagtcatcatctgtctcagttcacctttcctcttaccatttagttgtttctattgattgaaataatattcctaactcatttctgcttttatccaccctggttctaactgataattcctggaccactggagcatttaaattgctctttgcacttctagtttttgttcataatagtgtagcctccatgccactcctagatcacttactaaaaaaaataccagttggattatgttactttgttgctgaaaaatctagaattaaggaatgatattgaaatactaacattagacttctgtggtgaacctttttgtgtcattcatcaaagtgtttttgcaagtctggatttttataccctgctttttcttaaagcaagagaaacttttttctgtggtcactgacatatacagattttcataaaacttgagttactcttaagcaatttttagatagagttggacctgttaggaaaagagtcttgatgtcatctttatcatcttataagtgagcaccttccctgagactctttaacttcttgaaaaaagttgatgctgttttatttgaaaaatcgtcaagactattaaaaggcaaataggggaaactgttaagaaattgaaatacagttgcaaaaacatactgataacagtgacttttagttctgtatcatttgagttcttgtgccttttttctgtgcacattgtacttctatttttgtccagtaaaactttaagaaaacccagaagttgctacaaatgataaagataaggttttgtttctctcaaaaaggttgttatatgctgctgttccagga

SEQ ID NO: 60387 - DNA, 1134 bp, Homo sapiens
cttaaaggaattctgggacctgtggtagagacagaaaagtaaacaaatagtgcctgttaaagttgctttggagggtgctcaacacaggactcccagcttgggtgaggaagatagtaaagtataactaatgcttcccaacaggctgactaaaacttgggcagtaaaagagctctggacttcatagcatacaaaggaatagagcttgcaacgatgtagaagtgtaaaatagtgtagcacggttagagaactgccagaattttgacagtgtggaaaaatggcaggagctaaagttacagaggtaagtgggaggcatatcataagaagctctatgtcatgccaaggaatattaattatacatatataaggcagtggagaggtattgaaggatataatcagtaaaataacatcatatttgcaatttaaaaaattatctcgggtagcagtgtggaaatataggaaagaatgaacaatgagaaggctgacaaaggtgtaggttgagtccaactgattttgctttgagtatttgagtgatcatcatgtcttaattgacgttgaaagaccttcagattttatttttgtttcttgttgaagcagtgtggatagtacatttccatagaaaattgagacattaggataatatttggataaaaatagatagtattagtgtccatttagaaaattatactattggccaggcacggtggctcgctcctgtaatcctagcacttgggaggccaaggcgggtggatcacttgaggccaagatggtgaaaccccatctctactaaagatacaaaagttatcctggcatggtggcaagcacctgtaatcccagctacttgggaggctgaggcaggagaattacttgaacctgggaggcggaggttgcagtgagccaagatcaccccattgcattccagcctgggtgacagagcaagactgtctcaaaaaagaaaagaaaatcatgttaattgttttaacacagaatttaatatatgggattggttaagcagatactgaaaaaaaacaaaggaaccctcaggtaacacatacagtaatcaccactcaaggctattgaacaaccggatgaatttggggttttagaacccagtagcatagaggaggagccccacag

SEQ ID NO: 60388 - DNA, 1052 bp, Homo sapiens
cttaatagaaaaagacacttagaatttcataatttcgtatctgcttctgcattcaatctgttatgatacatccagtgttttgttgagcctctgggtaaacttcactgtatgcttgtggtaaaatgaggaagaaaaaaataatcatgttagtattattatgaaaatagttctggtcttgtgaaaggctgttggggttccccaaggtttcctggataacacttggagagctgctttagagcatatattggcaaccatcccaggccaaatctagaaaactttaaatgtttgcaggcctttcgtttaagtcctcaatattagttactctttttgtaaagttaagaaatttgacacctgctattgcacatcggcattgtaaaaattatcccataatttgaagggtttctttttccttaactccttgaggatggcagtggggtggagaaaataaagttattggtatgtgattgtatgctctaccctggaattctgttaagtgtaaggtatcagcttggactaatctagaatttgataggcaaaatcaatgtagtgtggtagaccggtgctcgggtttgtgaactttctgtcctggaggttgtgccagaatgttaatcacttaaatagaatgtttagttcagctgacttttttttttccttaaagcacaacttctgtgaaagaaacagtatgtttatatattcaaatgcaaactccttatttcctccaggataagttggcaaaccatcacttggaagagcactggcctagaccatactgacctctggtgtcctctgtccactagtctcaaatctcattctacctcttcagttcagtaattccacataaccacttggcaagcaaaccaagccttccagataacatccgtagaagggatcagttgcataataatttatgtatagggaggagtaggtggtagggaagaacttcctgaatttggccctttgtgattgggttcctaaagcttgattgtaggcttctggaagctagtgggattgaaaattaactctccactgctttttgaggtgtgagggcgcag

SEQ ID NO: 60389 - DNA, 2141 bp, Homo sapiens
ctgtttatgtttacatattttggttccttttctcactgagtaacagttaatacaggcaagattgttctcttttataccatatataattagtattgtgccttagaatttagaactgatgatttcatgccatcatctagtcgagagtgcattccccacccccatgttactggatttcaacaattaaaattgtggtgggagattttgtcatgctttctaaaatcaaggtgatgttaatttcacagttttctttctgtgcctaacaatctaatttttattctgcttaattttgatattttataaagttctgttgtctttgaagattttcataaactaaggtcttataaatacttacacagataattgcattctagttcagagtacctttatctcataagtgttttcctgtatgtgtgctttgatgttgttgatatttcatgtgattaaatagtattaacattttctaattgtaaaaaatatatttttaagccttatgattctgcagatgactggtctgagcatattagctcttctgggaaaaagtactactacaattgtcgaacagaagtttcacaatgggaaaaaccaaaagagtggcttgaaaggtaattagcttttaatctaattaaacattatttctctagcttggttctactggttaacatcttacagcattaaacattctaatttagcttttttatagtgctgcccatctacactttttagttgcggtggttggttgccccttcgtgttttccatagtttgtctttacttttaaaaacaaaaaacctggctgggtgcagtggctcatgcctgtaatcccagaactttgggaggccaagacgggaggatcacttgagcccaggagtttgaggccagccctggcaacatagtgagaccctgcctctacaaaaagttagctgtgagtggtagcatgcacttgtagtcctagctactaagaggctgaggtgggaggatggcttgagcctaagaggccaaagctgcagtgagccatcatggtgccactacactctagcctgagcaacagagcaagatgctatctcaaaaaaaaaaaaaaaaaaaaaaaatctaggatagataggcagctgtccacaaaggacttttgaatagtcagtatagttaataaaatacctacatttatgcatctttaattttgatggaaattttaatagtttaataaggccgtaatgtttctttcacatgtagaattaaaattgctgagctttggttatggcgttagtggtataacaattggtataattttgccattagtgagacatgttagtgttctgtttgctacgttccatctcacacaccagttaaattatgaccatgttcactccttttgttttctgtataccatttgttaggcatttggccagagctgtttagtatggaaactcatgcccttaatgtaatttttatatgtttatctttttttttatttttagagaacagagacaaaaagaagcaaacaagatggcagtcaacagcttcccaaaagatagggattacagaagagaggtgatgcaagcaacagccactagtgggtttgccagtggaagtaagtattaattttttttctttgaaatgtatgtttgacttattcgtatttatttttcaaatctgtatccattgccatctacatatgtaaattaaaataaatagaaacatacggagattcttttatgttggatttattataccctccaccattttggtccctgaaaagggaaaagatacacggtcgagtagtacaggtatgtgtttcccactacacattatggctataatggagttgaattgcaaacagtaaaattttgttttggattggtttcccctgatccccccagacaggagcttcctctcccaccctacctgcctgcccttaagttgtgtcctattaaactggacacaaatctcaccggcttttagtctaataattgaatcatagctacacacagtgacaccagaatagctacttgtttttttatgttaccagtgagtaacttgtttatccttgtatgtagaaactaatttcaccatgatcacagatctgtgtaacatctctagtttgaatttccacacaattttaaaatgtctactagaaaacttacacctt

SEQ ID NO: 60390 - DNA, 1091 bp, Homo sapiens
attaaaaatgagaccgaggttttcctctagacataaacaagttgcacccagcttgtgggttttttgagcaaattgcaggggaggggatgcacagaaaatgagtgacagatggctgggtgtgatggctcacacctgtaatcccaacactttgggaggctgaggcaggcggatcacgaagtcaagagatcgagcccatcctggccaacatggtgaaaccccgtctctactaaaatacaaaagttatctaggtgtggtggtgaatgcctgtaatcccagccactcggaaggctgagacaggataatcgcttgaacccaggaggtggaggttgctgtgacctgagattgcaccactgtactccagcctgggtgacagagcaagactctgtctccaaaaaaaagaaaaaagaaaatgagtgatgagtgatagataagtataaaaataactttttaacttgtttttcttcatgatttcaaaagtaggccatattcgtaaataggtaaagtttttaaattccatgaccctggaacattttggaatatatacttttttttctgtatgcatataaatgtgtatacaaattacatatgtatgtatttgaaaaatgggattctgtgttgctgttttttacctgttcttttattcagcaatgtgtcaggaatatgtttttatgtctgtttataattctgcagttgttatattgattgcgtaggtataccttcattgacaaataatcccctatcaatgaatacttgggaggttttcagccttttcctactgtaaacaagattatgatttcatatctgcccacttctctgattactgccttcagttaaattcctagataggcaaatgatgagtcattgtgtctgtgcttgtgttgaaatgtagtcatgtatcacactttttttttagtttaggtgatgtttgaggaagaaccttagctgtgttgttgcttttttaaaaaattggtcaacttagtaataaagtgaataagccattcaagtatttaacttagtctatccaaaacatattggcagagtgttaccttgtgtttcggtgtattggtgtttgtgtagagtatggcttaaag

SEQ ID NO: 60391 - DNA, 2992 bp, Homo sapiens
atcccagccacgtgggaggctgaggcaggcagaggtttcagtgaggcgagattcatgccattgcactccagtgagactctctcaaaaaaaaaaaaataaaatattttatcaaatgttaatattctccacaacttgatactgaaaattatatggataaaatttttaatttgcgtttaactgctactaatttttatttttgcaaacctgtgctttatatgttgatggctctatgtttagagaaaccttacttagggtttctcaacagaagcactaatgacactttgggtgaagtaattgttatggaaggctttcctgttttgtaggttgttgagcaccataactggcctctcctcactagatgccagtagcatacctcccctctctccagtcaggacaagcaaagcaccaccctctgggagggtgacaaacaggcactgctttaactgtgtttatctagagttgtaagtatagaaagctgttacagctatagcgtcccctgttcctgtaatgctgctgccctttttgtttttttaattcaaaaatgttagaagtatcatccttaattttcattggagtacatacgcttgatacattttgactagcgatatagaactgaaaggaagttttcttggttgaggaaataaaaattgtatacagggttgggcatgatattattcctgctatgtctgtctctaaaggtttctgtcttagttgtacctcattgcaggtagaaactgtagaataaaactttttaaattttatgttcatgcaagttgatagcttacttatatattactatcatacaacagatgtttgtattctgttcatttttgtagatttttatattgtatcatttataacacggaattttatgtagtaagtcattgtcagaagacctcgtgctttgatgtgattgactttttgggtggtattccggtaccttttgttgtggtgtaccatgtagtggttgtgtactgacagctttgaaactgacttctagtttgaatgttcctccttcgttgttttgtcttggtctttacaattggaggagctgtgaattgaaaaaaactatacaataatcaacagagagggcatcctttagtaaaattattgtacatcacatgcttggattttaggtcgtttctctccttggaggttattttaattctttagttattgttgggaatattgtaatttagattggacactttgaatgaacttcaacatgatagttgaaattttcgttctttttgtactgttttgtggaatcatggtgttagaatttaaattgatagattttgaactgttttcagtatttctgagcttaaagtatttttgtggctttaaattgaaagaggatttgtttttaatacacctagtgataagtagattgttctgactatgctgcgggtgttggacttctattttcagatagcattatgcatcatgattttattaactctctggtatttgtaacattaaaaatactacagattggtttacttactgtgttcacagttcatcataacttcagtcatcttaaaatgatttcatttaagccttcttataaactgctttagaggcaactaattgtagcttagtattcagaaagaccaggctaataaagcctaatattcctttgcagttgaaccactgtgaataattcagttattaaaatctgtgacctgtagtgtaaaagaacgaagcatttactttttctgcctttaaaacattttttaaaattttataagatattataactccatatgttgattttttttttttgtgttttgtttgaactacagtgtgattctaaggaatccttaaaaaatgtgtagcacccttgaaatatgagtatagatgaatatttatagttgagcaaaaactcctcctcttccagtattgcatatttacatgctagtggtaaaactgcagacactaactgggtttgcagttttataaaagaatatgtaagtacaagtatgttgctaaattagctgatgttaaaggtaggattctaatgtaatcttttttcttcccccttctgtcattccaacatctgttttttcgaactgtgaactaaagtggaagacaagcattccagtgatgccagtagtttgctcccacagaatattttgtctcaaacaagcagacacaatgacagagactacagactgccaagagcagagactcacagtagttctacgccagtacagcaccccatcaaaccagtggttcatccaactgctaccccaagcactgttccttctagtccatttacgctacagtctgatcaccagccaaagaaatcatttgatgctaatggagcatctactttatcaaaactgcctacacccacatcttctgtccctgcacagaaaacagaaagaaaaggtatgccattattactagatgctgcacgttgaactatagtttctaagtttcttctaagtttcttatatattacattatttcctttggctctgaattataaatttttaaaaaagtcttttagaatgtttctgtgtagagttaggtgtagagttagcaatatttagcttttttctttaatttataattatccagcctcagaactgtttcttgcctctgaattttaagtcaagtgcttaatttataacaataatggtttaagtaatttgttaaagtcaagtaactgtctcttcaattttctgtttttgtgatcattgtcttgacagtttagtttataaatcgtctcagttttctcttaatacttaatataaatagaggtattttaaaactaatgtctgtataacatttcattattggtttcagtttgtgattagaaaattaagttgtgggccataagataaggcgtgttaatgtctgaattggaccttaagtctgaagagtggaagttaaacgttgcaacccaaattgcgtttatccaactcagtgtcaataatcatagcatgtttaaaaagttacagaaaaatttaagaacaactacttg

SEQ ID NO: 60392 - DNA, 1046 bp, Homo sapiens
tagctgagctgtgtctaaagatgtcagtggttgatgctgtgtataagagcagagtctttgtctttcttaaccactgctctattcctagtgcttgacagataataggcagtgtgtaaatatttgttgtagatgcctatacaacagtgtgtaaatgttggatggatgcctatactacatgtgtgtaatggatgttgtataggcatccatgttctatgtgttaaaatatttgttgtagatggatgctacaagaacaggtgttgagagttgggagcacttgcactggtcatggtttttaaaaaagtatttggagaaaaagaagtttgtgtatgtgttgtgcatctgattaaagcataccagcaatggatttagatctgtttgatgccagtgtgtcatttgagagaaagaacctaaggtgaattcaagttttgtgcctgcatgagtagtcagaacggtagagaaagctgcagagctcttttatttttgcagagaacagtcttgatgttaggtagagtgaaacaagggagtgaggtgaccccatttaggtctatagttgtttgttagggtaacatttgaacatctatgtatgatcactttattggaccaccatacaacaagtagagaaagtctgatacaccaaaaaaatacaaaattgaattttatcagttggcacccaaatggccattttaaacctgctctaactctgccatcccttctagattggtgaaatgacaaaataggaaacgtgggtccttattgtttgctatgaccaagttgtcaggagagtttaatatccttattcagtaagttctctatttagtgatttagaattatgatttattagcagagataaatttgaaaacaaaacaaagtagccatagaattagacctatttagtaatctcaagctagctctccgtatgaacatgtgtaaataatcacatactcacatgctggtgccatatgtaaagggcaggacagactagtcgttttaatatgaggtgtgagtcagtcacttgaagtaaaatttccttctgtttttatgctatc

SEQ ID NO: 60393 - DNA, 2779 bp, Homo sapiens
tgagggtgtgtacctaaaggggaattactgggtcatgtagtgttcgtatcttcaacttttctaaataatgccaaattactttccagtgtggttatatcaatttattatccatcagaaatgttgagtaaatgttctcattactctttgccaacatttggtatgtctgactttaaaatttttgcattatggtgagtgtaaagggttatgttgctttattttacattgtcctgattctgaatgaagttgagcatcttttcttgaatttcctaggcattcaagttccttctttgaaataatgtcttctgtacatttttctattgggcagtttgtctattttgacgtatagaaattctttaaatagtctgattaccactactttgaatataattgttctgctttttgtaactttacacatctgcttggtgttatggatacctttctgtgttttcctctaagagttttaaagacttaaatacctacacaaaagttcagtctacctttaactggctttgttttaaatgtaagtttttatatttggcagggcatgtcctgctggcagtgttctttttcttcaggttatggaatcttcaggatttatgttactagcttgtcaaatagtattaacagtgctcttggggctttgattacagttacattaaatctatataaataattgaaacaacagctttcaaataattttccatgcgtattttatacatcctttatttctaaatactatgaggtgggttgtttttaatattaaagtgtcctttttaataatcttaaaatgaaacaaatagctcattgccttatatattgaattacaaaagggaagtatgtagttacaaaactcagttattaagtataaaagtctcttctcatcacatctttagcccattttgggtgtaaccaccttggtgtacctaccctgatttgtattaagaccagtgtcttattgaggtaggttgttactgtggccataaacatttttcaccttatttcatgagatataaattaaatcctgtagaattatattgtccttttatcctaatggaagcttatttgaatgtgtggttaataaataattatctttgagatagcattggtggtagacagattggtacttttcaaatcagatatgggtatgatttaccaggttttatggcttcaggttatctaacctttcttgttcagctttcttacctatgaaatagggtgagaaatgtctaaatcattattctagtcatgtgaatgtttactgagcatcttctgtgtgctccagtgtgtaagggttaaatgagattacttacgttaggtgcctggcacatgagaggtgttcctttgatgtttgttccaattttctctattcaggtaatttttcaggctgattatctttttatttagaatctacatcaggagacaaacccgtatcacattcttgcacaactccttccacgtcttctgcctctggactgaaccccacatctgcacctccaacatctgcttcagcggtccctgtttctcctgttccacagtcgccaatacctcccttacttcaggacccaaatcttcttagacaattgcttcctgctttgcaagccacgctgcagcttaataattctaatgtggacatatctaaaataaatgaaggtaaatcttcataacagttttttaaaaatttatttgcattgtgcaaagttatgtaagtagtaaaatccccagtttaggaatggtctttgttttcttttgaaatttatagttgaacacttttttttgttttgttttttgtttttggagtttggaaatttatatccactgtagtttaagaccattggtagtataattgagttagtggtgcttggatcttgtgtatatttttcaatacttgttatgtgtctggtagttactggaggtaagccattctatatacataatgtgtatggtgaaattttacattaaaacaatcgagcgtttgttgaaatcggtattaaaacttctggtatgtttctaaaaaacctgtataaataattactcagaatatttaaaatatgctaattactagaaaagtaggaattcaggtagctacttaaaatactttcaaaaaattctgagaagggaggagataggtactagataaaatgttgccatttttttcctggtgaattgcattatttaattccagccttgcttttcagtaatgctacttacgtttcagaatatttagtcagccactttgaaaaagtatgaataaaagtagatgtgttaatttggaaactattcagattcacacgttaattcctaaaagcactgcaaaattttctgttgaaaatgataaatttttaggccgaggcgggtggatcacctgaggtcaggagtttgaaaccagcctgaccaagatggtgaaacgctatctctaataaaaatacaaaagttaaccaggcgtgatggcacatgcctgtgaatcccagctactcgggaggctgaggtacgagaatcgcttgaacccaggagacggaggttgcagtgagctgagatggtgcctgtacactccaacctggctgacagagcaagaccccatctcaaaataaataaaaataaagtgatcaatttttatgtacattttcacataatatacttaaaagtagtgttaagtggttaagttcttatcctaaaaataaagctatctcaggctagttggtcattagtctgttcttactgtccttaatttttttgtatttttattttattctctaaccacgcagttctcttgtgtggtagg

SEQ ID NO: 60394 - DNA, 2089 bp, Homo sapiens
gatttattagggtggatcttgatataggatttgaatggccagcttgtctaaaagggcaatcacatgaaatagcagttgtttatccagttaattccatataacatactgaacactcacatatgaataggtttctgacataattggaagttcctgtgaacactcgttaaattttgtagagagactttgttcaggtgatcatcttaattagtgtaaaagaaactctgttggtttacctttattgtaaacccattaagtttctttttctctgcctcagatcatttcaaatttgggacccattgtattactcctatctagtaggcttttattttgagagttctaggttgaaatattccagtttcttgtgagttctcttccttgtcaggttgttactaatgccacataagcctcttgtttttatatgaatgtatgaaataatatgtttttagttcttacagcagctgtgacacaagcctcactgcagtctataattcataagtttcttactgctggaccatctgctttcaacataacgtctctgatttctcaagctgctcagctctctacacaaggtattcttactcatcttagatatctctagaatggcatcttgattttgttttggaattaatagcccttttttgtatttagttttttctttcatttttttttttagttttttaagagattagctacaataattttgttttttttgtaacactggcatatacagtagtatttttatttcctttctttttagatgaagcaagctttgacatttgtcttaaggtattgccatcaaatctgtaattatttaagacagtatttaattcagactttgttattaatgagtttttttatgccaaagctgaaagtaaactatgatgtgccatatatctttgtgaaacattgcatgtatttgaagagttgaagtttggttcagattgacgttagatgttttttgactggataatatggaaatgctcattttctgccttgaattagatatccctcttcatgaaggtatccaaatggagagagatacacataggagcaaatgggaagtgaaagggtcactttgtcagaaagctgataaacagcaggaatgccttgtctggaatggaagtataatggtgcaaagactcttgcaaccctctggctagcctcatgagcaggagactgcgtgggatacctgggcctaaatgtagaataagaaagaagaaataaggatggtgaggaggccttccatgtgagattaggttcaggcctagcttcctgttccagccacataaaggagagtgggccacactgggtgtgcttacctctgaacacacagctcacttagtcagtgtggcccagtgagaaggtcagattctgatttattccaataagtgttctctgggtaatatgggggtgggggggtttagagtaatacaaatatctttgccacatatattacaaaggactttagttttttgttttgttttgtttttctttaaaattaattgcttccctcttttacagcccagccatctaatcagtctccgatgtctttaacatctgatgcgtcatccccaagatcatatgtttctccaagaataagcacacctcaaactaacacagtccctatcaaacctttgatcagtactcctcctgtttcatcacagccaaaggtatgtcacctttgagggacattcggaaaagaaactacttacttttggaaagtcaataacattttagaatctgttatagaaaaagccctctgagaatgaggtgtagtggtggaatgaatgacaggtatgatagtagatgcagcctagaatttctcagttcactgagggatagaggggggctttgaatctgtgctactttaataaaccatctgagtctgttccctaatggttttgggatttgtcacatggagagtgagataaagaggatatactgagtcttaatatttgtagaattttcaaactccaaaagacatgaatgaacatgttttccagtgacttttccatatttgtatttcaaaaatgaggcagtttctgtgctaagaacttaatgtatgtttagctttcacatcgtgagaatc

SEQ ID NO: 60395 - DNA, 1089 bp, Homo sapiens
atgtttcaagacgattacctagattttggggggagagatgtggattagatttggagaccatctcaccagattttgacatttcaggttagtactccagtagttaagcaaggaccagtgtcacagtcagccacacagcagcctgtaactgctgacaagcagcaaggtcatgaacctgtctctcctcgaagtcttcagcgctcaaggtaggttgatattgtatattgagaccacattgttttatttaatgatggtacactgcattgtttgaatattatatctgtaaaatagaacttaacctttaaactccatgaataccctaaagtaggcttacatgttgtaaaatttacaaagacaaacctgtatacaagaggtaggttattgtctctagtagtgaagcccgggttattttgaagaaagtggctctttaaaattttacacagtggaatatgacggggctaaagatttgtgatacttgtaccagaaaggcacacgattttacaatatttgttggaattaccttactttttaacctcctcatagcagttttggtttgagtatattgatgaaagccaaagtctggtatctaaaacttgggccaatgtttcccaactggtatatgtcaggctttcccaatagcttaactgtgaccctatacggatggctttttagatagttctatactgctgtattgtgttagcacttttctttgttcattaacaacacaactttaaatgacatttgttgaatgaatggttttcatttgattgattttcctgttttttatttcatgctatgaggtagcaaaataattcaactgttgtttttattgttgttttctaaacaagcatttcagaacttacacctccaaatgagagttgttcccttcaaaataatgaccttgggaagctgtctacttactccagcaatgttgccattgctctgaacatttttgggaaattcttcttttaaattgtttttagaggctgcagtattattttaaatatcctcagtgatgaaaactcttcatcctttgggagatttagtttttggaaataactgaaattcattcagagccaagtctggtgaagc

SEQ ID NO: 60396 - DNA, 2806 bp, Homo sapiens
tgcctattacagaattgaggacaaacttggcaatggctttatgtcctgtctgtgcaagtcacagagttacaggtcgattgaatcttgtcaagaaaccataaatatttagtaaataccaaatggagtttatagtacaacttgaaaaagtaagtttatttacagttactaaaatatctggaggtactctctgagtaacaacttgggttcttatagtcagattgctctgaaagtagttctaacaaacttcattttggcttgttacatcattcgacttttgggaaattattcattattgcatcttaggaaaacagtatatacagtcaaatatcaagccagcctgattatgcctaattcatgtgtacaggcaataaatattatagttcccagaagagaagagtaaaaacaggaaatatttttacgttcatgggaatctgggtaactggggtttgtgtgtttcaacttttggtttttggcttcatttttatgtacctacatctacattgagaattgctcttctaaatgattaatctcttacacctggttaattctactctttactgtatagtgggccagaaaacatgcagtataggtttatttcatgtataatagctactgctttctttattgtgatgatacggtttataaagtaatacattttaagttgttagagccaaaggaattattaagaaattgttagaaaaggctgggcgcggtggctaacgcctgtaatcccagcactttgggaggccaaggtgggcggatcacctgaggtcaggagttcaagaccagcctggccaacatggcaaaaccctgtctctactaaaaatataaaaattagccgggcgtaaggacaggtgcctgtaatcccagctactcaggaggctgaggcagggagaattgcttgaacccgggaggcggagattgcagtgagtcaagattgcacccctgccctctagcctgggcaacagagcaagactctgtctcaaaaaataaaataaaataaaaagttgtttgaaaactaaaacatcctttcatcatccttatactttaatagatattatgtattaaatgtttactttgtcttaactgtaaaccaatttatagttaaataattttttaaatttctttgccttaattagaaatcacttgttttaatttaaaaaattttaattataaaagctcgggttttctgtaatatttgtatatgtacacaggttctaatgtctgcttttttttttcaggatactatttttgagacaacaaattaaggaacttgaaaagctaaaaaatcagaattccttcatggtgtgaagatgtgaataattgcacatggttttgagaacaggaactgtaaatctgttgcccaatcttaacatttttgagctgcatttaagtagactttggaccgttaagctgggcaaaggaaatgacaaggggacggggtctgtgagagtcaattcaggggaaagatacaagattgatttgtaaaacccttgaaatgtagatttcttgtagatgtatccttcacgttgtaaatatgttttgtagagtgaagccatgggaagccatgtgtaacagagcttagacatccaaaactaatcaatgctgaggtggctaaatacctagccttttacatgtaaacctgtctgcaaaattagcttttttaaaaaaaaaaaaaaaaaaattgggggggttaatttatcattcagaaatcttgcattttcaaaaattcagtgcaagcgccaggcgatttgtgtctaaggatacgattttgaaccatatgggcagtgtacaaaatatgaaacaactgtttccacacttgcacctgatcaagagcagtgcttctccatttgttttgcagagaaatgtttttcatttcccgtgtgtttccatttccttctgaaattctgattttatccatttttttaaggctcctctttatctcctttcttaaggcactgttgctatggcacttttctataaccttttcattcctgtgtacagtagcttaaaattgcagtgattgagcataacctacttgtttgtataaattattgaaatccatttgcaccctgttaagaatggacttaaaagtactgctggacaggcatgtgtgctcaaagtacattgattgctcaaatataaggaaatggcccaatgaacgtggttgtgggaggggaaagaggaaacagagctagtcagatgtgaattgtatctgttgtaataaacatgttaaaacaaacaaaaattgttatttttcttttccttcggtcagtgcacattagcatttgaactacctggggattctttatcagaactgttcttgttgaatatttatacttaattgaaataattccttaagggaggttttgtttaaaacgtattaacaggaaattgtgtatgagatatttaatgaaataagaaattcaacaagaatgattaagtcacttcccaagtggttgtcatttgttaaaccctggtttacctgtcttgctattatgacatttcatttggaaggatgtttgtgttgtagctaactgttcaagtctggtgctgactgctgttcttagccatcacaaaacgctaaatttgtgtaattggagcttcctgctgttatctggaaatagcaggaaagcgcagctttgtatattgtttcctaaagtatattaaaataaaaaaagaaactattgctactataaaattaccttgactttttttttcctttgctgaaatattagtcacatagccttagcttcacactgccagtaatgtatcaaatcacaagggtttccgcatgaaaaaaatc

SEQ ID NO: 60397 - DNA, 1711 bp, Homo sapiens
tagtgaatttttttttttcttgagacagagtttcactcttgttgcccaggctggagtgcaatggcacgatctcggctcaccgcaacctctgcctcctgggttcaagcgattctcctgcctcggcgttccgagtagctgggattacaggcatgcaccaccacgcctggctaattttgtatttttagtagagatggggtttctccatgttggtcaggctggtcttgaactgccaacttcaggtgatctgcctgccttggcctcccaaagtgctgggattacaggcgtgagccaccgctcctggccagtagtgaatttttaaacacagaaaatctaaaattttgtggaaatattttaaatattgcaccttaatacaaggtatccagctcctaaccttaactagggaatatctattaaaataagcataatgttctggactagagtattccttatctagttggttatggatttgaacatgtaccttggtttagatactttgaaaatagaagtactgaatagcctctagggaacttgagtggcctttccctccccctgcccccccccccccccccccgttttaaaagatcagtagtctctattcaaacttttaaaatgtcgtggtattgtaacaatatatttgatgaaagaaggttacagactcccctgaagaaccagctttcctacgctttttatttttctaacttgtctaacctgattttaaaatgactgcaattccagactaaaaacatgcttcagccctgtttcaagacattatgcttcttttaacagtccaaattagtagttttatttttcttctaaatctttgtttcacacttgtaaaatcttgggaaggaggttcttaaaactttgccaggaattgttacccatttccaaaaacagtttattatgttcaaaaaccaccatatctttgagggactgtttgaaaggggagagggcaacgcgggaaataattcactctgcgcaccggaactattgtagttcaggacttccagctactgtatttagatgttgggtttgaatatacagatttcttttcaatacctgtaaatatggctatattcttgtatttgtacgggagtgtacaaaatgacactgaaaagtaataaatatgttttgactatattgtgcagttatttcagaactgtgttttgaaagtcttagaatgcataatttgcatttgagtaaggaaatttaaaatacagattactgctgagattttaatcagtcggtgtgtttcaatagtctctgaaacattttagtgaaaattatgacgtaaaattgggattctttaggtcctgctctaatttgcggtaccctccttttcctgatcacgacctttgatagtgccctaaagtgcagcctgtctagaagatctcatccaggctcttggctctaaaaaccccttcatgtgctactttacatcccgattatctccagccctgatctctttgagttcccaaaaacagtccacttagatgctttccttaacacggcatgcactccaaaaagaactcacggtttgtgcctcagattattctcttttagttttttagtaattgacaccatcattgttaaagttgcccaaaacccaaatcaagtcatccttcttttctaacactcgatatttaatccatcaagacccacaagctctttgaaaatgtttccttaatgttcacctctctagtccaatcca

SEQ ID NO: 60398 - DNA, 1207 bp, Homo sapiens
cggggcgtcaatggatcgccactccagctacatcttcatctggctgcagctggagctctgcgccatggccgtgctgctcaccaaaggtgggtgccgggggcgcacggggcccggggtcccgtcctcgccgcggggctttggagccggctgcagaggctttgttagcggcaggcgaggctccctcctgcgccggagccgcaggtcgcgacaagttgctgtgttcttagaagtcgcggcggtggcctggcgcgtggatgcggactccgatctaagggcaggcgctgatcagagggtcctcctggctctgcctgcggggagcggcgcgtttgcagcccagcggggagcggggccggagtctcggcctcgacgccgccgcttccgcaccctgggggctcgggcggccgggaggaatcgcagatcctggcctgtagctgccgcgtgccctcagcgtgtctgtgtgagtgcctcagggtgtatttctgtgagtgtgtctctgagtctcagtatccctaaatgcatttttgtgtctctgagtgtcgttgtgtttctgaaagtgtgtctgaacctctgtatcactcagcgtatctctgtgtctctttgaatgtatctctgaatgcatttctgtgtctctttctgagtctttgtgtctctgaatgtgtgagtctctgtatctctgatcttgagtgtgtctttctgaatgcatttctgtgtctgtctctaagtgtctttgtatctctgaatgtgcatctgagtctctgtgtgagtgtgtctctgcgtacatctctctgtgtgcgagcgagtgtgtgggtctccctgagagtttaggtgtccgaggtgtgcagaagtgtgtgttgtgttgcttttcagcagccgggaggagtaggctctgtcagcgtctcactgccactcacctcatattttacaaacaggaccaaaaaaaaaaaaaaggcagcgggtcagtttcttctttcctctgcaggctttcaccttttagaaagaaataacccgaactgtctccgaatttcaaggttctcctcacctccctgctgtgaaatctacctactgttctgtgaacagataatttttttaagtaggaagcagtttagtctttgcagccccctacttctctttaattgctatgtagcaggcatgaggttaaagcataagctagcccagcgaggatgatgtgctacagtatttatttatt

SEQ ID NO: 60399 - DNA, 1423 bp, Homo sapiens
tttcctgcagtgtttccagggggggatggtggtgcactcggggaggcgggaagaggaagaagaaaatgtgcaaagtaagtcacttttactgctggaattcgactttgcctttccctctcttggaaagaatttttataagctgggggctgaaagtgagtctgtcttcatctagctgtggctcgacctctgaaagcctcctgatgtttgcctgataactcagctctatgggtgctcatgacccgcctctccctggagaatttactcggggattcacctttgcacgcaggaggctggaaggtggtctcccctcctctgtctgctgtttttaggaagaaagaaaaatcagtggctcttctatgataaattatgaaattttgtgttgaccagcaccccaccccccaaaaaaatcttagctctagagccttttaaaatatgcctgttatagaacttgttgtataaatcttgggaaaatggcttttctacattgtggacttcagatcacctgcttctaactatgtaagaacccactttttaggctggcaggaaggcctgatgcctcagtgctccacagggctccctgtgcagtgcctcagcccctccagtcccctaagtccctggccctggacggaggtggctgccttggacgacacagcggacactaggaagggccgcgtttgctgccactcgctcacgtgctaactcctccgcgccgccggtgccccctgcaggtgagtggcggctgtactgcgtgcgtggagaggtgcccgtggaagggaatttgctggaagtggcctgtcactgtagcagcctgaggtccagaacttccatggtggtgcttaacgtcaacaaggccctcatctacctgtggcacggatgcaaagcccaggcccacacgaaggaggtcggaaggaccgctgcgaacaagatcaaggaacagtgagtgttgtgtctgcggcgagtccccccacacaccgggcttcccagagggacggggcaggctcaggggtaccaagactcccagcagatcccagggtgctgaaagtgactgcagcaaaggatggctgggaacgtggtcaggggcctctgacattccgagcagagaggacacacatctcagtccagacctccgacttgggggccgctctgaggatttatctggctgggtgagaggctggtgaggagccagggagtgactcttggaagcactctgggttctttcttcatagttgccgttcagcttttggatgagaagcctgggggcctttgatatttaaagggagcacatttcaaatttgtggagttttcgtttgccagaacagcagagtgttaaaaagctaaagaagagtgtgggaaaccgccatctgtgtcagacgataagatatcccccattctggagagcagcccccgatggagagggatcgga

SEQ ID NO: 60400 - DNA, 1011 bp, Homo sapiens
ttacaaccccatggccttatcatcccagggcctgcatcgtgcctgggagggactgctgcccagatccaaggccacctaaagctactggcctcacaaccccatggccttataaccccagggcctgcatcatgcttggcagggactgctgcccagatccaaggcttgcaaacctgtctctttaacattcagatgagctctgcctgagtctcctctgctctgtagagtaccagcaattaagagttaacttgctgagtagcagcaattaagaattaactctgggattctttgaaaacaggacaatgccatgtgcaaatctctttattctcctggatgaatgattaacgatagcaggagggaagacagcagagacattcttgccagaaatagatccacactcacccagccttccacagttccaagaaccaatcacatttcctaaaacaatattttctactatggactatattttagaaatggtactggcaagagttgcattttaatttattcctaatagccatttcaactacccctttatttttttgtaaaggccatgaatgaatatgcttttatcatgccttcaaaatcatcctcagagttttgagtcttaatctctctcatttgagcattttacctgttaccaatccagtggatggaaaatcattttatttttatttgtatcatttttttgagacaggggtctcactctgtcacccaggctggagtgcagtggcactatcaccactcactgcagccttgacctcccaggctcaatcagtcctccttcctcagcctcctgggtagctgggacttcaggcatgcaccactacaggcatgagccatggtccagctctggaaaatcattttagatatgaaatactgccacaaaatggcaattggttatgcaaaatgggcacagagattgataactcacagtgagaaatgctttctctcagtgctccctgactaccagctccaggaaacatttcctctttaaggaaaggtgtcctagag

SEQ ID NO: 60401 - DNA, 1024 bp, Homo sapiens
gctggtcttgaaatcctgacctcaaacagtcctcccagagtgttgggattacaggcatgagccattcacctggcctcaccaaatattttgaagaaattactctgttgcacacttggagtgatctgccaccccctccagatgacagatctttttctcagggcaccaagagggcccctcagatcccttttctccctgtgggaagttctgggtcaggagctggaaggaaggtggtttttctcttctcctgggcgtgaccagccttccctccaggtgccaacggtttctcccctgccctaggtccgaggctctttgccactggtccttgcaggcccggggaaagtgagccagacatttgcttctcctcgggtgtctcagctgctgacctgtccctctgccattctgtgtttgcagtgggaagtcgccagaagggagagcactcggtgagggcagccggcaaagagaagtgcgtctacttcttctggcaaggccggcactccaccgtgagtgagaagggcacgtcggcgctgatgacggtggagctggacgaggaaaggggggcccaggtgagtcctggggagctctgcaccccggggactgagaggagcatcctctcctgggagccgatggcactcggcctggtccctcccaacatgattctgataatggaagaccacgtcacccaaagcacttcagtcctggtctggcttctgcaggtctcaggctgtgcctcccatttctttcctcctcccactttttgtaagatgatcctggagaaaatgttgtatctgcaaataggaaatccacatgacaagtgcagatggccaatgggtggctttgaaaggtttccacctaaccaatcaaggcactgtaagtaaaacaaagagatgccatcatccacttctcacagtggtagtgattttttaaagaatggatccagggccagctggcaaggcctcggtaggatgaggatgctatgttttgggtgagaagtgtaacttgaacagccatcctgaaattttgtcac

SEQ ID NO: 60402 - DNA, 1068 bp, Homo sapiens
tttttcagattgcaggcctctgctcaccaaaaggccttagccaaggaccagacaaatgagggcaaagagcttgctgagcaaggagaacctgattcctccactctaagcttggccgaaaagttggccttgtttaacaaattgtcccagccagtctcaaaagcgatttctacccggaacagaatagacacgagacagaggagaatgaacgctcgctatcaaactcagccagtcacactgggagaggtggagcaggtgggtgtgctatagtccgattgcagtttgtgtgtgtgtgttcttaaattatagcactgcagtattcctctgaggtcaatgatgtaattaaggtgctctaccaggaaactgctacctgtaggtgatttggtaatagctttcttcctaaaaatgagaattctaccaagtatgttgctctttttttgttttcataccttgcttgctgaaatatctagaatgagtccattttggagagaaaaaaatagtatgcccaactgtgtttcacccagaggattttgtttaatgagacgtattatataactatgtccaggaatggttttccactaagagaaacagtgaaactgcatcaaatcgagtatttcagcttctgtcaattcataaaccaggatttatatagatgatatttttcaagcagctttttaatttttaactgtgtccttccaggtgcagagtggaaagctcattcctttctcacctgccgtgaacacatcagtgtctaccgtagcatccacggttgctccaatgtatgccggagatcttcgcacaaagccacctcttgaccacaatgcaagtgccactgactataagttttcttcttcaatagaaaattcggactctccagttagaagcattctgaaatcgcaagcttggcagcctttggtagagggtagcgagaacaagggaatgttgagagaatatggagagacagaaagcaagagagctttgacaggtcgagacagtgggatggagaagtatgggtcctttgaggaagcagaagcatcctaccccatcctgaaccgagccagggaaggagac

SEQ ID NO: 60403 - DNA, 1671 bp, Homo sapiens
ttcaaagtgagcctgtgtcccaagacgccaaaccaactggtcacaacagggaagcctcgaaaaagcgcaaggtccgtacccgctctctgtcagatttcacaggcccccctcagctccaggccttgaagtataaggacccagcttccaggagagagctggagctgcccagctccaagaccgaagggccttatggggagatcagcatgctggacacaaaagtctctgtcgcccagctccgaagtgcgttcctggcatctgccaacgcctgcaggagacctgaactgtaggtgatgcttcacacgccctccagctgtgtcacttgcacgtccctggcagaatgattcactcctcgacctgtgttgtgttctgcattgaatcatattagcttagctcacaagtgcgtgcagggcgactatgcggaaaatggctcaaaaactaccactctgcttctgcctactaatggggaactagtggattgggtgtctggaatgtctccttccttacgtgcatggtagaggcatgaagaggggtttggtggtgtctgtcccttgactcacggagatgcataatcctttgccatcttctctttctctgtcttcgtttgccttccttatactctctgccctttgattctcaaagcaaatcacgggtggagaggtcggctgaaggacctggcttgcccaccggtgtggaacgggagagagggtcccggaaaccaagacgctatttttctcctggtgaaagtagaaaaacttccgagagatttagaacccaacctataacttcagcagaacgaaaggaatcggataggtaggcatgcgtatgcgcagtttcctcatccaggaacgtggcaatgacacaggagttttaccacactgacggtcttgacgctatttatataggatgttggcgattccataattgttccatctaacctataagcgttatttatttggcttatttaaaagtctttttaaagaatattagcctttacagcggtattatgatacatacacaattttacattgcattcagatgataagaagtaagaaacattatttttctttatttaatggttttaatgttttttaccccttgttaaattagactccagattgcatattcaccagattttacagtgaaaataactgaggaattttatattcattttataaatgtccatctacttgttgtatttgagttttatactgaagtgtcatatactattgcatagaaatggtaagatttgtctggaaaattgtcatcagtggtgtttaacaagttgttcttgtgcctggtctctctccacggggtgtgtacttggctgggattgtgtgcacacacgctccacagtgttgcttcacaactgtatgtgtgttttcacaactagaattgctaccaggaggttatttcttaaaagaatttaattgcatttttatttttactttcagtatgatgttttatttcgatcttctgctcccacctgctaatgtattattgttatttgctaatgtctttcctaggtgcacttcacattcagaaacgccaactgtcgatggcaagtacctgtttcccttttttttcttctttattatctcatctagactggatttaataataaggtttttggctttttgagagagtaagatgatggagcataacagtgtctcc

SEQ ID NO: 60404 - DNA, 1014 bp, Homo sapiens
acagcgtttggtcaataggtgtctgtatgccaggaaccttcccccacagtccgtgttctgggcgtgtacatgaggaaagcttactgattcaagggaccaggctcattatgccctaatgcatgctggtggtggatattaacgcatttttctgtggcttctgggtatttatttagtcagaagggacccattctcccccaggatagcatctgacccctgccagcttttacaggggtagagttagttttgcacctcctgggcatacatatgcaaattggaaactcaactcaggatcatctgacaagtagttgacattagacaccaaaatgctttttcacaagttattctctctcaggtcagtttccattcactggtaatctgtgatctacgcatgctttcctcctgtgaggccgttactgcactttgcaacttaaatcctttttctttcttaaagagttaaagttagagaaaaattggtgaaagaggaaagtgctcgaaacagccctgaactcgcctcagagtccgtaactcagaggagacaccagccagcgccagtccattacgtgtcatttcagtctgagcactcagcctttgatagggtccccagcaaggcagcaggctctacacgacagccaatccgtggctatgtccaacccgcagataccggtcacaccgccaagctagtgacgccagaaaccccagaaaatgcatctgagtgtagctgggtagcatcagccacccagaatgtccccaaacctcccagcttgacggttctagaaggtgacggaagggatagcccagttctccatgtctgcgagtcaaaagcagaagaagaagaaggggaaggagaaggagaagaaaaagaagaagatgtgtgcttcactgaagctctcgagcaaagcaagaaaaccctactggctttggagggtgatgggctagtgagaagcccagaagatccctctagaaatgaggactttggtaagcctgctgtgagcacagtcaccttagagcatcaga

SEQ ID NO: 60405 - DNA, 1558 bp, Homo sapiens
gtacccgcacgccggccctctggggcttgtgtgcatgagtgttgcttcctcctgcctgaccacacatcagctaacacccactctcctcttgccttctttaataccagtgcacttgaaaatcacgtggaagttactttctaatcatttgcttttcccctccacatgccctaatccatgctaatagtatctctccttccccctctttttcaatctttgtcaatctttcttgattgacaaaccttttacttgaccttttgcttttcccttctcaccaactcacataggactggccagtgaggggcagtagtgagcacccagccaggccctgggctcctttccatagctggactcgctagccggcgtcccatctgctcagcttcccactgctcccagcccttccagcctccttgctttcatatctcctcatctctaaaccagtagttaattttcaacagttaaatttagggcatgtggttttaaaagcaaacaaaaccccctatcatttcatttttaagactgggggcagggagaggcggaaggagtcagaatgagtaagtcatggaaggacaaagctccacacacagagtttctgacagtcactttgttcttggctgaggacaacattcagattgtctctgatcaggagcacgcattccacaggagaactggaaccgcgcttcagtctccttttgattaacaaacgttttaagtatgaaaacctccaacactggctcatctctgggaaaaataacaactaagaatgttttctttccctgagttgttcatagttaccacctctatgtgcgtctgtgtggattgtcctttaatgacacatatatagatacactgcctcgtacgttaaaaaaaatatataggagtttttatcaaatttagcagggtgcacttgtcattaaataaactattcttttccatacagtgcacatcataaataattacttttgccaattaagcttaagtaaacagtctaaattcctctccccgcaagaaatcccttttcccactccaaaagccctctttgctttttaaagctgagccctaatcagttttccattctcaagtagttggaattgtgtctcctttcccactacatggtacttcaaaaaccaaaaataagaactagataacactattaaacatttactctttgctaagcactaagccacgtgctttgcaaatatcacattacattatgtcactattatttccatttaaaaggtaaagcaactgaggcttactaagggcaggtgagttgcccaacactacacagctcaacctgactgagccaggatctgagcagaggtctcttccaaccccacagccagagctcttggtttctttgttttgcagtaatggaaaaaggtctgtagcttttgaaaaggatgtcagttttgctctcagatatttgaataactttagaaacaactggagcaatctctctttatttttattttatttttgttttttagggacagagcctctctctgttgcctatgctggagtgtagctgtacaatcatagctcactgcagcctcaaact

SEQ ID NO: 60406 - DNA, 1040 bp, Homo sapiens
agtaggttgtgaaaattttctcccattttgtgggttgcctgttcactctgatggtagtttcttttgctgtgcagaagctctttagtttaattagatcccatttgtcaattttggcttttgttgccattgcttttggtgttttagacatgaagtccttgcccatgcctatgtcttatgttcgttttaaaaacaaactgaacaggtgtcatggggacactttcatggactcctcacttcaggaccctcttactgggtttctcacacccctttcatagtttatcttttcgccgcttttctgtaatcatatcagagactgatgattgttggtgactgcttttgttgctgtgattagaatcacagagcagaagaagcaccactaaccagtggaagcatctcagtgcagagcacagaagtatgactgcaatatacacgaaatagaactagaatgcctagttctgtaagtatatcacacactaggacacaggtatgtgtgagaaccccgcattatgaagatcagccattagaaaaccactgtgtaaaaggatccactcaagataagagcagctgccatttggagaaattgaaaaaggtatgaaatcagaaagtcagatcacagaagagaatatatgtttacttccaaatttaaattttaaaagtgtgatggctatattaaaagtgcaatttacttaactgtcctgcttaaagctttggggtaattgtctaggtggatcttaagtgtatttctcagttcaaacaagcaatagtttcccaggtgaattgagaagggatcagaacctaaggtcagggagattcattctgaaaaaaaagattcatatgtgggaaacacccctatttttttcccactgggacacaggggtgcacacctggtcatctctaagtggcagtaacacatatgaagcagacccttgtggtactgaaatgtattaacccaaagacctgtcaccacatactcgagcatccagactgaaatacttagagagatcagcttccaacagaattaaaaggtagatcccaaggat

SEQ ID NO: 60407 - DNA, 1095 bp, Homo sapiens
ccacgccttacggggcttgcagaacgtgcaccattcacagcctttgtagatttcactgccgatctcagacttcttcaacagcccaggtaaataatcagtttaggcaaacacacctcggtgagaaactggtccttcacagcatgggcacccaggtgtgtgctgtgtgcagtagagtgtcattctgtgtgtaaatacatgtctttacttgaaatctgcacctctcatccatgtgaccttcttgtaggccgatcaaatgaagaggaggaaacttctgattcttctctagaaaagcaaactcgatccaaatactgcacagaaacctccggtgtccacggtgactcaccctatggttcgggtaccatggacacccacagtctggagtccaaagccgaaagaattgcaaggtacaaagcagaaagaaggcgacagctggcagagaagtatgggctgactctggatcccgaggccgactccgagtatttatcccgctataccaagtccaggaaggagcctgatgctgtcgagaagcggggaggaaaaagtgacaaacaggaagagtcaagcagagatgctagttctctgtaccccgggaccgagacgatggggctcaggacctgtgccggtgaatccaaggactatgccctccatgtgggtgacggctcttccgacccggaggtgctgctgaacatagaaaaccaaagacgaggtcaagagctgagtgccacccggcaggcccatgacctgtccccagcagccgagagttcctcgaccttctctttctctgggcgagactcctccttcactgaagtgccacggtcccccaagcacgcccacagctcctccctgcagcaggcagcctcccggagcccctcctttggtgacccacagctatcccctgaggcccgacccaggtaagcatccagtccacgctaagcaccctgaacgcaggacaataccttctttttgcctctctgtgtgatagggtttggctattctaagcattatgtggaagtcaaggcttattggagaaatatcatagtatatgattcttttttttttttttctgaagacagggtcccactctgttgcccaggc

SEQ ID NO: 60408 - DNA, 1050 bp, Homo sapiens
ttttacttcttagccaacctatatatgtgacatatacgtgagtcacatagctaggtgttacaatatatatacaacaaaacattctatttaaattattttaatgtatgtgattttaaatatattacatatatatttcatattaaacagtatgttgagtgagcatgtcttagctttgccttgataactctgtcatttttatgggcatcaaatattcagcttgaccttagaagaggatgatgcgtcctagggtgtgtccatgtgtgtgtgtgtgtgtgtgtgtgtgtgtgtctgcacactcttattcatttggcatctgcctcccctactaggaaacagtttccaagaaagcaggaacttggtcagttttgcatgtcactgtgacataggaatcaagaactgaaatttgcagttcaataaacacgttgcatgagtgaataaaatgagcgcacgactactaaatactatattttgttcttttttggttttcttccagttgcagaattaagacaaatctttgaaccaaagaagaaagaattcttagaaatgaaaaggtaagatctttatagtgggagttaggaagtagaagagagcttggcaaagcagtattccattttcctttagattcgatcgctgttgctcactctgcctcttgtggtgtatttcacagaaaagaaagaattgccaggcgcctggaagggattgaaaatgacactcagcccatcctcttgcagagctgcacaggattggtgactcaccgcctgctggaggaagacacccctcgatacatgagagccagcgaccctgccagcccccacatcggtgagcgtggagctgggtggcccattttccagcaggctgcctggctggttacgagttgccctttccacccagtggtatcagaacatgagatattccacagaagtgaattgtgtggatataatttttttagcacaaggtttcactctgtcacacaggctggaatgcaggagtatgatcatagctcgctgcagccttaactcctgggctcaagctcaagggttctcccgcccc

SEQ ID NO: 60409 - DNA, 2060 bp, Homo sapiens
gaccctgcttcatgctttacataaaaaatatcagtgcagtacaataaatcctaatatcagattactgtgttttcagtgtgacattttgtttattggaatctgtcttgtatgtcagtttattgtatattttacttgattttggactaacttgcatgtattatatatcacaattgcccgaacctcagaacgagtttacacgcttttgtcttaaaaatggaaatacaggctgggtgcgatggcttatgcctgtgatcctaacactttgggaggccgaagtgggtggattgcctgagttcaggagtttaagaccagcccgtgcaacatggtgaaaccctgcctctactaaaatacaaaaattagctgggcaaggtggcacacacctgtagtcccagctacttgggatgctgaggcacgagaatcgcttgaacccaggaggaaaataaaaaggaaatgcaatttctcaaatagtaaaggtttaataagccacccacctatgtgctgaaataaccttgaattgataaagatttaaacaaaaactaaatttggtcatctgtataagcatattatttagatatggggtatcatgccatgtcattgcaaattgtgtaggaaaagcatcaacttctgtttaaatttgcttggctgaaataaatgtgaggaagtcagtgtgggagtttatggcaaactctgaattattctgaaaatagtatatttcaaagaggcagatatctctaaacaaatctgaacaggatttggaaaacatttttgtacttaaatttgatattatgcctgatatttaggacttctaaccattactgcccaatgcttgatatatagcaataaatatttgtgaaatgaagaaattaatgaatggaacacacatacttgaatgagcagaaagactgaaagtacacagagctgaaagcctgtttgatttcttcatctgtcaagctccctagtgaaaatttgctttgtgacacttctgattcattcaaaccttctccagaaggaaagtaattaagtgtttttgttttagatagttccatttttatactgcaggtgacaagcgaggaataaccagctttagcttttaacacaatgagtaattaaacacagaagttactgccaacaaaattgaaatcaaatctgtcatttgatccagtgctgtgttgcatttgctttgtgaattggtggggaaaatatggtaaataataatacaccattgtatgttaagaaacagctgggagaagtaggatcattttaaaaggctaagaaacaaggtggcaaacatctagaaaattctttaattaaagctaaagcaaatgagataagatcaatccttcgattgtgatatgatagttttttaaaaaatagcaattgtttggtctgtttcttaaatagatgctgtcatttaccttaaaagctttgctaacctcaagtctgactgtgggccttctctgtggccgctgaagctactagtgttggttcaaattccaacactttttgttatgatttgtattagcatggggggataacttaacttctgcctcaatttcctcatctgtaaaatgggaatgatagtagtacatatcacatagagttgttatgaggatcagataggtttatgcctgtagaacaccaaaagcgccacttgcagcatgggcatgtttattgaatgatgatgattaatcttcattaggacccaaatgattcgtggatttcattttaaccataagctgcaaggattttttttatactttaagttctgggatacatgtgcagaacatgcaggtttgttacataggtatacatgtgccatgttggtttgctgaacccattaactcatcatttacattaggtatttctcctaatgctgtccctcccctatgcccccatcctctgacaggccccggtgtatgatgtttccctccctgtgtccatgtgttctcattgttcagctcccactttggagtgagaacatgtggtgtttggttttctgttcctgtgttagtttgctgagaatgatggtttccagcttcatccatgtccctgcaaaggac

SEQ ID NO: 60410 - DNA, 1051 bp, Homo sapiens
ggctgagggggcgggaattccctgagtccaggagtttgaggctacagtgagctctgattgcgccaccgcactccagcctggatgacaaagcgacaccttgtctcaaaaaaaaaaaaaaatctgctgcaagagcttatttgtaacctggaaggaaaggagtagtccagggtttggggcagagcctattgcctctgaaaagacccagtaaattctctggggactgcttgtatccttgtaactagatagtcgtcacacatgagtgaaaagaaggcatttgggctttgaaggtggtcaagagcgtccaggctgggccaggcatggtgggtctgtgtgagaagcagagcttaggaaggctggggtctgaacatgctttgacttttgctttgtgcaaccagtaatccagaaaaatcctacctgaagccccagaggctgtgcttcttcagcagggtgtcatattgtcagggagctgcaaacagcctgttgtagtcagaaaagacggtgttttcctttccacagctttatggacataaaataaaacttgaatttgacaaacaatacaataaatcctcctttcccaaaaattacgagttgaggtcatggttcctaatcggaactgtgtgcagctgttggatttttggcgctttctagagctttcactaaaatcaaatgcatttaaacaccctccctcctcaagaggacaggattagcccgcctccccaggagaacagtgctctgctgcctgcgtcagcaagctccttacacagtggtctcctgcctgtgtcagcgagctccttacaacagtctctgtgcacgtcccatcactttatcatggattagaggctgcaggatgttttcatatggcccatgataatgtaatgatggctggtactttaggacttgaaaacctcttaacgtcttggccagactgtggactgttctttcaggcatctgtcttttaaatcagttatctccatttgctgtcaaatttggcctgcattggccggctttattatttctattgttccatagagagccacactgaaactaattt

SEQ ID NO: 60411 - DNA, 1062 bp, Homo sapiens
gcacatcacagccctggttcccagaggacaactttagtttccatccatacgtttaaacacgtcgaaagcaaaaacaaacaaaacgctatttaagctaatgtctcccagaacaacaccatgaccttaaaccgaaacacaaacgtaggaaagaacaaccaagcagccaaaggacacgttgtcaacagagactgcaatccccctagttccccaaaccactctgtcccggaattcaaagcacctccatgcaaaccgctccctaagcgagagctgccttgtgaagtgagcttggagcattcaactcaagcgttattagtgatgctgagattgcacagcatggatcttcaaatccataattcaaaatgcagaaatgaacattttatgttttcgggacacaaagaacctacaaaactgtatccagtgtgtgtgcgagtgtgtgtgtgtgcatgcttgcactgggtgtgtgtatatgtgaaagaaataaggaatccccaggaaattttcccctaatacaataagcttccatttcttttgaaaaacacagtattttagatttttcctctgctatccaagtatgacaaattacatggataggtcaataggcaatgcatggcagtttttcagttcctatcagcagatgcaaagtgcaaatccacttcctctggtcctgtgctgtccaacaaaaggggccactgcaattctgactaattaacatgaagtcaaggttaaggtctaattcctcagtggcacttgctaccagtggctaggggctacccaacagaacagtaccagtttgagaatacacccatcaacagattgtccagttctactggccagtactaagtcaggccccatgggttgttctgatctcatttcagtggaggatgggacccattaggagccgtaaggctcagctgggtgttatctggagccatccaggcacgtctaagctcttcatttctatagaaacacagtcatttgccaggcaggcgcggaggctcacgcctgtaatcccagcactttaggaggccaaggcgggtggatcatgaggtcaggagattgaga

SEQ ID NO: 60412 - DNA, 1870 bp, Homo sapiens
ataataacatgccatccattattactgtgtgccagacttaatgccacactctttacctctacaatatatcacttaattatttttattttttgagacagtcttgcctggtcacccaggttggaatgcaatggcatgaccatggttcactgcagcctcgaactcctgggctcaagcattcctccttcctcagcctcccgagtagctgggactataggcaatcactactatgcccagctaattaaaaaaaaaaattctagaggcaggggtctcactatgttgctcaggctggtcttgagctcctggcctcaagctatcctcccattaaggcctctcaaggcactgggattacaggtgtgagccaccacgcccggactctaatttttacagtagcccccaagaaatattagtgcaattgtcttcattctactgaggaaaaaactgagggttagaaatgcttgcccaagcttgggcacataccatgtgcccaaatccagctggatttgaacccagatctagttgacttcagtgcctgtattcataaccgctgctttagccagtgcagcccaaactttaataggaatcacctgcagtcttgttactgcagcgtctgattcagtaggtctgcactggacttagagattcaacaaacaggatccaggtgatgctaattcctgtctgaggacctgctttgagccgccttaggttaattctttgccacgtgcctgagatggaagcaaccagctggggtgcgggactcgaagggggcttccgaggaggagaaggagtctttcaaggctcctctgttcctctaggcttttcatgccaccccttcccgctctctacctacaccattctctcccgtttgtcttattttccactctgctcttctcctggcttctccttgtgttgaaaacatcctcaggtttcatccattctaaataaagctccccttgacctcaagcgatcacttctttctttcctgcccactcactcctcagcactgatcaggagctcttctgtcttctcctcttggacacctttcaagacctcctggttactttgatgtccccgcagcctccctgggatggaacccctctccgtgagaatcccatctcaggtctagtgagggtgatggggctctgacctccatactcagcatccacaccctgctgtgatcttgaggtctcctggcggccttattttaaaaatcattttctgtctctttgcttgctcagctttccttcttaaggtccatttaagattttttaaaaaatcctggtgttcctctttataaggtgaattgttcaacatgtccatttcaggtggaatgcattcatttggcttttagaactgattttctgtttgtaagtagaaattaactcccaattagctgtgtgagaatttgtatcctctgtatctgctatcaatagaaaagaacaattcggttctgggcgaagacccaaagggctttttattaataatgcacctacgatttgtgaactgtgtttaggttcatcagaggcctctcgtttctttctggactttcaattacgttctgagcatggaaagttggcaaataacttaggcttggatggatagatacagtcattgaatagaaaaaccatattgatatttttaggtttttaagatctcacatactttaaatatttcaaaattttaagtaaatactctttcatacattctgaaacattatatctaatttatctcagccaaaaatttaagacatatacatgttgcagttgcacacctgttactccaaaacaaacaaaccgctccagccaaaacccaaatgggaaagcacttgattttcagtagcttaaaatatgttgaattaagaggtaggttatga

SEQ ID NO: 60413 - DNA, 1160 bp, Homo sapiens
gcctcctgagtagctgggattacaggtgtccgccaccacgcccggctaattcttgtatatttagtaaagatggggtttcaccatgttggtcaggctggtctcgaaatcctgacctcatgatctgcccacctcggcctcccaaagtgctgggattacaggtgtccgccaccacgcccggctaattcttgtatatttagtaaagatggggtttcaccatgttggtcaggctggtctcgaaatcctgacctcatgatctgcccacctcggcctcccaaagtgctgggattacaggcatgagccaccgcgcctggcctcgcctcgccatctcttacctgggctactgctttgcccttaatggatcccttggccctcggtttctcctccgtctggtctagccacagaatgaccttcctaaacaaagatctcatcttgcactcggccagggccaaaccctcatcgttcctcactgcttacatgcaaaagcctgggctctgtagcctccccttcagggtctttcatgcccctggagttctgttggcaagtctccccaaaatgttgtcttctcttgcctgccagggaagcaatatcaaaggagatgtgccagaagcttcctctgacatgcctctggcctcctgggcctcgactccagcctgtactctagggctgcagtcactaggtcctggtggccctttccttggcagcagggtacccagtgaggtgcttgggtctcacttctcttaccacccccagggtctagcccagtgggcaatccagaaatgtgagttgtttgaacggattgaattgtaacgacttgtgggttcttcatatcgaaatttggctgtgatccatccagtacttttgccctcatcctatattactcacagtagaagctggtgttctgtgttataagttctccttttttttccttcatctatgacaatgcaagcagaaacgttcgtgttgcggtaacaagtccgatggggtttctgtatatggggtttctgtacacgtgcttttgccaaccgggaaattaaggtgtgccgcatgaagtcagtcacttcattattggaactttgcctaaaatgaagaaactcatctagtggtgcaatttgacctaagtgttttacccatacagtcaacttcaacttgggtcacacatc

SEQ ID NO: 60414 - DNA, 1055 bp, Homo sapiens
atatttcttgggttgagaaggattggacttttttttttttttaaaggatttactttatggtagagaaaggtttaatactaaaaatttgattaatataacttagtacattctgtctaaatgttagcacttaaagtcttggaattaaagtatattcacaatgcaacgtactttaataatcgtagcacaagtatgggggtggagttcagaagggcaagttttatttcactgccattataattcatgtaaaaatagaaaatcaccagtgatccttttgcataatctttgttctgagggttctttgccttggtactctcattcttcagggcttgatttctagaacttgcgatgttccagaatttatgagaaaaacctcactgtaggttctagagtttgaactgcattttatttttaaattctccaagaaaaaatactgcatcagccttttaaagccctggagattgctatggtctctttgtaatttagctcagtgatttgtttctgctgaaaaacagcagtgaactctagaacatagaaggcttatttgacgtgttgcttctttgaaaaaaaaaaaagattatttctttataccacatcagatggacaagtacgggcagtcattatttttaccaggtaggaaaacagagtatttatagagaagaacttcatcggtgaatactgcgagggttcttcaccggagatagtgtggcaaccctagggggcgtttgaaaatgcatgggggtgtttcaggttttctcaatgactcactggcatttgggaggatgtggttaagaattgtaaatgcccaatttacatggtgtaggggacagtcccatacagcattaccctggccaaactgctggtggtatcccctgttgagtaaaactgcaggatataaattgtaccctctgtctccaaagaagagcagcccagtgccaggcagatgtgtgctgtctcttctcaccaaaaccagtgatgtcttttttttttttttttttttttgagatggagtctcgtgctgtcacccaggctggagtgcagtggcacgatctcggctc

SEQ ID NO: 60415 - DNA, 2144 bp, Homo sapiens
ccatgtctcaaaaaaacaaaacaaaacaaaacaaaacaaaaaaaccttgcaagattttgataggaattttgttaatctgtagatcagtttggggacaattgacatcttttgtgtgttgatttttcttccaattcatgattatcatcattggaaagaagtgagtatgatgagtcttctaagccaggcagatagcaaaaaaattaggaaagtaaatggattgcacaggaagaattaactgggatttaaataatcaaagacagaaaggatatataaaagaagtgacgaaggagatttaccctattagactccagtgtattaatctaggacagtttggttgctatggggaagcagtgtgcaaaaacttaagaggcacacaaaagactgatgtttattttgtgggagtgaatctttttttaggaaggaaatagcactattgtggtaacagtgattcattttctcctcctatcttctctttacagagaagacccaaatagtgaactgtttcatgtaagtttttatttatttttgccctacttttctctagggaggggcttaccacagcttataaaaatacgtaaaacaagatcaaataaactttaaaatgaggaaaaagccaatatggtccaagggaaaagaagatcagggtcaggactgagattaggatgcaaaagccatgctatgaaattttgtttgtttgttatcttgagatgggtaaaaaaaaaaaaaaacagttgactgggacaaatacccctagcacaaaacagtcatgaagccaatgtttaattattatacctgtcatcttttcacctggcctcaggactgtcctcttagggagaggcattgttctgtagggttaattagtaacaggaatttagatcctgctttgagaggcctcctgtgctggccgaagcagctggtggtctgagaaccctgacacccagaggcataccactgggaggccccgcgcagcacacagcttttgctgtactccagcccaagtcttatggggtttgtggtttatactgaagttggtgcagacaattaagactctctgttcttggtaccgacagggacagagacctacaattgtaagtattttgtaaacagggttgtgatatttgtttgagtgtattcaacatgtcagtggccttttaatgtttaaaaaaatgcatatggccatttaagaagtggttgtgcttcatagttaatatttttttcattaggttaggttcatctggtttttcagtgaggtgagctacctgagagccataggaagatagatcttgccagttcagaggactgactttggctttaagagaaaatatttgtgtcattttcgagaaagtacttccagcacaatgctttcttctgatgattcattttctacagttattggaagtgggaagaaatccacagaggttacagaatttgtaaacttgtagagacatgtgccattatatcatgctgtttcatagatgtgtatgtctgttagttacttttcgggcattcattgtatatatgtctgttacttacttttggggtgttcagtgtctgagctttgtcaacgattgtgtgctctttttttagcctaaaaaaactaagttagagaaatgtttgctcatccaaatctgtattgttgtagcttattcagtagactgctgttgtatttttaatttctctatacaacaagctgaaagacagtgtggacaacctaattgcatttgaagtagctgctggccaggcctgctgcaacagctgatgggctcctctgaatttccagggctatttctggtagatgagctggtatcaaggctctcgagttcaggccataaaaggcccgtcccatgtgaagttgcttcactgctctgactgcgtcctccccaggctgaagtgtcctcaggtttcatgtggatttgcccagtaatggatggctccaccgaggccaggttggggaagttcagcctcgaggacactaggggacgaaaaacttcaaaaagaagactctttttattaatattttggcgttctttttggagaggaacttttgggatgtagcctttacctgtttcctgaatttgacatccaaaaagccttttggaaaacaccattctaaatttatcctgttctgaatcatcatcgcttct

SEQ ID NO: 60416 - DNA, 1050 bp, Homo sapiens
cagcagggaagggaagagcctcccaggtcctcactccactggtcacatcaccgtcagctcatgtccccatttgagcagcagcctccatggttctgttcgtgcagtgagctgctgcttgacagcagacagaaatcccatatttttagatatctagtggcccaaacggagcatgtcacactttgtacatctctgattactctcaagactctgagcctggtgtccaggaacgcgatgttgctccagccgtgtgagaggctgggtctctggagccaggactcataaaccacggtccaggctcacccctggcaagttcacatctcattttgaccacgaggccagcagttctctttgtgttgagctctgctacacacccattgctctgaagctacagcccgggagagaaaagttggctggctcatcagtggttcaagccagtgacttacagatgaccttggagctcaaagattttcagctaaagccagtaaagttctccaaaagctttgagaaaaagcgagaccagacagacagaaagacagactcaattgattgaattattgattgattcagatttccggcaggggtggggggttgttggttgaaaaatattaactgaaaataatatcccctttttgtctttaaaaagaaatttatgcacaaacaaaatgacttgcccatggtacagaaggccacaagctcgattcatacaggtgtatcggtgtacatatcagtagactacagcatgtctctgtcttctcccatagaggtcaaaatcctaagctttttgggaaaaggaaatgattccaagtctggttccatcgtggcagaaaatagggcaaaatacaggtcctggttgcctagccttttcatctcctggaaatgagctgcttaaaaaatacctccagtgattgatcaagttcattgccctgtggaaagcagaacttttcagaaggcagaagcaaggagacagagagtgttgttgtcttactttcctgcactgacagtcctggccaatgctctgacatcatcttgagtccagaaataggagtgaga

SEQ ID NO: 60417 - DNA, 1120 bp, Homo sapiens
cttggccatcatcagaaaacattaggcagggcctggctgaaaaataatcctgccttcagggcttaccacatcaattagcttaccatacgggccagtaagccgtgtctttgtgaacacatggtccctgggcagcggatttgtgaaagtgatgccaagcccaggagatcagaatgcacggaagattttgcaagggagtcctatattgaaatcagacactgcttaatgaggaaaatctttcccaaagaggtatttgagaaggaggtaaaccaattcaggcatgtggaacagcctgcacaaagccagcagaaattacgatcacagattgcagggcaggggggtgtctgtgagggataaagttgcctttggaaaagaactcattgccttgtcattttccctggagcatacgcattatttgccttattcgttcaagaaatatttatcgagcacttaatatatcctaggcactgaagatgaacagcagttcacaaaccagacaaaagtctctgtcctcacacaagtcacattttagggggcccatgtcactaggggtacaagcgtaagctgaagggagctgtagcaaggagttaggagtacctggaagaactcctgaataactatagttgtttgaaaacgtatttgcttatttattttctctcttccctttgatgcaacttgcacccactatcccactaacgagattaccagccatctttcgataaatccttgggagggaattacttgtacttgctaatgaataatccactttagtagtccaacagataataacttcagggtcttcaaagggttatctgatctgctttggcctgagtctctatgggagggaagttgaggcatgatcaaaggattttatctttgcttgctctcctactgtctaataattttttatttcagaatgctttgctttaacatattttatctcgcttggagcgctttattccttccttatttatttattttttgagacggagtttcactctatcgcccaggctggagttcagtggcacaatcccggctcactgcaaactccacctcccgggttcaagcaaccctcctgcctcagcctcccgagtagtttggactacaagagcccgccaccaca

SEQ ID NO: 60418 - DNA, 1050 bp, Homo sapiens
cctactaccaaaaaatcagaaagtatctagctttctaaattgggaaagcaagcaatgttataaaaacactgaaggaatctctttcttcgtgaccttttgttaaactcggtttaagctgtagaccttatttaaaataaaatttaccacagaacaggaaatagaagctgtggaagactcgaaatacacctttgtacttctctgttcttcacctgctctctcactgtctctacacacacacacacacaaacacacacacacctatatttgcattaaaaatgggtagtaaaagcagtgaagggcaaacagaaggtacaatacaatcaagtaagaggttgaatataaactggaacaagtcttaattttttatttcactttcattcggatacgtttactaattttctttgctagctttaagacttttaaaacattctttggccctgggagggagttgtataaccataaaacttgagaatcctggccctagaataaatgttccttttaaaaccccaaggacagaaaattgaatacagctgtgcaaaaaagaaaaaaaagaaaaagaaagcaagaaaagaaaaaaaagccaagtgatggtttaggcttgcaggcaccctgaccaactttcccagtgcacttgggctgtggtttcctggagatgggagatcgggagctttggtgtacttcttgaaggtttcagaaaaaggccaagacttcttcagaactgtatgttcctgggatatggttaagagcgcattctttttggcatggttatctatcatcttgcttgtcctaagcatgtcctcttgttttcccctgcagaggattggggtttctaggtcattctctgtgatgccgtgattctgcaaaccttatagttcctacctaaaagtaagcttcagagtttaagcagtttccaccagtcagaaggtggaacggatgagtttttaagacgcaatcttgctcttctccctcagtcactgaatttgcctcagtatggccagttttcagacatggtcctgagaatacggcattgctactccctgcttctcctct

SEQ ID NO: 60419 - DNA, 1072 bp, Homo sapiens
attagaaggtagaatatcacccatgaaaaaatttctggcttaaaagaaaccctgcttttatttatttatttagacagggcctcgctctgtcacccagcctggagtgcagtggtgtaatcacagctcactgcagccttgacctcttgggcttaaaggatcctcctacctcagccacccaagtagctgggaccatgggtgtgagtcacaatgcctggctaatttttaatgtgttttttgttttttgttttttttgtgtgtagacgggtgccttagtgtgttgtccaggctggtctcaaactcctgggctgaagcaatcctccccacttggcctcctaaagtgcttggaatataggcatgagcctctatgcccagcccaagaaacaaaccctgcttttagaatctttttttttttttcccagctgtcctgtgtcctaggtttataactttgactaacttctagcaacttccaatcatgggagaattagagtggttatctgggatgaattgtttgaacttcaacctgttatcttggctgcagggctttcttggccacagggccgtgctaaagggcactttgatttcttgattttaaaagagcaagagaaagtgattgccaagaggagaggtttggttggcttttcttagaactaactgcctctccagagaagcctgcattggctgctcatcatgatgagggtcgggcaaggtcagtttccactgtcttctaattgttttcagagaattggacggtacaaagcaggtgccactgacaacatttcccatcattttatggaagagtactgattccgtcttttctgctcagagtggatctgtgcaaataacttttgtttctcaaaaatttctggtttgtcttgggatgcagccaggcctctaatgtggtggtgtgtgctgtgtcacaaacctcggccccaaaagcctgagcttggctttgtcagatctgatgagtgtgcatgagcaggaagccacccttcgggagaattcaggggcaaacgtacaagtaacgtttgtgaacctgtgcagacaaaggctttgggtagatgcctgtgagatg

SEQ ID NO: 60420 - DNA, 1097 bp, Homo sapiens
acaggtctgagcggaagtgtgtggtaagtcacatggaggcagaaggtctgttcctgatcagggttaaggtgcccctttggtctcccttcctagcctgtgtaagaagccctgcatctgttgaaataaacaaatgcgacaaggaagcgcagaagcagcaagccttattgcaatgtgcctagtgtggtttgtagcaaggaggaagtcctgctggtgggagcatccagcccagctctgatgatctgaaaccatctttgagtaactggtgcccagagggaatgttttactttttggctgcttttctgacgtgatcattaggaaagagataggcacacttttgcacaacttctatgctaagcttctttgtctggaaaggaaattttagttgcaaggacttaaaatttccttcttgtgagctgatacttttgagacagtcaagaggatgttaatttaatgaaatcatgaacttatgcttcttatctcctcctcctcctcctcattcttctctctctctcaacacacgtacacacacacacacacacacacacacacacacacaccattccatctttagaggtcatcatgcctttgcatgtcatgctttgtgctgtggtggctggagactctctttccatcaccagctattccctgggctgtcattctgtgtaaaatcctttctgctgacttctcatccttccttgcctgcacgtgccctaaatctcacttttctgcccatcctctttggctcatcctcttctcttcccacacaattcccttctcccagtgccatcctccttcccagttgtaccagtcacagccccattccctaccatgccaattacaaatgcaacccctttatgacagcttcctgccccacctccacagggaactcacctctcttccgccctgcagtgctctgagcttctcccatggactttccgtctcctgcccctgagccagttgtttgtgaggcaagcccagcaggtagtgtccatgcctgctggttgccttctccttccctcccactttctttgctatttttttttttgagatggagtctcactctgtcgcccaggctggagtgcagtggtatgatctca

SEQ ID NO: 60421 - DNA, 1355 bp, Homo sapiens
tctcccacctcagcatcctgagtagctgggattgcaggctcatgccaccacacctggctaatttttgtattttagtagagacgggtttcaccatgttggtcaggctggtctgaaactcctgacctcaggtgatccacccaccttgacctcccaaagtgctgggattacaggcgtgagccaccacgcctgggctattttttaaattttttaaaatttcaacagctttagggatacaaatggtttttggttacatggatgaattgtgtagtggtgaagtcagggcacttagtgtacccctcatttagtgtacctgccccctgaatagtgtacattgtacccaataagtactttttcatccctcactcccactaccccttctcataggagacgtcaaggtgagtcaaccttcaaaattactaattgggaatcaattagtattttaaataagcagctcgtacattccatactttctggagtggctgctgcttccggctgcagaagccctagtgttggtggtgccacatcttcattcctagtttgtcttcattgctttgggacccggaggtctctcttgacctcaagcagaaattgttctccaaggctctggaaccccaattcactagaattgccgaatttctgccctcagaagtaccgtgcattgtgcgaggcatgcagaatggaggagcgctcaaccctgcagagagagataactcaggcccctcccttcctctagctgcctttccttaggaattcacagtttccttataattctgtccctcgggctgtttaggtccaacggcttatagcgtatgaatctctcaccttgagctttcctataaattccaagttcttccttagttttccttttcccctttggttatattaagagaacgttaaattgtattttggggccaggcccagtggctcacgcactttgggaggccgaggtggaaggattacttgaggttaggagtttgggaccaacccggccaacatagcaaaaccttttctctactgaaaatacaaaaattagctggatatgatggcacacacctgtaatcccagctactggggaggctgaggcaggagaatcacttgaacccgggaggtggaggttgcagtgagccgagatcatgccactgaactccagcccaggtgacagagtaaaactcgatctcagaaaaaaaaaattgtattttgggaaatgcttgtaatgtaaccatgctcacaataactgtatcaatttatttttttaagagacaggttgtactctgtcatccaggttggagtgcagtggtgtgatcatagctcactgcagcctccaactcctgggctcaagtgatcctcctgcttca

SEQ ID NO: 60422 - DNA, 1762 bp, Homo sapiens
tctgagaacagtcaggtgagccttgaagcgatgggctaaggtgcagtgcttctcaagcttgtttttgttaatactcaaataaccaagaggactgaaatcgtgattgcaggtgggggtaggggtgccacaggtaactcctggctcacataaagaatggaaatagtggccaggcgcagtgactcacgcctgtaatcccagcactttgggaggccgaggcaggcggatcatgaggtcaggagattgagaccatcctggctaacacagtggtgaaaccccgtctctactaaaaatacaaaaaactagtcgggtgtggtggcgggcgcctgtagtcccagctactcaggaggctgaggcaggagaatggtgtgaacccgggaggcggagcttgcagtgagctgagatcgcactactgcactccaggctgggcgacagagcatatctccatctccaaaaaaaaaaaaaaaaaaaggaaatagtaagaatttcttctctgtgttataagctatgggaggggagtcactgagcagtgtgcccaaaatttttcctgtgtgacattttcaggctgtagtgggtggaaagattttgtaaatgtatcttcttggtgagagggtgtcctctgaatctgctggtaggttggagtgtttgcagggaaatgttcatcaaagggcttgctctgtgaagaatgtgacttaggatgatctttattttacgtgcattccatcatatgtaaacaaagttagggtctcaacattcccactagcaccttcagccaactcccaagcttctgtctcagcaaagcgtttgctgtagaagcctacactttgaacccatccttattttaggtgaaatcatttatttcgtctatgtttttactctctagtgtgtcatatcttactttttcacttcttgaagaaaaaaaccaattctgtcctgagtttggaaacctttccttggtaagccagggcccatttgtgtagagtaagcttttcaaatcactttacagttccttccacatttgttgaaagggagagtttagaatacaaatcactgttcagtagccaactgtgttaccagcccatcaatgccctgaggacactgcatagcagacattctcccgctggtgccttcaggtgcccggaggcctgggcctgaactggccttccacactcttggctggagatgtggctccatctggcttcaccttcagtgcctcctaactcgtcagtaacactcagtaaagaattgagcagaacttactgaaaaagcaaaacgtctttgtgagtttttatggcttcagcgtgtcctgagctatctttaaaaatagagcaacttgggctgggcatggcggctcacacctgtaatcccagcacttttggaggccaaggagggtggatcatctgaggtcaggagttgaagaccagcctggccaacatggcgaaaccccatctctactaaaaaatacaaaaattagcctggtgtggtggtgcacgcctgtaatcccagctactcaggaggctgaggtgagagaattgcttgaacccagggaggcagaggttgcagtgagccaagattgcactgcatttcagcctgggtgacagagcgagactccatctcaaaaaaacaaaacacaagcaaacaaaaagaggtggtcatggtgatgcatgccagtagttccagctacttgagaggctgaggcaagaggattgcttgaacccaggagttggaggcttcagtgagctatgatcacacactgcattctagc

SEQ ID NO: 60423 - DNA, 1034 bp, Homo sapiens
acttactcatcactgatgattcataaaatacaaagtgtgctttagtaacactgaatagtatagtctagaatcctaaaaaagttgagaaaaagactttgttctccttattttctatttttttctattgctccaccttgtattagaaattaggaaagactcgtggtgaatgtgtccaatcagttcacctcacctcatgttgtttctaaataaaataataaaatctgaacccatagtcttcgccttttttgaggtttaagtattggttcatctatgtcgttatgtaatttcaaagtgccttccggaaaatccctcgggatggagatgactcaggatagctttgcactggtttgttatggggccatctaaatgaaggaatggccctctgaaatggcagcaacaaccctaagctgcctgggttccagtcccagttctgacaccgtctaggtgagtagcctcagccaagtaacttcccactctctaaacctcatttttctgtctatacaaggtaggaattagatgatgacattgcttcccaagccttcccacccaacactagtggcccttgagatatcattgattgggtgcttctccagtatatccatggaaattggagaaatgctgtgtgctgaattctattccatatttggcttccaaaagctcataagcacattagagactgcaagaagccttgaagtaaagaaatctgcttaacatttttaaacctagcattttctaaactctttgaactggaaactctccctcttttggaggaaaagcttcaagtatattggagtatcctgtagtacatagtttgggaaatgctggaatagatcagtggtcggcaaatagcagcctgcaggccaaatccctcttgccacctgttgtgtaaataaagttttattggaacacagctacactcattcatttatgaattgtctatttgccccagaatagccaagttgcagagttgtgacagagacctgtatggcccatactgccaaaaatatatttaccatctggttatttacagaaaa

SEQ ID NO: 60424 - DNA, 1033 bp, Homo sapiens
acacacacacacacacctccataaacacagaggcccagcatggctactgtacccactatcctttttcacccagcccagctcctttcagaagatgacttcacctttataccatcaaactttttcctcctgcttaatgtcttgggatgctacaaaattcttgatggatgtcagatataggtgggcggtcaaagttagcctgtttcctctttttccacaggggtactgttggaaaatgatccagttccccttgatagtggtgactatgttgtccccccaacatcatggtccttggggttagaaataagagccatttcccttaggaggaagaaggtgatgagcttagttggggagggggacctcctttgctcaggacttctctagtattccttatgcagccatagtaccactccccacaaacatcctaacaccgcccctcacccccagactttggcagctttctcctccttctaggaccctttgtttgtttccctctttgacattctgcccctcctgttcctggtctgttgctgtcgcccagccacctcccggcaggcctgggtttcaagtgtcttagggacacatttgccttggacgtccttatctccatctgtcattggtgtttaattgctttccctccactccccagcctgctctttgacttggggtaagtttcccccttgcgatcctttctgattacttctttcagctttcctctggccaattcagctgcccgttcagctcctccatgctgctagctcaccttttgtgtctgcagtttcccagggtttccaatacatggctttgtttctatccaaggctgctctactctttttcccttccttcctttccttcctccccctttttgacagtgcttcttgatgcttgcattcctttccctttcatttttttcttcttaacaatttgcaaacccttctccctttgttctgagtcaatctcatttggctgtcacctttgtttagtataataatgatattgaataccctatcaaagtttttatgtacaggaaatttct

SEQ ID NO: 60425 - DNA, 1094 bp, Homo sapiens
aggtcgccagattttatttatccctggaaggtctggagactcaaaggggcctctcagggctccagggtaagcggctgcctccgggcagcagagccggtgagagccagggagccctgagccgctgggcgcgtgcgcgtgggcgcgtccctgggccgggcgcgcgccgagggggtgggtggcgccggccccgccggcctggcgcgcggtccgagccactcagagcgcctggcggccgacacccgggggccctacaattaataccgggcgcctgcccgctggccgggactcgcgcgccggctctcggggacggaggcgcccggtccgccctgacgagctcgccactggctctgctccggcggcgacggcgacagtggccctggccgactttcccggggcccacacctcctcgagagccagcttgggcaggggacggtgccgcaccaccaaggccccgcgctagtgtgcacccccggcccgggcccggcaggtgggcgaggagggcgggcgcagtcgggctctgcaggagcgcgcggaggtgagacgggggggaaggtggggacgcgagtgtgggcgcgtgagtgtgggcgcacccccgggaaggtctcggagatgtcctctctcccttcttcctggtcccctccagagtttcgctcaggtcctcaggggacagcctgagaggccaacctgctggaagagttcactcgggcgacagagcgagttggacagccacacccccggccgggagagcgatagggcggccctggcctccagcccctgggatcctaaagccccgcatctccggggctgcagcgggggctagcccaagcatcttcccagccctgggaccgggggggcgtgactgccaccaccctgagagctactgagacacaggacacaaacttagtttccaaacaaagtaaaatctgcctttccggtgttttaagataggacgtgcttatgccgattcatcgcggtttccttgggccacctccgaggacgcggctggacccgctggccgtggagggggtcggctccgggcgcgagttcgtgtcctggggcgtggggacagctctggtgcttcccccgagagtcgt

SEQ ID NO: 60426 - DNA, 1064 bp, Homo sapiens
tacaggtgacgaccttgcaggctgtagtacaggtaccagcgagtgtcctagaaaggtattgtgtgggatctcctggctggaggctagctggctacagcgtcaggaagagcctaaagattagattgtaagagagaaaatagaggccaggcgtggtggctcatgcctgtaattccagcactttgggaggctaaggtgggtggatcacttgaggtcaggagttcgagaccagcccggccaacatggcgaaaccccatctctactgaaaatacaaaaattagccaggcatggtggtgcatgccagtagtcccagctactctacttgggaggctgaggcaggagaatcccttgaaccaagaggcagaggttgcagtgagctgagatcatgccactgcactccaagcctgggcaacagagaaagactctgtctccaaaaaaaaaaaaaaaagaagaagaagaaaaataaaagaaaatagaagccattttcaaagacctacaggtttggaagacctgggtctgaaacagctagccatttggttctttaaagatccctgaatgatgtgagttacttgggcgagtgggtcaggaccctgttatgaggcaggtgatggaaaaaatccattcacaatattttctctagcaacaagccagatatggtgatcaggggactgtgaagtttaccaaatgggggatgtcagtcaaaagaaaacatggcatagattatcagtattctggccaggcctcagagatgtggcatagcagtatgtgaaaaagggatcttgagtttatgtggaagggcaagtagactatggtgaatatatggataaaaataatgtgaggtggcaagcaatgactatcatagctgataatattatacttctaagagaccaggcaaaagagaaggcgtggaatggatgattcttctttggccatcatttggtacagcctcatttccaaatcatatataatctttatagttcccaatgacaagaattaaaatactcttatacattaaaagaaaaaaggtttgtgtgcattaatccccacatgagaagcacaatccttat

SEQ ID NO: 60427 - DNA, 1047 bp, Homo sapiens
aggcatgtaccaccacacctggctaatttttgtatttttagtagagatggggtttcgccatgtcggccaggctggtctccaactcgacctcaggttattcacctgtctcggcctcctaaagtgttgggatgacaggcatgagccacctcgcccggccaaaagattgtttttctaacttttcagatacttccagatttcctttttttttttttttaagtgaatcaccttttttgaccatgccgagacttgctgttttttttcctttttctttttttcccagctttattgaagcatgattgacaaaaattgcatatatttaaggtatagaacatggtgttttgattcatctatagattgtgaaatgagtaccccagtcaaggcagttaacatagtcatcttctctcatagttaccagtttttttgagtgtgtgctgagaacatttgagatgtactctatcagcaaattccaagtgtacatgatggcattagtaactaaagtcaccatcctatgcactcagtctccagtacttactcatcttatagcttagggtttgtaccctttggccagtatttccccttttccttcaccccagcccctggcaaccacccttctactctctgttactgtgatttcaactttttttttttttttaaatgattccacatataggtgagatcatgcagtatttgtgtttctgtgtctggcttttttgactaccataatgtcctgaagtttaatccatgttgttgtaaaatggcaggatttgcttatcttttagggccgaataatatcccattgtgtgtgtatatacaatttctttttttcttttttttttttttttttttgagacagagtttcgctcttgttgcccaggctggagtgcaatggcgccatctcggctcacagcaacctccgcctcctggattcaagcgattctcttgcctcagcctcccgagtagctgggattacaggcacgtaccaccatgcctggttaattttttgtgtttttagtatagatggggtttttgcatgttggtcaggctggt

SEQ ID NO: 60428 - DNA, 1683 bp, Homo sapiens
atgtgagaggcagccagcacgggcacactggaagacaagtttcctccccttactcacagggcgagagcacctgcgaaactcaaaccaagctcaaaaagttccaaactgggactcggaccaagaaaagttcaaagaaaaaaatgaacgagactatattttgcttggtttctatcccagtgaaatcagaatcacatctgccagatagagatatggacaacaatgacttaaagcccagtgctgatcaaaagaatgggtctgataagagcccggctctgcaagaacagagtctgctgagcatgtcttccaccgacctggagctgcaggccctcacaggaagcatgggtgggagaacggagttccaaaaacaagatctaggggaaccagaagaagacagacaaacaaatgacctcagtttcatccaccttacaaagcacagagaactcaagcattctggctcttggccagggcaccggtacagagatcagcaaacacaaaccagtttctccgaggagccccaaagttcgcagctgctccctggtgcaaagctgggagggccgagtcgtgcagcattgagtccaaaatgttcagaccctgctgcctccgaagctcagacgcacacagcattccctaccggtgatcacaaacagaggccaagtgcccgtaacctgaaaggtcacaggtccctcagcccatccagcaacagtgcgttctcaaggacttccttgtccgtggaccaggcaccgacgccaaaagcaggccgaagtcagccctgcgtggatgtccacgggcttggagcccaccctgggcctaagcgggaggtggtgaagggggagcccacgggcccttgcaacagtaaacaactctttgggcagtttctcctgaaaccggtcagccgtcgtccctgggatttgatcagtcagttagaaagttttaacaaggagctccaggaagaggaagaaagcagcagtagcagcagcagcagcagcagcagcagtgaggagagtgaggcggagccgcagcaggagaaccgtgctcactgcagacaggaggatgtgggcttccgcggaaacagcccggaaatgagggttgagccacagccgaggatgtgggtgccggagagccctgtgtgtaggtcgggaagaggtgagagtaagtctgagagctggagtgaggagctgcagcctggccacccacgtgcctggcctccatccccgggccgctttcgcgtggaagaaggtggcggtgcacctttctgctcagcagatggaagcacgagtgcagagaagagacacctggaggttagcaacggaatggacgagctggcaggtagcccatttcctgtgacgagaatgtcttcaagatcaagtgacgcaaaaccactgcccgcgtcctatccagctgaacctagggagccccaggaaagtccgaaaatcaccagtgctttcagctctgtgaaaccaagtgaagcggtccctcggaagtttgacagtggtggagagaggggggcagggctcccactgtccctgtctaacaagaaccgagggctctcagctccagacttacggtctgtggggctcacccctgggcaagaacagggtgccagtgagctagaggggtctttgggtgaagcaagcacaatagaaatccccccaggtgagtccttgcaagccagggctgcaagga

SEQ ID NO: 60429 - DNA, 1037 bp, Homo sapiens
tccaccagacattttaatgtttataaggaccttgacatcgctggagtacacccaacatccctgtattcttgtgggctgcccactgctgccccttcttggcccttgatgccaaaacacgtggctgtcttccaaccataattaatgggatatgttttctttcaagctggcaagtactgtggctgggaaccaagttttcaaagttgctgacctgagtttgacttcgaatgccagtcacagaagcagatgaagacatgtttcttctgtgcctaacgtctgtgactctttgttttgtaggttttgtaatcaacccccctcagcatggtcctctcatcccccgactggtaacgaccaagcctaccggagaagaggacggcaagaagccaggagccagaagccgagggagcacgaaaacctggaggccagaggaatggcccaagcccacagcctgcctgtccacgtgagggagggtccatgggaagttggaggaaggtcagagcatgtgatgaagaagccagtttgggaagaagaattgcgaatgtcaggtcctgccaagtggcagaacgtcagcctggaaagctggaaccagccaaggaaattagggaggcagatgtctgatggagatggggagagactgtttcaagacctgtacccattcattcaaggagaacatgtgttgaattctcaaaacaaagggaagtctcgctcactgcctagagttctttcccccgagagcctgagttgcacggaaattcccattccattaaatgaaagacattcacctaaaatgccaccgtatcctcccacttgcgcaccaaatttggactccacgaggaattctgagaagagtggctgctcagccccatttccccggcctaagtttgggaggcccctcaagcccccatcttacagctcgcaccagcagtctaggggaggagcggacagcagtgactctcaggacagccagcagatggacgcctatgtccccaggcatgagctctgcctgtcagaccctggattggaacctccagtgtacgtgc

SEQ ID NO: 60430 - DNA, 1011 bp, Homo sapiens
caccgaggggtttgcaggggagctcagagtgttgtatctgctgttcagtgcagttcccaaagtgtcagcaaccccagctgggaacagcagctgcccaggtaggagggaggcagaaggtgagggtcctcaggggtcccttatgggggggctgaacagtgtggggcaccagcattagcagtgtggccaccgcagtggccagccgcaggttagcacttacatattggggttacaaaagtcttacacaggtggaggaatttctctaggagtttccatgaattttttgtgacatccatgggtgccagagggcaagatctgttctttgacatttgctttccaattctcacagggacccaaagtcaaactgggcagctgtcccgtggttccgcggcctcattccatatggctttacgtttttaaagttcgcttactccaaataattaaaatgctttatagactttatgtagcagcttcgccaggaggaggctgtttcaaaggagaagtgacattcatgccgtgacttgggggaaacaggcaaggataggtattgaacggaaccttaggactttgaaatcagatgcaccatgtcttttattgctgctgtttttgtttgtttgcttgtttttgagacagagttttgttcttgttgcccagtcagctcactgcaacttctgcctcccaggttcaggcgattctcctgcctcagcctcccgagtagctggcattacaggcatgtgccaccacacccggctaattttgtatttttagtagagatggggtttctccatgttggtcaggctggtcttgaactcccgacctcaggtgatccacccgtctcggcctcccaaagtgttgggattacaggcgtgagccaccctgcccatcctattgcagctgttttgttttatgttgttgtttttaaagatagggtctcactctgtcacccaggctggagtacagtggtgtgatcatagcttactgcagcttcaagttcctgggcttaagagatcctcc

SEQ ID NO: 60431 - DNA, 1075 bp, Homo sapiens
aggctgaggcaggagaatcatttgaacctgagggttggaggttgcagtaagatgagatcactccactgcactccagcttggatgacagagtgagactctgtctcaaaaataaataaatttaattaattattagtgaaaaataaaattataggttgttacttttgcctgggtttattttgaagtgtggcacattgaaaagttactgtaatggatgctgtcaaataaaatggagcaaactaatgaaaagattccacattaagcctgcatcatgctccgtgtcactaaaattctttaacatgttaaacttgttgggtacaacggaagtcttacgtttctgaagcttttcctcttataaaattaaagcatattgacatttctctctagttctaccctgtcttgaaaactggagtaaaaggggtgggttatgaaactggctgattagcaaggaaagcaagctcactaataattgtatgaaactttactatggagaattttgaacacaggcaaaagtaaattgaaaagcgtaatgaacttggcacacatccgtcacctctttcaacaattaattcatggccaattgcttttaatttataaccccattaacttaccacttctgtattattttaagcaaattccattctgccatttcatctgtaagtatgtaatatttctaaaagataacttttgttctaatataatcacaaaatcattgtcagaccaaaatggaacaaacaaaaacagtaattctctaataatatcatcgtatttgattactgttcaagctccccattgtcttgtggatatcacgatggctttttcctagtgcaattgtttgaatcagtatccaattagagtccacatattgtgattggatggtctgtttcttaactctcttagattccaggtttatacttcatctcttttttcgcttgcaatttattgaagataggggattgtcttagggagttcctacaacatagattatgctgatgatgtcagcacatatgattgttcaacattgttcacataagctgttcaacattacttaatgacttgaaaatattttttattagtt

SEQ ID NO: 60432 - DNA, 1089 bp, Homo sapiens
agccatgattcctttcttttaaaaataacaaatttggccgggcacggtggcttatgcctgtaatcccagcactttgggaggccgaggcgggcagatcatgaggtcagaggttcaagaccagccgggtcaacatggtgaaaccctgtctctactaaaaatacaaaaattagccaggcatggtggcgagtgcctatagtcccagctactcaggaggctgaggcaggagaattgcttgaacccgggagatggaggttgcagtgagccgagatcatgccactgtactccagcctgggcaacagagcaagactccatctcagccaaaaataataataacaacaaatttgagtacttgagtataggttttatcattaagttagataaaatttggctgttaaattttccacaaaaggccagaaggtgactgtctctcatatgcctcagaagagtctttctccttagtgtttaataagaaagtaaagcttaagtagtttaaagctatcagcaggaagtaacagctcatggcttacatatgattgtatgtaaagccttattaatgaaaaattctttacatatatacttggaaaagaatgaaaacacgaccagaagtcccttttcatcttggcaaatttattttaaatacttgaaagacttatttgggtttccacaatgaattcaattacttgtggatacggattccaaagaatataaacattacagtgttcctctggaattcccatgtagcaactatcagaaagtactgtagatagaatctttaatctatagtatttgtgatacaggatatatcaaatcaccacaaattattaaaaaatgtactttatcttttaaatgtgattgctcgtgttttatgttatctgtgtgtgtatccaccccctttcggtactcagtggagtcaaagctagattaaaagcattattcatttttctaagatgaatatgttgcaaaaattttcccccatagcagagtttctaagcttctagaatgtggtgctaaggcatattttaaagagagtattaaaaaggtctaacttggccgggcgcggtggctcacgcctgtcatcctagcactttg

SEQ ID NO: 60433 - DNA, 1321 bp, Homo sapiens
cctttaccaagaagaaaagcaataagtttgcaattgaaacagtcaaaaacttgctagaatctttaaaaggtaacagaacagaaaatttcacaaaaaccagtgggaagagaacaattagtactcagacatgatggctgctacattgtgtaaagaactgggcttagcctatcaaatggtctgtggacttacttggaaaaactgatttgaaactttcacagatctcagctttcatctgatgtcacttttcatgatcttctcattggcccccttaacctggtctgaagttctgggatgttttcagtttgatcagtctgatactcagtggcactttattaaaacatcagctgtggagtgtggcggtgcacacctgtagtcccagctgctcaggaggctgaggcaggaggatctcttgagcccaggattttgaatccatcgtggacaacatagcaagattccatctctaaaaaaaatgaaaataaacataagccacaaggaatgggtgaaagattattgtaatgtgctttaactaaataggtaaatatactaaacaaatgctaaaactcagttttaggatgaaaccattgttgatatccacatcagtccctgtttagaaaacatttaaaatgacttttagttatgtacagtacgttggcaatgaatacattaagcttcaaaatttggtagtgctctcgaatatgtatatttgtatttttcaagcgaagttctcttattcacatataaattaaagtgggttggtactgatatcaaaaaatgtttatgtttttagaacagacatttcagtcactgcattcttaggtattccaaaccaaatatgatgacatcaatagattgcattttaaaaatattgtttgatttttctattttcaaaaataaaattctgtttctaactaaaatgtgatattcccagtattccttcacatctcttttgagaactcccctcttcctgcaggaaagagacatatttgtctctcagtatatgcagaaaattggttccaggaccatccacgtacacccagatctgcacacactgaactccttcagtcctgtggagcccgtgcatgggagaattccaccttgcacataagcagattttgcatcctgtgaaagtactgtattttctttctttcttttttttttttttttttttttgagacagagtctcgctctgtcgcccaggctagagtgcagtggcgcaatctcggctcactgcaagctctgcctcccaggttcacgccattctcctgcctcagcctctctgagtagctgggactataggtgcccgccaccacgcccggacaat

SEQ ID NO: 60434 - DNA, 1058 bp, Homo sapiens
tattataaattgtatagtagagcacgtaaaatgtgctattaaaatgttaaaacctagaataatttttgagaaattatgcaggtaaccaggtcttgacaaaaaaatgacaaaaaacacaaaaaatgggagataaatttataggaggcttatttatctctctggtgattataggcatttaaagtcaaatatcagggccgggcacggtggctcacgcctgtaatcctagcattttgggaggccgaggcgagtggatcacttaaggtcaggagtttgagaccagcctggccaatatagtgaaaccctgtctctaactaaaaatataaaaattagccgggtgtggtggtgttcgcctgtagttccggctactcaggaggctggggcaggagaatcacttgaagccgggacgcggaagttgcagtgagccaaggtcacgccgccactgcacttcagcctgggtgacagagccagattccatctcaaaaaaaaaattaaaatatcagcagtcatccagattattgattatatacctgctatatgctagatgctcattgggggcaggtcggtggtggggagttgggcaataatgaataggacagtggcctttgtaattcctgactggggcagaggagtggacagcatacaaacagtcacaatgcagtcagataagtcaaatggtgaatggaacaaaaaggatggaaaaccagtttggaattatgaaatgctttcagataggaagtagccattgatgagatttctgaagagtgggaatttgctcttgaaaacagcatagtatctgttgcagatagtgtgggccagggatttcatggtggttgtatatttatgaaaatgattacctcttaagatataaatactagtaggaaaggtgaatatctgagtctaacgtgctgttattgagtttgttttgctgaattactgaattccagttagtctagagtgctacattttagaaattacctgaagcttttttagttagcattcagtttgtgtcgtgtatgaagatgataagaatggaattggagatgtaaattaagtattga

SEQ ID NO: 60435 - DNA, 1819 bp, Homo sapiens
ttttgttgaaacggggtctcgccatgtttcccagactggacttgaactgggctcaggggatcctcccatcttgttctcccaaagtgttgggattacaggcgtgagccactgtgctctaccttgtaggcaggctggagtgcagtggtgcaatcttggctcactgcaactctgcctcccaggcttaagtgatcctcccacctcagcctcctcaatagctgggatatacaggcttgtgccaccactcactcagctaattttttaaaaaactttttgtagacatggtgtcttactatattgcccaggctggtctcaaactcctaggctcaagcgatccttctcagcctccccaagtgctgggattttaaatgacctgttgagtttttaattccaaatctacattaaaatacatttaaatatgttcacatcgtatagcatcaaaacaggcaaaactagcttggaattctttaatatttcacttgaaacatcaaatttgattgtttttaaatttttgcagtagtttttaaatacggtaagagaatttttcaggctagtttttgcaattgcttctcggcatatagcacattgtaggtgcgaattgccaataaatgccaagcaaaatacactttttgccttccatcacctatggtttttgaagttgctgtaaaagaacttgtcttagattaatgtatattaagaatttggtgaagatcattttgaggagaatttatcaatattttccttttccttttttttccctccaaaatccatggtttttatactttctaattttgaccagtagttcaactttggtggacattaaacctaaggaagaaaacaattttaaactgtgaaacaatcaaaaccatattgagtacttggtgtttaatcatgtaagtgacctgaatcttgtgtacaatcatttcatttcttctaagctgtacctctcatttgatatacaaataatcaatttgttcttttttaaaagaaaaaatattttatttgcttccttgcttgtttattaatagaaggcaacatgaattcctagaataccttccagaacttctaggattttgtaaactactatttagaacctaagctaagctaaagaccaaactttttcacattgtatgcagggccctttatcaccttcctttttatcctcttcttttacgttgattcctgtataccagttgggagctttagccactcttgaactccttgatgatccctgatgttttgtgctttttttcattgctccatgcttttgcctgaaatggccttctcccagcctccccctcccagccaccccgcttttttttatggagaatctcaagattaagccagagaagacagacaaacctagtacaggatctcatctgttaggtcttttcttgctgtcctctctgcttcccagtgggtagtgctttgttggtttccaagctcttggtacacacctgtattgtaacaactgttagattgttgtagttcttttatgtgcctgcctcagcattgtcaagcttttctagggctagctgtctgcttcacctctgcgtcttctgttctcggaatagtattgggttcatagtaggagttcactatgtagatttcaaaatgattggataacattttaaagttgagggctgtttgtactgggcaagatggaccatgatattaactttcatatttggttcctcttgaattgccctgtttatttgtgttttcttataatctccactgtgttctctcatatgtctcattttcttgtgttttccatgctttctggctttgctacttttgttacatttacttctgtgcttag

SEQ ID NO: 60436 - DNA, 1581 bp, Homo sapiens
gattacaggcatgagccaccgagcccggcttacattttaattatcaattttaagaggatgttttaatgggaatgaatgtatttgatattcagccattcatattaaattttatattgcaaattcataatgcttttgattacctaatgatgttctgaatacattcagatatagtaggatatttagatgtgtttcttggtttgagtttaattttacccttggtttataatttggggatttgaacatttttcttatttttattttttgaaggattgccttgacaagttccgaactcctttatatatatggtgccctagactcaagagtgagagccttggtgttcagtgtacggtgctgggctcgagcacattcactaacaagtagtattcctggtgcatggattacaaatttctcccttacaatgatggtcatcttttttctccagagaagatcaccccctattcttccaacactagattccttaaaaaccctagcaggtaagactagaaagaaacttctccattttctttttccaatgttatgagtaaatataattaccatgtgttaccaaagtcccgtctatttgtttattagtcataaaatttgtcttgacttttttttaaagtctaccggagtcacgagagcagatgatttgggaagctagggcctttagcattttttgagagttctgttttctttgtatcagttggcaaggttgtttacagcagttgtgagatagctggagcttctcccctagttgaccaagtctagaatgacctttttcagatacaacttgttcagatacaacttttgattggatcacagtctcagagatgactttcaaatctgaacttatgtttagacttgtattagagatactaaaactgcttcgtgatgtttcaaagattctaaatgtgtttttaatgaaaagcatataagcagtcttaggtgcattattttaaatttgacatactatattgtttgtattataaatgattttataaatgcctcccagattcaagtgattcttgtgcctcagccttgctgaggcctgctggagaagttatgttataaaatcttgaaactgtaaatgctaaagggaagataattaaggggtacatacacacaaatgcatactgtcttctacccgtcttacataattgctgcctgataattcgattaagtgccttcttgaatcttcctgtttaaaatgaccttaagaggcaaactatttacatagcttggtgtttaaaatctttagctctctagacacggcccagttttccatgctcttccctactcctctttatgtgtcccacattccagccagtgctgtgattacccttggaacatttcatcttagctttttgttcacactgtttttctgcctggaatctgctttctcttctcccagtctaaattatttcttccatgctaccttcctttatccatattagaagtgatctcttcctgttaacactgtaagtgttgatattgtttgaaattgaccttaaaaaaagcttgatttgtgtttacaactaattgatcacaaccagttacaaatttctgtgttccttctccact

SEQ ID NO: 60437 - DNA, 1072 bp, Homo sapiens
tatttatgattcattttatactgtagttcataagttaattacaaaaaccagtgatcgttcaagttagtgctttgtatttctctatattctggagaaacagaaggcaactggggatcttttaagtttgcttttggctgtgatttcttgaagagtttttattttgtgggttgtttttttcttattttgttttgctttccagcagtgatttagagcattcttttacaaaagcttattaaaaaattgttttttttaccaaaagctcctatttagaaatgtgtttatttttcagatctcaggaaattttctgatggaatttcaagtgaaaaatgttccttcagaaagaattgcaactcagaagatcctgtctgtgttaggagagtgccttgaccactttggccctggctgtgtgggtgtgcaaaaaatattaaatgcccggtgtccgctcgtgaggttctcacaccaggcctccggatttcagtgtgatttgactacgaacaataggtatgaccgcttacatttattattttaaatatgaatattctgatatattagcttagtgtttctcacacagaaacagtggctttgtaatcttaaacatgcttgaataataattttttaaaaatttatcacttggattgaaaagtaagtaatcttttctcttacgttatacctgttgataatttggtgttcctaaacagtgttaggatattgtgttaaaatgttcacatatctaacctctgagaagaaatgtatttcattattcttacttgtgcagcctggtagtgtgtagtgtgaaagatgcctattttttaggagaaatttctgatggcaaaaaaagaaaaaagtaaaataagaaagaaagatgcctatttatagtacaagccttctaagaatacttagaaaataaaataccaacttgaagttgacctttgaattgcctccagatatatagtcaactttgtgtactagacaaatgtcccctttacttaggtccaaaagtggttggaagagcttaagaccggatggcttttgttcagcctatgtgcattgtattatcctagtgatttgtttg

SEQ ID NO: 60438 - DNA, 1174 bp, Homo sapiens
atttgctaatgaatgaataaaagttacttacagctaggcgtggtggctcacgcctgtaatcccagcactttgggaggccaaggtgggcggatcacctgaggtcaggagttcaaggccagcctggccaatgtggtgaaaccccgtctctacaaagataacaaaaattagccgggcatgatggcgggtgcctgtaatcccagctcttcaggaggctgaggcaggagaatcgcttgaacccaggaggcggaggttgtagtgagccgagattgcgccactacactccagcctgggcgacagagcaagactaaaaaagaaggaaagttatttactaactgaaatgtagattttaatgttcataaattttttagtgtgtgtaaaagttggttacatgtgaaatatgtcacctgacttatcacaaagatcatgttagcacaaaatcctaaactaaaatctgcctttggtctttccttcagttttgctttttcttacagggttctgtatcttagaggacttaggtaataaaagtaagaattagtgcctaagtcttgagtactgctttctgttatctgaatgattgctgtggacagtgtgcttaacttctgttttttctttattagatgatttgctaataaacagatagtgctataggaatagcacacattaataggaagtatttatggatctaactgtctgtgaacagtttttctagtttttatttatttaatagaggacagtcatttttgagaatatctttcctttgctcataataagtataattttcatctaaattttccctaaaggcagtgttttatttctgtactgagtccattgtgattcttcgtggcttgcatttttggtcagtcaggttaggctagttgatgctttggtaacaaacaactcccatatctcaaagatctcagtggcttaacacatcacctatttatctgttgctgaggttatatgtcacagcaggtcagcatgggcactctagacattgtagtagctcaagcacccaggctgaccagtgtttcatctccacctgcgctaccatcactgaatagtggaaaggcaaagtgaagaattgagcatcggctcttgaagtttctgcctggaagtgacacttaaaacctctgctcacatttcactggccaaagcaaatcacatgagtttgctt

SEQ ID NO: 60439 - DNA, 2032 bp, Homo sapiens
ttgaatgcttagttcagttcagttcagttatgttacgttatgttatgttatgttaatgttatgttgttatgttaatgttatgttgttatgttatgttatgttacgttattttttgaggtggagtcttgctctgttgcccaggctggagtgcagtggtgcaatctcagctcactgtagctgcatactcctggactcaagtgacccacctcagccttctgagtagctgagactacagatgcattccaccatgcccagctagtttttgtatttttttttttggtagagtcagggtttcatcacgttgcccaggctggtctcactcctgagctcaagcgatcctcccgccttggcctcccagtagttcacaggtgtgagccactgtgcccagccagttgatattttcaatgttggtttcaaataagagcatttgaagttacgattttttttcacttcagatactccagtacacaatttcagtatgtgatcattttaatgccagtcttctagtggatagacaggattgttattctgagaaactgagaggtcttgggccttcattacttgagtatttctagtttttcttgccctttaacattggtctttcatccctttgagtttaaaatgtctaacgtggttgttttaacctcttctggagtactttactactttcattttcttaaaacaatactttatactcatcgcttacaaagttttaattctagccaactttcattttgctagtggcattcctcagagctttttaaaaattttaaaatattatataatttatttctttagtgaaatagagacgaggtcctgctgtgttgcttaggctgatctcaaactccttgcctcatatgatccgccttggccttccaaagtattgagattacaggcatgagccaccgcgcctggccttctcagtggtttttaaagagtatttttttttgagacggagtcttgttcttgttgcccaggctggagtgcaatggtgcgatcttggctcaccacaacctctgcctcctgggttcaagcgattctcctgcctcagcctcctgagtagctgggattacaggtatgcgccaccacgcccggcttattttgtatttttagtagagattgggtttctccatgttggtcaggctggtcgcgaaattccggcctcaggtgatccacctgccttggcctcccaaaatgttgggattacaggcgtgagccactgcgccaggctttgcatatttctaaggtaggtcttcaacgccaccaaatctttgaaagtaaaatggtaactttttatgcgacctgtactttttctctattttgttggttttgtttcggctagctagatagacgatcagctgaacactctcttgaaggagttccagctaacagaggagaacactaagctccgatatctcacctgttctcttattgaagacatggccgccgcgtattttccagactgcatagtcagaccctttggctcctcagtcaacacttttgggaagttaggatgtgatttggacatgtttttggatctagatgaaaccagaaacctcagcgctcacaaggtaagtctatttcttttgaccactataatcatgtaaagttaagaaagtataaaaagaaaaatctttgaacttaataaaatagaactgttgatttctaaacttattaaacattgtggttaaagaataaggtgtatttgttattgattctttggtgaagtctttctttgtattgttctactatgtgatcatttttgtgaatattctgtagatatgcaatcaaatagttaattgttttcaagtgttcagaaatttttcagttaagtcaaagttacctattgtgttattcaaattatgtatcttaactaattttttctttttaatcttgtgatctagttactgagatgtttttacatctcatgattcttggttttgttaatttctctttaaaattcttttgatttttgttttatccaaaggctatattagctacatataggtatacgatcatcatatttccttat

SEQ ID NO: 60440 - DNA, 1127 bp, Homo sapiens
taactaacattgttttaaggttccgtttctttttttttgacatggagtctcactctgttgcccaggctggagtgcagtggcatgatcttgggtcattgcaacctccgtctcttgggttcaagcgattctcctgcctcagccttccaagtagctggacttacagacacctgccaccacgcctggctaatttttgtatttttagtagaggcgaggtttcaccatgttggccaggctggtcttgaactcttgacctcaggtgatctgcccacctccatgtcccaaagtgctgggattacaagcgtgagccactgcgcccggcccagtgttccttttcttcatctacttaaattgaataaaattaatgctatgttagaatcatatcatttgtaaattttaaagacttgatattttgtagcattatgataattgttttaatatatgagctaaaatagtatgttagatatatcgtgaaatgtgttctgttttttcttatgtttttggtatagggtctctatgctgtcgtagaattttgccaaaaggaaagcataggttcactgcagaatgggactcatactccaagcacggccatggagactgcaattccattcagatcacgtttcttcaatctgaagttgaaaaaccagacttctgaacggtcacgcgtacggtcaagtaatcagttgccacgttcaaacaagcagctttttgaattactttgttatgcagaaagtgtaagtttttaggtgtacctcaacttttagaactatgtatttttttatgaacaataaagattcctgtaaaatgttcaagctacattattgtttaatgggtatagatcttcagttttacaaggtgaaaagagttacggagatgaatcgtggtggtggatgcataatgagatgaaggaaagtttttttctatttctagctttctaagaatgtcgtcatgctcaacacattgagtagatgttgagttttgacatttgagatggtattgatgactggcatatggtcttgagattgtatatggttcctaatgtctttttctttcccctcctaatgtcttaacgtagtgaattgtagattcactgtagatttcctcatgtcaagtcattcttgcattcacag

SEQ ID NO: 60441 - DNA, 1057 bp, Homo sapiens
taaggaccacttggaggaaggacagttggtagactgagatctaattgaaaagaatagcctctgccctcaatatggaagaaagtattcttccatattgttaaataaatataacactatgaattacattccttcatagttgttaaagtaaggtaatacagaggtggaagagattctgccatggagagtcagaagtcttcacagacctgagcaagatttggagggtgaatgggagtttgccagacagaaaatgagaaggtagacattccaaccagaaggaagaagacatagatagttcatagcatgtgatagtattgtgtgtgtagagtaccatatgtgaaaagtacaacagaaagaaatggtataagtgacatgaaagaggggagatgggacatggtgcaagcactttatacccatgctatggagttgagatgtgatcctaaaggcagtggggaaaccattaaaggatttaagcaggtaagccaaagaataagacttaaaaaaaaaagaccattttataaagaacactttggcagttatgtggaggatagcttgagaaaaacaaaactagggtgaatgagactagtttaggagtcagattattgtgatacaggcctgaaataagagattgatgttaaagaattgtcattgggaatggaggcgaaggcacatagttaaaagctgtattttcaggcttggcgtggtggcgtcatgcctgtaatttcagcactttgggagtccaaggagggaggactgcttgaggtcagcagttcaagaccagcctgaccaacgtagtgaaaccccatctctactaaacatacaaaaattagctgggcgtggtggcgcacgcctgtaataccggctactggggaggttgaggcatgagaatcgcttgaacctgggaggcggagattgcagtgagctggggttgtgccactgcactccagcctgggtgacagagggagaccttgtctctttaaaaaaaaaaagaaaaaagatagtaagatagtgggtttggagtatttccttgatccatcagtttcatagccttttggaagaa

SEQ ID NO: 60442 - DNA, 1035 bp, Homo sapiens
gtggcacataactgtagtcccagctacttaggaggctgaggttggaggattgcttgagcccaggaagtcgaggcggcagtgagccaagatcatgatgccactgcactccagcctgggtgacagagcgagaccctgtctcaaaaaaaaaaaaaaaaaaaaaagtataaagtggaagcatctgtatgcatgattgaagtcatgctttccatatattttttccactttgccttttttctgtctaaaacactgtatcttaagcttttccctatgttattaagtactcataagcattattttaatggttgtatcagaaaccattatctggactcattatcatttatccatctgcagttgctggagatactgccgtttctgccacactcagtcaccttgactgaccttgctctgtgtccagttatctactaatacacatactggtcatttaggagttaaagttaagaataaacagttatcatagttcctaacacttcaaaaagaatgtatcttcctaaaaatagaatgacttggtggttaagataattttaaagtaaaatagataaatcggtattgaaattaacattttgctttcttcttgtatctattcttcatttctctgtcattttgatggataaagtttcatttggagggatttttatttcaaaatagaaatagcatatgacatgagaatgggaactctgaaaggttcaactttctagtcattagtttcctaagattttcacaaaagctaccgatagccaatcatgattggcctgtattgaaagtgagttgacattacatacaacttatgcatatactttctatcagatatagaaaaataggtggtgtgtttggaaaagtattgggctaggagtcaggaagcttgactgttgactgttggtcccaaccctaggcttgttcagctgagcacccctagacagtaattcagcagctatttcttaaatacctaatgagtttcagactttgtagttgggctgggaatatagacagtcatgcattcatgattctccaagcctc

SEQ ID NO: 60443 - DNA, 1462 bp, Homo sapiens
agaacgtaatttgaattggtaaatgctggattagtaaaaactaaaaatcaatccgctatttatgtctctaacataatggcccttaataggcaaccacttttcatgagtcttgtttcagacatcccagactccatttcccagagaagcggagaatgaatgggtgctgtatgttcactgccgggtgtccgagaagctgcacaggaagtgtcttaacgtgaagagagtccacactggacaccggcacaaagggcagagtgaagggacgaagtgtcagatgcgtctctgccaccagcacacgtttcagcggtgctagatttgactaggcacaggactctaaactggtggtttgctgactattaacctccacggtattgctatctcatgctccttgaccccttcctaattttgctgtggttcggcagctccagtccactgttgaaatgctggtagatttcaaaactccgttgggacatattaaattctggtgagccagtgggtgggatgccttctgaatgacaaaggggccccgtggctaaaagctgaaggaaattcatgcaatgatgaatgtgctgcaattaatcaccagagatctgttcttttccttatatgcgtagtatagtgcagggtccagggttggggagagtctctgagtccagatcttcatagaattaaaaataatgaatatttgtaatcaggcatcgcttgaccaacaactccgcctccttagttggaaatacagacgtccacttttcgctagtgtgtaattattttctggaatgctgagaattgttcccctgacctatggctcttttttaagcatctgggatatgcagtcaatttgcaggttgctattttgaagtcagggagcctcagagaatcgaatatatgccacataagttcctgcaagatggactttctgggagtcctctgatgaggttgggagaaggcaaagaggagatgtttccatgtaaaggctgagcaagctccaggccactgcagaagttcagctttcttcagctctgtaagctggaccctgtggctggagtctggccaactgcagggacaagtttctattattatgtaaatggagtcccagtgcggccttggaagagtttttggcacagggtaaccctttgtctgccaaaaggtagcctctccctttgcttcaagcccagagtgtgcattttgcagtggtgacctgtaagccaccggtcaacctgcagattgccttattaggcagactgcggaggctggtggctggggactggctggcagaggcggtggcagtgagcttgtgtcctgtacgaagccggagaaccccagccccggagacgtggcctagtacttactgttctataaatgatagtcctccgtggtgacaggaatatacactctccttggcaggcatactttatgggttggttggagaacaggaggtttgcagggggaggtgactgtccga

SEQ ID NO: 60444 - DNA, 1107 bp, Homo sapiens
tactttaaacagaactgacctatgtctttttttctgacaatcagttctccaccctttcttcctctgaggtacctgcatttttctccccaagaatcattagtcatagatttggaatgaaccagaaactaaaacgattggagataatttcattacaaatgttaacattactcttttgaacatttattttaaagacactaataaagtcttttaggtgattgcaataagccttttctttgaaaaagaattctgaagtatagaaaggctggcaccgttttctttcaacgcatctgataaagaaaaaatagttgtgacttgtaatatttcttattaaatgtacttttgccttttcatctctacctacgtggtctgttttaaattaccttatgcagtgatgtaacgcaacattttatttgcaggcttgtccaaaatattaccactaaccaaaattcacagagcatttcacagtgcacgcaggaggagaattagactaaaatgaggaatctggaaagtctgaccgaccagtgagatgtgatcaaagagaaatgaaagggcctaagtgggctttccatgggggattgcctcaggtcaggcagttctgcctccgattaaggatctacacacataaagaaaattcaacaaagaaaatgagaataccatttatggctgttgctagtgtacaaaattctcctttactgggctatgaaaatatatccttcactttggaatttcagtccagctgtggtctttagtggcgtatagtagatttcattaaactcacttccatggcactttttaattttggaagtgtatcagtaactcacaacagtatgtactcagacaactgcaggtcgtaatatcacactcccctgtactgtccacttaaattccagctcatagccgggcacagtggctcatgtctgtaatcccagcagtttaggactctgagataggaggatcacttgaggccaggagtttgagaccagcctgggcaacatggcaagatcccatacttgtttttttttgtttgtttttgtttttttgttgttttttttttgagacagagtttcactcttgttgcccaggctggagtgcaatggcgcgatctcg

SEQ ID NO: 60445 - DNA, 1035 bp, Homo sapiens
caacactccctcttttctttttgttgctaattatctatgaccttaccatcaagtttctaatttagttatccatggtactgacattgttccttgctgaattttttttaactatcctatttgccatactttttcctgaccttgtgactataatgtaatgaggagtttagagaaaaataccaaatgctatcactgacacctcttgtacccagggttgatgtaccttgtgtttatgtgtctttattaattcagcatataattcttcattttcaccttaagtgtgtttgtattttacaaattagtctaagtccacctggtttgaacacacgatactaactccacacacccattttagaaggagatgtctagtttttagaagagattatcttgtgatttcctgtggtcattcagcaaacatttcctgcagccctactgtgcaccaggtacagtgtccagaactaaagatacaaagacaaactcagagtccctgctcctaggtggggtgtggtgaatcacagtcttgatcccacctccccaagatcccatagctccatcaccaaacagttgtctatccaggagccagttacctttctagccctatttccttagcttgcaaatgagattatttcccttggttttcttgaatgttccatttctctgtaaatatggtcagtctgtaattattgcgaatttttcttggaattgcatgagcattgcttgggcccaccgactacatattgtggttaaaattaaacagggggcagtctaacaggtgaagcttaacttaatggcttctgcctcaaattaaaattttggggccagtcgcggtggctcatgcctgtaatcccagcactttgggaggccaagacaggcagatcacctgaggtcaggagttcaagaccagcctgaccaacatggcaaaaccccgtttctactaaaaatacaaaaaaactagctgggcgtggtggcaggtgcctgtaatcccagctacttgggaggctgaggcaggagaatcacttgaactggggaggctgaggt

SEQ ID NO: 60446 - DNA, 1036 bp, Homo sapiens
ttgagactagcttggtcaacatggtgaaacccggtctgtaccaaaaaatacaaaaatttgccaggtgtggtggtgcatgcctataatcccagctactcgggaggctgaagtgggaggattgcttgaggtcgaggctgcagtgagccatgatcacatcagtgtactccagcctgggcaacaaagcaagaaggaaagaaagaaagaaaggggaagggagggaagggaagggaaggccagagtaactcattttaacagagagagaaaaatgaaatgaagcaaagtctcaaagaagtggtttggcaggattctctgttacaactaactttcggttttgtatttattttcaccaaatagttattttcaattccaaccccatttcggcttagttggcattaagacatacacggtgaccccgcaacttttgtgaagatagttttccagcgaatcagaccttttcgaagaagaaaaaactcttcatagacttggccattaaaaccctgtgtctgtttctgagttccagagggaactggatatcccactgtgcttcagcagctgtgaggtcagtgtccatgacagccccagaacaagtccctgaaattttaagaaaggtgaatctgcacatttatattctcagtgtctgctgccattgaaattccagatcataattcaggagaatgaagtcactttaaagtgcgaggatgggagggagagaaaggctgagggaatgctctctaaactccagatgatcattctgcggtcagggaatgagttggcctgaggttcacatcaccctattgtgtgagcacgtgcatgctgctgtttgaacccaggcacaaaatacttgaaggtgattgcgatgccctgaccaggctcttctcttccagtactctgccatgttccctgtttgttttaacctgcaggaagaaggaggagttgcggatgatagtgccatttctaatctgctttgggtaagcctgactctaacacaggtgtcctctcgatggtggccagaattacacttcgcgtgggtaatcct

SEQ ID NO: 60447 - DNA, 1046 bp, Homo sapiens
tgttaatctggttgtttgttttcctatggttgagttttaagagttatttgcatattttgggtaacagtcctttatcagacatgtcttttgcaaatattttctcccattcgtagtttgtcttctcattcttttaacagtgtcttttacagaagtttttaatttcagtgaagtccagcttgttagttatttctttcaaggatattgcctttgctgttacatctaaaaactaatcatcaaacccaaaataatctaaatattctcctacgttatcttctaggagtgttatagttttgaattttacagttaggtctttgtgatccattttgagttaatttttgtgaatggtggaagatttgtacctggatcttttttttttttttcacatgtgagtgtctagttattccagcacccatttgttgaaagcagtatcttttcttcattctattgcttttgctccttgtcaaagatcagttgactatatttatatgaatctactattgagctctctatttcattgatctatttgtttattcttttactagtaccacacaatcttgattactgaggctttatagtaagtcttgaagttgagtggtgttggtcctccaacttttttcttccccttcagtgttgtgtttgctattctgggtcttttgactctccatgtaaactttatgatcagtttgtcaatatgttcaaaatattttgcagggactttggaactgcattgaatttatagatcgagttgggaaaaactgacatcttgacaaaattgagtcttcttatccatgaacatggaatatctctccatatattgttaagtttaagagaaaataacatttgccaaagacatttatgtttcatcacttcaaaattaaaatttcaaaaaattctatatttttacttctgaccagtttttcccagctgaatgtaaatattttatatactaagtatgtagcactagctcatctgtgttctcagaggtcaagtcactccttttctttcctccagcagtactggtgtcttcatacttaataatacagagg

SEQ ID NO: 60448 - DNA, 1829 bp, Homo sapiens
ccttcttttcatcttaggagctggtagatggtgacaggactggaaaacaattacttcaaggtctgagcctagacccgtgatcttcatctcttgttcaggctatttgaggctgcatgcagtgacaagggactgaaatttctcttaaggaaggggcaaagctaaatttctttcacagtgtgtagaaatcgaaatgatgctagcgtttttgaaaactgaaaagtacaactttattactttgaccttttttctattgcttaatacgtgctcttataatttcttcctttatagtttagtttaactagatgtgaataagataaaaatttaaaagccagatcacagtattttcttcccatgaagctctccggttgtggaggagttttacccttaaatctaccctaatccttataatacgacttagttgtgctctctcttgttggatcacatccctgtgtgagaaacattaagtgagatttgctatgatttctcagtcgatgtataaagacagaagcaaacccatcagcaacatcatgcaacctaaaagcattcatgttaattcattctttgcatagtttccagctgtgacttaccaagtctctgaccatctttaaaagaagaccgtcctttctacctgtttcactaccttctatacacacacacacacacacacacatgtgcatacacatacacaaatactcattttctcctccaccctctccctctgcctctccccaccacattcatgggatctatctttgaaagaataaaggacagatggggtagaggtttctgttcagattcttctccaattctctcttacgattccagtcaacactcaacttgtatcggctaaacctgggaaatgctacagtacttattaatgtacatatgtccttctctaaacaaggaaagaaaaaattaaaaggaaaaaacaagacaataatgaagaagctgagaaaaagcaaacggacaaagatatccatcttctttgttttcacactttgagttcaaaatagaagagcaacttgtgatagatttttgttaaattctttggagtataaacagcctatatattatttacctccttatagagccatgtaaagtcagatagcaggaattggggagccataagccaaccctactaagtagcaatgttaagtagaaatttttagagaagcaaaaacgtttatgtttaatattatcatttagcagagattacaaattatttgttcttgacctagatctggcaaagaaatggaagctttaaattctaagaaggtcatattgtcccagggttcatatccatcatgtgcatgaagggctctgggggaatcccagtgctttgaaaaacaaaattgttgactcaaggccaccatctttctgagtcaccatccacacccactaccccaccccggactgtcgagatgcctgagataattcaccgcagagttgactaagtgaatagtgagtcaccatagtgatggctggacctttggagacgccaactttcttggcacttgatgtgtttcttggaaatatttgaacccaagtgccatcttggtttgattaaaattcactcctgaaacttcattttcaaagaaaacatattctctttgttgaattttgatgaggtcttttgggcaagtgaacctcatcgtttatttaaaaaggatacgtgattcagagagttacttggaattaggagcttctcgccaatcataagcagaaaagttagggttttaaaaaaatcagtaaatcttaattttgataaaatgttaaacttatagaaaaatttccattataggcagagcactttcgtaccctttaccaga

SEQ ID NO: 60449 - DNA, 1026 bp, Homo sapiens
cctgtctctaactgggcaagttcctcgtgtgctcacatggataaagttttctagatcaatcatgttctttgtgagtatatagggataaaaatctcccagttaactgagtttaactagatgggttaagacagagaaactttaaaaccctgtagagtccagggcatgaaaacaatctatttttaattgtttgtgtttacaaagaattgttctggtgctccagtgccccaaaccggtaagtcacaggacagaggcgttcatctaaagttacagcatcgccaatggtgatctcccacccaacctgcacgtaaggaagctgagcccatttcagatagaacatttttgaacatctttggacaatatacttactcctctttgtctacctgcttttttcacgcatgaaatgctgcaggctgagatccacaccgctgtcatttctctctcctgttttctcttctgtacatttatgaacagcgggtcacagaaagtcgagagagccaaatgatgattgaggagaggaagcagctcatcactgtgagagaggaggcctggaagacgagaggcagaggagcggccaacgactcgacccagttcactgtggctggcaggatggtgaagaaaggtcagttgtgtgtgtgtgcctgtgtatgtgtgtggtgtgtgcacaatgcacacatgtgagcacactcacccatggagggcatggtggtacacgatagctcaatttaaaagaagaaaccatggtctctttaattttttttttttttttaagatacaaggtcttgccctgttgcctaggctggagtgcagtggctcagtcatggctcactgcagccccaaactcatgggctgaagcaatcttcccacctcagcttctctagttgctgggactacaggtgtgcaacaccatgcctggctttttaaaacttttatgtagaaatggggtgtcactgtgtttcccaggctggtctcaaactcctgggcttaagtgatccttccgcctcagtctcccaagtagctaggactaca

SEQ ID NO: 60450 - DNA, 1039 bp, Homo sapiens
gaagtttgtctcctcttccttttatattaattcctgggtccttctccatcaaacctgatttctctgactgaccaaagtcaatcctggatatgctttaatagatgtctaaaatatgtcctcagttccaaggcagtgggatgtctctggggcagtccattctttgctgctgagctcttggaactgatttgttgtctgtattcaaacatttatgaaattgacttacatatgaaatacttagtaaagtcatctgagagctttaagtcttcataggagtgtttggggctttgtttcatgtcctgcaggaaatcgttaaaatttggggtccctttgtcacctatatgcacataccatcattttctaagctattatttaaaagcagatttcccaacttagtggtaaacattttcacattcactttgtcttaacatcttgtcatcaactttataggcttagctttcctttttctcagaacctttaggggtccatgctttcatgaatagtacctaattcattataggtacataataaatgtttgcagaaggaaaggaggggaaatccctgaattgtaaataactcaaatcttagtggggaatcccttccaatacatctcttcagcctcatcttggaattgtgaaaagatgagagaagataatttactcttacagtaaattatttgccaattttctgcatcagatcacagaactggacactcatgtttaaactcctttaacgtgagccccaacccttctttaacagaagcacgtcgttaggtgcagggtgactaagtagaactggaactgagaacctgaaccagacctcaggttttccaacttctagcccagactttcatcttgatgactttctgctttggtttcttttttcctcttccatcttaaaaatctgaatttatttgtaagtgggttcttactaccaaatgccactgcccttgtccacattgacatcagaggatatagatttgctcttattcaggtttgtggaagcaacagttcccatttctcggtggatgagttcgctttca

SEQ ID NO: 60451 - DNA, 1035 bp, Homo sapiens
acctgccctgctctgtggtttcttctgaaaggttgaccctccttgggttactgtctgtgtcatgtccccaaggccactgtccctccctcccctcagcctggaggagagctccagtgtggggggccacttgctggcaagtgtgacacagttcattctgcagatggcaccaatgcactctcagctgcccccaccatctccaaagggcctcagaactcacagctgcatttgctcaagtctacgtgtcatggacatgttttcccacatctccaccgttcattttggattatcagctcgtcagccactacagtccttggaaataataaaatcctgtctacatctgcagttggttgtcccacagtcgtggtacgtgtgaaatgtgtgtgtgtgtgcctgcatgtgtgtaaattcttatatgttgtgccgtctaccctgggactcctggagatcggtcagggtcccggagatttccagaagtgaccctgagatgctcagtagctcgtctgtgtgttccacaggtttggcgtcacctactgccataaccccagtagcctcagccatttgcggtaaaacaagaggcaccacacccgtttccaaacccctggaaggtaagtcgccaaggcctcggccacgccaagcctgatcagaagaggccttagtgatgctgtctcactgacggtttctgcttgcctagatatcgaagccagaccagatacgcagttagaatgggacctgaagctggacaggctggaaacctttctaagaagactgaataacaaaaacatacctaccggaagccagaaggctttgctctcagaatctctaaatcctaattctgattgcttttcttcctcagctaaattgttttctttctattatggctttcctaattcatactgtaatcaccgcctttgttgttatcttcaaaaaatgaagttttggtcaagaccgattagactatcaagccctaattcatttgataacatactaaattggggactcccaatatcacatttgttcttgaatctaagcccttgg

SEQ ID NO: 60452 - DNA, 1047 bp, Homo sapiens
gtgggaagcaaccgcaggaccttgtatatcacaaccgtatttcttccactcctggaacttaggaggaaatagaatttttaaactattggtgaagcataattggagtccttgtttttataaaactcttacgtcatttgcttgtttgttgatagttggcgggatgcacgaaacggtgctcactgtcaccggcaaatctgtgaaggagctgatgaagccggatgatgacgaaacctttgcccaattttaccgcaacgtggattgtaatatgctgagaagtcctgtggagctggacgaggacttcgatgtcattttcgatccttatgcacccaagtgagttatttgggtctccgtctttcctccactgagaagggcttccttcgcctgcagagggcacatccatgaggctcttcccccagtgtggcctccttctctttctaactccatcacagccgcgttagtattctagagccagggcaccgtgttgcaggagccaggggcacggagcctcgcagcagataaaacatgcagacggcagaccagatgtgcatgcaggcagaccgcgtgggccacagatgcttgtcctgtgccataaagagtcaatgaatttttcacataatttgaataccgttttgcagtttttatgtttatatcacttagcagagagttcaacacctgtctttcatttgacatatttcttactcataactttgcaaaatatttggatgagatgggctcaaattagtacagctcactagaaaatcagtaaggcatgttacttagcttccaatcatttacaaaatcaatagatctgcgggttttctcagtgatgactaagggtttctcttcccacgggatcatgactaaaccaactaggaaaagcgataatggtattaggatcccgtcaatttcaagtgccagaaaaccatcccagttcaaaccgacttcagccaaaaagaaaaatgagaggggtttactggctcacttgccgaacagtgcgggggcaggtttccgggctcattcgctggaaagtgctggggggcaggtttc

SEQ ID NO: 60453 - DNA, 1046 bp, Homo sapiens
attccgctccagtgcccttcctgtccgtagcaagggagattccaaagacaaaccaggggtctctgggccatgaggaggagactcggctgcctcctggtggccactgtatagatgaatccttgagatgagaatgaaggaaatatcctctccctccaggagggtttcccacatgtttctgtgtaaccactatcctattgtgtgtatttaaaaagactagtgagaagctcacataaccaatctctgtcctgagtcctaacccagagactacatgatcagtgtaattgtggaaagctcaaaatcaacaaatatttaggaaaaggtgttgaaagccacagaaggtggcgcctccatccttcctgttgagaggcccctagggttcatagtggaaactccccaggggaagatcggacccttcctgaaggcatggcttcccttgcctgggccacagatgtaattgggtgcaggaggtggccaggggagagaaaggccccgggagaagagtgaaggagggaaaaggagcctgtgtgctcatctccctggaagagggagccttcattaacccacgcacatgacactgataatggtcctgataagtgggtgacatttgggaaagcacaaaccaggaaagcagccgctagtgccatcatcatgccctttctaaatccccctgctgccaccctgggccatgggcactcttattagcagacaagactctagaagtgaaagcgtccgcagcagggatgcttccgatatggggtgcgtcctatccccgttctgtctggaaagacggtgagtgtctgcctcgtgttcaggaagaagacacgtgcagaccaggctggtggaacctcgagcttcggcgctcaatagtggggactgcttcctcctgctctctccccactgctgcttcctgtgggtaggagagttcgcaaacgccatagaaaaggcgaaggttggtacctgaaaaataaaaacgctttagctaacatctcctttacacaccggtggagtgttcttcctggcgtcagtcacaaagcttctcaaaagcc

SEQ ID NO: 60454 - DNA, 1634 bp, Homo sapiens
agaagacaccattggaccatgagtgcctggggtatatgaagtggcctctgtgtatatattaagtgaatgaacgagcacatgagagggggaggaataggggagagaggcaggaagtcgacaggaagatgtacctaaagaactcttgtgaatcgcaagttgtaagcaggttgagagttcagaggagggaacattatcctggccacttaggacactgggaggaggaatcgtgcccacagggcagaggctggctcggtggggcagtgccagctgagatctcctggcctttttgtgtctgtgctggtcaccccattaggatttctgtcttcctccgtttgactcactgtcaacagagaccctgttgcacctgattcaactgttgcatgttcttgaagttaacaaattcttttgtgccatttctcccaggtactggtgtttgattttggtagtgaagtttacgtatggcatgggaaagaagtcacgttagcacaacgaaaaatagaatttcagctggcaaagcacttatggaatggaacctttgactatgagaactgtgacattaatcccctggatcctggagaatgcaatccgcttatccgcaggtactactgcccccaccttgggacggctccctgagcgagctgattcccttcgatccctctgttctcaccacagtcctctactctcgctctttatagggttcagttttcataaacgattatatgcagtggactgtgaatattcacaaaaggaacagttctttaacttttatctaactattatagaaatatggatgctgtcgtcttccagaagaggtttgttatagttgatttcttgaagtgagcaagaaatgctgcaagttcctccctgcggcattccaagtgctgctgtggcagatgaacagcaattgtttaaacaaattacatgcggatctgaaaggcttccccgggtctggaattcagccattgatctgaaagtgcaaaagcaacatgcctccctctaatttcataccttcccagcatcgccctcgaattccaggatttatttggcagcagatgatgtttatgtctttataccttttgggaagggaagagggagaggagatggtattaaaacaatgattgcaattgtaatattccctgcaggtactagactctttaaagttatttttgaaattgaatagaatatgtgcaaactctaaaattgtgattatgagaaaaaaattcttacatgcaaaggattgttgttgtctttttaactatcagaccaaaaaaagtagtgctttttaactatgggtgctgttacaatagatgagaaaccaatgaaccaacaaacagcatagaatattgggcatcacacaactacattttaatgttttccattgaactggtatatgaatttcaactttcctgcctagtttcctgctttaaaatccaattattgattttcttattaattattatagaaatcattaaaattatgtcagtgtggtaagaagttttaatgtccttgttaagcaaatgcactaatgtttaacctcagtatggtaacaactgttgttttaaggactggaactacaacagctcaaaagattttatttggtatagcagagaaaaaaaaacaagctaaagcataaa

SEQ ID NO: 60455 - DNA, 1066 bp, Homo sapiens
tttatttatttatttatttatttatttatttatttatttattttgagacagagtctcgctctgttgcccaggctggagtgcagtggcatgatctcggctcactgcaagctccacctactgggttcacatcattctcctgcctcagcctcctgagtagctgagactacaggtgcccaccaccatgcccggctaattttttgtatttttagagaagtgaggtttcaccgtgttagccaggatggtctcaatctcctgacctggtgatccgcctgcctcggcctcccaaagtgctgggattacaggcataagccaccgcgcccggccctatttattttttttgagacaggttctcactctgttgcccaggctggagtgcagtggcgcaacctcggctcactgcaacctctgtctcctgggttcaagcaattctccctgccttggcctcccaaatagctgggattacaggcccccgccaccacaccccattaatttttgtattacactttaaattaggcaactgatcaaggctgtgaaaagaatgaccccataagttcttcacactgaaaattgaatatttacattgataaaattaaaaataaatacacataagaaaaattaatttgtatataggactacatttcaatacatgcaggaaaactgtaaggaaaattagtgaaatgcccattttgtaaaatatctttaaagaaataaaagtctaggcttacatctgtaatccctgagttttgggaagctgaggtgggaggatcacttaaggccaggtgttcaagactaccctgggcagcacagtaaaaccccatctgtacaaaaaattaaaaaatcagcccagtatagtggcatctgcctgtagtcccagcgctttgggaggctgagccaggaggatcacttgagcccaggagttcaaggctgcagtgagctatggttataccactacactccagcctgagcagtagagcaagaccctgtctctaaaataaaaatacttttaaaaagagatacagttgtattttgggtatatacggtcaagtctgtttagaatgttaggacg

SEQ ID NO: 60456 - DNA, 1052 bp, Homo sapiens
gggactacaggagcgcaccaccacacgtggctaatttttgtatttttagtagagaggggattttaccatgttggccagactgatcttgaatttaaccccctggcttaaattccacttgcttgacttgtaccttgtaatccgcccacctcagcctcccaaggtgctgggattacaggcctgagccaccgtgcctggccgagtctctcaattcttagtcacttgtcagccttacagttaagtttgccatttcctagacaagtcttctgcaagtagaaaagttttcttatacagttcttctaccacttttctcaactctgtcataacatttgtgttatttaaaggtagttttcaaattgtgagtgttatttctatttcataaaagtaagaagtcggggtggagagagcaaatggtttgacgcagacacacaggcggccccctctggacccactgcagttagctggacatgtgctgtacagctactactaatttcccaaatctttacatgatttgactgcacaaccacagccattactgtctatcatgtgaattcatatttgaatcttttttaaaaacccctagattttctgattcaataaaaaatggttatgatactgtctaaaaaatgtattctatgtcttgcagacataaaagtgtatacttacagcttacagacctaacattttggtatttgtgaataagaatattagaactcaagtaaggcatacttagggaggagctagttaatactcatatcattcttaaagtttgaggaaaagaccttacttattttggacttagtatcaattaggtcttttataaagttcttgatgaattttctatctttagtaggatttaaagcgtcctggcatgtagtaggctctcaaaatgcatattaaattatgtataaaatgctttaaactctcaaacagtttttataaatcaatcacacctgttgctgtgaaaatattgtcatctttttttttaatgaaacaccaaagtggatggaattctaaggccaatgaaagcaaatgttcatttaacaagtatttat

SEQ ID NO: 60457 - DNA, 1122 bp, Homo sapiens
tattcactggcagttaactggcactaacagatatcagtaaaattaaaaagtgttggctttattgaagcaaaataacacaagtattttagtgagtagaagaatatatgcatatatattcacacacacatctgtagacatacacttagaggatatagaatttgtgtatacatttctttgcctgtttcccctgatatccatttaaaaagaaatagaaaaactattttactttttgcaatgtataaaaaataaaataatgattttttaacaggcacttctggaccttccagaagaacctgtacctccagatggaggtagagtcctttcttcatcaagagtaattaaattaccctcaccataaagggtacactctaaccccggggagaaataccagtctttccctgccccatctagtctcttccacacagaagagaagttctgacatgtatgagaaaaaagacatatctttaatgaggcaaaattaggttgccttagtggaacatgtagcttttagtgaaaggagggaatttgttatgaaggacccttaaatagagcaaacaccctttgatctctctaccagtgagaaaggtagtatcataactcttgagcacatggaatctggatttgaaactcagtcctaccacttaactgtaaaactttaggtgtatcacttgacctcagcttccacatctgtaaatctataaaatgaagataataagttccactctataggatatgtggagactaaaggaaatagcatatgtaaatcacctagcatattgttgtttgcatagtaggcacttatatgatgataaaactaccattctcaatggctattattaatatctgggacatcctcatctttgagactggtcagtgagatggccatgaggccgcctcttgcctgggatgcctaatggccttggaaggccaaacatgctccaaggggacccatggggagtaagcaggaattagaccgcttggtttgattcttacccaggagttgatccgaagagagagtgagagtccttgagactcacacaaaatccagccgggaacactagggcaagaaaggagatgggcaaaccccaactagaaataaagagcatgtgtttttcttgagtg

SEQ ID NO: 60458 - DNA, 1036 bp, Homo sapiens
ctgcctcagtcatgcaagaaagtacctagaactacagatgtgtgctaccgtgcccagctaatttttaattttttttttctggagcagggtcttgctttgttgcccaggctgatctaaaactcctggcctcaagctgtcctcccttctcagtctcccaaagtgttagaaacacaggcatgagccattgtgtctagccaacaaatttttttaatgaccctaattaaacatgttcaattttttatgccaaaagaaaatagatgtactatagtttagaatgtaacatttgtgtacaatttttaaggaaaaaaataagatcaagaaatttaaagtttccatgggccacttagggttatgtctttagtcttcccaggattatttggtccctcagctctgaattaggactactttgatggaaaaggttagaactacctatttaagttgtcagatttgtaattctgtattttggttttgttcagtggagctattataacatttttattcagcatggaataggaactggccatgggttggtctctgaatcatcaggcttttctggttaaaggtaaacatataagtattttttcttttagccatgtttaattttgaaaaatgtcattaaagtaagcattgctgcattataaaaatgattgacaagtccgggcactgtggctcatttctgtaataccagcactttgggaggccaaggcaggtggatcacgaggtcaggagttcaagaccagcctggccgatatggtgaaaccccatctctactaaaaatacaaaaattagccggttgtcatggcaggcacctgtaatcccagctactcaggaggctgaggcaggagaatcgcttgaacttgggaggtggaggttgcagtgagccgagattgagccactgcactccagcctgctgggtgacagagtgagactccatctcaaaaaaaaaaaaaaaaaaaaagaattgataagaaccaggtgatggcctagctgttggagcagtactcaaaaacaaggttgtcctaggccacaaagtaag

SEQ ID NO: 60459 - DNA, 1048 bp, Homo sapiens
gaaatagagttattactctcattttatagaaaaagaagttggtttagagatattaaataacctattcagtgccacccaactcataatgtagtttggctgtttccactgagctattctgtgtcttcagatattctccaataaataaatctgacaatttctggataaattcacagaatctttgcctaacttaattaggtttcttgaaactcatgttgccacttgaatcattggtaattcagtgtttgtaagcctattctaatttgacttaagtagaaacttacctgagttttggtaaaccatacttgctgggtaggggagaaccgtgcttgcagaagacagtcctttaaacaggcagagacgtttttatgtagggttttgaggaagcacagagtttgagattggctgattttgaaaagtgcaaaaatttaaggattagccagctttaaacttagagtttagagactgaccggctttgaggagcaaaggtactgaagcggggcagttgctgattggcttactttgttggcaaagtgcttaagtggaaaggttgagtagactttaaggatggattgactggggtagatttaaaactggttttgtggttacttgtttccagcttaggactagagccaaagaacaatcttttcctttcttgaagttgaagaatacgtactttttatgtcaaacatgttgatgttagctatggcgctaatataacatacttttgattttgcttttcttctgaaacttaaaagaaaaatggatgtacaaatatcacttgttttctgtctatcaatttcaggacaatatatttggaacccaggctgcctcaaggattatttttatatgtagttcaagaggtaatatattatttgtggaaatatattaatgctttaaaaattatggtgaaggctgtgctgtctatggtgaaggttatgtctattttttttctcttttgggagtgtgttatattatgtgcctgccacaattagtcttgatagatgccgaattatagatctagaagtctgttgtttttgctgttattaga

SEQ ID NO: 60460 - DNA, 1112 bp, Homo sapiens
ttgtgtccatgggtagaaaaaaagacatggaaagaaagacagcaatgccttttgtattagtctgttttcatgctgctgataaagacatacctgagacagggtaatttacaaagaaaaataggtttagtggactcacagttccacctagctggggaggcctcactatcatggtggaaggtgaaaggcacatcttacatggtggcaggcaagagacaatgaaagccaagtgaaagggaaacctcttataaaaccatcaaatctcgttagacttactcactaccatgagaacagtatcggggaaacccatgattttattaactcccattgggtccctcccacaacacatgggaataatgggagctactattcaagatgagacttgggtgaggacacagccaaaccatatcaccttctctggcagtgtggcagaacagaaagaccatggactgaaagccaggcaaagcaggttccagccctgccccttacttgctggctgtgtcaccttgtctaagtaatgtaacctctttgacctcagtttcctcatctgtaaaatgaggataatactagcctgtttaattggatcatgaatagtgatacaactagctattatttattgagcacttactatgtagagtatttggccccagcgctttatgtgttataactcacttaatattctcaaacacactaagagataggttctattgtgatcctgaagaacctgcggcacagtaatagccataaagggagccattatgatcaattatcatgatggtgctaatattgttgtgacagcactgacagctaacaatgaaaggaagtaaaacaggaatttcttcacttaaaaatatcataaaagcaagatttatatgaaaaaatactgagtaggggaaagacacatcattctttagatttacacttgaattttaaccccatgtgtctttctccagattgaaagggactagcacaccaaacaagaaaagacccatcccaagtcacagcatcaaggaaatttaggtacaccaaaaagcagacaagatcccagagtcttcccaaaatggataaacaaaccaagaaaagctgcttacatacaaagagatgtcaaatagcat

SEQ ID NO: 60461 - DNA, 1040 bp, Homo sapiens
gcgtgggactgatggtagccctgcctccaggaagcaggcaggcggggacctctgggcgctcggaggggcagctccgagggcacagggtacagggagaatcagccagatccctccctgccccgggcagccgcggcgggtgtggccagcgcggaggcaggacgccgccgagcctccaactttacctttccaactccgacagcccgtcgcctttctgaccgcgtccctacggtttcccggcatccgcctccctctccccaccacacctgaggaaaacttttccctcgcccctcaattcaaattcagcagtgcccacggttgccgcaaaccgcccggtccctagcaacaaggttccggccgtagagcgagagcctctaggtgtaaggaaggtgatgtcgtaaagccgggagtgtcgtaaaccaggtgcggtggggaggggggaggggtggaggcggaggggtgggggggaagggggagggagggggaggaggtgactcgagcatttagacacaagcgagaggatcatggcggatggccccaggtgtaagcgcagaaagcaggcgaacccgcggcgcaataacggtgagtggcggaggggaccggggagcggcggagtcagggggagctgggcagccggggcgcccccgggggtgaggggggcgagccgggctgggggcagccggggcagggacggcaaagtggagtgggaaagtagaaagtagtgctctctgcccccctccgctgccgccgctgccggagccgcgccgcggccgctcgctctccctgaaccgttatgtctcttacctggtctctctccgcctagcggctcccgccgcccctgccgcctccctggaccgttagccggcgccgacgccgccgcatccccggcgcagggcgggcggccgggacgcactggccacttttctggtcccgggtggagcggctgttgcttctttccgcacttttccccactcttgtgcccttcggcgcctccctctccccctcctcctggccccctcagcgcgattctccctcagcgccca

SEQ ID NO: 60462 - DNA, 1022 bp, Homo sapiens
gcgcgcgtgtgcgcgggcgccggctgtgcgcgccgcgggcggacagggttcggccggcggcggtaaagttgggacccgcgggccgggcgcgctcgcgtaacggggattagaggcgcgggggcgcgggtccctaagcgcccctcctccctggcgcctcccgctgcccggcccagagccccggcctggggactccgcggcgagccccgcgagtggggtccacgtttggcggggcgcggcggggcggcgcggggaacaaggcaggaaaggtacccacttaacgccgccgggagccgcgcggatgggggcgagctgggcggcgggtgtgtttgcggagttgttacctgggcttagagaccgggaagcaccacagacagatccccctcccggggcagacgaggtctctgcgccgggatgggccggtgtgcgtgcgcctcgcgcttttctctttcggtttttggggaagttgttacctgggccggacgcacggagcgctgaagccggataatggggcttggatggcgctctgggtctcgggtggaaggagggtgggggagggggcggacggaccgacggacgcgcggggctgctacttgcaccgcagctgcagtgtttattgatttgtgctgctgtgccaagggaaacacacacccctctgcctggcgtgagagttaaaaaaaaagagagacagcccgagggatcgagacctgaacatgtggtggtggttgcacagtcgccttttccagtttggagagacgttgtaagttgattgtatttctggttatctcggggcgatgctatgctttctctccctctcgtgcagcagcgaaatgtctgctgattgttattgtctggacagttcctgtggcgagaggggcgagacttgtccgcccgggggcggcgggagcgcagggagagcagcccccgcctgcgccgccccggtacctgtttgtataataatgggcggcaacggccctgccgccggccgcagcccaggctatataaggaattacacgtacatttcg

SEQ ID NO: 60463 - DNA, 1149 bp, Homo sapiens
ttctccttgagatcctgtgatatgaatattacactcgtaaggcatatcaacagatgacttaaggggggaaaagcgatcctgaaagatacttgaaatcaacaggaaagagaggttcttgatcgctgcagcaaatggcaacttgtgcaggtagaaaaaaagatggtgtttagttttctcctgcatgtatgtcagccccctcctgtctgctgctttcattctcaagggagggatttatttaccacgcttgctgtcagtgtttttcctttgtgtttaatattagaaaaacagatttgcgtctgtttagcacaaaacgtcttgtctgcagtatgcattactctcagaaaacaaaaggtgtttaagatagcactgtactactacaggtatcttccattttcatcacttttggctctgtccttgtatttctttttgttctcaaatgcatttcatccattgctggtgattatagccatgctatttgatttagccttatattttgcaaattaaaaatgaagttatattccattgtgttgtgaaacctcagtatatgtgctggttaatatttcttagcagtgcagtcatatttaagttgcagatgtttattggagaaaattgcctggcaaaacgttaactctcaaatctttttaatgaagaaatatgtgatatatacagtggaagattgtcgtagagatagtttatgttgttatatatgtaaataatgttttattcattttgaaataagatacgtggattttgctgctaagccttctgtaaaatattttaatttcctttctggaatatgtctgaaggtaggatattaaaaggagtatcaggtaatgtaactgacaggggtaaaccaattgagtaaggtttggccaaagcatcaaaccttgtgtggtaacttaatgatgttagtcatccgtaaaggagtgacattagaattgcttgaattagtttttaccatttataatttcatgctttgttgcattttaaaaaatctgtctttttctttttctgctttcttctatgtggttttcttcttgttctaccttttttttttttgagagagagatgtactctactaatgaccacatgctgattaattctctttagatggaatagaaggtacatatccttctgtcatcagcacca

SEQ ID NO: 60464 - DNA, 1090 bp, Homo sapiens
tggtcaaagtttaagagtagcaaggaaaattacaattgattgataatactgtgtaattatttttatataacttatgtagacttagactatggatgggttggcagagagctactaacggaggtggtaactagcagtcacttagatgttagtgatttttagattttatcttttccttccccttcaggtcttttcctactggtagccctcccccacctttttagttaagaatcagtgagtgcatacgttttaaatttgtcagttgtaattaaggaatataagtttgctttgagatcttatatgcagtaaaactctgtagttcgtacgttgctgtatgcttgtatttaaataattcctttcaagaaactatataaattgcatataaataattgcatgagactgtatttagttatgtcttttcattttgtgttcttataggtatattaatataactgtaaattttaagcctctcattaggtagaacattagaagtatttatttccttaattatttttagtggtgtttttataaatgcatcaatatcagtaccgtaatggaatagccatactgtttatcttgaactaagtaggtattgaattgccaggtaagcctgtgttaatttcttattttaggatgtcatggttcttcgtgtgtgtgtgtgtgtgtgtgtgtgtgtgtgtaaatagtttttcatttcctgacaggtatttcttgaatttagtattctaattcctgagggctcagtagtgaataggtgtgattcacttaaatgtttatgaactcagaaactttgccacaaagtcacgagatacattgtagcatggagcaaaacttaaagtatcttataaattgaaaatattaatcgtttatgaagatgaccctgatataaaaagcatgtgaaatatttgtttaatactgttttcttcctttctctagtctctagtatgtttgaaatggcatacctcctatgtagtagcttttgaagcatgtgctgagaaacttctgttaaattgagaatgatatttttaaaataagagcataatgatttctcatagttgtgtttttcttttgctttatcctcttgtggatttac

SEQ ID NO: 60465 - DNA, 1049 bp, Homo sapiens
ccgaagtgttaaattctaatattgaatctgccattatttggcctctgaaattgagaaaataattccatttatctgggcctatgtttgttcatctgtgggatgaatatgatggattattgtatgcaaggtaatgagaccctgaagatgagagatgtagtaccttgccctaaggagattatagtgtggtagggaagaaaaatgaggaaagaaacctttagaatacagtttggtaactgatgtgatattctgtcttatatgcatagaggggatggtgcttaaaccaagtcttaaagtatgtgtgtgggttatcctagtaaaatatcctagtggaaaataatattccatacagggggaatattatgtgcaaaggcataacacacatgcacacacatattgtgggactcaagtcacgtttggtaaaactgtagggtgagcggaagaatggctagagatgaggctggagaattggatagtaagcaaatgaagaaaaaatgctttatattgctttcctgaatttagattttatcttggacatgatgggaaattaccacaggtcttgaagcaaagagtgacatgattacatttatatacagtaatttataatattatgtttctttatatactcagtgttaatatgattaaaaatttaagaatatatatgcttgctttactaaaagtgaaaaaagttgtaaaacctgatgtatcctgctttcctgagtttttgcttatctattctgataatactaatagatttgcatagtaattgcttcgaaatggtgctgccactaccacttctaccaccaccataaattagtagaagacttacgctactagaagcataagcagccttacgttatagtggctggtatctgtgcaccaagtttggctgtgcatttctagtccctgcactgttagggggaattgtatatttttttttccttttctcaaatcagtaaatcagtgcaaacaaatgtgttgtggatttacaaacctatggaataaaatgtttttacttctatcaattatggctctccaaagacataaaatac

SEQ ID NO: 60466 - DNA, 1092 bp, Homo sapiens
tgtttcatagctgttgggtacacattccaaggacggtaaaaacaaaatgcacttgctcttctaaatctttagccactggctagtggattgcatttattctcagtttccttgccgatccttttacccttcccctcccccatttttctttttgaatggttttgtttcatgaagctcttgagagctttctatgttatattgtggcacaggaaaaagtttattcattttagcactaaactgtagttaacattttaagttaatcatttttagaatgttttgatgagcaatcctgtttcatttttagagatgattcaatctgatatttcatttgcttttaaagtctctaatttcttttcatctatttccatagcattgtaatttgtatcctgaacgtttctcttcagagaaatataaaaatccagcaatccattatagtattgtattaagcctaagatttcattatttatcatacacatttatttatttatttttattttttatcatacacatttaaagtacggcctttgatttatagaatttttcattttgtggttgtgcctgcttatctttgtttttgtgtgtgtatgtctttcacagaaattagtatcattctgtcatagctcttaggaaattcagagttaatcaaatatgttataaaatgtgtttgtataatgaaaaggttggaggagatgattctgaaggtgccatttagagcaggtgtgctatggtttggtggctctctattctctgcccgctttaaatcttagtaggcagcagatgaaatactactaagtgacctttgacacagaacccatgaatgctccaagtatgatttcattttaccgtgttctttgtaaactcaaatgcctgtcaaatcagatgtgtgtttcgatgtttttactgaatgcgccttgaggaggagactaaagcttggggtcaatttggcataatccccacgtttttctttttctattatagaggtttcttggggaaggggtgacatttctttctgaggaaaaggtgcaggctaagtgtaggtggactttctgtcttctccatactttttctgacagcctcactggatcctggtgatat

SEQ ID NO: 60467 - DNA, 1127 bp, Homo sapiens
gtagatgctaagtgttatgagttgtccacctgtataaaactacttcccagaagccttgatgttcccataaagagctaaagacaaaaccaaatcaactgctaacaccttttatgggagatcaacttgtgtgggttatgaggcccaccttgactaagcaggatatgtaggtaaacctgcccagttggaattagtagctgatactctaaaaggagaatggtgaacaggaggccattagcagaaacagcctcattcatttatagagatcatcttgttaaaagggaaatcagcttccctagatcccaagggggtattgaaaatgctaggagagagcctagaaaacttttctgtgcagattgtcagaaaaaggtgaaaatattttcttttactgtaaaaagaaagaaattcttttccttcttccaaagatgccttaccacctttgaaaaagatttttaaaagtctcagagaaaatgaaatatagattcttaaagtggaaagggaccttaaaaatccatctggtctggttcattttatagatagaactgagaacctcaaaaagttatgtaatttggcttacatcacaagagctagtttgaagcagaagctacgattttcttactgtgtccagttgtttggaagtatgaatagtcatcattaaaatgtagggagtttatagggaagcttatgacaactattagttaatttacaatttgttcactgtagctcatctgctttgtttcagaagaaaaattctatgtcttgtgtggaaaaactcttacctccctatgaacagaactataggaaatttcttgctaacttggatgtttcagctacttcagggttattttaagtaactggatagttggttttcagaattctagttacagaaactagtaaaagaatatgagttgttgatacgtggaaactttagacccaaaataaaggtaggatgatgtgagtttagtgcttacaaatttgaatgaaatagtacctttttgaggtgttttagtagttgcccttaatgatttattttaaattagatggctttgggagtaaaaatactgcttttagcaaaaaataaatataaaattgaaacttttgcacgtagagttttttttttctttttgaga

SEQ ID NO: 60468 - DNA, 1139 bp, Homo sapiens
tctgtcagtcttaatgtgatagactctcactcagtgaagatctatggatttattttattgaaaacatttgtttagcatatatctgtgttattttaattttaatgtttttagagatgaggtctagctattttgcccaggctggccttgaactcctgggttcaagtgatcctcctgtttggcctcctaggtagctgggactacaggcatgagccaccatgcctgggtaagatctaatgatttatttgattgaaaacacttatttagcatacattcatgtatttttgtaacttgttgcctcctgacaggtcactagacataggaaagtgcctcttttaacactttcataaacctttaacataaacattttaaatttcttcattatagtggaaatagcgtctccccttattattggacattttgaaaaattaaaaaaattttaaaacaatttttatcataaatactagatgggaataattatatatgaagcttgtctgacaagttggatttttatgataggatagaatcccaggagtagaattattgggcatacccttttaagcctcacagtaaattattactaaagtgtgttgcaaagattttatcagttgtatagactcccagatatgaattccagggcccttcaggggaattagtggggacattttgcaaagagcaacagatggtgtctggaaacatgttctttaatctttgctgtgccacatactagttgtagatatctgggttagtaacataggttgtgtgggccttactttcctcaccataactcaggtgaattttaactattctactggccttaattctcattctgtaaaatatgagtataatcaaggagaatcagtgcctatatattaccaagtgatttgtctgggaaaaaagcagaagcagggaatgtcagatgtacctagaaaaaggagcaagttaggggaaatgcacaaaacatgatttgctcttctggtttttttaagaatagagtctaggctgggtgcagtggctcacacctgtaatcccagcactttgggaggctgaggtgggtggatcacttgaggtcaggagtctgagaccagccttgccaacatagcgaaaccccatctctactaaaaatacaaaaattagccggg

SEQ ID NO: 60469 - DNA, 1053 bp, Homo sapiens
acttgctattttagaattctttattttctaagaattatgaagactgtattaggtatttatgtggacttcctttttttcctaccttttattatagcaccaaaattggaattacgctagattattttctctctgctgtttaaatcataagagactcttttattgggtcagggcaattgtctttctagcacaataatcttctttgataatgtcactactggaaattatgtttatccttcataaattaactaatccttatttttgtaataaattatctgatatccttcagaggttatctaaaaatattcctttaagtctgcatgtattcagcatatttcatggtataacaagacttttacagttgtataacagaaatttaaaataaggcaacggactgtaatccagacttctgtcaactggaaatttttatgaagtagtattttgctggtatactgatacttcaccaaatacaatgtttatctttaaagaagtttctaaataagacaaaacattatgtttagtaaaattcaatgtagtatgttttactgtatactaattctttatatagcccataatcataatacataggctatataatacatgtaaagcatataattcataatacataggatacaaatcaaatatatgagctttattttgatataatcagactttattctgttacctatttgcctttctttttcaaacttttaagcgttgcccttattttcataagacttagtgtttcactcagtattaaatttatccaaagtcattgtgattttatgaaacattgtgattttaagtgctgaaccatgttgtttttcaatgtaaaatgagtgtaacttttagtaattattgaaatttaagcgttactgtgattttccataattctatttcggtagtcacaaaaaaacaaaaatttggcttcttattggcccttctagtgccaacactggcattgttgaaatacatttctaaggaagatggtgagtgtttcacttcattagtagctgcatgacaagccaccccaaagtttaatggcttaaaacaaca

SEQ ID NO: 60470 - DNA, 1072 bp, Homo sapiens
gaatagatttgaaatttgggatgtgaacaaagccttgtatttgacagaaatgtaaaactattaatagtattgttattgttccacctatagaatctgattataagattatctctaaaatactttcaggtaacttgtacttaatgttaggaggaagtgactatattataaatataatttagaaaacatcgttccttaaaaaataatttttgaattgtgctaattcttgttattgtttgacttcattaactaatatagggagtatagggagaacttagttttaaaagataatttgacttcctgatttatacataaaacacataagtaattttggacatatatgatgtgtatatatatatatatatagtgcaggtcatcttgtttacaccacttattaatgaatatcagatttggaaggtgactctttaggattttcctattggttgattgattgaaacttacatgaagaatttaacccttttgtttcaaatagctttctattaagaaacacttttttcatgattattcagagaatttattgctggatcattggctctagagatagactgctggttaaattaaaagatgccggaggaaacattttggaaacagacttcacagaattccttatgaacttctgtactttcttaaccaatcttatttctttcatgtacctatggctgttactagcctgttgtatcagggataccatagtcaactacctatacgggccttaactataaagaattaggccatttagggaaataataatgagactggggctttagagaatttgtgctcatctaactgagtagagggacagctaatattctgctccatctgatggtgatcatgggagtattcaggctgattgttacccaatatttcagtttttccaaaggatcctaaaatacagatttttatgtaaattagttggtaattaatttaggtgtttttaagatactctgtgacaataactctacagggcaaaatcgacctgttaaatatatttggcccataggctgttgttttatagccttgaccatatagaaatcttcaatatctatttaaaagt

SEQ ID NO: 60471 - DNA, 1818 bp, Homo sapiens
gactgggtgttgctttgttgccaaggctggtctgaactcctggtttcaagcagtcttccccaccttgacctcacaaactgctgggattacaggcgtgagcctccatgcctggccaaattgtaagactcttataatggatgagtagaatatatttaagattatataaaaacacaagtcacttcatgatcatcgtctgctggaacatgaaaccagctttcttgtgtagatgtgttatcagtaatgttattcacaccgagaggatcattctgtggtttttaattcatgattttgtaatctgatagtgacttttcattatgtctcctgatttataattacatcacagccattatgattggaatcattgggaagagttgaaatgagcaatttagaattgtttctgaaatacagaaagccttattttttggtgggggttgttggaggagatatctctgtgttctgtaatttcatttgactaaggaatttatctttggtcttctcccagagtgaggacatgaatacttccatagctatattccgtattaatcacagtttgctttgtgggtttcattaggctaaataagaaaaacgtcgttatgtattttctgctttaaaaaatgcttcttgatataaagtcttctcagatcagtcccacatgtgataaatctattcaaactattaaactgcctcaatgtgcttgtttctctcttggaaatctatccatttctgtgtctttatgtaccactcactctcccccatcatattttaggttataagctcctttcctttatatctcatagcacccaggaaagaactttgttagtctctgaatagtttataagtgttattgctattgagaattttggatttaaattattggaatgaatagaataatgctatttctagtatatctaactgagggtcagtgttattaactcaaagacatagcagttttattaagctctaggctttgtttctgaagtcagtttctcttaatcataagtggattattcactttatattctcttatataatgccttggtatcaggttattgataggtaaacatcagaaataggctggatagatatgcatgcatgtgtacacatgcacatgtatgtgagagagagagagaaggattgcacatagaatatatgagaatttgaggtgtgtgtaatgtttataactcatctgagtcttacatagctatctagttatgtacacttaattttgcaccttttatagttgaaattcagaaacattttttaaggaaaataaggacgtgtttttctttccttcatgttttcagtttagctttatttgattgtatttttgctaaagacttaaattgtcaataactattgaaatgggccaacttatagctgagcacaaagtatgttaggacactgagatatatcttaacatttgggaataatttaatgtgtctaatacttgagaaggatcaaaacagactgtacaacccaataatcataaagcctatggtcaaaaatcgtatataaatgacaggccctatgaagagtagccgtaagaatcaagagaaaaagaacctaaattggtacagaaaaggagctgagtcatttttatattataattagaagttggtaacgataaattttgtcttcccagtacaaaaagtatcatgatcaggcaggattacgctaaagtgtaacctctaacttcttgtggtatgtactattacaagtagttgatgatttaataaatataaatatagatgatactgtcagagtgtttccagacattacagttagcttttaggtgaaggcagtgcttgacagaaccta

SEQ ID NO: 60472 - DNA, 1802 bp, Homo sapiens
aaaatagacatgcattttgtggtagtctgttgaatgctgtttggttttttactttcattataaaataggaaagaaaaaagtataatatcatatgacaaaatccatttagtttaacattagttctttaaaaatgtataattgctactatactttggcggaaactattaaatttgtaagataagacgtttatactctatacccaaaacaaagtgaagtagctgttcataatatggcgcagaatcaaattttggtgataaaatcagacatctctctcctgccttacacatactcccactgagaaaataatttctaaatttggttacattttcatatacttcagatgaccttaaatttatatttttctcctgaatatatttgattcctgcatatccctttttttgggcatctgtgtccaatcagatccatgattagtcatgttagctttggacaagagtggaggtaggatcttagcaagtttgaaatctttaagattgatgtttatctgagattattccagcatgtccacggacatagtagttttgtgataacaaggtaatggctgatgaagattagcatattaataatagattataattctgttaaccattctattgtcaaatacgtgatttttgcgattcacatagtttaagtaatttttcatgcccaattagagatgtcaaaattatgttaattgaatctggccatgttcttagctgttttctagagcttaataacaaacatatcaggaagagctcttgtgacaagcacccagcacagcatctgtcattatgtaatcattccaatgtttacagtgaactaagtacttgagatggcaacattcatactttagtccctctgtctagtaattcatacttgtatagtctgtctactatgtgtcacccatttaggtaggtgctgagaataaaatggtggggttaaaaacagatattccctgttattgaacttccagtgccaatggtaattacagtgtagataataattacacactgcaactggaaccaatactataaaatggcataagttcctataagggtaggaacaataaagttagtgtataaataaagcacagaacctacacatttatttattagattgaattgataacttgcttttgaacttttaaagttaattctattaatatctgctaagctaggcatcagaaagactaaattctaaccatagagaaatacattttttatgctgctattctattttcttagatttcttaagaatttacaacaaaaccctgtcaaagcagcattcttacgtgagaatttcacttacgggagagttcttacaggatttcaagaaggaaagccctgaagagggacactgatttcctcaactgaatttaaaattgttacatgcagacatttttaaaggtagtatgattttccttaatcaagtcaactttatatctttttatctttttaaagaagggaatgtgacatttatgtttttcatacacacacacacacacacacacacacacacacacacacacacacagagaagcatacatgttgattacgttttggaaaataaaatccaaagagcatttggatgtctgaatgtttatgcttcatctccgcagtgacttctaaatttagtttttttctggatatactcaaagtcaccaacctgagttcaagtattctgatttgaagatctcaacttagagatccaggcagtcccccttgtcagtgctaggagaaagatgtccttcccataccttccagaaagagtgtcttgaagaaatatattccttcctgggtaacgtg

SEQ ID NO: 60473 - DNA, 1059 bp, Homo sapiens
ccaaatttactgagtaaaagaattctattctaaaaattattttgtataatgcccttcaaattgagttttacatgtactatttcaaggcttctcagatattcccacataaattatctagtgtttctgcatcactttgcgatcttttcattaatgtcaagtgtaatgttttttaacttcacaagggaaacatgaaattcctttagtgtgcctcattttcagacattttcttgttgattaaaattcctttttaaataaagtttcaacatgtactaaataatttgtttacctttgaattaactttttataaatgaattttaaataatgacagcagtcattacaaactctgctgttggcaacactagagggcatttctagttcttcagacagtgtcatgagttctcagaataatttaccaattcattaaacagcagattagcattttaagggaaaggaactaaaacaagcacaatacatatatcatacatatatatagtatgtatatattatgcatagacagataatataaatatccatatataatatatacattatataatatatggataatacatatatattggatgtatgtatactcacgtctgctttaccaaatgttctcactgaatcactactcctaaaaaggcgggagagtatttgtgatctgctcactgaagcaccactatattatccagttgtttattagtgtcgtggaggtctatgctctgataggtttagcatcaagtgaacattgagtaaaaaagtatatgtatatactcatacatacatactcatcagaagttagttgctgtgcttattgaactactagatgctaacatagtcataattagaataatttttcagataaaaaatgagagttaaaatagatgccctttataggcttagtagaagatttaagactacctatattttgaattactgtattttagatgttaaaatattttcaagggttttgaatgcaaacatttttagggaaaagatacaattatgtaatattaaatatataatattaaatattaacatgcaatgatatgaaagaag

SEQ ID NO: 60474 - DNA, 1020 bp, Homo sapiens
caccaagaaagatctgcagatctttttcagtgttcttggaggtgtggggtgtgagaacttgatcagtttgtgtcagccaccttgttctctaaaggtaagcactgtgtagtgagtgcacactcgtgggcccaggctcctaacctaagactggttttggaatgctccattgagggtgtgagaccttcagacgttcgcacagaagggaggccctacctgtgggtaggacatcacacattcatcaagaggtgcttttcgttatttagaagtgaagcatgtcctggggatgtatggatatttttgttttgttttactttaaaaaaaatcccagtcatagtaaaaccttccagtttagtctgcatttattcagttaataactgctggagttaatcaaaaatttttcttgtatgtcttgagatatggattaagaattttgaaacaatgacaccatttaggcaatctagtgacataatagcttcagttgatagagccagctgtgaagaattacttttcatgatctttttgaagctgtatcttatctttacttcagggaaagcccctcaaaccattttgtattctgtattacacttcagaaagtgtggaagcaaaggtcatctaatctttaaaaggtatgtaatcataaaattttttatgtcagatcttaattgaaaaatattacttaaaacttgaaaaaattacttaaaattggcaatttctttttcgtcttacaacttcttcctgtcttcaggaaatgaagaataaatatgttggttctatcagggaaaccttatgaaggataagcaaattaatgtctgtgctttacttccaaattctgacatcagaaaaccttattgttaactaatataatctatagatgtctctcaaaatgaccagtcttaaattcaaatgtcatttggatatcattaattgactatggagaagagcagaagcatgctgatttcgaaaatgtcattaatattaggattaggtcagtcttaggcaagaatactttgaataacaaga

SEQ ID NO: 60475 - DNA, 1026 bp, Homo sapiens
tgaaaccccgtctctactaaaaatacaaaaaaattagccgggcgcggtggcgggcgcctgtagtcccagctactcgggaggctgatgcaggagaatggcgtgaacctgggaagcggagcttgcagtgagccgagattgcgccactgcagtccgcagtccggcctgggcgacagagcgagactccgtctcaaaaaaaaaaaaaaaaaagcagcattaggagagaaatttatagcactaaatgctataaatttctctcccacaagagaaagcaggaaagaactaaaatcgacaccctaacctaggctctttttctgggtctctttctttctaaagttttgcttattttgtttactgcacaatccaactaaaaccaaattttttacatcatttcatttgagagttaccttttattctaataaactgtggaataactggggttggggagggaattgcttaagttcataaggattcttgcaaacttgaatgtgtcgatacaagattttttttgaaaatttgtaattccatttcacgatctcaaccagaattcattatgtttaaaccacctgatatagactaaaacattttttcaggagcacaattgtaaaaaggatgcagagaaatatttacaacattacttatttctttgcagatttagtgaaagtatgtcctacttttacaaaatatcttattttcctctcttttttacacatataatagagaactaacttttataaactaaatgagaagggaatactaatttttaaattatgatgtcacttgtagaatttgttttaaaattgataaaatacacctctttttttattattatactttaagttctaggctacgtgtgcacaacatgcaggtttgttacatatgtataaatggccatgttggtgtgctgcacccattaactcatcatttacattaggtatatctcctgatgctatccctccccactccctctaccccatgacaggccctggtgtgtgatgttccccttcctgtgtccaagtgttctcattg

SEQ ID NO: 60476 - DNA, 1024 bp, Homo sapiens
ttcaataagttaatgtgtaaaagcacacaacatagtgcatggcacataatagttgagctttaattgtacatgttacttgttttttctatcttctcaactggtaataataactctactgaataggtagtaatttaatgaaaaaaattaaatgcattgtggtgtttgccaaaatttttggtttgtatgtatacactggattacagttttataaatttgtcctcatgaaattgattgtcaggtgttttctctttagttgttttgttaaaaggttaattggagcataacaaatgcatcactatcttatgtagctcctataaaaacataaatactttaaaataaatttgaaaattagaggggctactacatgcaactgattatagttctaattttagttatgaaatttacttctcaactaaggcacaatctctaattctgtatctgcattgatgactcagtgattttagaggttgtgagttgatattttcacatttctacctatggtaactcattacagaatgtctgatcatgatatcctgttctgtgtagcatcatagtggacacttcatgatatttctgctaaaccctttacctgtcataactgtctcctttctgttttgcaaattccctcagcaaagtcaaattcagtcctcacttggttataaatagcattataaaccatatttttgatttaaataaagcacacaaatctcaaagaatgataaaagcattgttcatactttgtaaaacttaatcattgattatagattaaaactgaaacaacatgaagggatcagactcactcacagaaggttattgagaaccaggaatcatagatttcattcaattcaaattatcagttgtacattgttgcttgttcaaaatcattttacaatccactttgcccacctccatcttcttacgttacaaagaactttcatctgctaggcactgctgatggtagaatgccatgcctttaaggtttccctttggaatataaagtctatgttttcaatagaattaactg

SEQ ID NO: 60477 - DNA, 1097 bp, Homo sapiens
ggaataaattcagttgcacattttgtatttaatccaatgactcaaaaacatgggcacatatttaccaaattaaacgctttcatcaaacatcttcttgatcataccataaaagcccccaaagtttttattggtagcattgctctgattaatgaaatgagcttcagtgcaaaaacttgggctgttagaatacttacaaaaccattattgtccagttctatagctgctaccctagtccctggctctcatctttttatacctggtttaccacatcagcatccatgctgagaaccatgcctcagtcttgcactgctcaaatacatttagtcatgaacttatttattcagcagacctttgaggacctacaatgtgccaacaatttatttaaacaatatttgtatattttccatccccaggctaggacttatagtccccagttggttatcaaatctaaactaaactcagcctaaaaatttagagttctccaaatctcacttattcttgttctttcatgccagtctccttatggtaacattcattcttagcacaatgtgtgtctgttcccacttcttgtcctagtgcatcatctttcctcttcaaggatgtactccttctcctccttaaaattttaaaaatcatagctaaaactaccctgtgaggtgtgaggtttaggttggtgtagtcatctgacttggatcattctttttattctggatcctgagagtatctagaggaaattgcgtattctggttaatgagtggcttatcacatactgtcttaacaacactaagcactctttattcagtaaaagttcacaccataagaaaatatattgtaatgtatttagtgcttcttcggtgatatataaggtgttctacttagaaatttagatttgtaggaatgctggttaatagaagtttctaatatttactgtcttccatatttcctgatgttttgtttattttaagctattttaaatattttgcatttcatatttttaaccaggcagtatctctgttcctcattctgaacacccaatatggtactttgaacataatagggtttcataaagtgcttgattcagtaaaaaaaaaaattga

SEQ ID NO: 60478 - DNA, 1716 bp, Homo sapiens
gcttgtctcagtctcattatatctttgatgacttcttcaccattctttctcttccttcattccgtagatatcgagatttctcaaaacatctcatcaacagtccagcctgtttcttgaccctgtacctcttatttttcattggctgaggaccaattttcttgttctaaaaataaagctaagagcaggcacttttttctccagtcatttgctgaaaaacataaactcatcagataataaaacaaatgctgtttcttgcctgccttgtaccaatttagggagaagcctaggggagagtgactgattttagctccagccactccaggtagggaaaactgtgcatggatgattgggagaaccttacttagatgggggacaggcagttgtgttagtgagttctagcagatgcaccctccatggcatggaggagtattgtccttttatgccagggtaccttagaagagtatcggtgtgggttgtgacttatgagaggggctacacatgcatgggttgggacaaccatgtggtattaatctaccagtggtttcaagttatattgataaaacaaatacattcttacaatttaagtgtagcctttacacctgaattcaaccatctgctatctagcaaaattcagtatcttgcaaacttaaggctgtcaggcgtctgctgctaatttaaggatagcttggtggaatttgcatggagggagcagttctcttttctctttctgaaatgaccttcatctctctttttatctgattggtttatctgttaaaacccagcttaggaaaaaaaaagcttagacattgcctccctgctaaagcctttccatttctagaaacctatctccagtgtccatccttgagaaagtcaatccttcttttctctttgttctctacctggattgaagttgtttctgtcaattaaaactaccatattttattataatttatttacatgcctgtctcctctactagtgagatccttggggatagaaactgatttattaattttcttaactataaagtgcctgacctgtgacaaaagctcaatacatgttttgagtaaatcaatcactgcaccaactcaaatcacagtattccccccctccccgctgatttcaagtgaccacctctgatccccttagacacaaacattgaccctgattaaacctgtgtttgctttgatccatagatacacatttgaactacaggccatcctttctggacggggttttgttactctggcctacagttctttattctttttctccccactgaccagcatgtattaaagtcacaagaccagtctttcaaatagatgttttgaatggggcaaagccttttcatcttgaagccctgtaagtcactccagagagtgtgggaaaagcaaagtgcttggcatagggtacggtagtagcagaggatcttaattatagttcttcacatttgagtgaagttctgaagctatgaagtagaaagtaggaattatcatctcagttaccttagttttgatgtgtggaccaaagaaaatgttcaggaatcttcatattgtgaaatgtgcagtacatgtttaaggttgtagaatattggctctaaggagaattttatattcattcttaaaagagaactaagttagagacagtatcttcagattattgtttccccaaagacccttacctggttttactgttgaattaaacagtaaaattaaact

SEQ ID NO: 60479 - DNA, 1066 bp, Homo sapiens
gtgcagcataccaacatggcacatgtatacatatgtaacaaagttgcacgttgtgcacatgtaccctagaacttaaaagtataataataataataaaaaaaaaagaaatccaagtggagctatcaagtagataatttgggattcataggagaagtcacctgggatataaaactgggagtcaacaaatggcatttagagccatgaaacagattgaggaagtggaggaaagaaacgaaaaagaagcagttggtgagttaagaggaaactgatagagtcaagagaagagattgttttgaaaaggagagagtaatgaattatgtcaaatgctgctaaaagatcaagtcaaatgaggactgataattgtcattgcatttagcagtgctcacagtcatgacaagaacagtgttggtggagtgttgtaattggagtaatttaagataaaataggaagaaacaaattagagacacatgtaggcaacttttccaaaaagctttgaagtatagagggactgagatatagaattaggagtgctggagtttaatcaaggtaagagattagccagcatagagattttgaagccagagagagcaagaaagttgagagtgtacgtgagaagtgattataaaaatataagattaaaatggatatttcttctgttactgaggttgagcatctttttacatgtttattgggcattcatttttgtgtgtgcgaattgcttgtgcatattcttactgggtggttcatcttatgagtgtttaagaattctctgtaaaataaagatgtcagcctttagtcatatgtgttgcacatatttttcacaatttgtcgtttgtcttttgacttgatttttttctgtgtatagttatgggtttcatttcatgcttataatggccttcttattccaggtttgtaaaaggatttgcctatattttcttcttttttttttttattatactttaagttttagggtacatgtgcacattgtgcaggttagttacatacgtatacatgtgccatgctggtgcgctgcacccactaactcgtcatctagcattaggtatat

SEQ ID NO: 60480 - DNA, 1046 bp, Homo sapiens
tttcactgtttcatctatctgtgagttgtacgaacactggctgaaattagctcattgagtggatgggagtttagataaaaggggaaaaggggaaggtaatttgggaggatggctcttgttgggggcagatagatacaggatctgtggaggaagagagaaaggccagaacaagaactgagagagtaacaaagaaatcctacgaatccttagtaactttcatgtaatgagagacaggagaaaataagaactagcattctgtgagcaatgacaaccctttccctgcgtttgcctatcagttttcattctattaatagcatgtatctgaagatattaaaaaccaccaccccttttgcaggggtaaaatttagaatgattgacttttattggagttatgttttaaaatatattttgaaaatataaaaagagtttatgaagattttacctagagaaggatttaaaaatttcacccaaaatttactgaatcattagaattactaaaatctaacatgttcatggtacttggggtactctaaaaccattatgatacctatttttagattatttaaattaaaattagataatatacacattgttcattattatataacattacatttgtatattacattatatccttcattatacagtaaaatatatatagacagtaagctaacattatcagttcggtcaaaagtcagattaacaaaaatttacagtaaatgcttagtatttatagacaagctcctctttcctggagtaatattatatgcagaagttttctctgatcctatgaattaccacatgacctctccattccattttgtgtacctgtttgcctggtctggttatgactgcagttttgttttcattttcctgaattgttgctaacacttaagtatattgacttgtttcttcactgagaaaagaaaaaagtgtggtcccatattcagttcagcaaataattctatacctactatgtagaaggcagtatgccagtgactgtatttaggataaaatgtgtgtgtgtgtgtgtgtgtgtgtgtgtg

SEQ ID NO: 60481 - DNA, 1194 bp, Homo sapiens
tttcttagcaaataagaatcaccctgaaagtagtttaaaagagatattctagtgaccatacccaatgaagtactaaatattcatcctgttagagtgattattgcaaggactctaaaggaaaacattgattatactagattatttattttatagaattttattctcagcttatactcctggttctatgaactatagaaatcactcagaataataaaatgctgatgttatattttattgaaattcattaaaaattatagaaaaaggtgctcatttgaaaacttccaaatgtcagttattcagaatgacaaacttaattatatagaaattgactaatttggttgattctttctaaagtcagtgttggattaataatgtaatgcatggatcattaacagcttaaaaatacttgtggtaaacttgatgatgtaatgctattttgttaggaaagatggcctcttttcttaagttgcaatcctttaaggattcaaagccctaattgtacataagcaatatcgtatgctgtaggctcgttatcattggaggggaggtttaatatagagtttaagagcacaaaatatggaatcagactgttgctgttaaaatcctggctctgccacttcctagctgtgatcttagacaagttactctctctctgccttgattttcttacatataaaacaaggatataagtagtaagtggtagaactcttatttcataaggctgttataagattgttgtaagaatttaatgggttagtatttataaagcaggtctatatatagtaagtattcaataagggtagctactatttgtcattttggtcatgtaatatctagtgttacatatgtgtgttgtcaaataaattagttgttaacattatttaaaagaaaacattgaattacaatctgttttaagcatcttttttatttttctgagatgtaaaaactgattgttttactagttggttttgattatttgtttcttgtttgtattacagttacaaattataatactgtggtagaaacaaattcagattcagatgatgaagacaaactgcatattgtggaagaagaaagtgttacagatgcagctgactgtgaaggtgtaccagaggatgacctgccaacagaccagacagtgttaccagggaggagcagtgaaagagaagggaatgctaagaactgctgggagga

SEQ ID NO: 60482 - DNA, 1067 bp, Homo sapiens
tataagaatatgtcactgtttgttatataagttccttcagaacaacttagagaaaaaatatggtaattaggttatcatgtaatccaatgacatacatctctgttgcagcacttttgcaatgatgttgtaattctctgtctctctctcccccaacctttgttctttgatgttagtggtctttccaattttgtatttcaacatctatagagtttctggctgatggatcctcaaatagtgaattggatgaatggattagttaattaattaaatcattcctataattgtcaatccatttataccctgctcttaaaatttaatgaattaatttgaggtgaaaatgtttcagacaagatgatcttcaaattctacatgtaataaagataattttaagagtctcaaaacaatttgtatatttatagaatccctaataatggccatttgcagtgtgctaagcattgggctaaacgagagctcagtattcacaacaatcctgtgatgtaatgctctagtcgtatacatgtggaaactaaggactaactgagttgtatcactccccaaagtctactcacggacccagtagagccaatgtcttcacctaggaataattgactctaaagcgtttgcccttatccactgcctcatttctttttattcctaaagtaaaactactcataagatttctggatctgatttctgtactacttgtggattgattaaatacaaaaacattattgtgtattattatcagttggtctttcaaataactgagaccaaaacattaaaatagttttaaaaatctgtaaacactcctattcttctggatttctacttacagaattagcacctagaactagaaaagtaagtttcttttttttttctgagtgttaagacctcaggaaatatttttttaattaacatactataaaattgacttgatattcatttatttgagctttaatacacacacacacaaacagacacacacataagtgtattcatgtagcaaccatgacgatcagggcacagaacagttccatcatcagagcactatcgtgctacccgttttt

SEQ ID NO: 60483 - DNA, 1045 bp, Homo sapiens
ttcatagatttgataccctttgatgcttattagaaatccttcttactatagataattattaaaaactattttctaagaaatcatataactgaactgaacgtcagagtggtttatatgagaattattcagatttaaagtagagctcccccccccattatctgtgggagataaattccaagagtcccccattgagtgtcttaaataaatacttatatatactatactgtttcctatacatacatacatatgataaagtttaatttataaattttatacagagttgcaacaagaactataataaaatacggttataacaatatgctttaataaatttatgtgaatgtggtctccctcgctcgctctcaaattattcttcttgtactgtattcacctgatttcatattgcagttgaccacaggtaactgaaaccatggaaaatgaagccacagataaggggctgtctattgtccaactttaaataagtattatgatatgataggttgctaagaaggtgacctttgagaactaaagtttttttcttgctttatcattaattgagaaagaattcagtcaactatattgccttctctgtgttttattagtaaaatgcaatagaagtatgactttaacatttgaaagggatactgtgagaatttcacacattcatagcattttaaacttataaagcaaagatatatcttaatacattacaacaaaatgagtggaattcatttttaattttcaagaaatattttctgcagattcaagaacaatcatatgttctctcaagataaataatttcttatttagaaaacctttgtaataacttagtggtgagattgctgtcttaaaagtatgcattttttttagtaaaagatgatgaatgcgagtcagatgcagaaaatgagcaaaaccatgatcctaatgttgaagagtttctacaacaacaagacactgctgtcatttttcctgaggcacctgaagaggaccagaggcagggcacaccagaagccagtggtcatgatgaaaatggtaaatggatctt

SEQ ID NO: 60484 - DNA, 1183 bp, Homo sapiens
agagtaagcatttagcatttattataccaagactttgtgacattttactatattttataaaatattggtccacagtagattggaaacttaaaaaagaaccaaacaaagccaactggtcattcaccacaaatagtttgaaaagctctgcctagggtatctaataatggaagagctgaatatcttttaggaaacctccataactttcttttcacatgacttttgaaaagatgttgagaatcaggatccaaaattatactctctaaaattacctatattgttgctaaatactggtacccaaaaaattttgatcatgaccctatgcagaaccgtgtgtgttaataattagttgattctacctgtaggaattgagctatcatgaggaaaaggctaccagacctccactcagattagagacaaaagaacacctgcatatggctgtggtccacccccaaaaataattttccatggtcttagtaatttttgcctggaaaatttttgtatcagatgcagccaaacacccaccttagccattaaaaaaaaaaaaaagtcagtatacatagtataccgaactttgagtagtgaaacttcctgatgtaaccttcaggctaaaatacttgtaaaccctaacctccatagataaattagtgatatgcctaactaataaactgtaaagctatgaagctagaaacaaggagttttaaattaacaaatatagtgactttggctttagaataattgttgtgtaaactttctttctggcaatgataaaatatcaagataatttttaacaataataatgataactagcacttattggatccttagctatgtatagccacatgttagttatttgtatgcattaattcatatagtcctcaggataaccctatggagtaggttttattattttctactttttactgatgagaaaattgaggctcagagggcttaattaacttgtccaaggtcactcaggtagtacatggcaaagctagggctgtgatgtagtcatcctgacccaaagtcattcccttacgtaccatttctgtccccctgttttaaaaaatagtctgtatttatagatgtttatctttctagcgtctctagaaggaaaataagcatgtagttcatgtaaaaatgttatcaagtaattaaaagtgttaaaatagagatgtactagagt

SEQ ID NO: 60485 - DNA, 1050 bp, Homo sapiens
gaccaggttttaaaaatagaatgttagcttttgcttagtgaaacccagaatgagaaaaatgaaggcaaaagatgcagttagtaatgagcgattaattagcaaactaataagttaaaaccttctgcaaatttctcgtaaagtaatgattcacatgaaactaggtaaactctgttactatatattttacatgctttcttttcggtgtccttgctttctttccagtaccagttgagtatatgtctttgctatggttttgactgtgttatccccaacctcactcttgtctttgtcatctccacctgtgatctggccccacccttggggcacatgtgcagtgaagatcagtgtgcttgctttggtcaagtccttgaaagtataaaagtataagttaaagtagttctttatctcatgcttttatgtatatctcttgtttatcttttaatgttaaattacattttctcacacctttctccctctaggatgaaagacaagatactagctcagaaggagtatcaaatgtagaggatcagaatgactctgattctacaccgcccaaaaagaaaatgcggaagacagaaaatggaatgtatgcttgtgatttgtgtgacaagatattccaaaagagtagttcattattgagacataaatatgaacacacaggtatgtcagtgaacacaaacataaagtgtccatgatatgatatactggaagatgcaaaattaaaaactaaagttttagaattttctttctttttttttttttttattttgttttgagacaaggtctggctctagtcacccaggctggagtgcagtggcacgcaatctcaatctcggctcactgcaacctccgcctcccgggctcaagccatcctttcatctcagcctcctgagtagctgggactataggcacataccaccacacctggccaattttgatatagacgggttttgccatgttgcccaggctggtcttgaactaatgagctcgagccatctacccacctcggcctcccaaagtgctggtattacaggcatgagccaccacgct

SEQ ID NO: 60486 - DNA, 1294 bp, Homo sapiens
ccgggtgtgcctgaacctcagacctagtaatttttcatgcagttttcaaagttaggaacaagtttgtaacatgcagcagattagaaaaccttaatgactcagagagcaacaatacaagaggttaaaggaagctgattaattagatatgcatctggcattgttttatcttatcagtattatcactcttatgttggtttattcttaagctgtacaattgggagaaattttataattttttattggtaaacatatgctaaatccgcttcagtattttattatgttttttaaaatgtgagaacttctgcactacaaaattcccttcacagagaagtataatgtagttccaacccgtgctaactaccttttataaattcagtctagaaggtagtaatttctaatatttagatgtcttagtagagcgtattatcatttaaagtgtattgttagccttaagaaagcagctgatagaagaactgaagtttcttactcacgtggtttaaaatggagttcaaaagattgccattgagttctgattgcagggactaacaatgttaatctgataaggacagcaaaatcatcagaatcagtgtttgtgattgtgtttgaatatgtggtaacatatgaaggatatgacatgaagctttgtatctcctttggccttaagcaagacctgtgtgctgtaagtgccatttctcagtattttcaaggctctaacccgccttcatccaatgtgtggcctacaataactagcatttgttgatttgtctcttgtatcaaaattcccaaataaaacttaaaaccactgactctgtcagagaaactgaaacactgggacatttcatccttcaattcctcggtattgattttatgttgattgattttcagaatttctctacagaaacgaaagggaaattttctaatctgctttatccatgtacttgcatttcagacatggacatgctattgttatttggctcataactgtttccaaatgttagttattatggacccaatttattaacaacattagctgatttttacctatcagtattattttatttcttttagtttatagatctgtgcaacatttttgtactgtatgtcttcaaacctggcagtattaatacccttcttactgacatatgtacttttagttttagaaaacttttatatttatgtgtcttatttttatatttctttatttattacacagtgtagtgtataatactgtagtttgtattaatacaataatatattttagtatgaaaatttggaaagttgataagatttaaag

SEQ ID NO: 60487 - DNA, 1030 bp, Homo sapiens
ctccctccaggctgcagggacggtgggggctgatctgctctgtggctggggctgcctgctccaggctgggcagcactgggctcaagtcaggcagccctaagggttcagagcttctggatttttccaggggctctggaggaagagatgagggattcctgagattcctgccccaccgctgatgctcagagctttgctgtcagtgttgtcttgcaggataaccacacacccctttcttcctcctttttcttcctttatacccagactgtgggcctgctcgggccctcaggcttggagaagccttcccaaagatgtgggcctgttgttgatttacaggggcctggctcctctgtgcgcgcctggctgcataacttaacgggatctgtcaccttcaataggccgctgcgcagctgcgtgcaggagcagctgccttcactgcctttgtttggtctcagttctcatcttatccagcacagccaaggggccctcttgcctcccggcactgtgattagtgctgactgtcctctgcccaccaagtgctttgggtggcccacgaatatacagggtctcacacacagtttatgatagtgatggcgaccaaaggctgttcataaacagtgagtcgtgggtggcggcattagctcttaaaaatcataatcagctctccaggtggcctcttaaatgtgcttggggcttttcttctcatccataaaataggctaccttagccagaggccccagagctggcaggaggacagagcacatgtttggcctttgtggcctcaaacgaatgcgcgatccccagctcagactgatgagaatctgtgcttctttaaaacatacatgcacgtgcacgcacacacacactcattcacacatgcatgcacactcacacactcacatatgcactcacgtgagtatacacacactcacacgtgcacactcaaacatgcatactcacaggcatctgaggccccacaaccaccgtgggctgagcctggggattgaggaagcaggtgcagcgggcacaactg

SEQ ID NO: 60488 - DNA, 1060 bp, Homo sapiens
atagataaaatctgcataaacacaacttttgaaacccttcataatttttaagagggcaaagtgttcctgagaccaaaaagtttgagtactattggtccatgatgtaagttgttgatttttttgccagtttgtcatttttctctcgattttttctttttgtcatatagtcattttttatttttatatagttgaatttattattcttttctttaaaaaaagtgtctggatcttgacctgtggttagatcttccctcactccatggataaaaaggaatttacctgtgttttcttatgattccatgtttcactttctatgtttctaaatatataaaatatctgtcctacccagttatcccaacttaaaagtcatctttgccccaccggcttgtgatgacacctttatcacatattgaatttccatatgttggttcatcttagtacttcctgtttatactattggtctataattcatatgctcatgttataccatttattgagacttcatggaatattttgctagcttgtagaacttgtctttctccctcccccattacttatcctttcaataactttcttgacttatttgttcattttttcatgtgaattttggatcacctacagatcagtttctcctacaggttttagttctcatccagggtcattggtgccttagcccaggctttgctgctggcaatacaaccaatagataaggcttgttacttatgctcagggctacgggaagctgtggcatatacagggacatgccctgttggctcctgcccaagtgctatgagaagcaggatagtgaacattctgcttgtgtttgatttgtttatattcggcagcagagggtcaactgagtggaatacagcattgattattatctgaattcaatgcaactaaatgtaaaaattccacaagcctgaattcacagcaatggaacacttatcaatttcaacttttattttagattcagggtgtacacgtgcagttttgttacctgcgtatattgtgtaatgctcaggtttggggtatggatgatcccatcactcaggtagtg

SEQ ID NO: 60489 - DNA, 1070 bp, Homo sapiens
acatttcgaatggtcagtggggacttggagttaatggccgccatcctgaacaatgcaaatatggaacaatttcatcctcaaaagaaatttctactggatggtgctattctagaaggttgggatgtggggaataagcagttgcaaaatgcgcattctgcaaaatcacttaaaaaattaaaatatgtaatattttatccatctccctcatgcttatctcttaagtccatgacactaggaaagtttaaggagagaaatatatttttattataggtgtgctaaacttgaatatttgtcccattatatgctctcatattggggctggaagggaggtaaatgtgatttaacttccaatacaacaccatcaaaatgcttgcaatttgggcaaaagcggtctgagaccatggcttaatagaagcctcagttcacattgttctctttggaaaatctaggaatgctgtactgtgagataattaatgtttcagaagtttgtgtcacaatagtcttacatttaaattttagaagtttttacattggtgagaaaggtcttctaaaattttattttagaaactaaacaatgaaagaaatggttctaattggaactttcccttgggatctaagctacttcacattatatttacttctgatttttaataataccctgtatgaagtagtgaaaaacttgaaaaacatacataacacaactttttaaatggaagctgacgtctaaccatggatacaaggaaattattggtaatctcaaagcaactcagtaggtctgcacgtgatttctccagatgcattctaaagtatggaagatggcagggtatgtaggtctcatagagtagatgataatcagcattttttgtttttatttaaatgactatcagatttacttcaagggtcccaggccacattcttccagagctggtactcatgcatagttggctctagttgaacgatgctctagttgaagaagctgctactgatatgttttcaatcctgttataaaaggacttctattaataagcactttaaaatttctaggtagggagtataataagttgttagtt

SEQ ID NO: 60490 - DNA, 3009 bp, Homo sapiens
attacataaaatgagtaaaatggaaagtttaatctccacaccctaatgagatttttttcccatcaacttaatggagcagtcactgttacctgaattgtaactcatacttaaatgttctattttaaaaactaagctaaaatatcacacattttaagtttgttagagtatgcttaattgtatctttcagctgtgtttatcaaaaagaaagcttcacatggcatttagacagaattctacttggttaaatagtttatgcatcaccttaggaaaataagtattacttctctttttaaaatgcaaactgttaggtttataataccatttgaagaattttccctctctcttattttctcttttaacaacttctttttttcccttcagagttatagaaaatggagagaaaaatcgaatgacctatcagagtatagcaattgtttttggtcccactctattaaaaccagaaaaagagactggtaatatagcagttcatactgtgtaccagaatcagattgtagaattaattcttctggaactgagttccatcttcggacgttgattcttactgaagacaacctgtggaatagaagctggattccatcagatttcaaatgtttatacacaatgtattttattttttggaccaagcagtgactctttgattttgcactttttttttgagggatcagaagggaaggggagagtcgagatgtgtgttaggccctcatatttgctgctttgttgcaagttgatataactgcgtgtaattatgaattcattttatcctgaatgtttgcatttcatactctgaatttcagtaaaaatcaaaacttaaaattctaaccagtcatatacactggataatttggtaagaaaactgtattttttttccctgaaattggataatgtactttcttctcaagattcatgacttgatagaacaatactttcagttatgttgcaaaggctcttgggcattttaaacaaaatgaagtatatccattttgaaacctgtgtatttctttttcggggtttctgcatgcagtggcagtcttaagtgccaaaattcattataaccccaaaataaccccttgatgaaggcttgctgtcttttactgtgttacacagcatccttactggatatcttagttgcttgtttgggcagcacactaatattacttaaaacactgtgatatactggagttttagttagcggaagtcagttcagggcattttagggctgtcttgctatactgaattgtagctaacaatcctaattatatctagtaccatactgagttattggtatgaccctgtggaaacacacattattttatgtaaatataggctaaagacttaatgtcctttagcttgtgtatataattgtgttgtatagtctcagagtacattctaaccctacatttctaatcattgttattggtaatcttttctgtgaatattaggtttcctccagaaatagtccgttatttgggaaagttaactgtgtgcacttttagatattaactacatttacaggcaaatcactgtaatgagaatggtactggaaaaatactgaatagacttgctaaatggcacatgcactacaagaggaaccttttgggttatttaatatgtacagaaaacattagaaaaaatttattacagaattctaattccagtatgaatagtggaaacccatctgtaaattagatggatgttggatggaaaatgacattgctaaatttgagaatttctttttacctactaatgtagattgctttgtataataaaacacagggtttggaaggttttgttacagggagcatggtctgttgaagatttttaaaatgtatttttctagattaacttctgtacatgaaatgtctaataaaactataagaggtttagagatttttccattggaaatgtgcattttggtttctaatttttttgttttttcatttactggcatactgttatacctcatttttaaaaatcaactgaatccaatatttcctgtggcaaataacactttcctcatttcataccttttctcctctcttccatgccaacatttctccacccacaacgtacactttttatttctccatcaatatttgaaagcgagtgatttgtgaccaggatttttttttcttagggttgcatttataatttacagattgccttccttgggaacaagtatttttttgtatgatctgtctaaaaacctctcacctgaattttgtggtagaaagtctgtatttgttgttgtgagcgtgttaaattgataacaaaccaaactacttgatagctaaagcagattgtttcgggtggggagaaaaagccctaaatcagaatgtttatatttgcctaaagatgtccttaataatacaatatgctttagatcttgcttatttagtgattgtataccaggaaaacaattagactcaaatcagtgatgttcttgttcttggtgttcatgaacatatatcaaagattaaaattgtcctgtgtttcttgtttcaaggtacgtgtgtgtgtgtgtgtgtgtgtgtgtgtgtgtgtgtgaagtcttaaatgttttattagtctacagctaatcagtttattgtaatattgtatgtacagtgagattaatgtcttgcgttttcatcctttgtgaattaaaaattctcacttgttttgtaataacaaagctagtaatattttcctgtcttgacagcttggttttatagtagaaaatatattaaaagctgaaataaattatcagtggaattttatttgttagtaagtcttccttcataatgtcattgaaaaaggtagttgcagatttagaaaagaaagtatatttaaatacattgtcacattccaattagaagaaaaacacttatttaaattttatagaaataagaaattttaccctttactctggagaaagtacgttaattattaaataatctccaaaaaatgatgtttatattttagatagagacaaatctataaattgttttt

SEQ ID NO: 60491 - DNA, 2588 bp, Homo sapiens
gggccatgttaaacaatatttggttacgctggatgtttctgttgcactctgaatggttagccatttcatgaactgaatttcagcaaggtgattgactttttaaaaataaatctttttcagatcaggtatttggatccaatctcgctaatctgtgtcagagagagaatggcacagtaccaaagtttgtgaagttatgtattgaacatgttgaagaacatggtaagagaaggattttgatttttttttttaacattaagcaaaccagcttcttgttttgccatcaaaattcctagaatttttatgattttgagtgatgcaaacagaagttccttatagtcctaagatgttaagaaaataattttgtttacaaatacttacatgtttacacctgtttcaaattaagatctctccaggcatctgctgaatgtttggtactcacagttaattaagtatatgctattctttgatgccatttcatttaagcatttgcttaaaatgaagaaggtagtgattgtgaaattgagcttgtttttaagaaataatttgacaatgtataagatccgaggagattgtgtttacttactaagtttcttctgtcctaaaaatcagatgacattttaaatggttaagtcaaccacaaatgtctcacgagataaaaatttttatgtcattttctgtaaaataggacaaactaatttctattgtgattaatttaaacatagctataatatttatactagttttatatacattagtatattgtaatcacattaacttatctctgtatatcatgaaagagattttgtacaattaaaacacataattcaatttgtaatttctgccagttacagatctcttgtcccactgactcttcttgtcaacatggcaatagggatactacactattgtcttaatttgaagctaaatgaatagtacattcaataatgtgctttagtaaatttgtacattattatcatttaatgaatacctgaaatttcggggcttaattgtatgaatttcagatgattctgtttcacatataaaagaaaataataaattatagcaaattatgtattgtttttatagaaccattaatttagtggttatattaagtttacttattacaaacacttaatatgacagatgccttcaataaagtttttacaatatgtgcatttacattataaaatggtatgcaaaatatgcatgggctgattttacctgctgacttcctttaattttgaattatccccagatgttttcagaaatttgaaattgttagtgttttaagattaatgaaaccatttccttgagctgattcacagtctatatgatgagcagagtagaattactgctgtttattaaacagaattcagagcgaatctccatctctctcccctgccaagcatctaccagaagccatttagagaaaaagaatatttgcccatttgattttaggctaatgcaaatgagtgggaattctgacacatgcaaacgtgttcagaagaggcaaagaagtactttaaacacacacacacacaaattattattgtctcttaggtttggatattgatgggatatacagagtaagtggcaacctcgcagtgatccagaaactaaggtttgcagtcaatcatggtaagattatatttactgttgttattcagatgcatcactcataactttttgaactggcttaaagtaattttttaaaatgtccaattcctgctgtttttcagatgagaaattggacttgaatgacagtaaatgggaagatattcatgtcattactggagccctcaaaatgttttttcgagaattaccagaacctctttttacatttaatcattttaatgattttgttaatgcaattagtaagtatgtaattctactcagttttttctagatattgaaaattctttgcacagattaagccacccaattttttttatcttactttaagcaagtattttcaacagattgttttactccaaacattttaaatgtgaccaccagatgtcactgtgtattaccaaatatcagcttccaaactgtgacattgctttcagtttcataagaatttgctgtaaaatatctggttattatcttttttcagagcaagaaccaagacagcgagtcgctgctgttaaggacctaatcagacagttgccaaagccaaaccaagacacaatgcagattcttttccgacatctcagaaggtaggaggactgcccagtcatgggatgtggtatagcacaaggggaagcgggaaggcctgtggggccagggtcactcagactcagatttggatcccagctatgctacttgctgtctttgtaacttgaaaaagttactcaactccttttagtatcagtctgtcatgggtaaatgatttgctatgaagaatacagtaaagtaggtattatatgtgaagtatttatgtaatgcttagcacatagtaggtgttcagaaattgttgctaaggttaatatgaagatgagattggatattaattgaggtgtattaagttaccgtcatggttctaggttactacatagccactttaataaccaagttctttcatctga

SEQ ID NO: 60492 - DNA, 1712 bp, Homo sapiens
ggtctcgaattcctcacctcaagtgatctgccagccttggcctcccaaagtgctgggattacaggtgtggagccactgcacctggcctatatttttgattaagaaattttaaaatacatactgtttccaaagtgtcagaagataaccaaggactaaatgtagcaagaggtgcaagaactttgcagggaaaattacaactctttattgagagacactgaataaaacctaattaaatgagaagtatattctgttaatgcatttaaagattcaataatgtaaagatataattttcttccaatgacttacagattcgagatttttgaatctcatttaaaatcccagtagtttttctggtagaacttgacaagcttattctaaaatttatatagaaatgcaaaaaactaagaatacctaagacactcttgaagaagaaagtaaaaggacttgcaccatcatatgtcaagtctttaaaaagtcatattcattaataaagtatggtatctgtgcagggataagcatacatacctgtgaaacagaataaagaacctagaaacagactcacgtacctgtggacactttgtgccagatagagcactgtagaggaagcagatggtgctggtgcagctgggaatccaagaaaaaactggaacccttccttaaaccatccacaaaaataaattccaggtggagtaaagatctccatgtgaaggcagagcaaaggtttttagctttgagaactcagtcattctttaatctgtacaagcgaccttagttatagatgagctctaggatttcttttcttttttttctttctttcttttttttttttttttgagacagagtcttactttctcacccaggctagactgcaatggcgcgatcttggctcactgcaacctctgcctcccaggttcacgccgattctcctgcctcagcctcccaagtagctgggactacaggcgtgtgccaccatgcccggctaatttttgtatttttagtagaggcagggggtttcatgatgttggccaggctggtctcaatctcataacctcaggtgattcgcctgccttggcctcccaaagtctttgctgggattacaggtgtgagccaccacgcctggccgctctaggatttctttccgttgacaaccgtgaatctgaagtatgagtcttgtcctgttgttacagggtaatactcttgtcaggtccatgtgtagaagtcttatactgttgtcagagaatgtagctctattgtgtttttcaccatagattatagccttaaccttttaactgttagtgtcactaatatacagttgattaaaatgaggcaagatagcctcatcatcagtgtaaactaacccattatcctgtgaattttcagcaacaatttcttttttaaaaaaatcaaaattgatgccatctagggagaaaaaaagtatttatcaaatatctaagtcatacatactgtatactaattggtttcctaaaattgtttggaagagtcatttacaatagtcattgtgagaattatgccattccaactatagtaatactagaagtgtaatatgtgtttgggaaatatctaaccaataggcagtagaaactgatgaaggaattgaagaggagataccggattcaccaggaatagaaaagcatgataaagaaaaggaacaaaaggatcccaaaaagcttcgttgtaagttgtcctttccc

SEQ ID NO: 60493 - DNA, 1036 bp, Homo sapiens
ctagtatatttcttcttctttatatacaacaaccaaaaataatcctgggtttatattctgcaggtatgttagtaagaacgttagtaagcagctgggagctgtactttttttttttgaaacagagtctcgccatcacccaggctggagcagtggcacagtcatagctcactgcagccttgaactcctgggctccagcaatcctcccattcagcctcccaagtagctgggactacaagtgtgctccactgtgcctggcttgcacttttttatactctgtattctccttttcacctttcaccatatggggacatggctcttcattgaggatcatattatattaatgacagaaatgaaagatactactgataggaaataaaagagaactttgcctcttctagcaaattagttatgaagctatatataaattcttcctttgtagtttgtaatattgcatgatatttctgaatcttgtcctttcttttccgtttattcctgaaaccatgagggcaggcctttatatcttaataccaaaataagagtaacctcctaaacagttttttccttatttaatcttacctatcactgattcatccttaatgccattgccatatgaaacttcctaatgtcaattttctaatcccctactgctcagaaacttgctgtgattcattaaaattcagcggtgtaggcccaatctgtcttttcaaaatgcaccttctattttacccaatatggactttcagctctagtcacagtagtctgttcactgtctcttgaaagcaagtatgcatgcattcatttaacaaatatgtgaatgccttatgcattggggacatagcagcacacagtcagatactgcactttcctagactgagattatagccacagacagatgattattcaagacagataacagttaataaaatgaaatgtgatgagtgttacgatggtaggggggtacagcattctgtaaaaacaccaattaagtaggggcaaacctagtgtattagttagggaaggccttgcagaaaaagtg

SEQ ID NO: 60494 - DNA, 3080 bp, Homo sapiens
tacagaactgccaagccaaagtatacatgcatttgtaaatttgcaaatatagcattaccaatttttcttttctaggagtagttccagtttatatcccacttgcatatgaggcctttttagtctatagcctcaccaacatagttttgaaaaaattttttcccactctggtgggtaaaaaaaatttcagtttggctttatatatatatatatatatatatataatatgatggaagttgagtcattttgttttctgtgaattgtgtattcatatattctagatatttttcaattttaaagtagaaattgttactttataatagagaaaaagaagaatttgagaaaatctatttgatttattgttaatataaaattgttcttaattatttttgaatacacatatatgtgagtatcacatgaaggttttttttctttttcaaaaatgaagtttggcagtaatcagtccaaaccagagttcacagtggacctcaagggggcaacaattgagatggcttcaaaggataaatccagcaaaaagaatgtatttgaggtaatacatttttttctaagtataacacattctaaactgtagtaattggatgttctgttttttgagctattttgggaaatagtctttcattgtgactagttaaggcaaagttggtgattaagttagatggtattgtaatttaagaaaaaactggtgtaaaaactggctttatttgcataagttgtttgaactcagactgtatattacaagcctttgtttcacaaatcctatcttttgccagcaataataaaaaggatgtggttccctttacttaccaaatctaatattaaaaagtaaattaaggggaatgttgataatggggaggctgtgtgtgggggtgggcagggggtgtatgggatatctctatatcttcttctcaattttgctggaaccaaaaactggtctaaaaaataaaggccttttttttttttaaacctttccattttatcttttaaaaccctccccagtaatatatgatctgtattagttacttattgctgcataagagaccacctcaaaacttagtggtttaacaaaagaaccattttgtttgctcagcctggcctgggctgagctgggtgatttttcttctaatctcacttaggactattcatgaggcttcagtcgtctagtggcttgattggaactggatggtctcaagtgacctcatggctagtattggtgccagctgttggctaggcctccttgtccgcaagatctttcattctcaagggagctaccccaggctgcatcaagtgacggcctcaggattccaagagggtgagggtggaacctgcagggcttctcagggcctagatttggaagtcacacattactttcagagtattcattggttaagactgttcaggagactagccaagtattcagagttgtgggaagagaggcagcctattgacagaagagcagcattatctgtcccattccagaagggtgtggttacagagatccaagactgattttgtggacagccttccagatcccaacctctttttgtagtctcatgtctcagggctttcctgttgtgttgtgtagacagattggtttaattgctgttttccaagtggagcccaggttttctggtttgtctgatttttactctttattgttctgcctcgagcaccaacccatgccaatctctccgtgccaaatgctccctttcttccaagactcatgacaagcatcaccataacaatgaggctacttctttatttataataataaatatttatttaaaaataatatttagtgtacttgggttatcatttgtcaattatttctctcattagataattacaatttttttgtttttcccttaagtaaagagactatgtttttcctttaaataagaacctataacagagcagagtatcttatgtgcagtaaacattcaatattggtaaactggcttgaccaacactagaaaagtgcatgaaagaagtcactgtttcctgaattagccttgtagtttcaaaaggtaaatcaagaataaaaatggtttcatggtcaaataaatttgggaagcagtgtatattttattcctatcttagaaaatcacagtgcaccctagaatatcaaaagcctgtgacatcttgaaggagagaatctagttatattttcttcaatccagtattttccaagttaatattatatacctttttcaaaaatttattttttgagggtacctttttaaaacattatttgtgaaactatgtttgaggactatgtttttcagaatgtttgggaagcattgccatatcttcctctaggaaaaaaaatcagtttttaatcggaaaatgggaggagtgctttccacaaatgtgtcaaaattcttcctcacttaagtttaagaaactgcaaaacagagattgtacataaattagttattgccttcatatagaataaacatagtattcttacttcagctcatgatctgacacttaatttagtaatacttccgcccaaaaggggtgtgacatttatgcctgctctttgtactaagccattatatttacctacaaagtaggaaatattgaaagtctttatgtattctttcttctgtattttttagccagagagacagaaaaaaatttctcaggttgtgtaaaaatgtcatagattttatttctttatcctaatttagaatgcaccactttgatacttgaacagatttttaagtgataaacgtactagtttcagcaggttttatggcatttgtgtgatggtgtttgggatcctaaattattagatttttgtgagaatttattatgagaaacaactttatgtttttttattcaactgatattattgtaaaccaaaaaggtattccatagccgtgtagtcctttaaccttgcatcattgttacataatatatggcagctactcttggtggttttgttaactttgaattaaaggtattcatgtattttgctgaaagcacaaactgaccatactcttttttctccctgcttttctctaaagctgaaaactcgtcaaggaacagaactgctaatt

SEQ ID NO: 60495 - DNA, 1040 bp, Homo sapiens
aaagtgggactagattttggaaaataataactaacgaaatgttgccagctatactgattgcattttttttttttagcattccatgtcatgtcattgtatttatatttaattgctatatcttatttggttgcttatttgtatcttagcttagagctacccatctacagcgtgtatgatgacaataaattaaataattgatttttgtcattttgttaaatgtatgttcaagtttggtaacatttgcaatacatcatttctgctcagaaagttatgcccaacatatagctttatgtttaatttgtctttcgattgacaatggtacttcaggcaaagactttgtagaatacagttacaatttctattgtgatttttattatgattccacaaataaattccatgtaatatctcaaaattttcattgactccactaataaattttatgtaatcctaacttttgtttaagttcacactgatagctaaaaagatgtaaacgggaacaggttgaggcaaactgtattttaaatgtgaagctcctgaatagagttactgagattacaaatagtgaataagttatcacaaagttgggtaagataatttctaatgacaaattaatttgatttgaaaatatttttagcaaatgaaattctctgtaggaaatatttataacagatttttatgatctttagattacaattcagtagactttagggttttaaaacctttaaacttttcaataccataggaatgttactttttatacttaacagactaaacaaatttaaagatgtcaaggtacagagtaagtgtatatttaacataaattttctactacttttgctaatcttttccttatctagttaacaaaatataatagctagctaagtacttctgaacccacccgtaacaactgtcttcccattcttttcatagttcctcattaaattgctgatgctttatagcatctgtctctagttacagtttctgacaaagataaaagaacatgggacttagtgttttctgtttccacaagttgttgttaa

SEQ ID NO: 60496 - DNA, 1024 bp, Homo sapiens
agtaaaatttaaaatgaaattattctaaatgtatttggtctacctcatattctaccgtaaccaatattttattacaattaatgagtttctttaaaattaatacaaaacctatggatcttatgtttgatgaaagaaaagtccatttataaaatttaagcaaattttagtcatccacatttataatgcagccatgcaacatggttctgaaccccaaatgccacagaacacattattcctcagcttctctgatgaggaaacctaaaaatccacatgaattgagcacggatgtgaacattctagatcgtttcttctgttttgttttactaatcttttaatttgctccctgttcagccattccagtggaaatgacctgtgaaagggttgaaattttggtttgatatatcttaaagtaaatggataattatgtctttctccttttcctcgaggtgaaacatgtggggctcttttgtgttaatgcatttctagaggactgtgtaattgtttctttcttcctatttacggctcaacttttatttcaaattgagtgaagaaaatggatgaaagaaaaggaatggagaagcaataagagattaataagtcacttttaaaagtatctgaagaaagctggatagtggtcacttatttgataattactgatacttaaagattgaaggttgtagcaggaacagatgaagccattagacagagcatcctgtaggtaggcaggtttgtatgtgatttagatgaaatgaaaacttattttgaatttaaagatgttaaatgagtaccttccagtacataatcattagtacaggatggttacattttttaaaatttatttaaagttttcactgtagaagatcttacacacgattcagaactcatgattaaaactaatactgacaaaggaggtgaggtatttctgtttatcagccaaggttgtattactttgttaccatgtggcaatagccgaaacatagtttaaaatttactgagcaagccaatttgaaattttagaattctc

SEQ ID NO: 60497 - DNA, 1044 bp, Homo sapiens
catagttatttctgataacttctctgattaacttcatttgttttggggccttcatgatcaggtttgaaccataaaatgactgtaaattgcattagtatctatccccaataaaaacaattaaaatgtcaacaaggctgtaaattgtagataacattgataagagctaagtaggtcttaattttttgaatttggctgaaagaactcgagattggagctttaatcggtcatctttataattacagaaagaactggttgtcttcttgggcggtgttgcagggttcatctttactttttaccaaaactcaaggaagtagcacaagttgggtaagtatttcttctctttggagattttatacatttaaattatgtgaatagtatcgtacctgaatttcaggaggtaatttccagagtccttatagttatagctagtgtgcaaataaaaatgaataaaatcttcttaaagattcattttaacttatgagagaaaaagaggactaagtaggacagtctaattagtggtgttattaaaatcaacagattctgttttatccattcaactgaaaagtgggcttattacttgggcattatagagaaaatacatttcttgattcattttcaggatgttaaagctttgctgtgtttgtgactctgctatttcagatatttagtcagaaaataagcagtaatgtggcaagctgtatcttgaattgtgatctgaccattggttacaaatcagtgattgaggtgtcagtgtctggattgtcagccagctttcaaaagaaaaagaaatgtcacattacttgtgggattttgaagctttttatatatttgagtgcttactatcattactctactcttcagttatttgtaatgcaaacattaaaaattataatttgtgacatataatagctacattttttgaatgctcattctgtatcccacatatgttgtcagtgcagaggattgtgtatatattgtctccttaacgctgggatagctattgctctgatttcgcccttcccccgtcatagatgagaaaatgag

SEQ ID NO: 60498 - DNA, 1050 bp, Homo sapiens
attttttgttgtctataaataatattatttgttttctttgaaaacttcatttatttttaagataatgtttgtgtgccacatatccaggtctgaataactatagtatgtacatcagttgttttttcaggagaaaaaatggggttccaggaaaaaaaaatgtgactaattcaccttgcaactaagtcacgcaagtgcttagtccttgaggcaataatcgttattttactatttatgtattcaatatttgttctcagatatatatctactagttctacagtttttctcattttgaaaattgaactaaaaaagcttacttaaagtggaaataggctaatttaagtatttttcatagtagggagtcagtagatgatatctaaagaaatagaagactgagaatataaaatgaatttacaaaaaattaaaatacttccaaaatatcttcagatccagaaaatgaaataatgatgacagaaaaagcaccatctataatatcaatatcagtaaatgtaaatggactactcatctattgaaagaaaaaggtgctcagactgaagcataaaaaagcaaaacttaactaaattctatatgtaaaagaaacacctaaagatgattcagaaaagttgaaaaaaaaaagcaataaggtgtgtcaaaggtatagaaagtaaagcaagactagggatatcagtagcaaagttcatcctagggagagagcataaagcattatgaaagtagtatttaaaatggtaaagcatgtgcagaagtccacagtgaagatgtaattattaggaatcaccatttaccaaataaagtagcattaacaaacataagcaaaaaaatacaggaaataaatggaaacatagaaacttagtagtaattaactttatttcactagtagtaattaactttatttcacttatcttaatccataaagttcaactagacataaaaagtaatttaaaaaaaggtaagtcttattgatagatattaaattctacattctgaaaacagaaaataaacctcctttagaggtggttttttttttgtttttgt

SEQ ID NO: 60499 - DNA, 1013 bp, Homo sapiens
tatgctacattaaggcaagttctgtacatgataccagttaactttttagtaatttattaaatacagacacagtatttggtctccctatttttacattttgacaaagtgagttagtatattgaataattttcagattatatagttgtaaaataacagcaaagtaaatcattccttttttgtagaatttatccttatagcattgtattcctttctttgaatagaaagacataaattatttttcagtgctgctttgttcatatggaaatctaatttgatagcaaagtatctaatagctgctgtgacttaaggagaaaaagaagtgtttaattataaaattaagaaaaaactacaaaagtattaggaaagttatattcttaatgtattctagaactacgcatgttacacattgactaatcttttcttttaagctaatttttagagaacgagaccatgttggttcagtcatgtgtaagaacttggacctcattgtctatgtgattgtataaacagtattactctgttccataggatcaagagaaatatggattattaaatgtaacaaaaattgctgaaaatgggaaaaaggttcggtaagtacacaagtctttaatgttcttacatgattcatctgaaataaattaaaaattctcaatataattattttagtataaacaataggtgctgaagaatctctcaccatttgttttctatgtaatcatatatgtaagattgtcatgagatttatgaaaattttcctttgtcttgacatatttcctaagtaatattaagttaagaggtaatgaggcagagggttctgaggatgcatttgctttaatattttttttttcagtaagcagtaaatgcacatggtaaaaaacaaaggtagactaagtattgagtgaaaagtcaatcccccagccggcattacttcccctccccagaggcaatcagtgttaagtctcctgaattctagtgctttcctccagagataggatatatatgtatatgtttgt

SEQ ID NO: 60500 - DNA, 1750 bp, Homo sapiens
ggtatagcaaaaatataaactgagtggcttataaacaacagaaatttatttctcacagttctggtggctgaggagtccaagatcaaggcattgataaattcactgtctggtgagggcaccttcctggttcatagatggttcctttttgctgtgtcctcacatggcagaaataacaagggttcccttttataagggcactaattagattcatgtgggcttcaccttcatgacctgatcatctcccaaaggccccacctccaggtatcattacatttgagattagatttcaacgtacaaattttgagggacacaaacatttagtctgtagtaagtacaataaggcaaacaaactgaggcagtcataaatagtgggaagtttacttaaaagtggtcaggaaaagccctaaagtaacattgaagtggagatattaccagctacccagttgctcaagcttgacagtttccccaagatctttgctctcaccctagcaaaagtccctgtcaattttgtcttctgaatctgtcaaattgggccccttttctctgtcactgccaccacattcaggtctttatcatctcttatagtaatgattaaaatagtattctagttggttcctggtcatgctaccctttcttagtgcattctttctgctacctcatttcttgccacttctccacctcacccaatacttgggggaatttaaaatccttcaaatatgaaatgctgtctttagcccctgtgcctttcactgttggttgtttttatctcctgctgtttcagtctagctgactcctgttccttagttcaagtgtcaagttccccaggaggctgtctgatgtctttctctcccaggttgagttaggcatagctttctcatagcatgtatcacattgcatgggaattgttctttgtatttgtacgttttgggtgtagcaaattttgttctttatgttcaagttagagtgattaatagagcattagtacttgggtcttgatccctgtgaccatttggtgaaagttctggaccttttctttgagtgatgcatatatacatgctcagttatgttccagtttcagtctatccgttgatttgggtgagaatccctgatctagactctccctctcatccttaggcttaggctgtctatcactactgctatgccatccatttttcttcctgttttgatgcctgtgtttccttcctgcctctgcttttttttttttttaatacaaattcagctgtggcatttttaaaatgggcttaattcccacctctctgcctttccaattgctgagttccctagcttaagtaatcagtgcccatccactcagattaatgttgttacttagttcccatatgatggaaagattgttttctccctgcttttgaggggtgcaggcggcaaattaaaaatgttcttctttaacatcttatgcagctgccttgctgtgatctgttgaaagtcagccctcaacatgaaggtttatgagaaaaagaaaaaaaaaaaatctcacacatacttacaattgtgttattaatgtttttgttgaggagcaacatagttcttacgaaaaatatcaaacttgcgtatctaaggagatttaagctgtgctttatgaaaaaattacaataaaacttcatatgggctatttcccaagtccccagtataccaaaaatgtaaattgacatagcagtttgtcagctttgtctacagatgtcagtttttatcagaccagacgaaactttca

SEQ ID NO: 60501 - DNA, 1119 bp, Homo sapiens
gctctggctcctgagtgcctccaccacctcatctcatatttccttttcccttcttgcttgttgtcctaccacaccacccttctctcagttcctcaaaggagcctgcctttcagatcagggtccttgtgtgtgtcatttcttctgcatgctgaaacattctccccgacatctttgcctggttagcttctattcattcatcagggcttagtttgaacttttatttcctcagagaattttattctaattctctaggttaggcaaagttttcctataatactcttcatagtatttgattatatattattcgattacataaaataacttgtcattatttatttcttataggaacctccaactctctattaatgtctgtcttccccaccagacagagtaaagcttcattagagcaggaacagagttaccccattacctcccacagtgccatataatagctgctcagtaaatatttgttgaataaataaatgaaaccttaaagctttttaaaagacaaaattttattatggcttctctagtttatgaaattatgatacactgttatttattaggatacttcagatttcccagaggtaaagattttcacagatactgtttcatttttctaactctttctccattccctagtgcaatctggtctttttggcactaatcaggggttgtacacatttccttctgatgttggcttaggcagtacccctgcctagagtgggccttgctttttctatacatagttaaatcctatacctccatcaagatggacccttccagaaagctttgtcagactaacgtagcagaataatgttctcttctttatctgaactctcaagtcactaattgcattgaataagtgcaagttattatatgtacttctagtctccctaccaggttttaaattcctaaaagaagtttaaatagaggacagatagagactacatgcatctacttatcttttgcattatttgcacagtactgggtacataaacattacataacgataaaagtgaacattattttggtggttttggcaagaattgccatacgaatctaaggcactgttactacagtactcttaatctgtccatctagaaaagtaggaaaccc

SEQ ID NO: 60502 - DNA, 2508 bp, Homo sapiens
tgtaaaattatttcttgtttataatagttataattgtacatatgttattactgtatttgtggtttttatttctgtgggactgaatgtgctatgaaaaatataattatcattttattcagttacttattttctactttatgaatcatcagatcttccatctttctcatactgttttactatcagacagtcttaggaatcaaaaattgatctgaagttgtcagaaaaaaatacttaagtgagatttggatcttaagttaaatttttttgaagttttttattcaatgtgattttaatattttctccattaatagtaccttgtttgatttataaacttgtcccttcaagggcttccatgtaaactttcactgctactagtttctgtatttacaaattgtgtgggatataaacccgaagacatttttccaaatcagtaaatgttgagttaatagtttttttgcaagtgttacttaaaacaaattcccaggttggttgacagcaccttctccaggtttatagacatagaaaactagaatgatacctacgtggagatgaatgttcaaaggaactttttggtttgatagaaacaaattaataataggtaatggtgtatgatttaaaaaattctctttttctgaaattattcaaaacatctaaggaaatggagaaaatttaagtggaggtgggctactgctaccaaaaaaaagtttttcagtcttaccctccatgaatagtcctatcaacatctgtaatagaaatcatattctgtgttttaatattgacaaagcagactgcttaaaaaaaaaacacgttattggtttggtcttatgatactcttgtaggcttagacattaaaatttttttttctggggagttattaatatttaaatcgtaggtttctttcttgaatttaaaatatcttatttctaatttttggaaagttttctataaattaccttaaatactaatagcaatttaatttcttatatagcttttgactaaaattaaattctcattctggcatttgctaaggtatttctgtgaccttgcctaatcctgggtatttatacttaccataccaagagcaagttagtatcatgattataacttatttatccagaagtgtttaggttttacttattttaatatggttaattcaaactgatataacatcatgattttaaggcagcttgtatcatttcttttgagtaattccatatgcattatttaaatttaactgtaattgctataaaaagcaccatattttataaacttttaataacgtttgtagttttaaaatcattaccttattagcttggagctgaatatagaacgaaaataacgaggaaaaaatttgttattctctcttactaagctctcccactgtgagtagaggcagaaatataattatataaaatagagtaacttttttcattacttatttcttgtaggaatctccaactgcctcaaaaccctgctttcctgaaaatgagtcttctccctcctcaccaaagcaccaagatacagttagtatgatagaagcatatcttataatgtagtccagttatttcaatcaattttagcaagttaatttactcttaatgtaatgtttaaatgagcttctattaaatttcattggtttttctaaaaaatcacaatcaaaataagtttaacaatcagattttattgatttaaaagtcccccttttgtttaaaatatggtatcttacatgattaaattatataccatatttttaagtgatgaacttatatttgtttttaaaaataaatataaaattcccagacaatactatgacattatactttactctttttttcctcaggccagcagtccaaaggtaagaagcaatcctctccttcttaataggcatagacaccttcattttctatgctgtaaaatatattgccaagtctgtgccagatgaatattggaaataatatagcttaactgtaagttctcctaaactggaaaacctccatgtgacttctgttaagatacctgtcttaactctgatgaaattttacttaatttctgtatttatactcattcccagtcttttctgttgctgatcatgctattccccttcaatggcttctgggttttttttcgttaccgttttttaaatagagacatggttgcgctctgttgtccaggctggagtgtagtagaaccatcatagctcactgcagcctcaaccacctgcccctcccccaccaggcttaggtgattctcccgtctcagcctccctagtagctgggaccacaggcatgcaccagcacgctctgctaaatttttttttttttttttttttgagatggagcctcactctgttgcccaggctggagtgcaatggcatgatctcggctaactgcagcctccacctcccaggttcaagtgattcttctgtctcagcctgccgagtagctgggatcacaggcatgcgccacaacacctggctaattttttgtatttttagtagagacggggttt

SEQ ID NO: 60503 - DNA, 1693 bp, Homo sapiens
gacataaatataacaagtaaaactttaaagactgtggaaagatatatcaaagaatatctttgtctgcagagtaggaaagatttcttgaacaagactcagaagcctactataaaaggaaagattgacagatatgactgaattaaaattaaacaaaacaccttctctttgtagaagatgtaatcaaaggggagaagatgggctacaaactaggaaaagatatcttcaactcacatagcctagaaaggtttagaatccagaacatgtaaagaacttactagttcattttgaatttaatttttggtttaggtttttaaaataatgcttatttttgattttagtagaagagatagaagtagaaaaaataatttgtctgattttactttataaattatgatagttaatatttattgataatatactactcttttaatactttcttctttaatactttgatctttatagcaactccgtgaatgagatatttctgttatatccactttacagttgacaaaacttagactgagggagattaaatattttaccaaagataacactaccttggtctgtgtaacaccagagtctgtgatcttctcaattgtgccacagttctggttaaagatgagaaaactgaggctggaaaatttgtggagatgtcatataatgaacttcgcctaacagtctttgtcatttggagccaagatgtttagattccactttcatttctattgtttatgaactgttttttgtgttttttgctttgttttgttttagtataatgcttcatcccagcagcaaagagaaataattaaaagtaggagcctggacaggcggctgcaagaaccaatagtattaacaaagtggagacatagcaccattgtattggacactaatgataaggtaggactgttgagatttttggcaagttctttgcattatattgtacagtgaattgtaactattcgtactaatattttatgtatttagtaaatattctttgctaaaacatttgatttcttttgaactaatttaagcttttgatctgcatgtatgttgaaatgttactacattattgtttcttttaccaaattgcatactttagtgactacatttttatgtatttagcatcagtttgtcatgaagtaggttttggttttgagggttttggtttttgcacaatagactgacttatctgtagcttactgatgtgtgtaccttgatacatttgatcccagtaggtgacagatttttcttgcttaccttattttaaagtcacattctgttatcctttgtcttcagtctctaggaggtttcatagggaagacatttaattaattttcctcatcccaggtaatattggaattctattccctttgtttctctaaatgctctctgcagaaagcacttcttttatcagtctgaggagtaatgtcctctgtttcaaaaacgggtaaattttaatgcaaacattagaatggatgttttaaacacttctttagaggttacttattcacagtgtagcttcattttggggataagttgggaacttagtatgaatttgcagaatattaggtatattgattttgaaatgtaaaggttttttaaatcatcaggcttcttgtagcatgactaacagtttttctgtaatttttaggtgtgttcatgaaaacagaattaactatccctatggcatatt

SEQ ID NO: 60504 - DNA, 1004 bp, Homo sapiens
gttagaaatttttgttgccggccgggcgccgtggctgacgcctataatcccagcactttgggaggccgaggcaggcggatcaccggaggtcaggatttcgataccagcctgaccaacatggagaaaccccatctctactaaaaaaacacaaaattagccaggcgtggtggcacatgcctgtaatcccagctactcgggaggctgatgcgggagaattgcttgaactgcttgaacctgggaggtggaggttgtggtgagccgagatggtgccattgcactccagcctgggctctcaaaaaaaaaaaaaaaaaaaaaaagaattttttgttgcaatgttcttgatcaagtagaataaaattcataagaattaaatctagtatctctgatagtagtagcttaaactcacttttatttaaatttaataaaaaacacctgttctgtttttatagtggctcaagcatgttgatgatcaaggtagacaatattactacagtgcagacggatctcggtcagaatgggaattgccaaaggtaataaaccttgacaccgaatttctatttaaaaatagtagatgaagtaatatctggagatggtttcagcagatttattttaagatctttattctacttttacaaagtagaataattttttcagaattcactgtgaatactgtgagtagtgtaagttttctaagatgtacaggtgtcttcactatgtgatactgattgttgctattcagaatatcttttgggttaacttgaaattggcctttccttattcttggaaataagaattctcttcaataccaataatgccatcttatatctagttgtgttgagtatattgatttttctacataaagttggtcttatatttaatcattttttgagagaaagaaaagtaactcagtattcaagtttatcctcttatgtaaatggtgtgtatgattgagccattcattgactgagatataggcaacatgtgataagatgtcctaggattta

SEQ ID NO: 60505 - DNA, 1043 bp, Homo sapiens
ttctttcatcggaagaaaactactacagcacttcttacagccagtcagatagtcagtgtggttctcctccaaggggttggtcagaagagttggatgaacgtgggcataccttatataccagtgactatactaatgaaaaggtacattctttttttctcatctagtgttttttggcagaattctctcataaaatagttgtgtactgcagttttagtatttaaaaaagaaaaaactcatgaaaatattcttcattgtaactttataatcatgccaattgacaatacgaaaactcagtgtaactactgattgttttaaactgctaaggatgatagtaatttttatgctcttgtactcatggaagactttttaagagtacacctgttgaatgtcatttgtttagatttcttcagtaggcatatttctttatatttttctgagggaatagttttttggaaatggttttctctctgtgccattatcatacatcgcctcactgcctattctcctttttctattacaatcaaatttatgtaaaacaaaaaccatcaatctagtattttatgattagtctgtaatgaatattgacattttatgtgtgtattgcatctggtatcatttgagaaagcaactgtgggttgtacatgttcagagaagatatgcttgggaataagtggggctaggcttttatccctctttcctgcctcaattatttgacattagaacatacggaagcagttttttcatttatgtcatactcaagatcatgtgtttgtattagcaatatgtagtcttttttcccctcatattccctgtgttttattgcatgatgttctgttgttgctgttatttaaattttattgtgtttggccataggaagtaattcctaaaggtttgcatgaaatgagcctttaaatagtttagttgtacatttaattgaaaaacatttctcttttgtcaatttctcaaacctgttttgagaatgtgagtgtacctgtgttccagtgcatatgtacatcgtatgttatatgttgcttgttgttaag

SEQ ID NO: 60506 - DNA, 1666 bp, Homo sapiens
tctagaaaaatcagggaacacatcttgtatttagcagactcccaaaagctttttgtagttaataactcccttcttgtcccatttttcagttggtttatttatagctttagtttggtaataatttgtgtttttagtgttcaagtgagagcaaaaatagaaaaattgttcatgtttaactataacaagaaaggaaaatttggctggacgcagtggctcatgcctgtaattctagcactttgggaggcagatcacttgaggtcaggagttcgaaaccagcctggacaacatggtgaaaccctgtctctaaattagccgggcgtggtggcgggcacctgtaatcccagctacttggaaggcagaggcaggagaatcgcttgaacccgggaggtggagactgcagtgagccgagattgcaccactgcactccagtctgggcaacagagtgagactctatctcaaaaaaaaaaaaaggaaaattttatttgaattgtacattagaaagatttgaaaataagctatccagtgtatcaataataaagtaaaatttaacaattttagagaattaggaaaaagactaaattatagactaaaagaatttgaagtatacataggaacttttaacatgtttcttagctattttagtaaatagatgggagtgactatgtatacagggtctcaattactggtctctatacaaattatatgaagattaatatttccaaagtggctggagcacatcttccagcgacttcttgagaaaagttgtgtatgggaggtaaaatggaaactatgtgtgtatgaaaatatctgtcttctcctctcatatttaattgatagtattcctgggtatagaattctaggatggaaattattttctctcacaattgtgaggcattttgaactttaatggatatctgggtcagcccctctttggggaatccccagtgttagacccattaggtctttccttttggactaattagaatgtccacagatgtctttaggtctcttgcctatacacggtaagggctgtctgtgtcttggtgttggcattcattttgcatgtggtccctcagtctcccttctttctcttggtacccatgttcctattgtgtctattgtcccccaactcagaatcttagtatttttcccttctcagagggaataactctccatatgtctgctggggtagggatgggctgcacacctagcagccaggtatgtagaaggagattctggcatttttaatccttattttagtaccactgctttcactccccagtttcacagatacctgataccgtcagttgctgagccagttgcagattctgttccgtaagcttgtcgggtttattttcccctactctcctttgtctgcaccatactggtttagattctactttcttccgtgtaggtaattcaggttttttgttcatctgcttgactgttgtcctccctgttgttgtgggtttacatcattttaagcacatttcgctgttgtgattttagtggggtttgagagggagcaactgttggctcttctgtcttaacacagaagcttattattttagtggttaccctagaacaatcattcgtagtagggctgatttcgcctttcagggacatttggtaaagtccgaagacttgttttggttgtcacaatggg

SEQ ID NO: 60507 - DNA, 1098 bp, Homo sapiens
atgttctcattttaattcataaagcaacagcttagtattttccagggttctcatttcatcttgcacttactctgtatgctttcatatgttattgaccccacgtgtatattaatgacttctatatttttagccctgatttttttttttttttgagacggagtcttgctcagtcgcccaggctggagtgcagcgtcgcggtcttggctcactgcaagctctgcctcctgggttcacgccattctcctgcctcagcctcccgagtagctgggactacaggcgcccgccaccacgccgggctaatttttttttgtatttttagtagagatggggtttcggcatgttagccaggatgatctcgatttcctgacctcgtgatccaccggcttcagcctcccaaagtgctgggattacaggcgtgagtcgccgcgcctggccagccctgatttttgtaaattgggaactgagttcccaatttatataaccaacaatctattaccatttccacttgggttttgaaaagacttatcaacctaatgcaatctaaatgtaactcctgtttgcccttctctttccattcttttcttcatcttgacattaactgtagtaaaactacacacacggtaaaacaaactgtacttcacataagcaaacatacaacctgtatgttaatttaaccttctgattgtttcttgaatctgtccctgcttctgcattcctactgtcttgtcctattgcagctctcttcatcttctgtctgtactactgtaccaacctcctagttgcgtctctctaaaatctgtaatattttaaaaatttaaatcagaatgcacttcctggcttaatcttcagtagtttcctaaatgcttctggatgtttgctttgcaacatgaccttcaaactctctgtgctgttacttgcttttccttaggcctttcacttgctgctccttttacatactcagtatgtcagcatcattccctgaaagtaccatgctgtttttcctagcttttgttcttcctccctgctgtttccccaacttttaccgggctaactcctgtttatttatttctaaggcttagtcacttgtttccgggtctc

SEQ ID NO: 60508 - DNA, 1026 bp, Homo sapiens
tgaagatgaagagacaaacaagacaaatgtttctgccttaaagagaatgaagttctagaaggaaaggcagacaagtaaatctgggattagagtttagtgtcgtaagtactatgatgagctgtagagaagtaaggctgaggaaaggatgagcgtgagggcatgaaagaaaaggagactggagagatgtgggctctatcttgaaggggaaatttgtcatttgttccctttttggcaaatcttttgcctgtaataaacttcctaattgtgcactcccatgactctctatgtgctggttcctattagttccttcattccttttcactgtggtgtctgtcacctcttctctgtcaaccgtctagatacagatagatagtctttaccagtggttgtagtttatagcatggcacgattgctgcaataatctgcttgcagctgttattgagggttagtagcagagagatgacttcatcagtatgtttgtgtatggctttttagaaacaagcatttgtcagacattacagcttttctacctggtacctgctttattattgtctttgtcaggggaggcgggagaaatggtgacagatctgtgacagggtgaagagactgttcaggctgttggccaaggtgataaaaggagagggggaggacagaagcaagccgtaaggtgacagctaagtcttagcatatgaatacaaggtaaggtaaccaaccctgtagtaatagagcacctctgagtttcaataactagaaaatcacctgaaaaaaaatcagtaaggcaaattatgtgtttaccatgaaaactgatgtctattaaagataccatgataacgaattcacttagttatcagtagtgtttccttattcaaaggttgttttccttatttgtgtgttatatccgaagaacaataaagtgttgcttgtgcttgaagtgcccttcactactctcttgacttgcgcctattttcctttaaagatcatgttaaacatctgttgtgaaactttttctgcatgctgtgtctcacc

SEQ ID NO: 60509 - DNA, 1028 bp, Homo sapiens
aatctgtttctacatagatggtactgaatctaaaaacaagtgtaaactggctttgaatagccagttaatagtgtcccctttcatccaaatcctagcttgctgctgataaatctttttgataagtcctctcttgccacactcctggaaccatggagtcgttacttagctttcttaaaattttctgaaatgctgctttgtcaccagcccagtcttaccgtagacttcctacttaattattgcttagagcatgtctaaagttaggaatcttaggcgatttaggggctcagtcttcttttagtacttatgatttctgctatataatggcttaaataagttttggtgaattagaaaacctaatcctcagtatttataacgtaatattttttggtaaaatatgcttgaagttccaatcatcttagaaagcaacctatttgtaggttggaattatttgtctctttgagcactagtataattgttgcttattttacttttttaaaatttaggacaatgtggggactgaacttgggttgaaactgatttagattttcagattttggatctgcctctgctttgctgatccttgggtgaaccatttaatctctgagcctcagttttctcccctctagaaatggagctcagaattgtcattaggtttaaatgaaattctgttgtgaaatgacttatgtacccagacacaaaaagaggtacttggtacaatattagttctattcactgcacagtaatgtatatacaggcagtgttggagattagaatgactaagtacaagtatgtatgagaatttcatggccctccaagatcccatggttttttctgcttgttttagtttatatatattaaaatatacaaaaatctggccaggcatggtggctcatgcctgtaatcccaccactttgggaggctgaggtgggcagatcacttgaggccaggagttcaagaccagtctggtcagtgtggtgaagggcatgcctgtagtcccagctactcgtgaggctgaggtgggagaattg

SEQ ID NO: 60510 - DNA, 1690 bp, Homo sapiens
tttaaacccgtaatgccgtgttctaggaggtgatcatttaaacccgtaatgccgtgttctaggaggtactaaaatattttggaattgttatagaaatgaaagtaaatgcatattagttattagtgagcctttctaagaaggtgaaggaggtttgagggagtaatgaaaggaaggaaagttcttctcaactcttgtgtctacctggttagtgtatatttactgttccagttatcggcttttgttttggtcataagtgactgaaaaatgtagattacaattagaatgaaagtgtttttaatgtggcagtgcatatgatagtagacacatgtttgctttttggggtttgagatttgaagtaatgttctttaaatggcctatactatatgatgcttgtgagtaaatacgaaatccagattgcattaacttttttcttcattctctttctccatttaaataaaacagctatattcatccaacaagccataaagccataatgtggtataacatcctttttgagaggtgaatattattgaatgaaaatggctgacagaagtgggaagattattccaggacaagtgtatattgaggtggaatatgattatgaatatgaagcaaaggacagaaagattgtgataaaacaaggggagaggtacatcttggtgaaaaagaccaatgatgactggtggcaagtcaagccagatgaaaactccaaagcgttttatgtgccagcccagtatgtgaaggaggtcacgcgcaaagctctcatgccacctgttaagcaggtagctggtctgccaaataactccacgaaaataatgcagagtttgcatcttcagagatcaacagaaaatgtgaacaaattgcctgagctttcaagtttcggaaagccatcgtcatctgttcaaggaacaggtcttattcgtgatgccaatcagaattttggacccagttataatcaaggtcagactgtcaacctaagcctggacctgacccataataacggaaagtttaacaatgactcacattctcctaaagtttccagccagaataggacacgctcatttggtcattttcccggtccagagttcttggatgtagagaaaactagcttctcccaggaacaatcttgtgattccgcaggagaaggctctgaaagaatacatcaagattctgaatctggtgatgaacttagcagcagctccactgaacagataagggtaagattaaaaatagaatgaggaaacactgtaccaccctagtgaaaatattagttatagttttaattgaaatatttgtaagagttaagacttgttttgctttgtattttcagagtacatgggttctatcctgatttagagatctagaaaatatgtgaaataacttgtggagttcataaagggtcactttggttttcataattattcttataccatgacaggactagatctactttaagtgaggaaactttttttcccttttctctattgattatgtataaggcagaggggatttacttaatttactcagtgatgatatttcttctaatagaaaaaatttttactcttttttacctgtacccattttgacttggttccaagaagtcttcaggtaataatggttatttgaggaaagatgtccttggaatattaactgctaacttttgtcttaagtgtctaagtatccacacttg

SEQ ID NO: 60511 - DNA, 1009 bp, Homo sapiens
ctcagtgtacggccgacacatggcattatatcaaactgagacgcttctgcgtggcaagggaaacagtcaacagaatgaagagatgacctatataatgggagaaaatatttgtaaactatatgtctaacaaggggttaatattttcattgtttctgaatgaataatttataataagtttttttctttcatttttatgtggctcttcctagaccttggattgtaacatgtagttcctgctatgtggctttctgcatgtttataattttaatagtttctcttggagcttcccaacctgtttccccacccttcaccccggtattgactagaaatctatctcagctcttactttctatcccattgtctccactcttgctcattttacctgccttggtatctaaccaccttttctatagagataccttttgaccacttatccatctcctttgccctcctacttctcattgcctttaactaaaactctagattggatgtctcatgttgaacatagtaaaaccgacttgctttatctttctccctaactcctccttcatacttatctttgtagtcactgtggggaaggtgtagtcctaaagcctggcagtgaaagagattgaatgtggactggcctttaactcattgttgtccccagccccacaattcctctcccactagtgtgaaaccgtacagctcacttgttattcttcatccttcttttctccattcttagggataaatgtctaactaactatagtatgtctgagctgctgtaaccttttgaaaagtagctgcatattccctcgctcatctctgtatcttcaaagatatttcttaagttattttattactttcctggaaaaaaaatcacctaaggataagcatttcagggtaaaattttgaaaagttgtgaaaaatttgtataggtaaatgatcaaagcacatagtgactagcgttctggtaatgcatgaaagtaacgactgagcgtctgaaaggtcagaattcctgtttact

SEQ ID NO: 60512 - DNA, 1090 bp, Homo sapiens
tttctttaacgttttgtttacctgtttactttttttgatatacctcttaaacagattggttggttaaaacggatgtcctgggggagaaagacaacatttgctgaactgtttaagttttggtaggcttcttggtagtttaaatgggaagaaaattttaaaaattggcagatagaaaggaggaggcttttagattaaaaaatagcgtgataggaaatttgaatctgacttgggggcagagaagtaaaatatataagcaggcgtgtgtgtcgggggtggtggttgttgaaacgtggaaaaagggaggaggaagaagactggtaagaggcatgaaaagcttgtatgggcgtttttgagactgctaagagcagcatcggggtgtagcaggcagtaggtatgcagaccttgtatatactgggagttgggtacttagtagttgtaagtgtttgggatgaatatggatggaggcgtgtggtgatgggtatagtatagaatacatttcagttccaggagtattgtgcttggacagcgttgtatttgattgagcaaacttttaaccaaaatactttatagaaacaggataaacagcgttcaactttctcttaagaacagaatctacaggtctggggaacagaggaagaaacaacccaaaattaaaactgtaaacgtttgttttaatacagcttatgtttttaagtaaaaatagcattaattattcacacatttgtagatactgttacctagatctaaagttttagtgctaccccataatcattttaattatttttttcagagaatttatctgatttttgtcctttctgtgaagtttgtttcatttttttaaacgtaaattatttcatgattccatttccacattctcagcacatttttaaaaaattgataacactgtatgttttttattatgtacaatatagtttttgaagtatatatacgtagtggaatggctaaatttagctaatttacaaatgcattacctcacatagttatcattttagtggtgagagcacacatccactctctttacagttttcaagaatacagtatattgtcatttactgtagtcaccttgctg

SEQ ID NO: 60513 - DNA, 1001 bp, Homo sapiens
gctcagtggttttttagtaggctgatagaaagtgaactttacaaatttttaagtactctacgtaagtgatattactgaaaataatacgggtgattaaaatttttaaatggagtaaaaactaaatagtggtgatctgtttaaccattaaacagtagtactaatattttacttacctgagaaaatgggcatcacagttttacaataaatcatgggagagaaaagtgaaattaaacttttgtcctgtatttaacaattttggctagaattgcaaatatgcactattttgtagtatgaatcagatgtgaaaggtgtcgtagtacgacatagcatcactgtacttcaaatcgggcttttcagattacctcttttgaggaacctattgggccactatccttgtggttttttttttttttcttcagttagctggccccggctcattggtatatggctttgctgtgattcagccatttccctattactttcattgacttcatggacttaatgaatattctgcagtttcgttttgtaattgattagctctttaattgaactgaactgccaaatggtgtagtctctaagcctccttcccctgttgataatctagtgcttctcaaattttaacgtgcataggaatcacctgcacttctaatatccacttggtcatatggatgctgttctgccagaccacagaccactgctgtccaatagaaatgtaatgcctatataaattacttgtgcttaaagtttctagtattcacattataaaaagtaagcacgtggaaaaaaagtgaaataaatgaatatattttacttagtatattcacaatatcattttaacatgtaataggaaaattattaatgagatattttatgttctttacattggaccaggttttttgaaatatcaagtgtgttttacacttagagcatttctcaatttgcattaggcacatttgactagtgactgctgtatcgaacaacagttttggagtctaaaagtg

SEQ ID NO: 60514 - DNA, 1032 bp, Homo sapiens
ttgttcagtataaggagtatttcctgtatgctttggcaactattttccatagactctgcttgtgttctccttataaaaccagaacaagagcagtgcaaaaaagaaaacgaccctgataggaatgcgctgataaccttactttccctactctccaaacctgaattgggcacccttggttttagcaagagatagaactcaacagtttgcatacacttgcggatctgcctgtaaccccacttcctatttcacagcctaatctcggatgataccacaatgcccacagtatgctgatcaccaccaacagcagatggaggcggataaaaagagctttctcgctagtgtgttgttttaaaagaacctgatggagagctatgatcatatgtaacactgcctctagttagtttttaaataacacttgtagcatatgtctggcgcctgtgctcaggatttcaacagatcattttcaggattttgacatttaactggcttcttatgaagtagcagagagttccaaaatgtagaactgaaatataagctccacacacaggcagagatttgagtctgatttgtttgtgtgtatatcccaagtgcctaaaagcacttggcatacggtagatgcacaatagattcctgttaaatgtatttttaggtgaaaatgtagtctgtactttgcataaacttgtcctactttcttcctagttctttaataagtaacctacttttcattatatatttttaaatgaaaaaacaaaattatatctggcatcactactttggctgggctataaagaaacaggaatttggcagtatgtattaaaattacaaatgcatatatactcggagccttgaatttcatttccagggatttatgccacagatgtttccacacataagaaataacaaggtgtttcttattgttgagaatagcaaaagattggaaacaagctaagtatctatcaacaggatactagttaaattatgatagagccatatgtttgaacattgtgcagctgttaatcaaaaaaacagaaa

SEQ ID NO: 60515 - DNA, 1038 bp, Homo sapiens
ccagaggctgaagtaggaggatcacttcaacccaggaggtggaggttgcagttagtcaagattgtgacactgcactccagcctgagtaacagagtgagaccatgtctcaaataaataaataaataaataaataaataaaatcaggtaagctagtgctcataggcaaacttttgaaaacctcagagtttttgttcagattgaatgatgtctgtttcttaccgtaataatttaaaatccaggtacatttattttgaggcttagtatacattttatcaaatgtatataaattttcagaagtactctatttttcttcaagtttagtagagccttccttgaacaagttttaacaaattggatcctccattttaaacaataaaattagaatttcatggatcatttgtctgttaattaaggtcaacaaaatatattttgggaaaaacgctaaaggcatatgtttctcgtgtatctgttcactcacccattttgtaatatcaactgcttcttgtttccatgggttacacagatgccctgtaaatgattttgtctgatatgtttcagtatttgattatatttatttgtgggcttaatttccagaaatctcaaagagaataatgagtacaatagcagtcagatttgcataacacatctttaagggttttaggagatttattaatattttcttgtgaaatctcactgctttcactatataaattcatatgatcagttttaactattattaaagacaaatattagtacttgtggtcaggtgtggtgactcacacctgcaatcccagcactttgggaggcttaggcaagtgggtcacctgaggtcaggagttcaagaccagtctggccaacatggtgaaaccccatctgtactaaaaatacaaaaaattagctggacatagtggtgcacgcctgtagtcccagctactcaggaggctgaggcaggaggattgcttgaacccgagaggcagaggttgcagtgagccaagatggtgccattgcactccagcctgggtaacagagggagaccct

SEQ ID NO: 60516 - DNA, 1068 bp, Homo sapiens
tttctgtttgattaactttctattttgtgtgcgtgtgtgtgtgtagaataagagagaatttaactaaatatatatgaaatcctatttcatatgggggaaaatatatgaaagaaagcaaaagttgtataatagttaaagaaattgggggaaaaaggtaaaacaaaaaccatctcccttgggtttgacagacaaattgtgttggctctgcatccgagcatgtggcttctctaacactacttttaattatgtttttcagctcttaaccaatggaaagtatctactaatacagtttctagccaggcacaatagctcatgcctgtaatcccagcattttgggaagccaaggcaatgagagatctcttgaggccaggagttcaagatcagcctgggcaacatagtgagaccccatctctacacaaataaaaataaaaaatagtttcccatagcttcacacaaataaaccaagttgctgcctgctttcccagtcttgtatgaataagattcttcaaagtgttgatattgaatttccttgttgcaaatccacattatttctgtaaagtttcccatgccttcacttcaatggttaattgaaaacaggagtagattcccctttgtgatgtgcttctcttaaatcacaaagcttccggagccctccttcttagtggctaacaaatttatttattctcatattaatcagtctgttgaaacaagattgcatattctctgtcaaactggttccacttcatctcgctgaccttcgttctcctgtatgtttgcagtaccccactggctgatacagaatgggactgcattgcaagtatgactcaaaagaggcttcagtttgattaaaatctgctctttgatatttactttttaaacttttagacatatgatgtttttagtttacacaaattcacattctgttgtcagaaaactttattttaccctatttaaaatggtagttattttcacgataggtataaaataaaagaggagttctgaaaacagtttttttttttttttgagatgaagtttggctcttgttgctcaggctggagtgtagtggca

SEQ ID NO: 60517 - DNA, 3326 bp, Homo sapiens
cctcttgtttatccctattcctctcccccttttttttttaaagcttctatgtatataactagtagttgctggttagtgttccttggtttaagaaggtcactgaccactgtctgctggttaaaagattagccgtctttttcttttttaaacaaatacaattcataaatcagcttacccatagctttatttgggagaataaaaacaaagggagggctgacctccctttaaacattactgcttctaaacagttctacttaggtagtatataaaaggaaaccaaatcatttaatattgccatccttctaattttggggaaagtagccacagatgttggctaaaatgtttataataaactgttggcatattttattttgttttattcttcatgattatctcaaacaccaattttgtaaaactaaacatatttactctatgctttctcccatttttaggtgttaaaaagtaatcgaagtacgaagaggacatggtatcaagcagtcattcaatgactataacctctactcccttgggattgtagaattataacttttaaaaaaaatgtataaattatacctggcctgtacagctgtttcctacctactcttcttgtaaactctgctgcttcccaacacaactagagtgcaattttggcatcttaggagggaaaaaggacagtttacaactgtggccctatttattacacagtttgtctatcgtgtcttaaatttagtctttactgtgccaagctaactgtaccttataggactgtactttttgtattttttgtgtatgtttattttttaatctcagtttaaattacctagctgctactgcttcttgtttttcttttcctattaaaacgtcttcctttttttttcttaagagaaaatggaacatttaggttaaatgtctttaaattttaccacttaacaacactacatgcccataaaatatatccagtcagtactgtattttaaaatcccttgaaatgatgatatcagggttaaaattacttgtattgtttctgaagtttgctcctgaaaactactgtttgagcactgaaacgttacaaatgcctaataggcatttgagactgagcaaggctacttgttatctcatgaaatgcctgttgccgagttattttgaatagaaatattttaaagtatcaaaagcagatcttagtttaagggagtttggaaaaggaattatatttctctttttcctgattctgtactcaacaagtcttgatggaattaaaatactctgctttattctggtgagcctgctagctaatataagtattggacaggtaataatttgtcatctttaatattagtaaaatgaattaagatattataggattaaacataattttatacggttagtactttattggccgacctaaatttatagcgtgtggaaattgagaaaaatgaagaaacaggacagatatatgatgaattaaaaatatatataggtcaattttggtctgaaatccctgaggtgtttttaacctgctacactaatttgtacactaatttatttctttagtctagaaatagtaaattgtttgcaagtcactaataatcattagataaattattttcttggccatagccgataattttgtaatcagtactaagtgtatacgtatttttgccactttttcctcagatgattaaagtaagtcaacagcttattttaggaaactgtaaaagtaatagggaaagagatttcactatttgcttcatcagtggtaggggggcggtgactgcaactgtgttagcagaaattcacagagaatggggatttaaggttagcagagaaacttggaaagttctgtgttaggatcttgctggcagaattaactttttgcaaaagttttatacacagatatttgtattaaatttggagccatagtcagaagactcagatcataattggcttatttttctatttccgtaactattgtaatttccacttttgtaataattttgatttaaaatataaatttatttatttatttttttaatagtcaaaaatctttgctgttgtagtctgcaacctctaaaatgattgtgttgcttttaggattgatcagaagaaacactccaaaaattgagatgaaatgttggtgcagccagttataagtaatatagttaacaagcaaaaaaagtgctgccaccttttatgatgattttctaaatggagaaacatttggctgcatccacatagacctttatgttttgttttcagttgaaaacttgcctcctttggcaacattcgtaaatgaagcagaatttttttttctcttttttccaaatatgttagttttgttcttgtaagatgtatcatgggtattggtgctgtgtaatgaacaacgaattttaattagcatgtggttcagaatatacaatgttaggtttttaaaaagtatcttgatggttcttttctatttataatttcagactttcataaagtgtaccaagaatttcataaatttgttttcagtgaactgctttttgctatggtaggtcattaaacacagcacttactcttaaaaatgaaaatttctgatcatctaggatattgacacatttcaatttgcagtgtctttttgactggatatattaacgttcctctgaatggcattgatagatggttcagaagagaaactcaatgaaataaagagaatatttattcatggcgattaattaaattatttgcctaacttaagaaaactactgtgcgtaactctcagtttgtgcttaactccatttgacatgaggtgacagaagagagtctgagtctacctgtggaatatgttggtttattttcagtgcttgaagatacattcacaaatacttggtttgggaagacaccgtttaattttaagttaacttgcatgttgtaaatgcgttttatgtttaaataaagaggaaaattttttgaaatgtaatgactttcttaaaacttaagtgttaggttgattttacatggctgagttcaggccttctgtcttgacagaatagtgactgatatgtcattatatttatgtatattttgtttcctaatgtcttgcagccttttggaccgcagatattaaatgtataggctaaagagctagaaatgaatgaccagtctcacatataaaactttttttttttttttttttttttttgagatagagtcttgctctgtcgcccaggctggagtgcagtggtgtgatctcggctcaccgcaactcttatcacctggattctagtgattctcctgccttagcctcccaagtaactgggattacaggcatatgccaccacgcccaa

SEQ ID NO: 60518 - DNA, 1053 bp, Homo sapiens
agataattatgaaatgatcagctgtttctgacaaatactaaagctagtttattttaatgttgcttgtttatacttcgacattttgcataatactggctctaagttgagtagagaattaagaaatattctgaaggattcacatttctagcaattttaaacgttttgttcacacaatgtaggatttaaaacagtggtagagtgaaaagaacagggactatggagttccatccaagttggaatcctgactacttttatgaacttgagcagataaactttttaatagtttttttctcattctgacttgttttacagtacttcataaaaattatggatttattgcttaactatttaatgaatctctaaaataacatttttctacatagccacaatattatcacacccagtaagattatatttttaatattatttaataccattccatattcagatttttccaatttctttttcactatcctgtacagctggtttgtctaaaccagagtacaattcaggactgctgtttgcgtttagttttatcccttaaatctcttctgatcttgaatgagcaccctctttagtgatattgacttactgagtaggcccagttatcttgagggtataacacctgtgtctgattgtttttatgtgtagtcaccttgttctccctctatttctatgcaaaagcattgattagactcagcataaacatttttgacaaagttatgtcatagataatatgtacttaatatcagtagacatacaatagctggttttcatgataattagagataactcctgtgtttttcccctttggactcatagcagttttattagtaaaatggaagtcattcttaagaattacatgagttggccgggagcagtggctcacacctgtaatcccagcacttgggaggctgaggtgggtgggtcacctcaggtcaggagttcgagaccagcctgaccaacacggagaaaccctgcctctactaaaaatacaaaatcagcagggcgtggtggcacatgcctgtaatcccagctactcgggaggctggg

SEQ ID NO: 60519 - DNA, 3737 bp, Homo sapiens
tctatggattttcaaaggtttttttttttttaagttgtcatcttagtttatctagaagcaatttccctgcctccataaccatgtgcacatacatagagtttatggaagtcagagtttgcaacaatttgagtaggaaccaagaagagaataacataacaaaataatgatgaggtttggggcgtaggtcttactatgaatacctgatggaagtaggcataaggattcaggaagatgaaagacagaggagaacagaatcatgatttcaaaccaaaatacgaaaaattttgtatgtccacaagtagccaggtccctttcctcttttcctccatagggtataggataacagaaaagtccttgatgagattatagaatttaaaagtttggaaattttaatgatgacattgagaaaactgtgatattgatactgtgttaattatttttttctttcgtcagccaaaaccagaaaatgatgttagagcaggaacgtctaagagtagaacatgagaagttgaaagccacagatcaggaaaagagcagaaaactacatgaacttacgtgagtaattgtttttaattaaagtttaaaaataaaagctaaattagaggattataggcattacctttggatatagccagtggatacatattttactttgtatgggctaaaggattttttcttaaatccactgagttggtttgatttatatctaaatacttggaatatatacttgcatttgagtgaaagcaaggtcttatatttcattgtggttaagattaaggtttctctttattaatctgcttgctgtttctttatctccatattacttcaggatccagcataaaaatgaacctaaaacaatatattaagtaacttcgaagattttaagatctaacacaaaaactgagtttttgttaaattttctcttgcataaaagagcattgtggtgtttagccttgccattttgaacagaggttttcatggtttaccttttctcattttctcaaaactcagttttctagaatcttagcaggtagaaagtgcatgattataatttttcacataccttgagtttgtgagacaatttgcaaatcaactgatattgttaggatagttagaacatcaggaccagttcagagtggattatatgaagattctgctaacttgcagctgtaattttgtttagaatacttgtaatgtaaaatattttagtctttgacagtttataatctataattaatcagtatcattttggataaatagcagtataatacatgtggcatattttaaaatataaattatagaactattccttattctttgaattctgccacattttatttcatctcttccattgctatatatggaatgtataacaatagactgttgtttagaaggcatatgaaaattttttgaaattgcaaagctgcagtggctcacacccataatctcagcactttgggaggccagggcaggagaatcagttgagcccagtgtttgagaatcagcctaggcaatatagtgagaccccgtctctacaaaaatttttttagacagggctgattgtacatgcctgtagtcccagctatttgggagacgaggtgaggaggatcacttgagcccaggaggttgaggttgcagtgagcagtgtttgggacagaaactctgtgtcaaaaaaaaaaaaattttttttttgaaagacagcacaggtaaattgtttaaaataggcatcttgtatttatttaaatttaagaatttatcctttcagacacaaaatattttattcaactctcatgctaagtacaatatacagaataaaatttgaaaatatatgtttgttcttctactgttagggttatgcaagatagacgagaacaagcaagacaagacttgaagggtttggaagagacagtggtaagaaaaacatgaaaataaacaggattgggaaatattttgtgggttttttctaccatgattattctaaatttaaagtctgagctccaaaaatatcgctgttcttaatccaaggcaaaagaacttcagactttacacaacctgcgcaaactctttgttcaggacctggctacaagagttaaaaaggtaatgtaactatgccgaggtaggcgtttgcataaatggtgcttacttctaggtaattatttgtattcaaagtgaaataactttacagtcacgtcaatttttgtatagttaagcttagttttttttaatttttttgtaatacttaccttcttttctcagagtgctgagattgattctgatgacaccggaggcagcgctgctcagaagcaaaaaatctcctttcttgaaaataatcttgaacagctcactaaagtgcacaaacaggtactaaagagtatattttctggtagctgcaagatagtaaaaatcaaaaattgaggattggcaagtgagtatttcaatctttcagagtcctcaggaatttttataccctgagccattttatcagaaattatataaagaaaccataagtaacttttagaggagttaatatttttaacaacgttattatcaaaagaggcagtgaaaacatgtattctcattttccctttaggattttaagactgtgcattttcataatttattcatggtaattttgaaatctctactacacaagactgcagttaaagtactgcaaagtcttttggggagagtggtctttttatacctaataccccagtgtgtcagacataatgacgcagttttcatttaaccagattagttgtcttactgaagaaacatagcactatcttgtaatgtattgtctttgcctagtagagggaaagaacaattctccccctaaaaaattaaaggaaattatacctttgtgaataaactagatgtgtgcacgctatgtatagatggatgtattccttgcgtgtttctgcctaaattagataaatgggaaacaatataaaatgcagttttacttttctaaagagcaattatgaaatgctcatactttttcaagtcatcctgttaaatctggaatccttgttttctttgtgtacgtttagttggtacgtgataatgcagatctccgctgtgaacttcctaagttggaaaagcgacttcgagctacagctgagagagtgaaagctttggaatcagcactgaaagaagctaaagaaaatgcatctcgtgatcgcaaacgctatcagcaagaagtagatcgcataaaggaagcagtcaggtcaaagaatatggccagaagagggcattctgcacagattggttagtagaacacattaaaacctttaaaccttgctcaatttgaatgctttcatttagtggaaaacgtaatccgaattttatgtgttgtcatggtgcatctgtctctattttctaacttagcagagtggcactgttgggaaagaggaataatcacattagcagaaaaagaagataaatgagaactagagaagcaagcaagaatggtcatggaatggagaaactatatagagcaatattattaaagccaagagaattgcaagaaaataagccatcagcaatgatttaacgtttaagaataatcattggtggctgggcgcagcggctcacgcctgtaatcccaacactttgggaggtcgaggcgggtggatcacctgaggtcagaagttcgagaccagcctaacatggtgaaaccctgtctctactaaataaaaaaaattagccaggcatggtggtgaacgcctgtaacc

SEQ ID NO: 60520 - DNA, 1868 bp, Homo sapiens
atgtcatctgcacagttttatttcttcctgaaggtgaaggaatatacagtgaccacaattccttctggttgagcttaaagttcatcctttccctgccacctaaacatcctcttgttaaattttaagctgaacgtgcacatgattaacaatgaatttactgaagaggtcctgtaaagaggaagtgaaaaaattgaaagaggcagaatttattagtttggttgtatttttgtgttttctttaggtttacatttatttatttttcttgttggcatgtattaacattattctcagtttttaaaaaaaggaaggcaaaaagtaagctgtatttatttacctttcgttgaaaacagtaataaaagaaaaaaataagatccagactttgtatgaatattgagtaatactaaaatatattttataaaaagattttatagcctaattgggaaaacacacattgaacatttttggctttaattttttattttactttttccttacagcagcctgagggaactggcatgatagatgaagagttcactgttgcaagactctacattagcaaaatgaagtcagaagtaaaaaccatggtgaaacgttgcaagcagttagaaagcacacaaactgagagcaacaaaaaaatggaagaaaatgaaaaggagttagcagcatgtcagcttcgtatctctcaagtatgttatagaacaaagtttattcatttttttgaaacagccacatagaaattttatttattatacaagttttcagaaaaatgtgtgtctataggtgaaatttagttgtttttttcctagtctagctgcagtaaatttgaatgatttaactgagttatatttgcctaacataaatatgggttatgtatagaaatttaccagaatgatgtgactggtggtaacttgttaaagacttcagaattccagggtgggcaaaactgcagggaaccagtttcctggcttggcaactgaatgaatggggccattcaccactatcagaatttcacaaggagggaagatggtaacgttagatggtggtatctgtaaaattagtatttcatatttgagtcttcagtgccttagtttgcaagttatgatcaccaatgaattaattgattacattctttaacatttcaaaattggctcctgaatattttagttttaaatattcccaaatttatcatatatagataatgaaatgtttactgtcaaatattcttaaagtgtatgcatatgttttccacttcatatcagtatattttttccaaaagcatgaagccaaaatcaagtcattgactgaataccttcaaaatgtggaacaaaagaaaagacagttggaggaatctgtcgatgccctcagtgaagaactagtccagcttcgagcacaaggtatagcttccaactgtttatgagttacatctgtgttcttattttagtataattgtagtaaacttaatattcacactgaaagaaatagtaggaatatggctgatttcgaatggtaaacaaatcatacatattaatgttgctttgaaacatttttttgttgttgttttgagacggcgtcttcactctgttgcccaggctggagtgcagtggcactatcttgactcactgcaacctccacctcctgggttccagtgattctcctgctgcagcctccctagtagctaggaccacaggcacatgcccccacgcctggctaattttttaccttttttgtagagacagggcttcaccgtgttacgcaggatggtcttgatctcctgacctcgtgatctgcctgccttggcctcccaaagtgctgggattacaggcatgagccactgtgcctgtcaaaacatatatatatatatttttaag

SEQ ID NO: 60521 - DNA, 1122 bp, Homo sapiens
atcacatggattctttccagtgagtaagtatatagaaagtagatgaagaaagcatactaaccatctagaaaagagtgtcattgtaacgttaatttgctgactcactttctaaagataagacataatatagtaataagtgataatcaaatctagttaaatttgaggcttcccatttttagacagaaaatattattcaatcccaggaatttagtgaaataacagaaactgcctgctcttaattgaaaacaatgtggctacttttaccatagcctattaggtctaaaatatattttaagtttgagctgggagcccagaacctggtagatagttcaagaaaaatgaaagcagaaaagacatggtttcgtaagggcttggtgtaaaacttgaaacaccgatgagtatttgatttgaattttcatgtagtagatttaactatactttttgttttgggttctcttaggcaactttagcgagtatagatgctgagcttcagaaacttaaggaaatgaccaaccaccagaaaaaacgagcagctgagatgatggcatctttactaaaagaccttgcagaaataggaattgctgtgggaaataatgatgtaaaggtaaatataataactaagtattaaggacaattatctgtatacactggcacttttgtttactactaatagtttgtaaagttcttttcgtattcatgatctcatcctcacaaacagtcgtgtagtagatgttattaaccgcattttaaatagatcaggagagagcaagagaataagggcacccaaataggtaaattcagtaggcggcatttattggacctcatgtttgattctttactataacattttccccaacctgggcaatgtggcgaaaccctgtctctacaaaaaatacaaaaatgagcctggcatggtggcgtgtgcctgtagtcccagctactggggtgggaggattgcttgagcctgggaggtcaaggctgcagtgagctgcaatcgtgcaactgcactccagcctgcacaacagatcaagatgctgtctccagaaaaaaaaaaaattcgtgcttaaaaattacgttaataaatttccataagtgaaatgattggaacaacaattaagatta

SEQ ID NO: 60522 - DNA, 1157 bp, Homo sapiens
ggcctcccaaaatgctgggattacaggcgtgagccaccccgcctggcccaaatctaaatttttaagcaactcttgtagaatgccattttcctttattacattaatttgcatgtgactgcagtcgatctctcctagccaacttctccatgaatgaatactctttcctgtattactaagcactttatctgtcctgtccctctcttatggttctgaccttctatcttgtactgcacttattcatgtgcctatcttctcttctactgtgttccttaaacacagtctttgattttctttctgccttgcagcatccagcacagtgcctgcacatagttgacatttagtaaatctgtttaatgaataaatgttgccacactgaataccatccatatttcactccatttgttcttgacaaatggtgaagcttcatgggtgttttttaaaacctgtatacttttggggaaaataaattattttctgtcctatagcttttggcatctaccagaagggatcaagacaatatgcaagctgagctgaatcgccttcaagcagaaaatgatgcctctaaagaagaagtgaaagaagttttacaggccctagaagaacttgctgtcaattatgatcagaagtctcaggaagttgaagacaaaactaaggaatatgaattgcttagtgatgaattgaatcagaaatcggtaggatatagttttattttcttttttaatgctttagtacaagtattcttaacctaaaaactacttaaataacttacttttctatgtaagtcaaatatcgataacatcaattttcaaggactcgggtttcaacttcatttctttctgtatatgaagccttagaggtggaggaagacagttattttagttcctaaaggtctgttaatatctaatttaaatgctgttttagaggatgtttgctactcctaattttaatttttttaatttagtatatagcatgtagaatctaatgttactactaatgttaaaggaaaaataatttaaagctgctagttgcccaataaagctattagatgattgttcaaacaataaattaaatatgcagtacaaattaaaatgctatttaatcaactgtgaattatttggaatagatgtaaggatatgtaacttaacataatttatgtt

SEQ ID NO: 60523 - DNA, 1059 bp, Homo sapiens
cccctgttctaatgaaaatttggcattgggtcattgggagcctcaatgataccaattgttagaatcagggctctgaagactccaataaaagatgatgtgagagattaagggaaacacaatagagtggaaataatatcttcctgctttgcatatagaagtaatgtcaatagtatgaataatagcaaactaagaacgtaatagaatggaaggcaagaacaagagtagtaaagagattagaagaaaatattttcttaagttgatatttttaatatattttaagcagagatggcaggttcgaagtacatgaccattataagtattgataattgaaagaaattccttttgttttgccattttcttaaaagagattaaaataagcaatgttgaatttagagaaatggttttgaaatatttctggggagtagtaatcttataacctgtattgggaaacaactagaaccaggttgttagctactggttaaccggatacttcacaattctaggatgaagaaattaaccagcaaagtcaactggtagagaaactgaagacgcaaatgttggatcaggaggaggtgagttgaataccttttacattgcttccagaaaagctttatagttttgttttctgaatcccattgactttgtctttaatagttgtataattttgggtatgactgtctttgtgggaataagaatgtcacatggataaagtgaatttttacttattcatcgtatctacccagatacaatctgttgttcatttccgccatcttttttttcaccctggttcttgacatttctcttcttgtcacttactttggatcctcattttatcttctcacccagcagagcagggggataattgaaaagcagtcctttaaatttttttgtgggggtggtgggcagggtgaagacaaagactgcttcggtaagaaagagatactctccatcagtgaacttaatcctggtcagatcatctttcaactatagcatttcatatttcaactatagcattattcctcaaaggggcactattgatattttgcattggataattta

SEQ ID NO: 60524 - DNA, 3133 bp, Homo sapiens
actgcactccagcctgggtgacagagtgagactcagtctccaaaaaaaaaacaccacaacatagatatttagatattttatatatttttaaaagaagcagatttgcttatataatgtgtttaaaactcagtctctgttttctaacagttacaacatcaacattatgcattagccaattttagaaggttcctgttttctaatgtagcaaaggggactaacagattaatgaactacaaatttacatttaaattggttattttcaagagtacctacaaactacagataaaatttgatgtctctctaatcaaactcttaagagtagtactcaagaaatggtggtatgcttggcaaataagatcatgaagcttttcatgttcttttttcttttttactggttattgatgacatatgaacattttagaaaatgtaaagaaaattataaacttgtaattttgtttcattcttttgaaatcttatgtataggttagtaaaactggagctgaaggtgctgtgctggatgaagctaaaaacatcaacaagtcactttctgctcttggaaatgttatttctgctttggctgagggtagtgtgagtatacatgtcttctatctccctgttaccttatggggcattatttaaatataggtgtatatgtgtgcctgggtgtgtatgagagagagagagagaaagagagattgagattcaatgtgtttgaatcagtatgtgtaagttagttgtcttttgggagtttattttataataacattttattatactggtcttgttttctttctttgtttttgtatgcagacatatgttccatatcgagatagtaaaatgacaagaatccttcaagattcattaggtggcaactgtagaaccactattgtaatttgctgctctccatcatcatacaatgagtctgaaacaaaatctacactcttatttggccaaaggtttgttgttaagaaagtacaaaacctaaatttagatagaccttttgtttataaaatgtaggaaaatgtgagctgttattccaacctgtacatactgttttgtgctagacacactcagtttgaattgatgacagataatacaaggtgggtctgatttttagactgcttggtttaagttttagtacacattaaagtcagatgtaattttagtcaaatttgtgtgacaagctgtaatttggtattaaagaaaataagcatttgaatcaaataatgaggtcaaagcctggcaaacataatcctctgttaagcctgtagacatgcatgacaggttaatataatctgtatgagatgattaggaaaatcagtaatgatgattccgtctttgactttcaacagtaatttcttaattcagccttgcaaacaaattggaaaaatataggcctttgtcttttatttttagtggtttgttgatttttttttttttaaagctattcacagattttggagcagactcaaatttagttgagttgtaaataacgtcatatgttgcggcttttagtatttagtctaagagattactggacaagcataagtttcttagccatatatacatatattccatatagataaaattaaaaataatttcagtctcatcctttttttcctccaattacatctcttagggccaaaacaattaagaacacagtttgtgtcaatgtggagttaactgcagaacagtggaaaaagaagtatgaaaaagaaaaagaaaaaaataagatcctgcggaacactattcagtggcttgaaaatgagctcaacagatggcgtaatggtaataacttaagaatttgtcatcttcagtttgttaaatacagatttagagcatagaaacgtagaaatagttcagcaaaatcagtaagtgactagatcaagaaatttaatagacatcgaaataatttttaaaaaaattaatagaaatcctggagctgaaaaataaaatgagcaaaatgcaagagaccatcagtagtagaattaattaagcagaagaatctgaacttgaagacagattatttgaaaataacacagagaagaaaaagtttgaaagaacgaggctgggtgcactggctcatgcctgtaatcctagcactttgggaggccaaggtgggcagatcacttgaggtcaggagttagagaccagcctggccaacatgttgaaaccccatctctactgaaaacaccaaaattagcctggcatggtgctgagcgcctgtaatcccagctaatcaggagtcttgaggcagtagaattgcttgaaccctggaggcagaggttgcagtgagcctagattgcaccactgcactccagccagggtgacagattgagactctgtctcaaaaaaaaaaaaaaaaatttttaaaggaatgaaattgaaattagctttagacgtcgtttttttattaaccactttattttcttattttaggggagacggtgcctattgatgaacagtttgacaaagagaaagccaacttggaagctttcacagtggataaagatattactcttaccaatgataaaccagcaaccgcaattggagttataggaaattttactgatgctgaaagaagaaagtgtgaagaagaaattgctaaattatacaaacagcttgatgacaaggtaggtattgcttgatttaggtctgctttatattaggatactattgacatgggtgtttttattttctaacttttctcatttcagtgctgtgggcacttaggatctttatgcatcttccttgatttctgttaatcttgtaaaaattattgtattaacaaaataaaaagtcataatttcaatttctgtgtggaaactgtatgagcatgtatcttttcttccccctctttttaagctaaaagaactttataaggcagcagtccccaacctttttggcaccagggactggtttcagggaagacagtttttccgtggatcaggtcggggagatggttttgggatgaaacttccaccttggattatcaggcattagattctcataaggatcctctaacctagatctcttgcatgcacagctgataatagagttcgcgctcttaatgatattctaatgctgctgatctggcagaaggcggagctcaagtggtaatgcttgctgctca

SEQ ID NO: 60525 - DNA, 2517 bp, Homo sapiens
gattatattttattttacagcaagaataatgttctaaaaaaatagtaaatgctggtttctttaattttaaaaattgtttttctggaaaggtacagttgaaagatcattcaggttagtaaacttggatttttgttcatctgccattagatgaacaggaatgttaactaacgtaaatgattaagtctttagcctccttcaaaaaataaaggaggttgctttactgcagaacttgaaggtttctactacataaaactattctaattcattttagatgaagataatgtaatttatgtccaatgggaagactgcttaaataactaagctaatttggctaatttatgtcttcccattagaatgtgagctatggctggtatgttgataactgtctctctagtctaaacaatgcctagcactcagacctcaatatgcgaataagttatataactttagttgatcggtgtttttttaaatttgccctttaggtttcatattttgaaatatatttggataagataagggacctgttagatggtaagttaaattcttgctaatcagttttaaataacatctgttaattcctttttaataatagatgtgagactatttctttgtaacctatatgaaattgtcttaagttattggaaatagacaaaattttttttcttctaaagttttagttgaatacctttaaatagaataactagtttaaagcgatgtttatgggtacttcttagtagtaattagagcattggactgggagttacataatctgagccctgagttctagtcttctgtcaactgtcaattagatacattgtccttaggcaaatcattgaaccattcagggttaatgttcttgtttataaaatgtgggtggtaggttggagtggtcctaaaattctatattgttgcattggtttctatttacatctcctgctgtgtctgtaaggtctgctttagagcaatgttttaatatgtttttagagttcaactattgctgttaggctgctcaggaaagcctatcagttatttcatatccagtgttaagagttttaggagaatgttgctaacatttgtttttctttctcagtttcaaagaccaacctttcagttcatgaagacaaaaaccgagttccctatgtaaaggtatttatagtacagttgtctagaaaaccctgtaatactttttttttttttttaagacagagtctcactctgtcgcccaggctggagtgcagtggtgcaatctcggctcactgcaacctctgcctccagggttcaagcagttctcctgcctcagcctcttgagtagctgggattacaggcatgcgccaccacgcccagctaatttttgtatttttagtagagacgaagtttcaccatgttggccaggctggtcttgaactcctgacctcgtgatccgcccgcctctgcctcccaaagtgctgggattacaggcgtgagccaattcatttaatatatggaggctcgctctgttgctcaggctggagtgcatggcatggtctcggctcactgcaacctttgcctcccaggctcaagcgattctcctgcctcagcctcccaagtagctaggattacaggcacccgccaccgcgcccggctaatttttgtgtttttattagagaaagggtttcatcatgttggccagacattaacatatttttaaaaattatttcacaggggtgcacagagcgttttgtatgtagtccagatgaagttatggataccatagatgaaggaaaatccaacagacatgtagcagttacaagtaagtagaaaataacactggttaggatttaaaaccagcttaaaatatccttatccaggtgattaattataagattgcttcagggaaattgttaaggggaaatcatgtttgtttatatttgtttgtgtaatttccttgcagatatgaatgaacatagctctaggagtcacagtatatttcttattaatgtcaaacaagagaacacacaaacggaacaaaagctgagtggaaaactttatctggttgatttagctggtagtgaaaaggtaaagtcttcatgtattttgacaaatatttaagcatctttgtaaactttagtttgagttgggagttacgcagggttcattgttgcatcttacttaccaaactggatttggtaacctgagatttgtaaccgctgatgccagtgccttatgatgatatcagctgaataatcagttccaagttactgttgtttgaccatactctagttcaacccataagtggtttctatgacttaagatatgttcatagtgagaactggttcagcatatgttgttataaactttattagatatcccttttctaatttttgatacgtattttatccatattggcagtggggtccctattaaaactggtaactctcgattagtcttttctggtttggttggacttatttctttcctttggattattgtttcattattacaattctatacagtctgattctagtctatatcaaatta

SEQ ID NO: 60526 - DNA, 1089 bp, Homo sapiens
gcgccactgcactccagcctgggtgacagagcaagactctgtctcaaaaacaaaaaactaatagtaccgtgcacggggttttgtgatgattaaatacaataatatataaaaaatggttagaacctgactcattgtaagctctcagatgttaatagtaactttatatgatgacttctaattctcagagcttttgcctaagtagtcattttgctggggaggctgaagttcagggagatacaaagtgactttctacaacgtgatgtgctgttatctcactacctaaatatgttttttctgttgatacagtatgaaagaagtaatacttgttcagagttgtccacctctgtttctcataggaatggcaaaagtatatttaaaagggtgagggaggctttagaaagatgctgtacattgatgatggtaataaatattcagcaagcatttgagttcctctggagtgccaggcactgtgttaggagttaaacacggtcctgactttgagttgacaggctagtgagtaaagcagacaggtaaattgatcgaatactcattggtaagtgttatgattaaatgcagatactgtaagaacacataggatgagacttttacccagatattttgggggtgcgttgtggaattgggttagaggaagaggtaaatgtgatacatgaaataattttgctttccttctcaaaaataaaaagattttgaaggaaagtttcaaatgtttggagtctcttaaaatcttcccagggaagttagtaatgatgtctttttttctcattaataaatgtttctgtaggaaatctgttatccacttagttgtgcccatgttggggtttttttttctttttaaaataatgaataaaaacaaggattggcttgcttattagtttacttttcactgttatatgctgtttccaacagaggcttctctttttgttttggcttcctctagaatagaatgtaatttcatagtacctttcttgtcaccaaaaacaaacaacaaacaaaatcctcgaaagccagaaatcaaaggattgcctttttcccccctttgacctaataaaagaatatatttaaatgtta

SEQ ID NO: 60527 - DNA, 2156 bp, Homo sapiens
cagtaagcagtgattgtgccactgcactccagcctgggtgacagaaccgagaccctgtctcaaaaataaataaataggtatttaaaaaaataaaaatcactcagcaatatttggctgccatagtagtgctaattataattactgggaattataattgtaattactgggccctgggaatgcagcaaagactaaagaccattcttgttttcctggagtttattctaatggatttgtgcatggtgatcccttctacttcaaagattcaatgataccaaattatgcatactaggtatactattttgaggattaaatatattatatgatggcatctgtaaaggttagaaatgttcatttacctttaatttgtatagttgaaacacttttttgtttttcagtccaagccttatgcatttgatcgggtgttccagtcaagcacatctcaagagcaagtgtataatgactgtgcaaagaagattgttaaaggtaaatatattcaacctgctgagttgtctcagcaataagtaaataagtttgtgatcttttctacttactcagcttccttttttcattttaatgcccctttcttctaagttaattgcagaagaaagttgtttaaataataaaaaggtcaaacacaattagtaaatattctattgctcaaattccatgatctaattatatacagtacctaattaaggttattatgagaactatgttacacacttattcttaagagatgcatttctgttagatattcccaggagagtttccaaggtggcagttctagaaagagaacagtatgagaatgaaaacaaaagggctagacacatttctaaaaagtagtggaaaatggcagtctatcattcttccattccattgttattccttccccaaagacttacctatcccttgaggaatttaacaagggttgccaagggtgagaaaagtatgtacattccagttaatactataacttatacaagaatatttataactttatatattctaaaaccattgaattttaaagctgagagagtgctcattgtttatctggagttacttccagttactgtagaaatctgtttaatcaaaggaatggctgttactttgtgatatgatttatttcattttttgacagctgtagttgttacaaagtgcttcttagattgaggcaaaatctgtgttgtggcattcaccacattaaaagaattgggattcagtataaaaataggtggattaggatagcataggagcacagatgctcatcctagtaacaggagataaagtggagttatagaaggtttatagatgaggtgagggagggaaaatgtgtatgtactcattatatcaatttcatattgtctaatacagggagcaaagtcatcatggagatgaggaagggggaagaggttctaggaaaaggcatgaaatggatggattcaggcagtgtgagagtattgccaggcagtattaagggcccactcaaggttagctgctgaaagagttgaatttttgcccatttggagttttgctaggtgagtacaaaagagggaagtgggggacaagagaattgaggatatagtcaaaggagtgattataatggtggaccatgggatctaaggtggttaagttacaggaagaaggatatgagggaggctgaagggcagtgaaaaaaggtggtaacattagtgggttgtagatctcagtggggtcaaagatttgttggaatcagggtactggacggagtaatagaaggtgaatacagacagtccctgacttagaacaacttaaaattgttcgactttacgatggtgcaaaagcaatacacattcaatagaaatattcaatagaaatatttctagtacctgtacaaccattctgtttttcactttcagtatagtattcaataaatcatatgaaatatttaacactttattataaaataggctttgtgttagatggttttgctgaactgtagatcagtgtacgtgttctgagcacatttaaagtaggctaggctaagccatggtgtttggtaggttagatgtgtttgatgcattttcagcttagggtattttcaacttacagaacatttatcaggaagtaaccccatcgtaagttgattagtatctctacttgaaattgagattatggaa

SEQ ID NO: 60528 - DNA, 1020 bp, Homo sapiens
tttttggatacctactctttctcctagattattaaaattgttcctgcaagcatttaaactacctcaggtcttacaagtcttaaaaaaaaaataactttcttagacatacagcagattttctgcaccacttggttacctcccattctttttcaatccattccaatctgacctttgtcattgagtactttttagttttgtcttggcctcacaactgtatttgacataatcactccctccttgaaaattattattttttgacttgcatggacaccactgattttttttttttgttcaatacccctggctccttctcagactatattagtggttctctgagagtggtccatggagtccccagtatcatttctggggtccagaagatcaaagctgttttcagaataagatgatgtctttttaaccgttttgatatttgcatttgatccttgctccttgtacttcaacttaacaacttccattggtttcttgaatgctacactgttctttctgccttaggatctttaagtatcctcccagtgcctagactactttcctacacgaaacctttttcacccttcatgactaatactggggagagtgatgatgagttagttgctgcgtatttttcagttcttaaatattctttctccaagggtgtttccgtgatattctgctttcccgtagacttaggttctcctcctatattctctcattgcactttcatagcactcaattgcatgagtcagaattctggtcacttaattttttaatgtctgccccactattatttatgctccactaaagcagagagggaatctcttggttatcattctagcatgtcatctcacattccataagtatttgttaaatgaaagaatggttgaaaagctgttgcaggacaggcatggtggttcacacctgtaatccgagcacttggggaggctgaggcaggaggatctcttgagcccagaagttcaagacaagcctgggcaacatagcatggtggcacatgcctctagtccc

SEQ ID NO: 60529 - DNA, 1047 bp, Homo sapiens
ttagcccactatagtgtttaactaaggaaaatctaatataatacactcccaagtgatctgaaatgatccgctattcagaattccagagaaagacatatccctgccagaagggtgtccttcataaccaaatttggtcttcagtctggtcggtgcatactcaaacaggaatcacttcccttaaggaacctaaggtatgcagttgagatcaacttattcctttttgatttgtccccttaaagcatcaatcagacgtgaatgcatcttgtgacttggagttactagtaatattgaaatctgaaacttgggggatctttgaagacacatgggattaaaagctgcataatgtacatttcgaggctaaaaaccaggtttgaaaaatacagatgtccagatgagtttttctttaatttatttgaaaaatagagatatgccttaattatagaccattagaaataatttttgtgtttcacagagtcttgattttcattccaggaagccagagtcagtaatttatggctagatctttaattaaaacatttgccttacttagtattacaaaatcatcatttggttttgcaatcaagataagactgttttgtcaacttaatgctaagcacttaatttttatttaacaataacttctagaaagataatcactccagtctcaattatttttatgtttgtgtgttaccttttaatagttgccatttatattattttagtaaggttgtagtggtagtttatatatttgcttggagttgataactagagtaagcagcttcataaagtacttctgaaggcaggctttactattaaaactgtttactattatgaagctgtttacattatttctggcatatctcttggtaaatggtttaggggcactattttctattgatgtaaaaattgaggccaggcatggtggatcacgcctgtaatcccagcactttgggaggctgaggcaggtggatcactggaggtcaggagtttgagaccagcctggccaacatggcaaaacctcatctctactaaaaatacaaaaattag

SEQ ID NO: 60530 - DNA, 1024 bp, Homo sapiens
tcgccgggccgcctggcccactgcgcctgcgcagtcctcctcccgcaccgccctgtcgcccaacggcggcctcaggagtgatcgggcagcagtcggccggccagcggacggcagagcgggcggacgggtaggcccggcctgctcttcgcgaggaggaagaaggtggccactctcccggtccccagaacctccccagcccccgcagtccgcccagaccgtaaagggggacgctgaggagccgcggacgctctccccggtgccgccgccgctgccgccgccatggctgccatgatggatcggaagtgagcattagggttaacggctgccggcgccggctcttcaagtcccggctccccggccgcctccacccggggaagcgcagcgcggcgcagctgactgctgcctctcacggccctcgcgaccacaagccctcaggtccggcgcgttccctgcaagactgagcggcggggagtggctcccggccgccggccccggctgcgagaaagatggcggacctggccgagtgcaacatcaaagtgatgtgtcgcttcagacctctcaacgagtctgaagtgaaccgcggcgacaagtacatcgccaagtttcagggagaagacacggtcgtgatcgcggtgagtgacccccgccggcatccctcctcccgcttcttcgggccggcctgtgcggggagtttagggaagtggcagggtgcagaattgaaagggagcggcggtgtccccagccctccccggcggggtttgccggttcagataacccagtggagggagactgcgcagcctcgcgtgcgttcctggatcgcccccaccccagtcttcggcgccgggagacgggaagcgcccagcctcagccctggacactcccccacctggggcaatggaggaacgtccgggcagcaagttcagtgcacgtttgtctgcgtgtgtgtgtgtgtgtgtgtgtgcaattacggatactgttggtgttttggattaaccccaaatttgccattcagaaaatatgtaat

SEQ ID NO: 60531 - DNA, 1003 bp, Homo sapiens
agcactgaacaacatagcagacaacacagtagcgatggaggtgacgtagcttcctccgagtggaactgcagcctggggacttgattaggtgctatgcatcagtagcattttgaatgcaagggatgatggaaagcagcacatgcgtttctgtggcagctgtggggacttgacagcaatgctcatctctcatgcttcaatttttcttttcttactgttaataggaaaaaaatcaacatctgtaaattaagaatacagcaattatctgtacagtactgcatatttgtaatacccttgtatatatgttacttgaatacagaaatgttcatttgtgatgctttgcacttgggggtggggggtgggagggaaatcaattgcaacaaagagtgtgagatgtgagattgtatagagatgaagtgtcatcacatcatgtgcatggtgcggaacctgctgttttatctatttattgtgccgtgtttacagttttttgtacactgtaccttcattggttcctgtgctgtagtaaatgtgttaggtagctgtggactccttggtattttgtaaatggtataacataacttggttcccctctgggtccttgagttttctgtgtatcatgtgaaaaaaaatggtgacatacatacagaattttacaaaaaaaaaaaaaaaaaaaaaggcatcagtttttttaaaaatggggaatgtactattaaatggggatcttcctggtctactatcattaggacaagtaacaagctaaaaatgaagtctcttgaatctttccatccccaacttgcccacaaagctgtgggtggtttctggtacttaaagcactaatattatgttgctgctctgcgaacagcccagtagtcccatttccttccacaccaaaaagtgttaaatcaagtatgcaaatggagtccttacaactggagtttatgttgtcttgccctttttttagcacaaaaaaaattgtacttttttattgtcgaattgtttaaaagac

SEQ ID NO: 60532 - DNA, 1009 bp, Homo sapiens
attgtatagatgatggctgtaattcagtataaggagaaatctttttttgcacagggaattctgggactcttctaacaaaataagatcagatccaatctgtgttagtcttcgggcaaagaggagaaagaaaaagcatttctggcaggtggagtgaaatacaaatttgaggctgagtgaaaatacaaagttgaggaaatacaagtgtttagaagttaacaagtaaactggtttttgtataggctcaggaaggttagtagtttaaattggaatggcaggagaagccattccagattcctggagcactttaaatgccagactggtagactgtctcagccaggagtggcccagaagaaagcagggtttgtagcaatgaactgtggcctgtagtttccaaaccatgcatctgcatctgcttctgaatttaagtaacagtcattgtctgcttaatgccaatccattcttaatagtattctgggtctaattatatagctcatctgtcagctatagttctgactcatatcatgattttactgctctagaattgtttaaccatggaatatttgccatgtatagaattttcatatcacatgtccttttgtttttaaagatgaagaaactgagacgcagagaagttaatgtatttctctaaggacactcaaaagtctagactgtagaaccactagggccctcgagctctgtggctgtgccactcagctccatgtattagactgatttaaagcctgacacaaatctcagttatgtttgtttcctttttaaaaactcttttgaaaggtttaatagagaaggaacttgaaacaacaattactaaaacatgggaattctttgtttttaacatctaggttgcttgagtactactataattttgatggtaatgtagttgactgtggaatttatttatagtcaacattagcctgatttctgataataaactataaagattcgtattcctctacttgctagcttgttcccaaagagtccaatttcttcc

SEQ ID NO: 60533 - DNA, 1077 bp, Homo sapiens
aggtaagaataaagacatttaaattgtttgggttatatttataacatatatctataatataaacagcaaagttgtacattgtttagatgtttctttctttttctctctaggagtatacaagggcttacacctcagtagtactacaccaacagcacttgtacatacaagtccatcaacggcaggttcagctttgttacagccttcaaatattacacagacttcaagttcccacagtgcactgagtcatcaagtaactgctgccaattctgcaacaactcaggttctgattgggaacaacattcgattaactgtaccttcatcagttgccactgtaaactctattgccccaataaatgcacgacatatacctaggactttaagtgctgttccatcatctgccttaaagctggccgctgcagcaaactgtcaagtttccaaggtcccatcttcatcctctgtagattcagttccaaggtgagtagttatttttgcctaacatacctggaataagagatctaacttcagtcctccagcatcgttctttacctatttctttgtgtttcttgttcttttccttttatacattgaaaatgtatagttgagaattgatcacttatttattcaagaactaaacagttcttgaacacttaattcaatattaagaatttgaactaactggtatagtgaatgttgcatatatgatttggaacatccctttcttactataacaatagttataccaggtgcagtggctcacgcctgtaatcctagcactttgggaggcagaggcaggcagatcacctaaggtcaggagttcgagaacagccgatccaacatggtgaaaggccacctctactaaaaatacaaaatcacccgggcatggtggcgcatgcctgtaatctcagctactcaggaggctgaggcaggagaatcgcttgaacctgggaggtggaggttgcaaccaagatcgcaccattgcactctggccagggcaacaagagctaaactctgtctcaaaaaaaaaaaaaagcgtataatgctctcagttttcttccgtctttggatggaaggagttct

SEQ ID NO: 60534 - DNA, 1600 bp, Homo sapiens
ttaatacatagacattcagtgaatgctaaattattgtttttctatatatgtgatgacctgaccttccaaaaatggtttgtttgcttttaaatttactgagcattccctactagaaaagccaaggcttaggcaaaacactcaaacttaggaaattaaactgtaaatctcacaaatatattggcaaaagtatctagtgagtcaaggattcttacatttaaataattttcgtggattttttttaaacatgagaaatattaactatgaaattatttgagggcagcattgacttttttagattttcttcaagttttggtataacacatttctgtttatatggaaatgatcatgttgacagttatttttatgtcaatatttagggagcattctattatcaataaaaatcttttctacagattgcagatttgtgaattacgaacatagtaggaaaaggagctcatcaaagggaagatatcaactaaacagattttaacacacacagaaaataagaaaaccaatttccaacattttttgcccttatagcccaagaacttagttcaactcaagtataagaacctgtgtagatactaataacttattaggttttcttgaatattatttcacaattttctgatccattcaaaacatggcagaatttgtacctaacctaattttctagttgtaccaggcagaaagtatatcctggaggataaagaaagattcttcatgagttatataagtgaaaagtataaaacttgaagtgatattctaactaaattatcaaactgaagttaaacaacaaattaggtgacagtattttgaaaacattaaactttagattgaggaaatgtgcatgatttatagattccctggtagccagggatgcatgataaatctttttttgttttaaaataattcttactcaaacatcacaggcttcttaaagacgcctttaaaatcagaggtattgtgattgtatgtgctttttttttttttaattggcaaaaaagagaaaaaggtttcctttttaaaaactgcacacacttttttgggggggtaataaatgaacatttttttgtttgttttttttagaactgagctctccatagacaaacataagtagcataacacagtgtctttcctcagacatcattctgtacagtaaatcaacataaacaactccgttcttattgactggattttttccaggtgggttaattgggtggggaaaattaattaaccttaacattagagcctcttttcttcctgttaaacttaaaggatgagttctttaaaaaaaagcaataaaccaaccaacaactgtaatctttcatatagagcaaatttttttaatgactacaattagaaaatatgtagaactattagtatatatacacagagccattagggatcatctgaatgccttgggaagatatggattaaatagaaaccaaatgtaattatcagatattctctcaagctcagtgcaaagctgaattccaaatctatggattttaaaagctgatattatctttctacactgtgtagaacaagtgtcacagcttaaaaaaaaaatagtggtgttgaaatttgggaagtgagc

SEQ ID NO: 60535 - DNA, 1401 bp, Homo sapiens
ggcatagtgatgctcgcctgtagtccgagctagagctacttgggaggctgaggtgggaggatcagttgagcccaaggaggtcaaggctgcagtgagcccagatcacaccactgcactccagcttaggcaacagagtgagaccctgtctcaaaaaaaaaatttctgcccaagaaaattggttacttagaagctaccaaaacaaaggtagtttctacttctgcctaagtatttctagtgaagctaaattcaacaactttctagattgagttgtttgaggatcttggttagaaagtttgtctatgtattgaaccaaaaactgccttcttaaattaaaacctgcaggtccctggtttgctcatggaagcataccgagtgagtttgctcccccttcagcatcataatggccttcacccagttgaagtcctatcatgcttcctttcctaatcccgttcctggttaaatatttggagcttttaatcctgtcccacacataggattctccttgcgtagacccttgtttgtcaggtgctctatgtgtgtgggctttttaagcacttgattcatattgttggtacctcagaagatagatttcttgtaaatattaaatccaagaatttttgtctatttttcaatttaaaatctcattgctttggggttctcttttccttccactgttacatatgtgtgacctcagaagtttcttcatctctagatgaggttgtaggaagaaatcctacaatctctaagagtccttcctgacctcaaaattttttggttttgtgaaaggattctgactgtaggtttggtcatctgtcaacaacaaccatcttgtccacctttgtgggaattacaaacttgattctcataccatatcaggaggtagacatacaacctaaaaatgttctaccttgatatctcaatccattcatagacatttagagagggtgagcatggtcatttttgtcttatttccatttagcatttggttagactttcaggttataatggtatcatgacctgaggttcagatttcttttgcccatatttactaccttggtacaggtttttctactcattcacactgggaccttctttaggaattgaactttatttctcagaagaatataaaaccttagcatctcatagctgaagaggaccttaatgatcacctaatttaatctcattctcattttatttatttatgtatttatttttaagatgaagtcttgctctgtggcccaggccagagtgcagtggtgcggtctcggctcactgcaacctctgcctcctggattcgagcgattctcgtgcctcagcctcccgagtagctgggattacaggcatgtgccaccacgcctggctaagtttttgtatttttggtagagacggggtttcaccatg

SEQ ID NO: 60536 - DNA, 1039 bp, Homo sapiens
tcaccaaatctttcaccaaaattgctacattaaaattccagcttttgattttttcccaacaatcctctatttatatgccatgataaagctataagccaaaaaagtaaaaggaagaaacaaaaggaattatgtaatctttgagagaaattgaatagtcaaagtttaactacaatcttgccttaaatgtaattggtgtttataattatatctcagtcagctagttattaatggttataaagataaatacttataaaactaactttccaaaattttcttctttttcctgctttatttaggtataattgacaaataaaaattatatattttatatgttggtcaaagggtacagacttacagttatgaaatgaatacattctggagacctaatgtacagcatggttaataacaatgtattatatacttgaaatttgctaagagtagatcttaagtaatctcaccacatatacacacaaggtaattatgtgaggtgatggatatgttaattagcttgattgtggtaattatttcacagtataaatgtatatcaaaacatcacattgtattccttaaatatatataattttaaactttcatttgtataattttaggtataatttgggcgactacaatggagagatcatgtctgaggttatggcacagagacagccaatgaaacctacttatgccatccccatcatccctattactaatagcagtcaatttaaacaccaggaagcaatggatgtgaaggagttcaaagttaataaggtgattaatgtttttgtgataatagtatctaataatgggatggtattttatcattagaatgaaagttaaaaagaaaaacacacataggccgggcacagtggctcacgcctgtaatcccagcacttcgggacacggaggtgggtagatcacctgaggtcaggagttcgggaccagcctgaccaacatggtgaaaccccgtctctactaaaaatacaaaaaaattagccaggtatggtggcatgcgcctgcaatcccagctactagggaggct

SEQ ID NO: 60537 - DNA, 1079 bp, Homo sapiens
tttaaagaccactcccttagcttttggtaaagtagttgaataatctacaaaataggacttaaatattatagaaaaaaatcttaaaggccttctccttttatattataaaaattgcctatgtgatgatttttgagctataaaaatggcacttcacatggttcaaccaaataagttttaatgatcgctttatgttcttaataggcttctagtgtatttgcttttaggagtggttggagggtgtcgcatccattgtcttttattacttatatgtatattcatagtaaagataatctcctttctttaactttaaatgtgtaagacaaatctaagcttagattgtttgcgactctgaaaacaaaatccaagaattctttcttatttctttagaaagtctaggtcttgtttttatgcagacatctgtggagtttttgtcggtgaattcacacagtaaatgattgcatatggttccttctgtcagcttttagtttggatgctgaacagcctgattatgatttggattctgaagatgaagtatttgtgaataaactgaaaaagaaaatggacatctgcccattgcaatttgaggagatgattgaccgcctagaaaaaggcagtggtcagcaggtacaacttcatttgtatataacaagtatatacatattctatgtaaagaactgtattgtatggaaagagtgtgagattgcaggttgggggtaatcagtcaggctttagagttaaaaagtatgaattcaaatctcatctctgcttatcagtaacctgtgtaatcttgagcaatatgtttaaatttttctgtgccttggttgccctgggattgtcgtaaagatgaaataatgtatataaagcaccctagttcagtgactgacaggcataatgtactcctcaagtttcccatttgttaataatgttgtaatattgattattgtcctttaaatttagaagtaaatacttatgaaccttgtatgtgtattgtatgaaaatgacataatggttttacatttagccagtcagtctgcaggaagccaaactactgctaaaagaagatgatgaactaattagag

SEQ ID NO: 60538 - DNA, 1035 bp, Homo sapiens
ttacttccccaggccagacactgtgttaagctttaagcagagatggcagtatttggcagctaaatagtgccctttgtacccatcacagactttaatgtctgactgggtttggaggttatttccccccactttaatagacgtaacattacagaggtggcatacaaggtgaaacctgttaccctccacttagcggtacagaagtaaagaaggcatgcctctccctaaagagatcacacacattctaatagggaggcatgcttaacaagcagattataaagtatgtgaagtgggttcttagccactaaaaaagatgaaagtggttaggaaccacttcttgggtggggaaaaatcaaaaaaggattctagatgagtgataccaggctgggtgctaaaaagaataaataggcatttgcctccttggtgggcaagcagaaaaacagggatttttgtaaaggcctgcagtcatgaaatagcatactgcatgaaatcaatgaaatctgatgttactagatcataaagaactgataacactggagagaataggaaaaaagggccttataccattctaaagatgtggactgtaatgttagtagaaggaattaagtaagggaaagatgtgagacaaatttttatattaaagctatttaatattttgcttatattcatatcaacctagcttaattttggtaagtaattaaacaacatttgatagtagcagcggttcttgcagatctaagatcctcccatttccatcagcatgacagtgttcgcgtagagaaacaaacttcctaggcaggaacatactcaccgagtgacagctgctgaaaactcaaaatctgaaatgctccgcagttcgaaatttttgagcaccaatgtgattccacgtgtggaaaattatacacctgccctcatgtgatgatgggtcacagtcaaaacttcacgcacaaaattatttaaaatattacataaaatcaccatcaggctatgcatataaagtatatgtgaaaaaaatgaattttgtgtttagacttgggt

SEQ ID NO: 60539 - DNA, 1184 bp, Homo sapiens
tgggctataaacataacaatcccaaaatcttagtggctttgcaacaaagttctgtttttagcattgcactatccattgggttgatttgggggttctgtactatgtggcctcactccaggatgcagacaggcagagcagcctttatcctgaacattgtgtacactgcagtggaggaaagagagcgctggaaatgtctgtctttgcatcagctgttaagatgctctggccagaagttacatgccacttttgctcacagctcattggccagaacaagaaacatagctgcatctaatcataaaggagccaggaggtacaatcttgtcatatgaccaaaaggcagaaacaaccacattaacaagtaggccaaggtttggcttacccttcttctcacagagaaaatacactcctctcccccggcgaagccagctcagaagtcccaagtaatgattgcatcaaacttaagagtttccaggtgatacgcataattctgtatatcagacctgtatgtgtttccttgacctggagaactgtgaacaaaaatgttacctgcaaccaccttcctgccacacccaatatacgttgaaataacagggacaggataaccccaataagcacttccatgtgtataacagaacattagaggagcactgcagtccccatcccaccgccattcagaaatccccccacagccccgtgtgacaagggctggcttaccctagatatggagagtgtgctggtttcagcactaggtctgctccctggtggggaactccccaggccattgttttttgtggctgttggcactgatatctaggagattgattcctccttttccatcatcttccttagcctcatctgaagtagtcattggaaaatatgccctcattgggagctaaaacccttgacaacctgcttcctatagaaagttggagacttaagcatacttttaaatcaggtttttaattcaggctctgggttgtttgttggtagcacaactgtgcaagcttgtaatgtgtctaaaaacacgtttccattcagctcatatgccagtgttctttaccagatgtatgtcttataaacgctgctaccggtaacctgttgggctctgtgtgtgtgtatttatgtgtctttttcttttcctcagagcattttattcaactgagagcattaattgggtgtcacaa

SEQ ID NO: 60540 - DNA, 1570 bp, Homo sapiens
tatgtccactgagaagatgaaagtatgggaaagtaatttaattagatatgtgccattggcatgttttggtggagtggtgagaaggaaagcccagctggagtagaagaaataatagaagatgaaaaaggggacatagcaagtatagtcaactctttggaatagctctgctatgaaagagagaaaaaaacagggctggagtagctggaggaggctcccagatcagcaaatgatttcttttaaaaattagttacaaagttccatcaggcacaaatgaaggaaacaaatgaagctgagccctagattgacccacttcactgccttgagagttttcagattgcagcacagggatgggaaattccaaacagatgtggcagctccttcagttgaagaaacagaattcagagtgtggggaggcctaagtgactttggagcagagtaccagggctgcacagaaaaagagctccagatattcacagggtgtcccttcgagtgtctagctgaaaactgatctgatcctgtccatgaggaacttccaagtctagggaaaagcaagaggaaagaaagaacagtttgggaagctcatagggctgagactgtgctacacattcccactaaccagaatggaaaggcctcaatacacagcgtatcaagtagaaccctcagaagggttattgtctcagtagtgaggccgaggccagattagttctaaagactgttctggacttgccctaacaaagattgagtactagcctcaaaagaatcaaactaaatttcaagtaacttgattgtgtcccagaacaaaggccaaaaatgtttaaaggaatatttagagatcctgcaacataaagctcagtgtttagcatccaataaaaaattatcaggcatttaaagaagctggaaaatatggcccataattagggaaaaaattaacagagacatagaaataacccaggtaatcaaattagattaaaatgttaaagctacaaataaaagcaagaattactagaacttgtagaattatttcatttgaaaagtatgaaataatcccatcctctctcctactcaaggacttcactcctaataactattttatgtctctcctggatccatttaatggagatattggttactaattccaacaggaacttttttttttcctttgtgaaaggaaggcagataaatgagaaaagatgcatgtcagtcgttaagagttgattatgacaggatgaggtagtttatcctatggttgtattttctctatgaggtatgagtgaggtcatcacctcaagagtgagggagaaccttcagagatgaggtaggtataggagagctaacttagaaaaatgtaaaaggattgatagacttgctgagggctcaatatttgtgatcatttaaagtgagaccagtcagctcacttgggcagtagcattcacttgagttccagcacaaagtaggtagatagggtttgtcaagggtcaatgtttggccagcaagtagaaaggaggaagacagggatgaaggcattaaaaattaggtagtaggccgggcacggtggctcacacctgtaatc

SEQ ID NO: 60541 - DNA, 1045 bp, Homo sapiens
tgcctacagtgtagcttaaattttgtaaacgagagaaaaaattctgcataaaggttcatgaatgtgtgggcaggattaaatataccaaccaatcctgttaaaaatggctgggttttagttttatattttgcattctactgtgtcatggtatgtactggtagtaatggtagaaacatagaatctatacacacacacagacacacacacacagacatgtgtccatgttttaaagcacttagtaatggcaagagtcctttttatgtatgtaaagatgtgatttctgattacatttattactcaattttcttgaaaagttaaggatgcttaattgttaacagcagttagttaaaagcagaagatagcattttaagggagcaataataccatggaattgtatcatttgtgattgtacttcttagaagaagagatgcacaaggaaatgagaattttatattgtaattcaggaataaaaagaattgagcgtgtctaagggcaaaagtgatatgaaagtatgacatactttcagagacaactagagtatgtatttacttttaaagtagacttttggaacactgaagtgtgacttgcattgataacaataactttttggtaagaataaaccaaattctgagaaatcaatgagaagacaagggattcaaatgttttaaacaacttgctagaattgcgggtttttttttgagtcaaagtcttgctctgtcacccaggctggagagcagtgacacgatcatagctcactgcagctgcagcctcaacctccctagctcaagcagtcctctcacctcagccttacaagtagctgagactacaggtacacaccaccacgcctaattttttctatttttatttttaaatattcaccatgttgcctgggctgttctcaaactcttgggctcaagtgatccacccaccttggtctcccaaagtgctgagattataggcgagaaccactgcacctggccctagaattgcttttaatttattgatgctaactgttgccttcaacacatttataaactgtagaaaa

SEQ ID NO: 60542 - DNA, 1396 bp, Homo sapiens
tctgcaaggaaatgtcgagggtgcagcgtgtttgcccggacgacttacttttctagaagataagacttactttcagtgtcctctttctgggacgtttgtatccatccctctccagagctagttggtcggaggataataaaccactatccctgactttttctgtgatccttgcgaatatcttgcagatttgtttggagtacctctctcttctgaagcctgtaaccttacctatttgtaaaataaatttaagttctcctgctctctggtatctcaacatagggggagaaaagacccaatttaagtaacttttatagatctaaatttcgaaggaggatcctttcttattcaaaaccgaactaaaactaagtgacttgattcacagaaatcttaatattgagatgtctaaattgggtgggtttcagcacgtaaatgttgacaactaatagacattttaccatcgctgtggctttaccttgttgtggaagttgggttcggacaccaggataatagaatcttcctctcatttcccccagatccttgacagtataacttgatgacttctaatcctaaggaattgcataccttggttttcaggtacagccatttaaacagggtgcagtgtattgacagttcaaggaagtccaggagtcgcgtggatttgtgtgctacaattttgttgtggaaaattgtactgtaatacttctcttggtactgtaagaatttttaatgtagaaattatgctctgtaatgttgtttttggaaataaaactgtttaaactctttgggttgtttaaccttttaaagtgaaatagctgtgacagtgaaatgttacttttgagagtagtgtcttaaatctaactttacagataagccaagtgtatgtagtagctcagattgtctagttgggcactgactttcagcacattgtctcatgagacactacctcttaatttattttacttgtatcaactttagagtagcatggccatttgtttattttttaataagtgatttgtttttaaaaattaaagtacttgtgactgcagaatcttgtcttttggttttatttttatttctaagttttacagataatactttcaagtattggggtgttggttttaccctgccctggaaattaatttgtaattcttgttcagcagccaaggaaggggaaagccttgattaaagcaagacagcacaacagtacactttagactttagttaagtcttgcttctgtgaatactttggacagtcccaagagttacaacctgaagtcagagctgagctcaatgaagtatcagtgcttgttaaattttacgggtaatttttattcgctgaaataatttagatttttcttcttttcttttctgagatggagtctcactctgttgccca

SEQ ID NO: 60543 - DNA, 1051 bp, Homo sapiens
actgtaatattttctttccaacatttcctagatgaaaaaaacaacatactataaagggcttccagtgtttgtttacctaaatgttatggtggaagaattgtttgcagtcatttctttatgtagcttattatgaaagtaaaaagcaggaagttaagagaaatgattagaaatgattacttcaagtgataatgtattcagtattcatacttttgcagaatgctttaaattattgcactacatcactttttaatgtagagatcattgtgcatttacatggtttaaagatattaatttcacattttcccaattaaatacaaatacagtacctcactttattattagtcccgtgaggatgtagagaccatatcttgtttattattgtttctccaacacaaactgtcttgccttagctcttagtaaacatttgataaatatttgttgaatgcttgaagaaatgaggaatccggactcctgctaccaaaaccagtattatgatttttaatcttgttgtcccatcaaagagagtttaactctttgcatcactgtccattctggctgtcattctttcctgcctggctcagaaaaagacagccctaaaattaacccatttaaatgattctttgcttttagtatacaaacatgcccacatctctcctactttcaaaaacaatgaaacccttgacttcaaatagctacccctttctctctctctttgcccttcattaccaaccctcttaaacatctctttcttcgattctagttcgcacttcacttcaatctgggactgcactctggaatcagataccagggatttctttttttgctttttttttttttttttgaaatggagttgtgctcttgttgcccaggttggagtgcaatggcgcgatcttggctcattgcaacctccgcctccttggttcaaggtatttttctgcctcagcctcctgagtagctgggattacaggcatgtgccaccacgcccagctaattttatatttttagtagagacagggtttctccgtgttggtcaggctagtcttgtactccc

SEQ ID NO: 60544 - DNA, 2041 bp, Homo sapiens
ctgtaacattttagctattcataaaatgtaaatgccccatcaaggctagtttttgacattatagattatttatagaatgaaatactgcaggtgtaaatatattatctaaccctctggttatgctggagagtttagttctctgaagttgatctaccaaataaaatatactttccaacacatgtattgctaaaatagtctgctattcagaatggcgataatttttattttatttaatctctgaaaactaaacatgtgtatataaggtagcccccttttaaaaacaaactgatgctctgaagtccatatggagctatgcaatgctctttgttctcctacatcattgactattacatcattgattatgaagtaactattatagttaaatcttcacttttaaaaatccttcatatatatttatatgactgataacattttatatatgactcttacatcactaagtatttaaggaggttgaaatctatgaggcaaaaacagttcactattttatattattctccattttaaaatccaccttgagcttcattttagctcttgattccttgaacattattttttttaattgataacatttttatagaaatgtagttcatgagcttggtgtgattgtgattagaattataacaaatttttggattaaaaacctttatttattaaatttagcagatagagaactaactcagtctttcatggtaacagttgctagatcatggacaataaaaaattattttaaaaaattcccaaaatgtcattttagtcaacagttacacacttatttctttcttgaacaccattttatcagataatagcaagtagcaaaatttactatattgtcatatcatttttctcatcctgcccatccctctgatggagggaggggctaatgagtagtgaaattaccaaaaaacaggttgcagaaagcagaaagaaataatgccaaagacatggagaatctgtaaatcaaattagaaacaataaacctcagaaaaatgaacttgaaattaaggagctcaatcaataacaaataaactgaaaattatattaagacaatgtaatgaaccaacacaatttcctaatttattaacttgcattcattagtattgttaaagactgaggaagtttcaggttagccaaactcattagatgataggtaatggtagggtaaggtaacaaagggaagaaagatttagagatgttaaggtgaccaaacataaaatgctaaaaatattagccagggctaatctaatctaccttggaatgaacttttttaaaagaagaaaatataaaataaaattctatcctgtgaaatcacgcacaatatagacctgaaattgtctgtttccaattctacccacttctcatgcatatttacctctgttatttgctagatgtgttactactttccataagacgatacagatacaccactgtcctcctcagcatggttttgcaaaagaaaacaagaggaaaatgatacacaaaatgtgtgtttgtgttatgactttgtttttgatctttccaaaatgattatcaaatggagaatctaaagggaaagtaaagcagatgtataattttataaatatttttatgaaaaagataaaagcagattttataattgatttgttcaacatttgtttctatttttattcgggggtttgtttattctagatcttcccccatctattatgtatcattctgataagatgctatgatgcaatattaagcaaaagaggcaaggattcctgctgtaatggagtctacactccaatgtggttagagttctaaagatactttaaatctaaggtcttagatgtgtgagattcccaaatgaaggccaaataatatttttagaaaaaaaatatttttttaatttagatctgtttaaataggatttgacaagtgttcttccattgaaggaccatgattcgggcatcaagtactcacatattggggttgggagaggatgtagcccttaagctttagatataacccaaatagatgctacagatggttgcctaataca

SEQ ID NO: 60545 - DNA, 1339 bp, Homo sapiens
ttacttggatacaaactacagaaaagctgcccttggtataatgaaggtggaggttgacataaccgggtttatattaagttatggctgttactaaatagtggatcttttatttgctgatcagatctcaacttgtagtctatgatattatttctttgaagctcttcattagataatctttgcaggtctatcttgtttttctcctatacggtacatttgggagacattttgtaatttttggcatttttctaattttttttctttttgcacacggtgggagatcttttttgttttgcattgatctgtgttggtggcgctgtagtgctcctcaacaatttatgtcagtttcactaaaagaaaaaaggaagaaaaaaaaagaggtggggcaagatttgatctattctcttctccctttattttcttaaagaaagttcattttagtcagtggaagtattcagttgtgttatttaaatgttttctgtgaactgtgaactatggtgagagcagacatgtcgtcacaaccagccgagggaacatcagggacaggcatgcagtttgcagttgttttatctgatctgatttatcatctctatatcagaattattcagtaataagctgtcgatttatccttttagtaacattttgcattttccttatattacaaaattatatgtgttagtgtattttcaatttaaccaaatgtctgagttttagttccttcaacattgtaaaagttgaatttcattttgaacctagggatttcttaaataactattctaagtttctcctgaggtttttctaataagtagtcatataataattcccacattattgtttgtttcattttgaaatgatacttcaactgaattacagatagtcttgttttaaaaataacaaatattttggaataagataattttttaagaatatgtgcacaattgcttttggctttaaaaattttgatgttcacatatctaaatgcaggattatatcttttccatctttgttcttattgagttatctgattagagaatgtgggatttaggcccaaagcctcccaagaacaaaaatgtgttacgatctgacataggttttactggtctctgtaaacattttagctgtttatggagatagtaagtgtgcccttagttcaaaaagaaagtgggacgaatcagtaattgaaccctaaagcgtattttttttggtcacataaaataaaaacaactgaaatagtacactagaccacttttccataagattgaagagattattttttgaaagagtgaacatttcaagaattattatttagcgtgtttacccactttgaaatacgtaaatgctc

SEQ ID NO: 60546 - DNA, 1034 bp, Homo sapiens
tttgggaggccgaggtgggtggatcacttgaggtcaggagtttgagaccagtctggccaacatggtgaaaccctgtctctactaaaaatacaaaaattagctgggcatggtggtaggtgcctgtaatcccagctactcaggaggtgaggcaggagaatcacctgaacccaggaagtggaagttccagtaagccaagagcataccacttcactccagcctgggcgacagagtgagactccgtctcaaaaaacaaacagtacagtgttagagaataacagggagggaaataaataaacaaggtggtaaggaagttgtctctagaggagtggggcttaacctaggcttgaaggatgacaaggagacacatttgaaaaatatcggagaagtcacagtctaggaagaggctacagcatgtgcgaaggccctgaggcagaatgaagcttggcacattctaggaagggaaatgaggccagtgtggtttcagcacatcaagaagtgcatcagatgaaatcagaaatgtagactggagagagatcctgcagaggtttgtaggccacagaaaggaattccgtgtttaagacagagaacgttgaacttccagattttagaggttttgataatgataaggtccagagaaggtagaggggaaaaaaaacccctcaatgctaattttgaatttacatagctacattacagggttttggtattatatttttaaaaatccatatttcactcacatagttacagccattgattatgactcagttcataaataaatatgaataagacacaaatatctgagatcattcatagtacaaacaaaatgaaaaggaggaattcaggcaacaatttgcctcagttttctctaatggtgctgattttgatatttttgattaaaaaaatactacattttatatcagttgaacagtgctcaccttttttttttttttttttttttttaaaacaaatgaggccaggagcagtggctcacacctgtaatcccagcactttgggaggctgaggtgggcggatca

SEQ ID NO: 60547 - DNA, 1036 bp, Homo sapiens
ctcaatattactcactgtaatgcggcatggctaattttttaaacctttggtttcattctcagaatggaggtgctaatagctagcttatggtcttgtgtaaatgactagcccgtatacacagatataaaataactagcagattttataataatggcagatataaaatgactagcagattttaagttgtgctgcttcttttgttctttgtcttaaagcagctgacagacaatcctatatttctttagatatttgtttttatattcaattcggtgtaccttacttcgtttatatacatgatctaacaactttaataatttttattgccctcggagaaactatttttattatttatctttccaggaagaagttgaggtagttcacaataaaaattatacacaaaaagagaaggtaaaaataaaggactcaaatctcagatgcttatgtggtcattcaaaatcagtatatatttaagtcatagtttggtattcaagataataatgagttgacatatacagaaggtaaagggcaaaagtaaaaacaaatccaaaggccgggcgcggtggctcatgcctgtaatcccagcactttgggaggccgaggcaggcagatcacgaggtcaggagatcaagaccatcctggccaacacagtgaaactccatctctactaaaaatacaaaaattagccgggcatggtggcgcatgcctgtaatcccagctactcaggaggcggaggcaggagaatcccttgaaccagggagttggaggttgcagtgagccaagatcgcaccatagcactctagcctggcgacagagcaagactccatctcaaaaaaaaaaaaaaaaaaacccaaaaacagaggcatgaatttttaaataacatatacaaatgaagtaaataataatataaaagacaaatttctcacaacatatactactgtctccattttggttatttcctcacctgtggatattcttggattttatcacttgtcctttgtccacctgaatctgaaaccagtgattttcttgtttcttt

SEQ ID NO: 60548 - DNA, 1033 bp, Homo sapiens
tacaggcgcccgccaccatgcccagctaatttttgtatgtttagtagagagggggtttcaccatgttggccatggtagtcttgaactcctgacctcaggtgatctgcctgcctcggcctcccaaagtgctgggattacaggtgtgagccaccttgcccggctggcctaaccttttggttacatacttctgtaaacatatttgaacatgtattctcagtatacttattttaaaattgataaattacaaaaagtacctccacagtttattatatatagtattagcattataaacacttcaacaagaatatttaaaaggattagataattatgtaatagataagtttaaaataaattttgagctactctgcctgtggagcaggcctgctctgtctatggatcagctattttcttgtactctgttgctctaataaacatgcttttctttaactcaaaaaattttttttttgtttactaaaagtataaaaccttatttgctcttaatttagaaatataagtgtaattttagggcctactctccttctataatgtctcttccaatgctaaaatatgataatttctttgcttttttgataccttaatcttacgaaattgtcatattaaaaaactaccttaaatgatatttttctaaatgactgtaaacatttcatatgcatacttgatatttttaaatgtagtattatctttatcacagatcactgcccaaagcggaagactgattgaaaagaggtaaaacactttttaaaaatttgttccctcattttctaatctttatcagttcacatacctaagcaatgaaaataaccattctaaatttaatgtcacaaaactctttgaaactaattttaagtagaaaatgttagaaactttagatatcaaagttagaagagttgatgcagtcaaaatcaaaattaaatgaaaaatttaaatttaaatttaaattaaggacaatgtagaaacaaacttttttttcctgacaacagcaattaaaatttccagatagtgaggaactaac

SEQ ID NO: 60549 - DNA, 1040 bp, Homo sapiens
tctttgtacattggtaaatctcagaaaatagaaacactggcttacaaaaagcattttaaagagagtttctggtctctatgaagacatggtaaggcagtttcagttactttccatgggtgtttggaaaaatcttaaagaggggttatgataatgttacctagtgagttattacccctggcagccctcattctacttttctgataagtcacattttagaattttaatgggaagtgatagaatggaagaagggttcaatggagaacaacagaatgaggatgatggggaatatagtacatcaagattaaaaaaatcatagaatggatatatcaaataattcctcttaaatgcctttttccccctagaaatgttgattgatgtaataacttcaggaggaagattattttaattcatttcaattcagtttagctctaatgaggaaacactgactgagcatctatgctgtgcaaggcactgtgctgggtattatgggatataaagggcttcaaatatatggtcattgccctcaatgcattaacagtctagtagggccgactagacatgtacaaaaataagtgaagtataatgcagacgttgcattctataaaacattaccaagaagctacatcaaagaagaggaaaagctatttctgactggattaagaattacataccatttaattttagaaagatggttgggttggattttaacagggaaatgtgaggaaagggtgtgccaagtggacagaactttgctttgaggcaaagatgaagatgtttagaatctatacagtgtgctcaggaagaggccaaaaattcattttgtttgcatcctagactaaggacaataatgggaaatatgagatgaaataggttgtttcagcttgataggttttatagaattgcacttaatagctttaggttaattattatatattatataataatataatatattacatattatattatgttgctaaatataataaaaattcaaactattaagcacatggcacaatattattcatcaaccttcattttgg

SEQ ID NO: 60550 - DNA, 1039 bp, Homo sapiens
gaataaatgaatgagtaaatttaacagctaatcatctaatctatggagaaaaaaaatggacatgttccaacactcttctcttgtatgttttcgtgcttgatagcaaacccaagtaataatgaaagtcctaatgaaagtatttagaaagaactaggttgactgtgtaactcttcaaaataaaacaccatgaattagttcacattttcatttctaaaaagtgtgaatttcaatgccacaaaacatttaagaaaagctaacaacgcacatgatgtgaaacaataaattattaaaatctattgtttgattaactatttaccactaactcattccctaagccaaaataaactgataaatgttgtaaagagcaaaaatgtactttattgtaagcaataccatgtatctgctcaggtggggtctccttacttcgctcccatccactctctgaaggtttgggagacttttccaaagtatttcagaaactctattagcatctaagaagtaacccaaaatgaaggttgatgaataatattgtgccatgtgcttaatagtttgaatttttattatatttagcaacataatataatatgtaatatattatattattatataatatataataattaacctaaagctattaagtgcaattctataaaacctatcaagctgaaacaacctatttcatctcatatttcccattattgtccttagtctaggatgcaaacaaaatgaatttttggcctcttcctgagcacactgtatagattctaaacatcttcatctttgcctcaaagcaaagttctgtccacttggcacaccctttcctcacatttccctgttaaaatccaacccaaccatctttctaaaattaaatggtatgtaattcttaatccagtcagaaatagcttttcctcttctttgatgtagcttcttggtaatgttttatagaatgcaacgtctgcattatacttcacttatttttgtacatgtctagtcggccctactagactgttaatgcattgagggcaatgaccatatattt

SEQ ID NO: 60551 - DNA, 1103 bp, Homo sapiens
ctgtagagggctttcccaatccagggaggcagggtgctgtgcgtgttcagtccagagggcagggtgatcagatcagattagtgtttctctaggaggctggcctatgcccattttaaaattgagttctgttgttgtggttgagttgtaggaggtctctatatattctggattattaataccttatcagatatgtgatttaaaaatattttctcccattctgtggtttgcctttttactcttgatattttccattgatgactgaaagtttttaattttgataaattctaacatgtctatttttttggacagtgtgtttggtatcatccaagaagtcattgccaaatccaatatatggttttctcctatgttttcttctaagagttttaaagtacagctcttagttttaggttttcggtctactttgagttaatttttgtctgtgtaagataaagggcacaacgtcattattttgcatgtggatatctagttttctcagcatcatatgttgtaaagactattttttccataccgattagtcttagcactcttgtaaaaaatcatttgaccatatatgtgagggtttatttctcagctctctatcctattccatcagactatgtgtttgtctttaggccagtaccatactgttttggttattgtagttttgcagtaagcttcgaaattatgaagtgtaagtctttcaattttgttctttgtcaagattattttgactatcgggtcccttataggggcagggtctccaactcctggtctgtggcctattaggaactgggccacacagcaggaggtgagcagtgggtgagcaagggaagcttcatctgtgtttacagctgttcctcattgctggcattaccacttgagctctgcctcctgtcagatcagtggcagcattagattctcataggagcacaaaccctattgtgaactgcgcatgagagggatctaggttgtgtgctccttatgagaatctaatgcctgataatctatcactgtctcccatcacccccagatgggaccacctagtttcaggaaaacaagcttagggctaccactgatcctacattatggtgaattgtataatt

SEQ ID NO: 60552 - DNA, 1474 bp, Homo sapiens
gttggttatgcattgttcaaaaaattaatattttgaatagggtgaatatttttattatttgtgatttaaaagataattgcataacttctttaaaattgaaaagaaaagtaataaagtaatttgaaactttcaaactcaccactgcctggtcaggccttctgtgatctgggcctaccctgttgatccactgtatttccagctgtttttcaataagcaccatccacacgagtcagtattattttcaaaaggcttctatacttgcaatttcctttcctgcatttctgaatttgtcatgttgcttatcttgctcagaatttccttcattctcaaaagtatgggtgtggtacagattttcgggcagcagcatgtaacactttaaagaaaagttatgtgttaattgaaaaaaagtttaattttactccagttgatataatttttattgtatatgatatcatggaaaacagaatgtatgaataatataaacaatgaaaatggaaaatagtatataaatctacctacctattgtttttatagaatgatgctgtgacattctcaacttagaggagtataaatatagataatggttctccaactttagctagcaacagaatcgctcagacaacttactaaaacagatttctggacctgaacccagagcttctgattcagtagttctggggttgcggcctaagaaactgcatttcttagaagttcccaggcgatgcccatgctgctagcccagagaccacactttaagaagtcttaatggagacattcaaaaagttccagttcactggaattttgtattttggcatacaaaaaaaatgtatatacttaatatgcctatggttcttcaaaaaatcagtcagttttaaatgagaggccaatttgtaaaccacaacaaaattaacttagtatcatggaggaaataacagcaagtccattttaggcagaagactcatctttaagctaatggaaactaagatggagtcataaaatatctcttgatttcaataatctttgttgcaacattgtttgttacatagaaaaaacgggaaacaaccaaagggcctatttaacagaggctcataagctatgatagatctaaatataaaggacttaaaaataatttgattgatttggatgtgctgatacggaaagactttcaagatatgatacaaggctacagtaaccaaaacagcatggtactggtacaaaaacagacacaccgaccaatgaaacagaacagagggcccagaaataaggctgcacatctacaaccatctgatctttgacaaacctgacaaaaacaagcaatagggaaaagactccctgttcaataaatggtgctgggataactggctagccatatgcagaagattgaaactggaccccttccttaaaccttatacaaaaattaactcaagatggattaaagacttaaatgtaaaatcccaaagtataaaaaccctgg

SEQ ID NO: 60553 - DNA, 1870 bp, Homo sapiens
gatggcagccaaagtctttcaaagaccctagaccctattcacatttgccctgattctggcctaatttgagctaattagagtcattggttaaaactggcatcccctgctcaatattaagggttatcctgctatcctgaaaaagtattacattttaccccaaagctcagttgaaagactattcctggtcctacttctccaaggagctatttttagttgaaccagtctaatgactggttcatattcaagcagaaatattttctgtatatccctctgaatagctcactgccttcccaggtcctggtggctattggatcattggtaattctggagttgcacagttcaatatgggagccacaagccacataggattattcatgtttaaactaatcaaatgtatgtaaaattaaaaatctagattcccagtcacactacccacatataaagagcccaagagccacatatgagtcatacctcccatactgtagggcacaggtgtggaatatttttatatcacaaaacattctactgaaaagtgctgaggagtcataattgccatgaaaaagatggtctaggaggaggaccatttaaatgaagccaagatagcttgaatctattaactgggtctcctctgccagtagctacaggacctggattaaaaaaaaaaaaatcaactgcaaccatttgcatatgggcttgggcattagtttatttcccttgtatcctcttcaaacaataagctccatggttctcaactctggctgcgtattagaatcacacagagaatctggtttaattggtctggggatgcaaggcagaaaactggtaggctttaaaagccccaggtgagttctattttgtatttaggcttgaaaagtactgatttagaaaatgcattacctcatttaatcaaataagtattctataaaggcagagcttcagtgaaaataaaacttcctccatgttttatagaaaagcctgctgaatcccagacttaactaatgggaattaagatagagctggcattgttatccaggtagttcataggggcaaactgagaagctggattggatctagtttagataaccctaacaatcaccacccattgcaggtagtcttccatactacactaaaactataaaaataattatagaaagaaacataaaatccactttattcacaacccaattatcggcaacttgcaataacaattctgctattcatttctgcatatattctctccaaaaccctcaccagagttattaatatagttcacatttatgttacctttgggatctttcacagttttagagaataattgatcactagggaataatttctccatttattttctcttgacagtttcattatgctgaattcatgagtttttctaaccatataaattgttcatttttcattactatataaaatgtaaataatatctttacaatgggagattataaaggatggaaactatttcagtcattttatttcactttattttgtttgagtagaaatccaattttctttattattttttggcagaaacataactccagaatatttagattaatattactgctcattcctctgattcttgctggggaaaaataggaaaatttaaggcataaaagaatattctgcaagtctaaatatttatgtcagtgataacccagattgggtttaggacaattttatagccaataatatttatgctcttcaggggacagtaaaaacgcagttacaaatactatttcagtgttataaaacatttgattggtaagaatcacatctttaaaattattagcagttgtattttgtgccattacaaattctacagagtatgcttaacacatatcaggttattgtcata

SEQ ID NO: 60554 - DNA, 1991 bp, Homo sapiens
ttactctctaaattagtaacttccgtaggagaccccagaagcacacctccctcccagcagtgaaagccgaggattcccgttttgattagcaggcgccttctgttcacgataaagggataagaatcaggcagtgatggcagcggagttcatgcttcattaaggcaggcattgcaaactagttcagaggagagaatccacgatgacagcacattctgtgccatggagaacattcttaaatcaagcctccagtggaggaaggactcaagaatgaaatagcaccagataacggggcatcattagacttgtaaagcaaagcttccattttctatttttatataaaccattattaatgcctttaaaacaactgtgatatctggacaaataaaatagaaatgacttcttaagatgattgcaacttttagtcttgatttataaaaattattctacataattttagtagggtaactgataatttttctcactttttttttgttgtagggtgaaaatcctatttataagagtgccgtaacaactgtggtcaatccgaagtatgagggaaaatgagtactgcccgtgcaaatcccacaacactgaatgcaaagtagcaatttccatagtcacagttaggtagctttagggcaatattgccatggttttactcatgtgcaggttttgaaaatgtacaatatgtataatttttaaaatgttttattattttgaaaataatgttgtaattcatgccagggactgacaaaagacttgagacaggatggttactcttgtcagctaaggtcacattgtgcctttttgaccttttcttcctggactattgaaatcaagcttattggattaagtgatatttctatagcgattgaaagggcaatagttaaagtaatgagcatgatgagagtttctgttaatcatgtattaaaactgatttttagctttacaaatatgtcagtttgcagttatgcagaatccaaagtaaatgtcctgctagctagttaaggattgttttaaatctgttattttgctatttgcctgttagacatgactgatgacatatctgaaagacaagtatgttgagagttgctggtgtaaaatacgtttgaaatagttgatctacaaaggccatgggaaaaattcagagagttaggaaggaaaaaccaatagctttaaaacctgtgtgccattttaagagttacttaatgtttggtaacttttatgccttcactttacaaattcaagccttagataaaagaaccgagcaattttctgctaaaaagtccttgatttagcactatttacatacaggccatactttacaaagtatttgctgaatggggaccttttgagttgaatttattttattatttttattttgtttaatgtctggtgctttctgtcacctcttctaatcttttaatgtatttgtttgcaattttggggtaagactttttttatgagtactttttctttgaagttttagcggtcaatttgcctttttaatgaacatgtgaagttatactgtggctatgcaacagctctcacctacgcgagtcttactttgagttagtgccataacagaccactgtatgtttacttctcaccatttgagttgcccatcttgtttcacactagtcacattcttgttttaagtgcctttagttttaacagttcactttttacagtgctatttactgaagttatttattaaatatgcctaaaatacttaaatcggatgtcttgactctgatgtattttatcaggttgtgtgcatgaaatttttatagattaaagaagttgaggaaaagcatttctggttggtgggtagttcacttatgaagctaaaacataattctttaaaaaaatgtactagggacataaggagagtggtatggtgaaatacagacttgaagactgtccttgggctctctgaatcatggtggatagatccttacttatcctgctacgctgggagagaggtttca

SEQ ID NO: 60555 - DNA, 1244 bp, Homo sapiens
gagaaaaaatttctgtcctactgaggtgaaattttcacccttgctgtacctttcattgtattttgaaggaaattatcagtaaatgttatttaaacttaatgtttataatgtatatatggctaaaatgttgctaaaataagcattttatgtaattcaggaagcagaagtttggtaaaaatttctctatgcattattgaagtccaggcaatttgatggctacagattattttaagagatgtttttctcaagaaaaagtagaaattaacaattgaaataaatgaatgagcatcaagaaattacatcatggattgtaagaaacttttctgatatggaccaaggtttgccagtcaattatgtcattgaaatttttgaaataatgggcaggcgctaattactttggcagaagactaccatgtaggaacattaagaagaacatgtcacattatcagcttctaactgttggagtgggttaaaaaaatggtctgtcctcatctgctgctatgcgggtttaaatgtggctcccaaatctcccacacttctgcattatgtatttaatacattgtagagatggttctgcagctaccactgtcagccattccagagtgagcacaaagatgacattttactgagcttgagggcttcctttcataatataaccctgttctcttgctgcgggtttttttggggtggggtggtgttgcactctgaatgatggaaactaatttgaattattttagtttaccttcatttaaaatgatgcctaatacagatagtgagcttaattttacctctaaccttgcatgttaaacttttgtttgagtggactttgaaataataaatacaaatgtttgtgtatacgacaagacagatttttctccaaaggtaagttcttccatataaattacactttggactcatctatatagggctttttttctttattttttgttttcttttttttttttgtccttcccttataattcttgagtattaaatactagatttagcaaatatattgtattaaagaaatttaattagatgctaatttattttcccaacatatttgaaggaatgtgtagcacttagcctcaaatcagataggatataaatgtggagtgtaatttatttgcactctggctttttaagatagtagttgccaaaatccagtttcctgacccccattttgaaatgtctgctctcacagctgtataatgtattagcttcagttgggactagagctgaga

SEQ ID NO: 60556 - DNA, 2045 bp, Homo sapiens
aatatctctccatttattcagtctgaaagatttctttttatcagtatttagtaattcttaacatgcaaatcttgcatatattttgttagacttatatgtaagtttttcatgctttttcattctgtagtaaatattactgtttaaaaacttatattttcaatatgtagaaataaattatatatatagaaaaatacatgatttttgttcattgatcatgtatcctgcaaccttgtaaactcacttgttagttctaagagctattttatagattctttgggatagtgtgcgttcactctcttgggtgtttattcctgtatgttttttataagacactgcacagctctttgtggtgctcattattaccttcttattttccagagtgtcccactggtccagacatcattccaattgtagctggtgtggttgctggaattgttcttattggccttgcattactgctgatatggaagcttttaatgataattcatgacagaagggagtttgctaaatttgaaaaggagaaaatgaatgccaaatgggacacggtaagttacaaaacatccaaaaagcaaagtggcttataaagtaaatgtaatactcctaagacttatgtattagctgtcaggctgattattaaagtcctttctaagtattttattcccccaaaagtttcttactcaaggaatttgcatttagtgaaaaacagaaagcatcctaaatatatcccattgaaacaaaacattgattataagcatgtatattctggttactgtggccagtatttttatttctttaatagttttgatcctaaatctgccttttcatctaatgtgaagtagaatcctaaataatgttatctgtgtagcaagctattcaatggaaagctgcttctttctttaaaacaaacaaacaaaaaaaaccttcagtgaaagccagattcaaaaggttatataccaagcttgtccaactcgcagctcgtcggccaggacatgcagcccagaatagctttgaatgtggccccaacacaaatttgtaaactttcttagaaattgtaattattattattatttttttttggtaacttttttttaaagctcatcagctatcgttagtgtattttatgtgtggcccaagacaattcttcttcttccagtgtggcccagggaagccaaaagattggacacccctgctatatactatatgattccatttagaggacattctggaaaagcaaaactgtaggggcaaaaatcagtggttgctaggggctggaatgggggaaagtgttgaccacagaggggcgtaagggatcttccttgggatgatcttgattgtgggtggatttatgtatttgaaaactcacagaactatgtactttaaaaagatgtatgttcctctatgaaaattatatctcagtaaactttggcttataaaaatcttaaaagccctaagtgaccgaaaggttatgttagcattgagtgctttgaaatatggagtcagagggtggggtaaccaaatgttggcctttgtgtattcatcttttgatacaagaaagcaatgccaatcttcagtatttttaaattgtaaatgaattttgtagttagttgcactttactacaatttgcttgggtttttaaaaattatcaattttttaaattacaaatttcagaagggtagaaataaaaaaaaagacatttatagtgttcaaacactataaagggattttttttttctgatgaaatcattagaaactatttcttttactttagcaagaaaatccgatttacaagagtcctattaataatttcaagaatccaaactacggacgtaaagctggtctctaaattgccgttcgtattttgtttcactttctgcctttgcatgtgaacttctatcttttttactgcactgtgtgtcctttatcactattgctgttctttttttaagtctggctttaaatatcgctattgtggcttttctttttgtatgttaacttcgcgtttagaaagaccgtaaaataagtaatgtgatatagaaacagcagc

SEQ ID NO: 60557 - DNA, 1136 bp, Homo sapiens
accagtctggccaatgtggtgaaaccccatctctactaaaaatacaaaaattagccagatatggtggtgtgtgcctgtaatctcaactacttgggaggttgaggcttgcttgaacccgagaggcagaggttacagtgagccaaggtcacaccactgcactgcctggatgacagaacaagactccatcgcaaaaaaaaaattattatgattttatgttacatatttaatatgtgatagggctaatttattttactatcttttatttcttaatagggttttaatttgaactgtaataaatctttaattttattatggaaattagcatctttttacataatttttctatccacaaatgtaatgttcctcttcatttattgaaatcttccttcatagctgtttgttcaatttggtcacaagagtttagcatgggaaatatgtttaagcaaatatttactgaaataataaaatgtaaatatcataatttgtgttttttgtaacagagaatgtgttcagtgcagagccttcaataaaggagaaaagaaagacacatgcacacaggaatgttcctattttaacattaccaaggtagaaagtcgggacaaattaccccagccggtccaacctgatcctgtgtcccattgtaaggagaaggatgttgacgactgttggttctattttacgtattcagtgaatgggaacaacgaggtcatggttcatgttgtggagaatccaggtagaaatgcgatgattgcagacattcttttcatatcttgtatgtcttgtttctgcttatttaggcctaacatccagaaacagcctccagctggaatattttaggtcaagttgggaaatttttcatctctcaaagcttaaaatattatctaattaactgtataagaaataaggaaaagagagttccacttttaagttttctgagtggagagtttgaagattaaatacagtgatttatataagacgcttagtgatttatataagacacttagaacgatgcctgacaccaagtgcatattaagagttttttgatgattgatgattttaaaattagagcttgatttaagcttgaatactgggaaagataatttgttaaaggatattaatataaagtgttgaatttg

SEQ ID NO: 60558 - DNA, 1518 bp, Homo sapiens
tctcagactgctgtgctagcagtgagcgaggctccatgggtgtgggaccctctgagctgggcatgggaccctctgagccaggcgcgggatataatcttctggtgttccgttttctaagagcattggaaaagcgcagtattagtgtgggagtgtcctgattttccaggtaccgtctgtcacagcttcccttggctaggaaagggaattccttgaccccttgtgcttcccgggtgaggcgatgccccgccctgcttcggctcacactccatgggctgcacctactgtccagcaagccccagtgagatgaacccagtacctcagttggaaatgcagaaaccacctgtcttctgtgtcgctcacgctgggagctgtagactagagctgttcctgtttggccatcttggaacctcttaaattatttttgttttgtgtgattgcaattttggcatgtttcttcaggtgcaatgaagggcgtgttggtagacattgtgaatgcagcacagatgaagttaacagtgaagacatggatgcttactgcaggaaagaaaacagttcagaaatctgcagtaacaatggagagtgcgtctgcggacagtgtgtttgtaggaagagggataatacaaatgaaatttattctggcaaattctgcgagtgtgataatttcaactgtgatagatccaatggcttaatttgtggaggtaagtaaagggcctgaagtggttgtaagatgtgatcccatctaatgccacgaaaaatcttgagtttagttggtgcataagtagaaaaggggtagcttgagggtcagtctcgcccctaggtatactttctcacatgttgttgcttattttacttttcagtcaatactgtgattgtatatttttaccattttgagaaatgatatgcttaattgcaggaaatggtgtttgcaagtgtcgtgtgtgtgagtgcaaccccaactacactggcagtgcatgtgactgttctttggatactagtacttgtgaagccagcaacggacagatctgcaatggccggggcatctgcgagtgtggtgtctgtaagtgtacagatccgaagtttcaagggcaaacgtgtgagatgtgtcagacctgccttggtgtctgtgctgagcataagtaagtatttcctaattgcttgaaatagttgatacttcctcttggctctcctaagcctgtattgtttctagaaccagaacagtgccaatattaaaatatactgtaaataaaatgcctgccatgtggaagcctactctttaattcttaaaagttctttctcaacagctagtatatattacatggtatgaagtgtgtcatgtgagagttgtactattattttgatctgaatgtgctagataattgaatttacatggtaacctttattttggcaattaagatttaatttaatttaatttgtcattaccaatttcttaattactgtcttttgacaaaactaagccaaattaaagatttttcctcttgaaggattattatactagta

SEQ ID NO: 60559 - DNA, 1058 bp, Homo sapiens
catgcaggtccatttttagtaaaatgtcatttaaccaaaaagattatcttgaaaatactttgcctttctttcctttatatttttaccagatacagaatcagtgcagtcagtgtccatgagcattatgtgttctaaaaatacacagggaacctgaaaagtctgcacatgtaggatatatttatttttaaatagtatactagttatattttaagtggtatacacagtatgttttttttcaacttccatacacttttttgcatgtgtttattgtatttttttaggttaacagaccattgctttaaatttagacagttcacctggaatagtaaatgtaatagcataccatttgaaaatgtaactaacgtgctctttaaaattaagtttattctgcctttccacatgtgtcattcactattcattgctagattacatttttgtcttgaccaaaatggttactttcctgaagaaatttttttcctagactcttgcatatattccatatgaacttgagtggctggaatgtacatgtgcgcctgtgtatgtttgtccctgcttgcacatgtgtgtacactttactacacgactgtgacttgtggcatggacactcccacctaacagattaggagcttgaagagattttttatagttttattttctttcccagtttttcccttttaaattattattattattattccctccaagatgattcttcttcttttttattatactttaatttctagggtacatgtgcaaaacgtgcaggtttgttccatatgtatacatgtgacatgttggtgtgctgcacccattaactcgtcatttacattaggtatatctcctaatgctatccctgccccctacccccaccttatgacaggccccagtgtgtgatgttccccaccctgtgtccaagtgttctcattgttcagttcccacctatgagtgagaaggtgcagtgtttggttttctgtccttgcgatagttttctcagaatgatggtttccagcttcatccatgtccctacaaaggacgtgaactcatcattttttatggct

SEQ ID NO: 60560 - DNA, 1404 bp, Homo sapiens
tgtgttggccaggctggtctccaactcctgagctcaggcagtccacctaccttggcctcccaaagtgctgggattacaggtgtgagctaccacacccggcctattccacatttttaagactcctcctaattagtaacagccctctgcactgtgtgatcctgagtattttaactcagtgattaaaacaggaatactcttttcaattgtgtattttattttaaagatttgatccttattaattaaaacctgtttctctggcctctgtgttttctagttactcaattggatttggcttgtagatactttattgaaatatatttttttctgagcagtttatccattggttttatgcattcaagtagcattttgtttgacttttcctgtgtataattaggcattcttttagtccctttcctcagaagtcattttggaaaacggcaaattgtcagaaggcgtaacaataagttacaaatcttactgcaagaacggggtgaatggaacaggggaaaatggaagaaaatgttccaatatttccattggagatgaggtatgttgtataaagcattttctgtagaaaacattggttatttataagcaaatttagtttatagtttgagaaacattaaaataagtgagcaactttttgaaatattttttagtagatttaaattgtttagttggttgttaatcttttttttcccttcaaggttcaatttgaaattagcataacttcaaataagtgtccaaaaaaggattctgacagctttaaaattaggcctctgggctttacggaggaagtagaggttattcttcagtacatctgtgaatgtgaatgccaaagcgaaggcatccctgaaagtcccaagtgtcatgaaggaaatgggacatttgagtgtggcgcgtgcaggtaagctgggtgttgtcagacagtgacagagctacattggtttagagagtataggcaggtcatattttgggacatccagagaatatctctctatttggagcaaattattttttccaaccacggttgctcaccacaagatcagtttgatgatcttgtgtgtgatatttatagaaagttccttcctgcctttttttcttaaagtgattactctttaaaataaaagattttatagccatgaaagaagtatattcaacaaattgttaaggtagcgtttctctcatgtgagagcaatcaattttctagaacaaaataagcttgtgtaaaataacgtttataggaaaatgttttggaaaaacatcaaaccgatgatggcgatttcgtctgggaaatggaattatgaagcagtagaagatgtttgtcttgtactacatgtacttctgcattgttggaataatttttaaaaaataaatatgtgttgtaaaatacaaaagagaaaa

SEQ ID NO: 60561 - DNA, 1010 bp, Homo sapiens
ttaatcacatattataaaactggtttctaggtttgactcctaaagttagttaggaggaaacatgggaactggcatttaaagataaaagttgctcagtggatcctaattggttgaatgaatagcagttgtattttacgtgttttatcttttaattgcaggagctgaaaaacttgatccctaagtcagcagtaggaacattatctgcaaattctagcaatgtaattcagttgatcattgatgcatacaatgtgagtacatcttaaataagatcagttttggacaataccctgttgagaatactttgtacaaagaaagtaaaacttccttcatacacactttagcgagcccaaagtactacagaaaaacttaaattctgtatgtatctagaggaaaaactttatacatattgtcttacaaaagcaagattcatggcctaaacaaagtgaaaatgtgataaaggcatgtggggagtatttccaaataactgtttgtttatcattaaggaatagatctccttgttagaaagcaattgtaaaacataacttacatttaaacttacaggatttctccaatctttttcctccccaaaatatcctttatagagtcatctattctgatgaattgtgctagaaaagtttttttttttgccaattcttctcttcccatatattcagaggatatgggtttctatttcaggaggtacacactcatatatacgtataccataaaatatataaaaatgtaaatatacatgtgatttgcctatttcaaaaagatttatagtgttgttttcccctcacagatgggaggaagttgaattgaaattaaagaggaattggcttatcctttttgagcataattcagtgtactttaatcacaccgagttagccttcattaataatcatttaaataatctgaaggcggttgtaatttggtaggtaacccttgtgtgtctcgtgcaccactttcagcccccatccccctaaccctttggcagcttgaattttaga

SEQ ID NO: 60562 - DNA, 3186 bp, Homo sapiens
attttaacatgagacttgggcggggacagatacccaaactgtatcagttactaatcccattcatgagggctctgccctcatgatctaatcaccttccaaaggaaccacttcctaataccatcatgttgggaattaggttttcaatgtaggaattttggggtaacacagacattcagtccatagtaacctacatttggtaacatagatgaattttttaaacaatgcaaatctctgtctttccatctatccatccattcattcatttatgtaccatttttttcttggcaggatttggctcatttgtggaaaagactgtgatgccttacattagcacaacaccagctaagctcaggaacccttgcacaagtgaacagaactgcaccagcccatttagctacaaaaatgtgctcagtcttactaataaaggagaagtatttaatgaacttgttggaaaacagcgcatatctggaaatttggattctccagaaggtggtttcgatgccatcatgcaagttgcagtttgtggagtaagcgcattcatttcctatcaggggatattgtttctattatgtgtgtgaattttaagtgtgattttactatgataatagaaaaattgaccttaattttcatagatttgattatcttagagaagtaattttaagtaaacccttaaattgcctgtatacataaagtgcctttataaaagcatatttaatctttatgcaaaccacacagttagtttattcatgcgggcttttaaaagacagaatgctaaccatttgaaacagcggggcaacctctctgtactgtagctggtggtctggattttagaaaagcccatgtgtcctaactttctggctttgtactagagatagaattgatgttattatctgaggcatcaccaggaaccttgaaattgctcaaagggagagtgtcttgtatcattttcctttggtcagttttcttctcactgtctttgaaagacacatctttctcctgtgtcttagtaattcaaaaagagagaactttttaagctctagtttttaacctatatgaatagatgtattttgagaagtgatacaatatttgtaattttaattgtaagattttcagtagcaagcccatccctattggttcaataatttgtattttatgatccatgtagcagctatgtattttgagatgacactttaatgatgtggctgaggctgaaactagaagacattgtcatgtcaagtttgtcctgcgtacctactcttgtctcatttttgttccctccagtgcccccattctctagatgaccttctttgattttagaggcctcttagtggttatttttcagtcaatttttgctaaggtgctaattgatgcccaaaataataagtgaaggaatatggatagtaattaagaatttttctatcaccactgatgctgggcaatttactcagcctctccagggctgttttcttctctttaagaagggatcatgatagtatctacctcatagggctcttgtgaagttaaaatgcatcaatctctataaagtaccaatgagcattcagcaaatactaattcctatattgttattactttcgacttttcactagagtgtttgcaatttaaggttagtccctgctgttatagccgaagcaagtagcattccaggtagtacctagccttacacctcttttcttactagccattgatgtgtgagcctgttagcagctcgttgtggggagggcattctctgggctgcctctaactaggccttaacctgtggtattaaacaagccataacacccttgattgtggctgtttttctgtgttggtcatgctgatccactcctctagatgcaaaagaatcagacattccacttttgaaagattgccagtattaataaatgtgattcccaccttaaagtattttactgtcttatgaagatctaaacagacgtattaaataaattaacgaaagcaggtaaattcctatagtcctatgattttataattataaattaccatagtgacaagaagattttacagttactttagattctttattggaaagggcaaggataaagtaaatgagtgcataaacagtactgattgaggagttagaatgggtgaaattatccttaaacaagatacttatttctgttataaaaaaaggaagcctcatatggtgggctgataaagaaggtgcatggcatagaacatagagcagagatgggtggatggggacaagacagcagcagtggggtaaagtaaggataggctcagacactttcatttattcagcaaatgctcatcaagggcttactgcttgccaagcagtgtgctggcttgctagctgctggagatatgatgataagcagaactaaaccaaaccaaacaaaacaaaaaaacagtttttaaaaagaactgagagattgagagatacggatggtcaggcaagatatcgttgtacatgggatggaagagcttcattcagtgggctttgtgtgtttctcagcaagataattaccattgtataaagagaagacacagaaaatacagaattaggttaaaaatacaatggtggcctatatgaaaattaaaggatttttgttgaattactgtgaatagtgttttaaaattgaaatccttttcttttcaagtcactgattggctggaggaatgttacacggctgctggtgttttccacagatgccgggtttcactttgctggagatgggaaacttggtggcattgttttaccaaatgatggacaatgtcacctggaaaataatatgtacacaatgagccattattatgtaagtgcctggttccttacatagtgaatgtgtttatgttggattttaatgtttaatactaagagcttgtgggtgactggcttggggtttctcagggtttgaggttttgctgttttggtaagtaggggtcctgattgaaagtgcaggaaagctagtgttgctgtttgtgaagatgcagctttgtatttgcttccttctgctcagacaagggcctcactggggtgggaaagggatgcccagatgccactttcactctttgcctcaactccccgcccacagcatttggtagcacagtcagtactctttctaaataaataatttatctagtctcatactctttgttttatacgatttttaaaagcagtcactctgc

SEQ ID NO: 60563 - DNA, 1165 bp, Homo sapiens
ataaataataaataataataaataaataattatttttaaagctgtctgccaggctttctaaagtaaagatcggatcatgttattcacttgcagggagtggcatcccactacacacagaacagagttcacaacttcagtgtctaaaaagtcagttgtaccctatcacgtgttctgccttgccctctccagactaatttatggtgttctatttgttttcttctcttataaactgactttttgtctgttttgtccactgtggattgggaatatcttttttatctttgcatcctgaaggcctggtgtttaaagtatttgttgaatgaaactgaatacatacccattgagttacttatggaattcccaggtttttgtaaaaattatgacaacatgttttattttattgtgtttaccgtgtaaaccacatttatttggtttttctcgtttgcgtttgattgccaacaggcaagtttcattttctaatctcttgtctaattaggggagccacagacatttacattaaaattcaagagagctgaagactatcccattgacctctactaccttatggacctgtcttactcaatgaaagacgatttggagaatgtaaaaagtcttggaacagatctgatgaatgaaatgaggaggattacttcggacttcagaattggtaggaatgttgggaacattgaccattttcattataaagtcttggcaattctcaaatgttgttttatattttattcctttgttactcacaacatacttgtgagataaacaagccagttttttagccttttctgagtggaagttgatattccagtcacacgtttaataatcttttctgccaccttgttcctctgtcactggatgctactgtttgacacagattgtacctcatagataatgacttgcatgcttattttcatactaacttgatcatttatcttatgacttactttattttatttttaagagtttcactcttgtcgcccagactggagtgcagtggtgtgatctcggctcactgcaacctccgcttcccgggttcaagtgattttcctgccacagcctcccgagtagctgggattacaggcatctgccaccacccccaactaattttttgtatttttagtagagatgggggtttcaccatgttggccaggct

SEQ ID NO: 60564 - DNA, 1016 bp, Homo sapiens
ctaaacaattttaaaatacatatatttgtagctcatctttgtggcacatattagatttttatgggagaaccttcaaaaaaatcctagtcatttagtttgactgtttcagatttccccttttttgatggggaggtataaattaaccttcttaattatatttgagttaaactactggaattgatttgcatcccaatataagcttattgaggttaattagggtttggattttattcacttttgtcatctctatacttttgctaatatggtaccttccacaaagcctactaaatgttcagtgagtcaatgaatgaatgaatgaatatatcaaaagagaaggtaaggagaagtcattttgaggttgtatagtttattcacagaatgaataactaatatcagaagatcaaggggttactgattttgttttcatgcaggcatttgggcccaagtttcaagtgcctatttttgtatgcctaagtggtcaagtgtcagatatgtcgtatggtttgaccacatgaaagaaaaaatgagaggttttgttgtttttcaaaaattttctaatggtgttttctaaaagtggtgtgttgggattacattggcaacagtggaggaaatatggagtgttgtgagtttgtctcaggcaaggcttatgtaactgaagctcttggttttcatatctgaaaatgaggatgataatatccgctttatctattgttacaataattagaattgatgaacttaaagcagtttcacttaaaaacttctaaataagtggtagctgctattattgttaacatatccattttatggggactacagtttatctgtagttaaggattatcttagcctttgagctttggagcataatccttaaaattttaaaggctttctgaatatattcagtgaaattgtatttgggtgtcatgattgtaaatttcgtggattgattagtatttagaaatgtgtaattcactaggatcttgtgctttggtaggtagtagtttaggtttaataaatag

SEQ ID NO: 60565 - DNA, 1303 bp, Homo sapiens
taaaactgagtattttacttattgcatgcatagaagttgattttcttttcttttctttctttttttttgagatggagtcctgctctgttgcccaggctggagtgcagtggcataatcttggctcagtgaaacctttgcctcccaggttcaagcagttctcctgcctcagcctccggagtagctgggactacaggcacccacgacgatgcctggctaatttttagtagagctggggtttctccatgttggctgggttggtctcaaactcctgacctcaggtgatctgcctgcctcagcctcccaaagtgctgagattccaggcgtgagccagcgctcctggcagaagttgattttcttaaaaaagagagataataggaaaacaagctcaaaaatctatttggggccttatgcaggatgttggccttagcctgaagaaataaaaactgatgaagcgcattgttagcagagggatgacttgatcaggtttttgaaaacgaatgttcagcattgaggtaactgaggcatctggatatgctggtctgggcccctgggagccgcaggagataatggagatagagattctatgggctgagaccattggtaggttttatggtgttgaggaatacttaacactgattttttttttgagcgctgttaattaaatgttaaaatataatcggtttgctttagagaaaggcacgaatggattctggggctctggtatggaagttattttcgcagtgtaggtgcaaggtgagggaaccagatagggaggggagatgggcgagggtctgtggagaggggctggagtgaaatggtttgagagccatcatgtttataaaagcaatagaaggtacggtggggtaatactttctatttaatgcatttttcattttatttctttataactaatataaggcacattttacatttcagatgaatttacaaccaattttctggattggactgatcagttcagtttgctgtgtgtttgctcaaacaggtaaaaacaaaaaattttcttagttgtcttttcatttccgtatcttgtattgcgctttgaccagttaggttcatatgagaacctaagtcataatcatgctgctccttctggaagccctgcaattgttcctcttactcagagaaaggtcaagttccttcatggtcaggctcccctcacccctgccacctgggatgatgggaggcaagttggctggtgaagtactaaaatgctagggattgaacacactgcaagaagatcttttgagaacatgagagtgtgtaagtgaacagaaggcaaaag

SEQ ID NO: 60566 - DNA, 1049 bp, Homo sapiens
cttgaactctttgcctcaggcagtcctcttacctcagcccctcaaagtgctaagattgcaggcatgagcctaacagcaaagagttttgagcatggactttgtgccaagtatttctaggtgcaatagctataaataagatacacccaggccctattttcttggagcctagaatccatcagggaagacatgttaacaaatagttagaagtgaaatgagtgttacaaatatgcctgtataaattagggtgtccaatacctggtgggctctcaccattgcaggctctcactgtaatcccattgcatcttcctaattttctgcaacccctaagccgtacctcttttcctaggagttcttcctatttcagaaaaaaacagtcatgcatgaatgaactctctttgctttctcacctcctgctctgccttagaagaaaggcaccatgtctctgtttagggtgatccacccccttgggctgcacatgccatccctctttgctccaaggaggcctggcttcatcactttccttttctcttttcctgtgtcttcacctcttcaagtttgcccccagttctcctttcttcctaagtattcttttcatcccaatcacatccattttcataagttcggttagcacctagattatgacaactctcatgtctgtgtctctaactcttgacttatctcctgagatccatactcatgtcctagcttcccaataggcatcttccctagattttgcaataaaacaaacctcattttttcccctaaccccattctccctcgtacatcttctttattttaaagtgatgattattctaaattcctttctttctcccatccttccttctccaagtaagcagcagatccctcatagctaccttctaatcattgtttgttcgtcttcttgtttgttgctgttatctgaatttagacatttgtcacctctcacttgaacctttgcagtaaattctgtatttgtcttccagctcctgtcttgccccctgtccttttctccactgagtttctgccatgtatatgtagaggtattacta

SEQ ID NO: 60567 - DNA, 2990 bp, Homo sapiens
atgctgctagtgtgataagctgaaacatcttgtaactggtaaaagtttcagagaacttaactttctgaatatgtaacaagctgcatgtatctgaaagggttcatttagacttctgttagatattagcagattttctcactctgccagagagttaggatctgttaggttgtgggtggaatcctggagattatgccgggtaaatatgtaagtacctgtattgtattagcagtgtttactctgacttggttttaggttctgagagtttggctggttattttttcagaggtgggaggtatggagtagagacgttaagatacagaaaggtacattcgtcttctgaatcctgaagtgttatgctagaggtatctatagctgtggaaaactgaaaagatattatggtatgtacccagcttaaagggggtacagtccgtaaaagtcagaatattagcagccttccaatatgtctgtcggtaggtgaaaaaaaaagtttctctctttcaggagctgtgtacaaaaggatccaaactatactttgtacatttgttattgttttaaaagtggctgtgagtttttagaggtcagctaactttaaacttgccgtttggtttgtgactttagaaggtagagttaactatatttagcaatatgcttaagcgtgtgcatatcacctcatgaaacgtgtgtgtgcatgagaaaagctgcctccagtacacatacatatgtatatacacacatacacacaagcacatatatgtatgtatttcttataggaccaatctcattgtacataatttcaaagcacaggttcctatctccagggatgcataaaaagactcactgaagtatagggagaaaattttaggtctactattatgtttgttgatctcatcactttaaaatttaaaattttgattatgattgataatcttactatattgctgtagaagtacatgtatctgaatttataaattgcatttattttgggtacaggtatgcctagaatttttttgctgataaaggtgagtggtcagaaagctttgcagatccctatatggaggatgatttgagtggggttcaagaactactgtatttgggagggagaactgataagacttgataagagaaataaaagaaacccagtgtgacactggtttctggctaggaggtgctgttcactgaggtgagagggtgaccacaagctgggggtgctggttggctggagcagaggggaaatgatgaccttatgaggccaagtttttttttttaaggtgaccatgggacataggtggagatgtctaaattgcagttgaatacacagattgagagcttaaaaaaagaaaaaactctgagagatttcaatttgacaattcttagtctattgctggttgaagctataggctgtgcatgcaaacaccaaaggagggtgtggagtgaaaaacgggctgaaggaggacctgggaacacttttaatagtcaagggggggtggaggaagaggaatctagaaaagcatttaccttccccagtttcttctctgaacttctaattcctttgagtggcatttttgtgagtgacataggtatttctgggtttttccagtgattggcatgtttgagttaaagacagaaagacttcattggtcacatttctttgtggtaatttattttcagatacctgatcagagaagcagtttgatgtactaaaggcttctcgattgggagacaggaaacctgggtgtcagtgccgggtctgccactgaatttctgtgtgacctttgtcagagtactgtacttccagagcgttggtttccacatctaccctataaagcagcctgcatgtttctctcattctctcgttcgaggagttggaggatagctgctgcctgatgtaagtagagtgcagttctctctccatgagcaactttttttttttttgtatcaccagagagtgtaggcactgtgccacttactctgttaaggatacctgccagcgctgaccagcaacatctgtccctgtcagctctgcatcaggatgtagcttggctgtacattacattttattctatcagtacattgagtaccagttacctgaaaaatgctttactcagtggacatgaatcaagaagttggcatgctctttgatgttgagtctgttgtctaattggaacaagttgtgttcagttcaggaaaacataaataccaaagagtgttttatacaatgtactgtaccataaaatactgtaccatgtaatattccctaacaatgttagaaaaatctcagcattggcttgtgtggttttggaacacgttgtgtaggagatgaggcctgagcttggaatggtatgagcgaaggttggatgacagatggttgtcacattcaaggacagcatgggaagaatccaatctaatttcacagatagtacctggccactttgttacctattaggagttatgtataatatcatatatatcagaaggatatgtgaaggctatataaaatgaaggcctgggttcttgccctccaatactagcctgatgagagacacagacatgaatacaattagttacaatagaagtttgaatagaaataacactatattattaagcatcactgaagatttgtcattcactctgctgggcactatcaaagctgttttggaaccacagagaaggagtagttaattaagttgattgtggttggtgaggagatgaagaggcaataaagacagaaaggaagaagaaaaatcagcattctattttgtgtagggagtatagtttcagtggagtgatgaggaaaatatttacatacgaaattaggtatgtaccatttggagtatggaagtcacatttttctgtataaatgtttattgaatgaatatgtaaataacttaagctttcgtaatctatgaaattagcaatagattattcttctccatgtacaatattttatggtttatgtatgattttcttcatattatgatttcagtgcttct

SEQ ID NO: 60568 - DNA, 2025 bp, Homo sapiens
ccgggctgggcaagcgcaggtgggagccagcgaggccacccggggctcggcgtttgggactcggcgctcccctggacgggtccggtgcctttgtctctcgctccctcgcgagctgctgtccttggagcagcgtcgagccagccgtcggcgcccgcgacggggactggtctcctccggctgccaggaggcggccctggggccagcgccgcgggcgggggcggcgggagccgggtagaagttggcttagtggagccgctggggaccgggggtgcggtggcggcagtgcagtccacttccccgtgtttataaacgtcaagagtcgccggtccctgccgggcaccccgggaccaggacgcatggccatggccagcttgtgctcagacccggtccgcgagcctgagagcccggcctgtgtctagtatcattttaccgcgtgtcatttcttaggcttcataaattggatttatgagactcctactctctaagtaacttttatttaatcaaattcgtgcttttgagtccaaaactttgcactcattggtatgatcattagtaagttgcattctctaagcttccgtttcctcatctgtgaaataggaacagtaatatctacattaataattcatttttataataatgacagtgagggccaagtttagctctaggcattttacatgtattatttaattctggaaccgctctaatgagattggtactgtttcgattcccattttccgagtgaagaaactgaggcacagggagcaaaagtaagttgcctgtggtcatcaggagctcctggagaaggcatggggtctagttccagagtccgcgtttaaaccacaagtaaccttcctaactatagttctgaaaatcaaatgcaaaatgtaaaaaacttagcttgagagtagatgctcaatgagtattgactccttttcagcccttcttttatagtaaaaagatgttaaaaatatctcggaagataattggtaacatcattggtaaggtttctttgggccaacatgccacatggttaacttaggtgggtagaattactaggttatttcgttttgttttgagacagggtctctgttgcccaggctggagtgcagaagagccatcacagctcactgcagcctcaacctccgaggcttaagttacttttccacctcagcctcttgagtagctgggactacaggcgcctgccaccgtgcccggctaatttttttattttttgtagagacaggatttcactatgctgcccaggctggcctcaaactcctgggctcaagctgtcctctctcaccgagctcccaaagtgctgggattacaggcgtgagcccctgaacctggcccttaggtttttttatttttttttttttaattgtagttttaatgctacaaaaataacatgctagaggaatttagattagacacctttcttaaaccacatacgtcctttacgataggttatacagtagaccaattttagaaatgattaaggaacttcagttggcagttacctgttcatttgtggacatcaaggcccagaggggttaggacttagagtctcactataattctcatatttttaaataatgttgactcattgatcaatattatataagtgactgaagatggtgaagtgttaaataaaaaacattggtattttcattacaggcatttggggagaaagtcattttacttatcccaaaattgagtatgaaggtggaagatgttattagaatgctagttaaaaggacaaagaatgtggttaatactttaattctgtaaacaggaagcaaatagattgtttaactcgtctgtgttgacttcagacctaaacctacaattttaagtgtttgtgattttcttaatgtaaagttctatattaaagttattttttaataccctcaacattctgcacatgagaagcatggaatcagcaattctgaaagtcactggatttagtaattttaacaattaggcagctttctggtcagtataatttaatttaaatcagccccg

SEQ ID NO: 60569 - DNA, 1025 bp, Homo sapiens
catttagttgatataatcctaccagaaggaaagcactaagaaacactcgtttgttgtttttaaaggcaacagacttaaagttgtcctcagccaaggaaaaatgatactgcaactttaaaatttaaagtatcttgcactgataaatatatttaaaaattatatgtttataaagttattaatttgtaaaggcagtgttacaaaatgttcagtttatattgttttagattgttttgtaatttttaaaggtgtaaaataacatattttttctttatggaaatctataaaactttctgtagtaaaatgttttcattttactggtatattattgcttcatgttttgtaccatcataagattttgtgcagattttttttacagaaattattattttctatgacaatatgacacttgtaaattgttgtttcaaaatgaacagcgaagccttaactttaaatgacatttgtattctcagacactgagtagcataaaaaccacatagaactgaactgtaacttaaattccaaactatgactactacattccaaagaaacagttgaattaaacattttcataaaatatcccacacctgatggcttttattatattagcactgttctagttaaagaagttggtgacatgccactatccaataacttccaagatttttaaaaattctcttttttaaaatatcctgataaggagagaagattaagaagacattttctgaaagtagaatctcaactcacattggaccctgtcatgataaggaatacggaatttgacgttaggaatgggaatgatcctaaattgtgtgtcaaatgttctatatttcatttggtaaagtttcttttatcatattcactcataacttggtaagttttgttcttgcagaaaatagtaatgaacctgacagtatttattcatgcacccacgctgcatttaggtaatgggaaaagttgggtatgacattacaactggctgtttggtaattcttaggagagttttattccatctaggaccagaataa

SEQ ID NO: 60570 - DNA, 1517 bp, Homo sapiens
ctaattagtgccactcagccttcccctaatcaaatgtccattttgcaagagctgagagcagggccttaggtgcccatgaggtccccaagtgtgcacacttatccctttccactacgtatttgggttcttggtgctcagcgcaggaagcttttgattagtgagacttgaaagaagagagataaaagtgtggtaatcctggccactctccctaacacagttctttgtcacagcaggagatggcaacttcatctattcccaagctgacgaaaatcagaagggcaaagtggctcgcctggtgagccctgtggtttattcccagaactctgcccactgcatgaccttctggtatcacatgtctgggtcccacgtcggcacactcagggtcaaactgcgctaccagaagccagaggagtacgatcagctggtctggatggccattggacaccaaggtgaccactggaaggaagggcgtgtcttgctccacaagtctctgaaactttatcaggtatgacctcttcccaaggctggggagggcagtggctgcaggaatgctgagatgatatgttggaggctgtgcaaatgagacatgggaattattccgaaattatttccagtgtttcccaaccctgagatattgctgcaatgataaccaccttaatagcagatttcacagtctcctagattgcaggaatagaaccaatttgctgagaaggaacacaaagggcttccgtgtcatctatttctgggctttcacaatgtatcattccttttgtttgctgctttctcccgttttaaagtttgtattataagaagagagtgtaaggagaaggtgcataccatcaccaggcagctaatgtggattgatgagtgaagtctgtgttacgctgaatctgatgaatttaatttatgtgccgtagctggagctgaacaagcatttgtaaacactgccatgtgagatgagcatttcaatactgtgaaaatgatcttattttgttaggtgattttcgagggcgaaatcggaaaaggaaaccttggtgggattgctgtggatgacattagtattaataaccacatttcacaagaagattgtgcaagtaagtatgagctgctgtagaaaccaatggagtgcttgcccagggcaagactcttgccaatatgatggtctttgttttgctcatttctacctagaatttcggtgtggcctctcggcacatcataggaaatgcgtattctggtgcaacagggcatacaatcagcccaatttacctgtgtctgccccgtcacctaccctaggtccttcataatggctgcttgatacctataaaactccacaaataatgcagaatccaaagatgatagctaagaagacccagcttacaagctatagatgccataccgaaacattttgatgaacagtggaaagtcagacatctggataattccaaatatctgggtgtataaacaaaacagcaggcctctgaaaactttgatcagaataagtttaattaagaatgcat

SEQ ID NO: 60571 - DNA, 1048 bp, Homo sapiens
tttttgagacagggtcttcctctgttgcccaggctggagtgcagtggcacgattgcagctcactgcagcatcgacctcctgggctcaagtgatcctctcctcagcctcccaagtagctggactacaggagcatgccactacacctggctaattttcttatattttgtagagacagggtctcaccaggttgcccaggctgatcttgaactcctgagctcaagtgatccacctgtttcagcctcccaaagtgctgggattataggcatgagccaccgtgcctggcctaaagtgaaggagactctctctctccttcaaaggaattataatctaggtactactggcaaaactatgcgcacacatacacacacacacacacacacacacacagaggcacccactccaattacccaaaagactaagtaaaaaaatattaggtcacattctcatggttaatatgtgtacatatgcatcatcgtgatcttcatagtagccatgcagaatgactaaatgaggtaagcattggcatttctgtttgagagtagaggaaactaagacttgaatggactaagtaacttgcttaacattatccaggtcactcctgcaggtcaaagctacaaagctacttctggggtctgtgcttttttccaccatatgctgcctgcatcaccccagttttctctctgttgtaccagaatgcattgattcattttaatgcaatctgttcactctgtattgtgatttactatttacttgactctttccctcactgtctagagggcaggaatcttatcaccttcactccctttcacccaagcacctagcacttatttgtgttatgaatgaataatagccacccatgaagttctctccacactggactggatattagaaacacaactgctcatcattagaagatcatgctctgaactcatgaacttctccttaaatgtttgaggcgagaacagtgtgatttcaacagaagcgtgaatctttaaagaaagcatccacagtttctgtgccatttcattgacaggttttattttaaatg

SEQ ID NO: 60572 - DNA, 1019 bp, Homo sapiens
catatgaatgactagtgctcagtgttgaagggtgcatttgagattctacaaatgtggcaaaatacttacctccttttgtgaaggctttgagaagaatccacagatttaaattttacaggggattggaatgccctagggggaaaaaaaaaacctgggaacaccagaaattatttgaagaacaaattcatagacttcaaagtttagattagattcctacaaacatagttttgttattagggtttttttgtactttatatcaggctatttacaaaaatggattggaggtggcacaaaactaggcacagttaaaaccacattctgaaagctggtgagcttttagttatcactcttgttaagaacaaactattcatcttatttaagacatttaatatttttccttgttccagcttcattatatgtctgttggcagtaaaaaacatttgctatgctgatgtcatagggttactagtaggatcaagtagtagataggaaagcctttttaaaaggtaaaagtgaccctcaaaataagttatcattattatgatatctttaacaagttggtgatttttagaacatttggaaatatgaaactaaacatacgtcaaaactaaatctattgacccagtaatgagatgatttgcacatgatacaccctgcattttctcttgaaatggtcagtatttgtatagtcaacttccaccctgagaaagcttaagaaatcgatgccttagcacatttgcttattgtgaaacatctttgaaacccaagtaaacagttttcttttgtagagtatagggatggttaagtcattagaccagctacatagtcctggtagaaaaaaaaaaattttttatttagatttttattgttttatgtataattaggtaaaaaacatcatttcataatcttaacaatacagtatacagtcacaacttctcatgtgaatagcaccaagactgacccagttcatgagttaattctggatcatactttgcaaaatggtgaagtttttgcagtgg

SEQ ID NO: 60573 - DNA, 1047 bp, Homo sapiens
gcagccatgttttttttttatttaaaaggtcattgcttgtaaccaatttcatcacagggttatttgtaatttgcactgttagaacagagcttcgccttgttctctggtgaatctccagagttattacagttatgcctgcgcaggtatttccctatgtgggtgttactttgtcgctgcagttgttgatgatattttatttgaaaacatacacttctctgtgaggttacaaattacctcttttcttcactttatttttgtgcttggactcagatacattattttgttcatgccatagggattgaagccacagtgtgtaaaattccagattgccattgtaatactgttcatccagtttttgtttttaagaggtcttcatttaaattgtgaattagaggggtgatttttattcaggtcaagtgtcaaacttgccgggatgaacttatttagttgttgctctgggctggtcatgtatgcaatcttccttgaaatatgtgacctgttagagggttttatcttaaaggtaagagtgattctgtttagtaacccacccttttgcaagttctaaaaagagaaatggagtaaactattaatggtgaagccaatgtttatgtttcttcctggtgagcatgatagtatgaaatatgtcagtttgctgatcccaaactcattcactccttttaagttttcagaccccatatgctgataatgtcatcattggaatgtatccagatccaactagatacttgtagctgataaagtttgaggcgaacagtgtcagaaaacacacagcagagaaaacaagtccttcaacttcttttttctctgtcagaagcaaattttcaggcctatgggagaaacaacttaaaaatacacctgaaatttctacaagaccttgcaatttcccttcacatctccacaagcagcttgtcacagaacagcacgagcttaaaaagctggttactaaatcctgctgcagaatgccagatctttcaagactgtttgacacatgcatatagtttacactgagtgaaaaggaaaggaaaatgt

SEQ ID NO: 60574 - DNA, 1111 bp, Homo sapiens
ggtatattttcaccaggctccaggaaagcactcacattcttgccttggtctctcaggaggctgactttcagagatcacagagccctagtgaggtgttttgggtgcagtagcggggaggtcgacaaaaggtatcaccctaagcaattgaatagatttccatgggacattcttgactatagactggtattcactggaaagcacatttgattggtttcatgtattaagatctggcagtgagcatttttcagttacatcttctgcaatagtatttactttgtgcaatttttcccagagaccagaactttgcagtgactaattctatgaatgatcatggtaaaactcgctcgtaaaatgtgatgcctgtctttgattccactcttctaacaacatgcttttgcaacaagcaccatttgtttggttccacttgtgggcagggcctatgtgtttctaggacattagggccaccttaaatccatccatactttatttccttgaatttaacaagaatgtacagcccccataatgctgtttaaagtgatggggtggtagtattggtgtgggggcggtctgaggagggaggtctagaacgtttattgctgcagtgctgtcacatagcaaattgcctaacctagtggcctctaataacaagcattgattttttgctcagacatctacagagaggctaggggttggctgatctaggccaggctccactgggcttgacttataagctgcaggttggattcatattcactccatgtgtctcttagactgtgggcatgttcttgttatggtagaagtcaggagcacaaagaatacacccagcatacaatcagtttcaaactccttttgtgtcacatccacaaacatcctgttggccaaaacaagtcacatggccaaggccaacaacaatggagtgttcgttttcttttgctacaaaacaaagtaacacaaactttgcagcttaaaacaacacatattgattatatcaccgtgtctgtgggcctggagttccagcatgactgagctggatcctctgctcagggtctccctcggggtgcaatcaaggagtcagccagactgggttctcacacagaggcttctactaggg

SEQ ID NO: 60575 - DNA, 1057 bp, Homo sapiens
cagcatcaatgtcttcaaattctgacttgtcccaaagcctttcaacctcacttctcttacccatctttgataggttcaagggctatgtctgtccacaatggaagtcacagccacatttggctctttagctttcaattaattaaaattaaatacatctaagaattcattcctttgttgaattagtcacacatcaagtgcttaatagccacttgtagctagtggtaaccacagtaactagtgatatggaacacttccatcatggcagacagttgtgttggacagcgttctaggagaatcatcacagagatagttgccatatacacactctttctcactagccagggcttgggacccggtttcttatagatgggctggaagtcttcctcttgcctttctgaatgaagctgtactgacccagtcaggcctgggcagcagtcgcttctttagatctccatgggttccaccctgcgtcttgcttagctttcaccctagccttagccacatgggtaacatgaaatggaaaagaatcgtgaatcaaacacacagaagctatccaagaaaaccacaggagtggagatgccaaagagagaagaaatggaaagagatgacttcagaagattctaggttctttaatgcctcccattaaagttgtctcctacctcatgggtcttggtgactctaatttgtcttttctctctctctcttttgtggtttttgtttgtttgttttttatttggagaaacgaagtcttgcttcattgtccaggctggtttcaaactctgggcttcaagagatcctcctgcctcaacctcctaaagtgctgggattacaggcatgagttaccttgcattgtcaggctttgaaattgtctgagtaggctgacatcagcaatgtttaaagagaatgaggtaaaaggaatagaaaatgtttgagtatgttggaaatagaaatggttttatttcataatctgttgcagttttatatttatgtacatttgtgctggttgctacatgaaatatagcgcttttattgtaggttgtggtcaaagtttgaaaaa

SEQ ID NO: 60576 - DNA, 1040 bp, Homo sapiens
tttcgctcatccccaaaatgactatggaaataattgtatatgtgtgtatgtgtgtgcgtccagctaggagggaaactacaagtagtactttctgatttttgaaaaaagaacaactttacatacaattcagttttacattgtttctgcacaggaaaactgcatgtcgtcttctgctgtaactataaaacacatccacaaaagttgtcactggaatttgcttaaatgtttctcaaagcagaaaaagaaatgactggtctctggttcattcagacgcctgcttatgatcacaattctgttgtcttacgttgtcatattctgctgagaatagttcaacaaatactactcttagttgaaagctttagaattttcctttctggaatatttacagatgtgacaaaatatatttgttataaatgtattcttatcatatcaaatgacctgaaatttgccatttttgattaattcctggagattacaagaatgatgagggcagttgcattcagaagttgcatacagttgccctttgcagaagtacatggtgcacatgcttcagtgtatttaatgatgttaacagttcattgattaaagttcaccttggaaataaacaaactttcctattcatctttcaaagttgttacaaaaacagaagcaggttttttttatggccaattcttccttttcttccttagttggtggctctttgttttgaattcccatagtagctgtttatttttccgctttgcacaatgtctgtattagtgatttactactcgctgtctttcacaagacctatgagcgtggtggtttaattaaccatattttgtgcatgtttactcttgacattaagaaaataataataattgcttaaactaacaaatggaatatgaatccagttgagttactttgctccttgttacctcattccctcaggtgtttattgctcttgtagccatttgatgtgaataacaagaattcattatttcagagtattaatgttactcattggactccttccttcttccagtagatccttgctgtaa

SEQ ID NO: 60577 - DNA, 1049 bp, Homo sapiens
gaaataaagttttagagaaacatatttgctaaactaattacctactaatttatctatttgtgaattgttctcagtgtgtgaagaatgctgagtgactgaagtcaccatttgaaaattgtctcaattcagtaagaagggaagagattgttatgagtatgatgcaggtagcttaggaacgtaaacacctgttctgtttagcaatataagggggtttgaataaactgacatatggggatttaacacttaaattgttcatataattttactttaaaattctcagtcatcccataaaactgattgttttaaactccctttcctatatcctataatattcactttgtatttccttctaatacaagggaaagtacttgctttattagcctctttaaaatccagaacattcatttattataaattgtctgatacttgaatgtctaaataaaatatcccattgcttgcctaaggaatatttttccccaggtgaaaatatattttactttatgtgactgtgatgataaaattgcttagtatactttttgagtcaaaaattcatgtagacaatttaaatgtgcaagtttatgatccagtctctggggcccctgcattggcatatggaagcatatttaagtttatttttaatttcctttatggctggcatggtttctttgggttctgacacaggcataagcacacacatgtacacacacactagcagaaagcataaacagggctttcccaagttatccaggcaattttctgaatgagttgcaaaactgaaattaatatctatctttagagtcttcaaggacaaaagcacatcatctgccagccctgctcgatgcttagctctccatgaagttaatgtgggttttgtgtatataaaggcaaatgattcttttttaccatgtgcagttaaatcccataatggtacatgctccgatttaattagttctcatcatataatgggatgcagccagattgatacaattaataatgatgttagtaaaaacttccccattctagatacgaggaactccaggtgtcaaaat

SEQ ID NO: 60578 - DNA, 1068 bp, Homo sapiens
tagcatctctgtgatgagtttaatggaggcaggaccagtctgttctccgttgtgattgcagattttgaggagctattttgaggaggatccaggaggtttactttcttatccctgtttttccttgggatcaattcttacgctaaaggtcaatgtttgtgaaacatgctgtccctcctgcatttcttttttgcccagggacatttaaagtcattatcttgccttgaaaagattaaaaaatgttggcacctccgtctttgtggtgcaaagtgatcttgggctgttgaccaagctgacttgatccctggaatgtcttgatctaaattcatcttttcttttgttgctgaaagtttagggtttccgcttgctgaaattggatttatgaataaaagaagccaactttgctgtaggtaattatgtcagaggcaagttcatcggtgtcagtgttcattttattagagaaggcttagcttattcacaatgcatcttttatccccttgtctctaataaatgcatgattttcagagatttgcagccaaaagtgtgttattccaattaggttacttatgtcaaacataaacctttcctgtatatatgttatttttttacagctaagttcagtagaaaatccttatgcagacattgatatgtatattttaggttatgttttcctgcaatagtatgtctctggaccagtgatagtaatttgtgtcaataactttataaagcgagaagcagttgaagaaattagaacggctgagggccagaagtcctcagcagggaaaagaaacacacgtgcagcagattaaggggaaagggccaaggaaagcgaggacccccactttctggtgtctctctggtaactggaagggcggatatgagcggttcgcaggcaccagtctttaaagcgcctgtgatgttctcctgactggcgtgggcttcctgccctttcaagagaactccttgatcatgcattctactaaaacgaggcagccctgggaggcgagtcttgcgttctaattgcccagtgggttgaggtttggggacaataagtggatatcaaggaaaggt

SEQ ID NO: 60579 - DNA, 1054 bp, Homo sapiens
tgcttacttaggactgtgttcaagagcctccttgcctctttgttgatctctttaaataccaaacaaaagacaatgaatcttccaactcaggcgattccattgtgattgatctgagccaattttttgaggtaattgatgatattgccttagttgagtctgttagtgcaaataattattaatcaatatgctctcagctcttagttcagaagataattctaacacatgatttatgctgaacatttcaattgagctacctttacaagaggaaaatcaattggcgagtgttctaaagcactttaattatctgcagctccacgttcctccgcagccatatttacccagacagctagttgtcccatcctagaaagggtcacaggaagtttttcatcgccacggtagagagatagtatatcgttcatcttagattgactatgttggtttaaagtaatttagtggaataccttaaaatcaaagcattgctgctttcctttggagagcataattaacattgcccaggaaaaagaaggaacgtgttactgatctccattcagttggaaaacagtttgccaatgtggatagtgaatgtcatgtaagtcaatttagccgtaaaacgtgaggagatctgaatcacagaaaggaggttaaggtgtaaaacattttaggggctaaatttacatcactcccctaaactgttgtttagattctttgtgacttccttgtgctaaggctttctagcatggaatttgttgtttttcccttttagacaatgtcttgatgaatattgtggtttgatttttcccccctgtgagaggagatgcagaagaaattaatcaccactaggaatgggcctgcctttgttcaaagtggagcttccaagcatctgtttttgttgtacttgtggtgggtacaggaatgtgtgggctctggcctgggacttttggacatgtttataacagatggaaattttaaatgacagttccctgcattgtcatggtggagccacttcaatagcactgagatgctctgttatacttcttgcccagtactctgtctc

SEQ ID NO: 60580 - DNA, 1056 bp, Homo sapiens
gtgctttgtttcataattaagaggggggtgcatacccccgctaaagtggaagagctaatggcatcttttgtggggtttcttcctcatctttaattaaaaaatatgtaccataataaatggaaccattttttttcctggagttattttctttctgctaatggagtttgtcagtattttgtttctcagtgtttcaggcattctctgcaacatttcctactgccaggcccctctgccacagttgggatatcagcctcctaagaccgccttctatgattgcccttgaaaaaagagggaggctgagattattgagaactccagaaaatgggttactagattttttcattttgattttgacataaagtgggcaggcccagctgaaaaagtgaactaataattcctatacctttaaaggattttgactttttagcgtgaacatttgaagtgagttcttcttcctgctctaggcctttaaatactatggctacttttggcccatcctgaaatcctgtgatgatttgaactatttattcggttttggttgatggacttggaatgcggatctgatcttaaaataggaatcttgatgggctattattttcaggtgccactgattatagaacagttaggttttcaccctttttcttcctctttctggttttgcatcccccaccccacacgacatccctcctcccccatgccatgtcccatcccccatttcccatgccctcctcatctcctgtcctccatgacctctccaatccatctttccactcatggctgattcttctttttttcttcctcttccaacttcttcattgctgtcacgaccttctttaaaataaatttgaaaacttcaaaaaaaaatttgtttttctcttggagaagtgccccaaatggcaaagtatttcccgcccttcccagttttaccagtgatttgctaagtagtccgtctgttacttgggcacatctcagaattgagtaggtttgtggagggttgggtggggacggagtggttagaagctagtctgctttaaatggggcttagagatactctct

SEQ ID NO: 60581 - DNA, 2432 bp, Homo sapiens
gcttttaggtcaatctcttaaagtttgttgttttgagacaggaatataagggcgttgatgattataggatctggctcaggctgtcagaatgagacgacttctccctcctgaggctgacctgcttaggagtttgaaccatatcaaactgtaaggatcaagtacaccctcaaggtttaagaacaagcttttaaaatatccacctctattgtctcgcctctgatgtagtttaaaacatgtcatttagaaaagtgattaggctgggattagagccatgaagacctgggttagaatccaggggctgccacctgctggctgtgtgtccttgagtgtgtgacatggtctctgagccccagtttcccattcaatacaagcagtgttcacacctgtctcacagagatgttacaaaggttaatgaggaaatatatagaggctgggtggacctaccttgtgcataagaagttattaatagatggctgtcattattactgttttcagctatttctgtgctgacatgaacttgattatgctaagcccatacaatttctctgtagcagtctgtagctcatatggtatctcttgattgttttttatcctttagagttcttgttaagtaaaccacacattatggatatggtcaaatttatctctcaccctgttcgccttcccccacgtaaagagctaagcagtctcctgagatgggtctgtgtcccttggttatttttagaaactctcccaacaataaagaaacacactgattcaatagtatctaatatataacctgttttcaagttcccttaattgggatagtttgttttcgatctgggatcctgttaaatgtatgcattgcttttggccatcatgtctttttcagtttcttctcacctggaacgttcattctcccacccttcccctttttatgtccctcttgttggtggcattttggcggaatctgggccagttgtcttgtgtaacatcctgtcctccaaccctgcctggtggcttcctcctgccctgcgagccccatgaggtgatgggacagtgtggtctacaggccccgtgtgtttcctgctctgcctctgctctccgaccccacacgtccagcttcatctctcagaacctgcttctcttccaactgtgggacttaccgaacacagagggttactatgagttcccaatgagatgactaaagggaaggcctgaacaattccgggcccacggtacacctgcgaaaaggttttcggcagctgaataggcgcaggagtgctgcccagagaggtgagaggagagccgggtgggccaggcgaggatgggagcagagagtgtcctgagtgtggtcaaagctagcaaatgcttaagagagcggttttgtttttggtttcctttcttggacttatcgtgctgtgatttggaatacagaggagcaatgtgactctgtaaactgaggtagcagattcagcagggctgatagagcaggaaagctccctttgaaggtagaaattaagtaaagtgctgatccagttctgagcatctggcaagtgctttctggaccttggggacgctcacagacctggggtaccttcacataggtgagaaccacactctcccttcaccaccagatggatctctctctctctccatttattactatcctggttatgccagaaagcttctgctgttgctgctgtttgtgttttcacatttactgcaagagcagcgaggtacgtacatagaaggttcctagatcttgaaggggtctcccatttggggcctcatgctgtcagtccctagtaggagggaccgctttctgcagggcaaggggaaagtcctaatccttcctgggcaggccttagttgtccttaagccactccagggacaaagactgactcaaataactggctgctggtcggtgctagctgttaatacatactttgtgagggcttgtgcaaaatgaaaatgctgggccccttattcagagcgcaagaaaaaatccctttaaaggtattaaaataaaaggcatgtttctttcttctgtggtctccttcccaacttgtcatgatgtttttaatttgctattgaatgttactctaagaaaaataaaataaacttttaaatcattagcatgaattttacctttcatctttatatagtgcaatgctagaggtttttaataaaatttaccatcttaaccatttttaagggtacagttcagtaacattaagtgtattcacactgttgtgatgaacgtcagttttaaagcaaatgtaagagcctttagctggtatgtagaatcactgaaatgacataactcgtatttcatagcttatacatgcatgtgtattgcattgtcaatagaatggtgaaacacaacacaaaactaactcagcggtttgtatctcatttctttacacatggacattgtccccacacccttg

SEQ ID NO: 60582 - DNA, 1014 bp, Homo sapiens
aactgaaacagtatgtcagttgatttttaaaagtgcaggtggttttctgatcgttcactatgatttcctttacagcaagggcatgagagcaccatttccccacttttatatctagtccgttcttgaaaatgtgtaacaaatgactatgcatatatatatatatagacatacatacacacatacacatatatataaagttatatatatacacacacataaacatatatattcacagaagttgtgttctcagaataatagtaaaataaacaatgatgcttcatgcaggcactggtgataaactccactgtgtcgggatgatccagggctgagacacagatcagcaagggccgctgccatttccctttcagatcactgtagagacaggtgtgtgcagacaggaagcacccttttccattaactgtctctcctgacccctctctggactctgccagcgcttgcccatggccatcagggttaagtttgcctgtgtggcttccaaggagagcaacggggaagggagaggaaggacgaggagataacaagttggttggcagcccaggcaaattctgggacgtcacaggagcctcagtccttaggagggagtgagtcagaggtgcttctgcatggaatgtcacactctcaggagcacacacctgtagggacctcagctgcctctgaggggcctggctctgtccccaaagcacagcagctgggggcaggcaggcagcaccaccacgcagtgactggtgttagttgacgtgaccacacgcaggtaatttaaaagtgcagctctcccctccccctccccagcacaccctgactcccttccctgccttctttttcttgctagtccttatggcattatgatgcggcataaatgcactttaaaaatgttatcatccgtctcctccaactagaatgaagttgcattttggagcggggcagggggtgttgtctgttgtctgtttcattcactgctgtattccaagttctaccacacagacattcaaatat

SEQ ID NO: 60583 - DNA, 1064 bp, Homo sapiens
tgaagccataaataaggtcatggctaattttaaagacttcttgtttaattctttttgttgattaacattgcccgaaaccacaatttgtttgtagaagtaatgtgtaatgggggttgtttatttatgtatttattttagccttagaggaagtttaaatattctgcagaaatgtggggataaatgaaagctgttttagactttggtcgttagcaggcaaataatcctccagcagagtatctgcatttttgttttaatgtctttcccttcatagaccactgaacttttaggtctttaaagagattttaggccattccatgatcaaaatctcctggagctgcctgggatttctttcaattttagccttctaacaaaagctccaagatcctgcttcatgtgcaatttggcacgataactcatctttttattttgacctaatcacttggttctcctgtcctttagacagtacaaacccatggcttcaagtaccaatcttgttggtattttgtgatcttaagtttgtgttattttcttccttgctcctgcataaggatggaatatcaatcaactattaataaaaattcatgaggatttatgtggagtcccattgtgagatgcattttcaacttcttgggagactttatcgagccctaaatccgcaatccagttttaaattaacttcccagatgttctagagcttttccttgggtaccctaagtccttggtgtaaataactatttgattactttctttctcttgttgtttcatgtcttcttccattttttccccaattggttgattttgtgtaactaaaggagatgcagtagttgattttaaaagatacctgttttcttttccaatcaagcaagttgagatatccttagtatttttcattaaaacaggtgtgtacatagaaatgtgaaaattataaactttctgtatcgttacagaacagaaagtaactagataattcatttgttctatggctatgtaataactattttgaatatgcatttcacattgcataaaatggactccaatgttagagtgaattaatgtagattgtt

SEQ ID NO: 60584 - DNA, 1308 bp, Homo sapiens
gtgacaatgacattttctttaaaagctcttacttggtttctgccatacttgtgaatgctgcttatagaaggtcaaacagcatttgaaggccatgaatgtcccattggaattgttttcctgggagaaaggacaccagaatgctggcgttgtcagttagtaacttttggaggaagtaaaaaaaaaaaaattagttgacatattattgatcgttgataaaagcactcatcattttcagcaccttccacatccactttgaaaacctgaaaaatagtagactaccacgtagcagtttttcacacagctcagaagtcccacatgacatcaaagccaggagtcagatgggttctgtcttcccagctcctgaggcccagaagtggttgctttaaaccccagtttaaatcatagtgccctacaagagtctaaatcttgcatgtaaatgtctgcaaattttcagtagcacttacatgctcagaacagcctctgtttctggactccagcatccccacttggagtctgtaccctgcactgtgctaaccccaaactgaaactcagcctcctaatttctgccaaaatgcactcagagaaacattctggaggagactttagtcatgaggatgagttacaccaagcagtaagtaactcagaatcacatcttagacattgctgtattcaaaagcccctctcatcctaactcaagcacagcctcagcagctgtcagacttacgatacttttatgcatttgtgccccagaagggtgattagactagataatttgtgagatgcttccaactcaggagagacataatttatatttttaagaaaaaggactatggaaactttagttttttgtaattattatttttgcagagaataagatgtccattaaacaaagattgatgttactaatccaaaaagttgggaattatcatacctgtaaagcacttcttcatctgcctttaacaggatgtgaatttggctgtgatgtcatggtatcacctccattgtctgttcttgtcaaagagaaagctacatagaaaagtgtttctcagacttgaggagtataggaattttttttttttatagaaagacaatctcttggtactgcagtattgaactaaattgttttgattataatgttacttaaatatgtgtaaaaataaaataggactaaactccttctgttgacaaccattatacaaccataaagccaaacatctttacaaattaaatacaaaaatggcaaagccattaccttcaaatgaacaacattaacttaatgtggccaataatgtttcttaaatctaaact

SEQ ID NO: 60585 - DNA, 1115 bp, Homo sapiens
actttgggaggctgaggcaggaggatcactggagctcaggagtctgagaccagtctggccaacatggtgaaaccccatctctactgaaaatacaaaaattagccaggcgtggtggtgcacacgtgtaatccctgctacttggcaggctagggcacaagaatcacttgaacctgggaggcggaggttgcagtgagccaagatctcatgccactgccctccagcctgggggacagagtgagactctgtctcaaaaaaaaaaaaaaaaaagatttaaattatgactgcaatcttgtagacatgaacaaagggcatctcaaattattctttttgagcatccatagcattacttaacaatctagaatgtgtatgacctgtcatttataccactgatcttctatagctgcaagaaatcaaatatattttacaacatattttgatgaatgtttctatatgcagttcctaaaaaaggaaaggtttctcttatttcaactttgttctgatttcataggattcaagccaaaactcgagaatttagggaacgacaagctcgagagcgtgactatgctgaaattcaagattttcatcggacatttggctgtgatgatgagttaatgtatgggggagtttcttcttatgaaggttccatggctctcaacgctagacctcagagcccacgagaagggcatatgatggatgctttgtatgcccaagtcaagaagccgcggaattccaaaccctcacctgtagacaggtaggcgccaggggcaatcgtggtattgcttccaaatcagcttttatacagcttctgacaggggagtagaccattcatcaatcctcaaaccagaattgccttttattaatggcctttaaaaagctgttgtgtctaaaagtattgagtttacacaaattgaaacctaatggaaggatcagcagaggttttgatggcttttctaatgattccaacatatttcattttgttctgaagatggttttatacctgagaaccaacctctactttataactcaaataaaaagcaaacttaaaattatgactcttctacttaagtgatatgtccttttattgctaggagagcctctaggtgtggcaattaaat

SEQ ID NO: 60586 - DNA, 1039 bp, Homo sapiens
caattagtgctaaaagccatttattgtaaaagcaaaaatactaatgaatagaaatgttacaaaaacagaagtcttgtgtgttttatcttcatcgagcgtcatccattttaattagagaaaaggtggtgaacactgtgacaagagcctggaattaaaatcattaattgatgtcaagctgaagagagactgttagcatgaatttagtgacagcaggaaagaaattaaccttattactttatttagtatattacattattttgtgtattattttctatgcaggttcaaggcaatttcattatcataatggaacactttatttttttttttacaaaaaggaaagatgtatttatgcttgaacataacaagttgaaatgataagttctttattaagttaaaaatgacttgataaaaggttttaattgtttgaatttgttttttcaagtttcaaggataggaaacagtataaatgttgtccatcaatgtcgggtggtacaactgcctgtgataatctgaacttcagaatagttctttttagaaccaggaaggacttactgaaatgtttaaagcaatagacatttatgtcttttgctgggttttggactaatcagttacttctgtcattgttgaggtttggcccgagataaatgggatagagaatgctgaacaacaatctgactgttcagaaaaatgagtgactcttacatcttggagataatttgtgacctcagggtcacaataaaagagtaaagggggtatgcttttatagccctggccatctggatccattaagggctcaactgcaagatactcaccatcttttcaaagtttccttaagaagtcatgttatttttatgaggacaccaaacatgttttcttcctgagccaaatattttcttactgaaatatgtatctccacagagtggaaatacataacatgcaaatataaccttttggtcgtgttagaaagttcatattctcactttgtaacaagacattcaaatatcaaagaatataataaattcatttgtgtcttttgtta

SEQ ID NO: 60587 - DNA, 1097 bp, Homo sapiens
tcagtttttaaactatgatgaatgtttccaataagcctggctgtgaaaataaagaatagttgtttatggaaagattattaactagatgattgtggattatcattctttagtcctaagaaaaacccactccaatgcagatctttcttcctctagcatctaaagtattcagcacttagtcctacagatgtattaattgtttaataaggataaaccacaactcttgttgtttgtttttgttttgctaaaggaaaaactgctattgagatcatttccctcaagagttttctctgggaagttctaattaaaaatgaataaaataatctgattcaaaatactagtcctgacccaaactactgactgcagaagacacctgatccctgttttgaagaagctaacattcatttcattgggtatatgtcattaccacaaacaaaagaaagctcattttgtatatattgacaagttagaattttttgttattaacaggtttggcaaacatcgaaaagatgacaagattgagaaaacgggtaaaataaaaatacaggaatcctttacatcagaagaggagaggatacgaatgaagcaggagcaggagaggtagacttcagttacttgattaaacctccttagaaagaggttctttttttttttctttctactttcttcttttttaatgtaaagattttacatttaattactcttcatatttcctgtatcaacccaaatattgatggttgtgggtgaatatattgtaaagagagatttaaaaaaaaaaaccttatatgtatttgtgacatcaaagtggattttaattgctttagttaagatcttttgcataggaaatagaacagcatattagatgaataaataaacattaatactgaatttatgattttttaaaataacacaaaaagtacttaaaatcctgcctgatatatggatatttagtatattataataattttaaagaaatactcttctgaaaataaaactccgaagttttatatcacattttaaatataataagaattcaggaggctgttattcattatgttgtttttctttcaaacctgacacttatttcttgattctccttc

SEQ ID NO: 60588 - DNA, 1115 bp, Homo sapiens
gaactgaacagatactttaaagtgatggaaaccaactacaaaatttttctaacttgctatattaaggtttctcaatttccactctcctggctaatttagaggatgatctattatcagtttttattccatttctgattttgtcaggtggtatgttggtcattctgactttttaaggcaaacaataagctatttctcatgtagccaatactgtggctagcagtcagcattcattcattgcatgttgatactggtggacactgcagagaacattgttttcaataacccctttacacctcataataaccctataaggtactaattttagccctgttttatgaatgaagaaactaaaacataaaggtgtggagaagaacttaccaaggtcacaaggtaattggtggtagagtcacaccgaatttgaacaatggtcaacctcaaaggccgtgttcctaacactctcctgcaccatctgagccgtcttacccttccgggtaggttttgccacccctaaaacctatgtgggagccaagattgctatgcgacatggcattgctattgtgagtgctatggaaaaaagcactcacatgttactagcttggaaatgcagaagttagtattttttgaacctgactttcacgttttattcctacttgatttctatagctttctctgtctatggtctcttctcttcccaaaataattcttttttttttttttaattttgtagagatggggactcactttgttgccctggctggtctcaaactcctggcttcgagtgattctcccacctcggcctcccaaagtgctgggattacaggcatggaacacaatgcctggcaccaaaataattcttaaggatttttactgctaatgaaaaacttaccagctgtctcattcctctccctcttcacagactctcagacctgtctgtgtaggtgcgatggcagccatccctgctccagaacacaaacgaggacgattttaaaacaatgccctctttcctccggctctcttccttctaggtggctctgtgctgcgcattccctgcctcttcctgttcccaccctcattttcccctttccttactgcatgccaccttgtacctctatctt

SEQ ID NO: 60589 - DNA, 1026 bp, Homo sapiens
aacatacaggagtgtgagcttagcaaaaagtactaaaaactggacacggtagtgcacacctgtaatcccagctacttgggaggctgaactgggaggaatgctggagcccaggattccaaatccagcctgggcaacagatcattccattctctctctaaaataaataaataaataaataaaagcactgaaagcacagatttgaaaacattatctttgagatcaaccaaaattcttgtataatcttttcctacctcatttttactttgttatggatttcatgttagctattttcagactattttagcagcctaaatgattatatcttgccaaccatgtaaataattgttgagaggtaggagggacatgtctgtatcttagttatgcataagagtgaaagccccattgagacaaagggctattaaagcagtgtttgttcttttttgtgtgtgaacaatggttcattatttaaatttaaacatagagctcaagttagtggtagcatttaaaggttcattaataacaagtctaataaaaaaagttacaaatagagcttcaattaagctgcgttcattaatttagtacttattacttcggtctgtaaagatttcattaaatgtggtctctggctgtttcttgacagttgtttttgtgcccataaattatactctaggattacttagcatatcattttttacaaatcattgccatacaataaaagtgacaagttgttcagaagttgcactgaaactctcccataaaagttcatctaagatgatttataatattcaggcacttaatgttaaatataaagattgcttgattgttccataaattaaacccctaaacatatcaaggtgatggtttaaaattgaaaacatacagcacagccatttgacttttcaaaaagtagttatcctgcattatggatcccctctttttaaaaacttttttttaaattgcaaaatgtgaacaacagttttcattttcatagaattagttgatttacaatcctgaaattgacctcca

SEQ ID NO: 60590 - DNA, 1013 bp, Homo sapiens
aaataaaattctcagtggcaattccaactgtagggttaggaatgctgtcatttcgattgtgtagccagccctttcggtcagaattggtttttaaaaagccttcagcttcattttaaattgtccccatggacagaaaacagcatccactgtgggccgtcatttgaatgttaaaatcagttggacactaaaagcgaatttgcgaaggttcagaaaattgagggtgtgaccctcattgtgcctgctctgcaacattgtctagggaagggagggataatggaggtgacattctaccattatctgtgggagcattttacctgcttcatttgagggggatgggttaaagagaagtttagaatgtcaagtaaaagtgaagaaaggtttttggtaataactctttaaaagagtgatcctattgtttttcttccttcacccacatatattgaaaggttttttaaaaatgaaatagagctatttttagagtagagtgtctgaggagtcatctatttgaactttctcccagttgctgaaaccactctacaataccactaataaatgtcacctgattccttcatagcttttttacctcctcacagtcttcatcatatcagttattattctcaccccatgtattagtctaaaagctctaaagtcttcctgtttcatgccagctttgtgtgtgtgtggtttcctttttttggttttcaggaaaagctaagtttttctgttgccaagagctcatcattctaatgttaaaagtcagagtccagaagagcagatcatgttattcgacaccatctgtgtatcactagctgttcatttcctacatctttctttctcttccaaagtcaaagtgttccaccaaaataagaaataaaaacaatatttatgtccccagcgttcttgattcctatgcaggagtttgcagcgactgaaagtccagtcctcatttagttgtattatctttttacctaacactaacagaaattggtagtggtcagtggatttactaaatc

SEQ ID NO: 60591 - DNA, 1008 bp, Homo sapiens
gagtacctgtaataatctgtgatcttaaaaacattttttttttctttttttgctttcaggaattactcattctttcctataactaaactagcaagctatatttatgtgtgtttattttgaaattgcaaaatatttaaagccaagattattaaaagtcaaaggttaatatgaatgttttccatggtttattgaataaaaaataatttatagataggtacaaatatatccttccagagagttaaacatttcttatattaaagtaaacattctattaaaaagtaatggaaaaactctaccgatatatttactaagaagcaaaagggcttaggagtcctaatagtgaaaattgttgattatcttatattgctcataactactaatttaccttttagtgttttaacctcaaatgtgactcaaccatcaaactattgtacgaatagttggagggaccacagaataaaactaaggcagagaccagagataatttgtgtagattgtaaattacttgcaattcaacatttgagtggaccacttctatcacatatacctaagaaagactttcgtgggaagaagagttttaagtaataaagatcacattttgagaatatatacatatacatataatgtatatgtatatatacgttaatatacattgcttatacgtataatgcttatacatataatgcgtttgggaagatgaatatttctgtcataatgtaatatgcgaagcataacttagaggattgctacacttctctccacctccacctgattctccatctaaatccaggcagttttgtcactatgatcagattcctcacaactgggcctttccaggcccagtttttcccttttggcggcctctccaggcccagaacttccttaggtcagcctctccagacccagttgcagcctcctggtgtcctctccaggcccacctcttcctcccggctgtgaatatatgcagcccattcttgcaggatgaggagcatatttactatttttgct

SEQ ID NO: 60592 - DNA, 1101 bp, Homo sapiens
gtctgcagtttagcaaggaagagacttgacaatgcacattgatgtgcatgtctagcttctgttctaaagaattttaaattgccaaaaaaaaaaaggttttaattaagtgcaaagcttattcttggttgttgaccttagccttctcctcatcttcccttgcttttcaaatgagcttccaggttattctggttcttttagattattcctattaccggagcaaaacgatttgacaacaatttcatctgttgaaattttttttaaaaagtaatgacttagagtttttcctaatgcaaagagagaaaatagaccaaatctaatataagtttgggaaaaataaaaattagcaactattacttcatttattctttgtcttttccatctgcattccagaactcatcattgagcaaataattgttatgtacctgaagttttcgacagtgcatattcaggtacataattttcactaattcacactaacattttttttcttgtaaacctcccaggttctcccagcagagatgtgggtccttccctgggtctgaagaagtcaagctcgttggagagtctgcagaccgcagttgccgaggtgactttgaatggggatattcctttccatcgtccacggccgcggataatcagaggcaggggatgcaatgagagcttcagagctgccatcgacaaatcttatgataaacccgcggtagatgatgatgatgaaggcatggagacctgtaagtttataatggctgaaagaataataattaaaattagactctatttcttaaagtgagctccagggagccctggagttttctaagattcttcagggtaatctctgagatctctgaggtctaataatctcttatttcataataagacgatattatttgccctttactcacattctcttataagtatacactggggttttttggaggccacatgtcctgtgatactgcattagattgaatgcagaagcagatatgagaatctgtcttacaggccaatattaaactaaaaattctgaaaaaatatttaacagtgccattgttctcacttcttttggaatatatatattttttggtaaaaaatgtaatttct

SEQ ID NO: 60593 - DNA, 1317 bp, Homo sapiens
cacaattatagagctgccaatcatatgccatgtaaacatacatattccagtcttacgcagatgttttcattgtgagaaattgaattacataagaaaagaaatattttctgttagtagaaatttatcagtggtgtacttactaaatagtaatatgatttactgcttcaaaaaggctagaaacaacctagattttcttaattatattcatgtaaggatgttttatcccaatttttaaaaaatcaaaatcctgcaaacgtgatctgttatggtagagtcctaggtttttaagtcagctatgtgatgtctaggttaacatccaaaaagtgattctcagagtggtgattttgatttgaaagataatagtgccaatataaatgtttttcattgtaggacaacgtccggtattgctatcattagtcattcagaaaggcatattctttttttgatgctggaattagcttataattaacctgacgttggattagactatataatgcatatggcttcatatcttaactttgtgagcttgttctaaattcgttacttctaaaatactgccaaatcattccatagaaacaatggattatattgaactgggattgcattatagtcatcgattttgctttttatgttattgtatgacagtaatcacaggaaggtcttttaagtgtagttaacgtgctttgtataattgaccatttatgacttattataagtttggaatagtgttttaatctgtatccagtatgatgtagttacactacttagcactaattagcttcaatttgcctttttaacttgcagtagtaaattagttttagctgcttaaaaaatgtgtatcccacatatatatatgtaaaaattattgtaaacatggttggagttatattctttggagtataagatagattgtaaaaacgacatctaataaatcataagattaactgtattgcacggcagttaaccgtagccttatcccttactgagttgtttgttgttcttatgaaacctaaagtttattgaagcagagctaaagagaaatgttatgtgatagttcacatatgtaaaatagtagttagtttttacagttagcagtataagcaataaccccgatccaagtaaacagtcataaaaaccaaattgagctgctcaggtaaaggacctgacttcatatacaatgtcagttaggtaaaataagaaaaatacttaatttaaccaactcacagctactataaggaaaaggacagtttattgtgatctacaacataatgatatccaagttataactcagtgcgttagataactttcatggaaagt

SEQ ID NO: 60594 - DNA, 1053 bp, Homo sapiens
atccagttcttgcttttcaacgagaaggatttggacgtcagagtatgtcagaaaaacgcacaaagcaattttcagatgccagtcaattggatttcgttaaaacacgaaaatcaaaaagcatggatttaggtagtgagtacaatctccatgaatctttatctaaataagttttaaatgctttcaggataaaattgatggtcccaagcagatgtctgtttactttgagcaatagagaaaataaatgtgaaatgtggcaatttggcaaaaattagtttttctcccagtttgagataacgatattactcataagtggcatgtttacataatatgcaatatgttaatatatatgttttcttaagagaatggaaacaaacacatatgcatatcatgctatgtccatgtatctttattttacaaaatgaaatgttttaacactttggctatttaaaaccaatttcattgaaattgtatttggttggttgtgggatttttgaactagaagagaaaattttggagagaaaccattatctcaatccatgtctagaatttggttacttcatgatgtcttcctttcattgctgttctttaaggtttatttattggaagctttcatattttgataattaaggcatttaatcaaagtaataatttgagagtatttattatagaaagtatttaggagcaaatgagaggaggaaaataatcatagttgttcaaacaccaatcaggtagtgtctctttaaatccaaatccaccaaaaaaaaagtaaaataattaattatatttatacactgaatgatttaaaacctttgttaatcaactgtaacttatgctgttctctggtggctgtttgtattccaagactaaaagcattaatttatcatacgcataaagaaaaatttggtgatgcattgccttggctaattatgatatgctaacatataacacacatgtctgtgaaatgaaatgactggcatattgcatggagacactgcttttttttcctccttttttgattatgaatgtttgcttgatgtttcatagtatttgcat

SEQ ID NO: 60595 - DNA, 1986 bp, Homo sapiens
gttccaaagacattaggactttggatttccattcgcctaaaccaataacaacagtgtttattgatttgcacagtatctaggcgcatagatattcctcagactgtttggttaatgattgtcttctatatgtttggaatcactcctttgtagacattagtggaggttgaggtatttacttcatgatctgctatgatacaaaaggaactttgtattgaaattctggctgattaccttagggagttattaattttatgttaacaggttgaattttcatatggagtaatcccctatgtaggactctaggctaaacggagctttgaggctttgtgatgcattcctatgtgaacacatccctggcgaaaggcttttaaaagatacaccccaaaaggaagagcctttagagttgaaaggatgtcagatgtcatcagtcacactttcccatttaacagatgaggaactaagtcctgatatcccatgatgttttttgttttactttgtttttggctatttcctttttctaaaaatagccctctctggggaatgctgagatcttcattctttattagtatcaatttataattatctacatctgtaagcagttattcgaaagtctccagatcttattctatcctggcacccatggtgactaaaaaaatcaaagacgttaaatctttgaaagcagccttcaaaccacatactccagccaacttaccttatatgtcggggagttatggagcaaatacattaattaacttgacagaagttgcacactttctgtacttctgaaccaaaatttggatgcatgtttttctttatcatgagtcacacctgattaggatttccttagcttttgttggggtcagacaggattgtgaccaaaggcaagatttctctgtcatctcttttgacagaatttccacaatcatggattttgtaatagtcctggacattcatcagaaagtaacctgtagtggggctgcctacataggattcttcctttgaaaagccttaaacatttttctaatggttggtctctcttaactaacaataaaaaacagcaacaatgcagctgggcacagtggcttatgcctgtaatcccagcactttgggaggcccaggcaggtggatcaactgaggtcaggagtttaagaccagcctggccaacatgtgaaaccctgtctctacgaaaaatacaaaaattagccggatgttgtgttgcacacccgtagtcccacctactggggaggctgaggcaggagaattgcttaaacccaggaggcagagcttgcattgagctgaaatcgtaccacagcactccagcctgggcaacagagtgagactccatatccaaaaaaaaaaaaaaaaaaacaaaaacaaacaaacaaacaaaaaaaccagcaacagggatagtcagcataactaatttaaccagcacatccatttcgtaaaagacatcacacattgtcatttgtaagcctgggactttaactatttctcaacttttttagctgaataatttttctttttaaaacaaaactgaaatctgttgtatccattttagaatttatctcagtagtttgtatattcatatatatgtggtgagtttaagaagacgtatttagaacatttttatcttgttagcaatttgacatagaaaaatgaaacattaatgtttttattgtgagtcatgtcactggcacagttttcctctagtatcatgtgtggtgttaccttctatgtaaatttgccaatgaataaatgtttagtaaacaaacattttgtatttcattgtttcactcctctacaagatactgactagtttacttagtttgtaggtcactagttaactagttgaagatagaggaaagtttacctatcagaaataaattgaagccttctcaagtcatagaaggtttcacatttatgatgtaccaactactagcaaacataattaagggatcattgtattgtctaggtgcagcttag

SEQ ID NO: 60596 - DNA, 1050 bp, Homo sapiens
gtgaccactcatctgaacctatgatacaagcatattttacagagaaaatatactctcgagctcagttggtagtcaatatagaggtgacgtattctgaaagatcactgaccactgaattattttgttgtttttatttgccaaatgtagaatgagttaacagtaatcaacaaattaattgcgatatcaagagaacaacataaccttaactaaaaaatctcagagtggagaagagtgggacatacaaacattcatttatgtaagataaatataaaagctaatccctcacagtaggatgctggactgatatttttttctcttttccgtccctcctggactgattgaatagtagtttttactcattgcaaaatcattagctgatcttttaacttaagtcccacaaagcactatatgaaaacatctcaactgtaagtttacaaaacatatcattctcttttaggcctttttattttggccacctgaatactttcccattacacaggacagttttcattccacagatatttattgagcatcttatgtgtatcagaaaatgtgttagatcctgaggacatagcagtgaataagacagatggcatgcattctactggacaacgtatcaccttagtcttttagagaccaattaaaatttttaacaccttctcaatgttttccttcacagaaaacattgaatgctacaggaggacttaaaatgcagaaatgaactgaagatcagtgttctgcttttatctgattcagattattccctattgttccccccaaatagtgacaaagtaaacctgtacctgcctgaaaatgttttgataaaagcactgattttattccctgtaagagatgtgaaattggaatccccctgaaatatctctgtgttttattcacttctccatatgaatttttgtgaatgaatatgatttaagtaaggaaacagctgcagtagacagtaatagactttaatattcaatattccttatggtatcattttcatacattgctggttattactatttcttaggacagcataagcttataaag

SEQ ID NO: 60597 - DNA, 1070 bp, Homo sapiens
ttattatctggtctagttatcaaatgattctataccttaaaactttgatttgattgggaaaattttaaagcaaaattagaaacagtgccatgattaggaaagcagtttggtgagacttgttttcctccagataataaattcatgatgtactgtgaatgagcaagtaaaaatgtatatctagaaaaatttcttaaaacacacacataaacacacacatcagcaaaattttggaagacagagcattatgtcagccatcatataattaccctttatatattttgtggattttaagaatcaacaaaattttctttaaaataaatcattgtgtccctgtgtgttgaagatggctttggtcagtctgtatttatgtttttcttcaattcttctagaatgcagagccaagccagatgcagattccaaaagaaacggtaagagctttgtcttttgaaggatgcagagatgttggaaagatacatggaactaacttcttactaatttaatacgaagttacttgtcctgccttttcctggctcgtaatatttaatacatgggtttattaaatgccaaagtggtcttattttaaggtgacttactgttaccaccccaaatggagtatattttgtgattaattttggtcagatagacgcaaaaaagagagagacttcctattcacttgcaaagtgaggaccaaagcttagttgtttggcatatatgcaaagtatttcatgagttgtgaaatgctaaattataagtggccacaaaatggaaagaaaagttaaaaaacttgattcaatcatggaaaaaaagggagggctaagagaatacagtaaaaaaagtatacacaggaaaattaaagtgacgtgtcagtattaggctaagcatagttgttagaataactataaaagagataatttaacaaaagttaaggactcacagctcacattaaaatgcaaacatagttgcatcctgttaagaaaacaagtcctgagacagactggggataaaagagtaagcttagttccagcaggcagaactaacacaataaaaggaaggattgctctatcagtctc

SEQ ID NO: 60598 - DNA, 1660 bp, Homo sapiens
aaaaatatgattgcatttacacaagctaatttagaaagactatgcttaatcactgaaaggagaaacaatggttttaagtgtttttcagaccttgagtaatcttaatgatatagagtcccatagatctatcttgattttaatttaccaactgtgagaatgtatgacaaaaagcacatgctgcttgtgcatgctgccaatacttacaaatattttatataaaaattatgtttactataaatgtggggaagaatgctgattatctttgattaggactaaatgcatatattttaataataatgaatgtaggagaattgaacaggctttccttgtagctagcagatttttttcttacaagttattacatttattagtgaagtacattaaaaacatagggtgtgtcagtgttaaacttcagattcagttcaaagtgagctaatgtgctttgagtggcagcagttcttcaaaaactggaatcaactcttagtacaaaaaaagatgtcagtataattattctttggcctaattttggagctatgttatataacatgacaacagaatagcctcagtgtacttgcttccataattatgatttcttaatatttattgccattttggtattctcaaatacccagctcttttgtagaaattagctttttaataaagtcagaggagaaggtcagtaatctgtttcagtcagtgcagaatgttttgttggctttgttaaatgaaaattgatatctacttatctttccttgaaaggtcattgcctgaacttttagcttacagatttaggggttgttgctgatattttaatagtattgaggttcctacaacagtcagcattcatagttcaaaaaagttagtattgcaaaaggagagtaattaagaattctttcttaataaatgttattgcaagtcattagagtttcatgaaagcagagacatatggaaaaatctccccagagcaataacaaacatttcatatagacagtatgccattcaggtgttcagcatggaagacatcagaaatattaatagtccaagcaccctaaagtgacttcagactaaagtaaatgaatgctttgtttgatgttgagaataactatggtaggttttgctacaggaataactatggagtgttttctttatttctcctttaatgtttctttaatctacatttttattcacccttttttgttcacttatattttatacttttcattacagttttatactgagtgatgtatcagattaatgtgctcttttctagatttttcacctttacagatctctttattcttcccataatgagcaagcatttgccttaacaatattttaactgaaatggaaactaatatcttaagaagtaactttttaaaaaagcttaggtagaaatcattattgtaaaaatgttgtgattcattacaaatgtatcattatctccccagtttttcctgggcacgtgttggcttcttgcgtcttgattctagtgacatataaacacttttctgctttgtattgagcatgtaagactgtctgtcaagaaagctgccaaagaaatgagaatttaaattctgtgaatcatcagagtaatttataaatgcatcattaatttagtacctttaagcataatatgatccccagatttggtagccatgat

SEQ ID NO: 60599 - DNA, 1053 bp, Homo sapiens
agactacctcatagcgcacacccctcgggaaaaccaccatccgctccagcctcggcacctcagaatgtatttagtacgactgtaagcagtggttataacaccaaaaaaataggcaagaggcttaatatccagcttaagaaaggtacgacctatcctgtttttgttttgtggaatttcttttcttagcagcaacacacaagggtagaaatggaatttattttaaaagtcaacctactaacccaaagcaccctgagtcttatctaattattttgtgaaagaactgatagattttttaaagttacttaccttttaacatatttcaaattgtatttcttatatgtctcaggtttattttgctctgtagaaattaaaatgtaaaagtgcagagaataagactatgtctatgagaagaagatagcagttactgtagtaaaatttttgattgtgaaagaaaatggcttcaggacattaatatcaaatgcagaacaatagtaaggatttgaccattttgactgccccatttgctgtataagtccagccctcaaggaggactttagaggtagtgcacgtcaatctcagtatttgatgtggggagggaccaatttgtttgaggctgccaggagtttatagtaggttgctgagaagccaggccattgactcttgtcttttgttttcttgtattattgcattacttccctttcttttttttcttttcttttcctctcttttctttttctttctttttttttttttttttttttttttttttgagacagggcctttctttgttgcccaggctacagtgcagtggtgcagtcatagctcaccgtagcccgcaacaccccatgtcagccttccaagtgctgtgactagaggcacatgccgccatgcccatctcatttacaaattttttgttgtgttggagtcttgccatgttgcccaggttgatctggaactcctggcctcaagtagtccttctacctcggcttcccaaagtgctgggattatggaagtgagccaccatgtccaggcctgcttctctttcttatggtg

SEQ ID NO: 60600 - DNA, 1141 bp, Homo sapiens
aataatgcagaataccaattgtatattttgaagagaaggaacacaacccagaccacctcaaatatcaaatgtcattaaggaaaatagtaatgtaagcttgtgaagttaacgttagagagttttttacagccatgtagatcttattgtgacctgatgtgtgatgaagttttttttgttgttgttggtttttttgtgtttgttttttggttttttttgagatggagtctcactctgtcacacaggctggagatcctggctcactgcaacctccgcttcccgggttcaagcaattctcctgcatcagccttcctagaagctgggactacaggcatatgctaccatgcctggctagtttttgaatttttagcagagacagggtttcaccacgttggccaggttgatctggaacacttgatctcaagtgatccgccggcctcagcctcccaaagtgctgggattacaggtgtgagccaccatggctggcttaagttttttaaaataagaatcttgcactgcttactttcaaagctattttttagactaggttgaatgtttttcaatcaggggcattaatgacaattagctcgtcctccaacccctgtcttagttgactacctgctgatatgtagaaatagagacaaataggtagagagacaatattatcttccccatgatgatgtttttcttttttttttttttttttttttttgagacggagtctcgctctgtcgcccaggttggactgcggactgcagtggcgcaatctcggctcactgcaagctccgcttcccgggttcacgccattctcctgcctcagcctcccgagtagctgggactacaggcgcccgccaccgcgcccggctaattttttgtatttttagtagagacggggtttcaccttgttagccaggatggtctcgatctcctgacctcatgatccacccgcctcggcctcccaaagtgctgggattacaggcgtgagccaccgcgcccggccgatgatgtttttcttgagttatttccttgtatatgttattcaaaaataaagttaactgatcctcatctatattcgttcacggtttcattactttggtgatttctttttttaaattattttcttagtagaaaaacatttacctaa

SEQ ID NO: 60601 - DNA, 1020 bp, Homo sapiens
gacataaacttgtattacacagaagaatagggtcggtccaagagaaatgttctgtgtcattttaatgtagttatctctgatgattgctctccctccatgccatcagactagtgttcaggtatgtagtgtttaatgttgccttcatcaccatgcttatattccagaatatgtatatatatgcctatgcacttggtgggatttttgttctgttctcttttgttgtttattgtgtgtctgtgttgttgcagttttttgttttgttttgttttggttttggtttgtttacagtacacgttcatgctccctcattcatcattgtctcacagtgatatggtaaagctcgtagaagtccccaacgatggagggcctctgggaatccacgtagtgcctttcagtgctcgaggcggcaggtaacgtatcttggaggtttttaattgaatcataatgtagagtgttttatcttcatttatgctcagatagagagtggtgttgacttagcatatgcttaataggaaacattctcatttggaggcaactgctccttcattcctatatatatgtcataatcacagaaagcacttagcctgatgaagagaggttttgcaggaacgtgaagaaactgcatttgaattatcctaataaatttattgttcatcacactcaagcaaacattttactttgctgtaaattgatgatggactttcaagtcagaactccagatgaatttgcaacgttaaggagagcttaaaagcactttttttgggaaagcttaatgcaataaaaattatctagatgacttaaatttgatttaagctttaaatttgtgtttagttcttcaattttatgagtttttttattgttaaaaacctttaatatgaaattttaaaaaattaggcaagccatagatttctgaaccttgagtctaaaaatcatgtactgtttgttaatctcaacttcattactttacagaacatgcatccttaaaaacttcaaatgttatgtcagtttccttgattctgt

SEQ ID NO: 60602 - DNA, 1091 bp, Homo sapiens
ttgttaatatttgaactttaataacggttctgtgagttgaaaaacaccattatgattttaaggtggtctggaaaacctaggtagttgttgcataatttgacgtaactacttgaaactctggttctcttaaaaacaattttgataatagtaataacattactagctttttttaaacatgcccaaattcagttgtgtatgtatttgtgtatatgtgaatcagtgtgctgtatttagggtaatttttggttaataacagtaattacaagaattattccttttcaaattttataaaatgttttaattgacaaaaatgtatatattgtgcacgacttgatttgaaatatatacattatggaatggctaaattgagctaattaagacatgtaatacctcacgtacttcgtttattttgtgtggtgagaacacttaaaacatgttttcttagcagttttcaagtatacagtatattgttattaactacagtgactatgttgtacagtagatctcttgaactttttcctcctaatggaaattttgtatacttttaccaacacatccccacccaccatccccctaaccccaggtaaccacaattccactctctactttgatgagttcagtgtttttagattccacaataagtgagatcatacagtatttgtctttctgtccctggcctatttcacttaacataatgtcctccactatcattcatgttgccacagtgatagatttctttctttttaaaggcagagtagtattttgttgtgtgtgtgtgtttgtgtatgtatgtatctgtgtattacacatttttcttattcagggtctattgataaacactgttgataaacaacaagataggttgattccatgtcttcgctaatgtaaatagtgctgtaataaacatgtgagtacagctatctcttcaacatactgattgcattttctttggatacatgcccagtggtgggattgctaggtcatataatagcactatttttaactttttgaagaacccctataccctttttcataatagccgtactaatttatattcacaccaacagaatgcaagggttccctttgtccac

SEQ ID NO: 60603 - DNA, 1040 bp, Homo sapiens
ttctaggaacaatggatgtttgcttacatgttcaatatataaaacatggatgttacaaattctgatctaccattaatatgtaatacctagtatatagcttttggggagtattttcctcagttctctgagtaaagctttttttgtacatggatatttggtagaaattgacatttgatatgagaattattttgagttttggaaatcattttcaaatacagaggaaatattcttcattatggtattgcataaaaagtttcttagtcactggagtgtatcctggtttgaggataccccatacaggctatagaggattttttgtttttttgagttgatgatgataggtgtcccaattccttattatcattagggttcattagacttctgtatgagacacaggattctaatcttccctgttcccatgggatacagtataactcttcagactatagggggattaatttgataacattctttaatttttaaaatatttatttgaattttgcaaaggtgatacattcatagttctaaaatcaaacgttatacatggagatgcaaaatagtagtctccctcccccaactctctattagctagctctcctccccgtattcagccacagttatttgtttcttgtggctcctttcaaatggtaccatgcttttatgagcaaatacggaaacatattctcttttcacctttttatataaatactactacagtatcctgtgctttgattttttttttcttaatatagcttggcaatccttatagactgacacataaaaggtgtccatttttgaaacactttgataattttcctttgtatagctgggccagtgtttattgatgggcattaaggttatttactatcctttgctgttgcataaatatactgcagtaaataacctgttatagataagtcattttgtattgagtttctcacagaagtatgcctaaaaatgaaattgtatgtttacacattgtacaggaatattacatacatttgtaactttgatagatgttgtcaacctgacctcagtag

SEQ ID NO: 60604 - DNA, 1027 bp, Homo sapiens
tttgctgtcctaaaatggcccaggcattgtcttgtttactatagctcctagtgaacccttatatacttttgggtaaatagtctttcaataaattgaaaggaaaaagttcataatgtccctactttttctgatatcatgtattatgggtggatctttgttgggtgaactatattgactcttttataatgccatataatgtgatatggtgattttcattaattatgggctataaactgtagattataggtaaataaatgaaaacttgatgaagacatgtacatttgtaaacctcataaatagttgtactattttgatgacattattgcttataacttagcatctgcatatgacaaaaagaaaaaaatgattataaactaaaggaccaagaaatggagggaaatgtaagttctctcaaagtaatgcaatgttcctatttttttaaatcttgatatgatggagagcacagcctttcttgtgcataagtttaatcgtttgtgaactttcttcaagaatgtcttgtagttgaacatggattcagtgttagaagataagcccgctcagtctgtccccgctggcctgtatccagtggtgtctgctgtatcaccgctgatcacactagccgtgggaaagccacctggctctccagaggctttgtagagggagtgagggggcagagggtaagagctgctatgagctacttatgtgagatttttgtgggacaaaaggaaaagccaaaaaagtgttcttataggcccaagatagttgtcaactctattagctctaaaagtatttaattaaatatttaagatgtttaattatcaggaaatattaaataactcttcatgtttatataactaaagtgacataagttttctgttaaattggaaaaacaatatttgaacaaaccatttgattatattgaataatttataagcaattgatttgaacataacatagttaaatattccctccataaaatattacgtattttacttgtttgcgagctgattttagctgtttaaaattt

SEQ ID NO: 60605 - DNA, 1023 bp, Homo sapiens
agtctaaaaacatcttctttggcataagtgtaaaaaaatgatgttccattcctgaaatttgatttgagtgaaactgtatactagaagagtagaagccactgatgttttcacatccagcagaataattgattaaactaaaatctgttgaagaggacaagaaccacagaaacaaaacaaaactccctctcaaattttttcagaagtaagcactattgtttgtgcagaagaggaatcttaggttatgctttatacactagaaatctattccaattattcccatttaattatggatttattctgttaaccattcccggaaagtcatctgactttaatgacctgatgtctcttctgaggctttctttttctctttagtttttgctattaaacatataataaagaggattgcatcatgtacatgaaaaaatattttgtatgcttaaaaaaaaaaatcctctgcctttccaatttgggaacaccagggtagaactgatggccatcttcctttagtcgtgtggtctggagtgaggtcagcagagttctagattttatgtgcctccagtggttttgtttttgctctgttttctacttaatgcttatctctcattatctgtttctgaaggcagttatgaccttatcagcttttccagtgggaataagcagaaggaatggaaaggcaaaagagtgctttaaagtgctaagctagctggcccctctagaagtctggggtgtcttattctttgggtggtattggtcctacttacggggatagtgaatcttctttctataagaatattggttagttttacttcaataagaaaagataggttgtatgtcttattagaagtctgtagcagcaagcacaatatgatttccaaaaagagtagccggggttttcagtgactaatcaccttgttcagaatagcccatagctgaatcctacatcagagtcatctcacaagttatgcttctgaaattttgactctgacactcaagaaacaaacgaacaaaaaacaacagcacttt

SEQ ID NO: 60606 - DNA, 1112 bp, Homo sapiens
agcctcccgagtagctgggactacaggtgcctgccaccacacccggctaattttttgtatttttagtagagacggggtttcaccgtgttagtcaggatggtctcgatctcctgacctcgttatccacccgcctcggcctcccaaagtgctgggattacaggtgtgagcccccgcgcccggccttgtacctattttattggtgagcaagtagagccctggagagtttaaatagctcacctaatagttcaaccagctgttaaatgttacacctaatagttcaaccagctgttaaatgataaagttgtgatataaatgtgctgaattctcttggctgggtacttgcacttttgtatttaatttttattggggcatcttgttgcaatatctgttttatttcgactttagttagattgtgtttttttggggggaaggggagagtaaggtttcaatagacgttactcaaattccctgaatcacattttctaaaattgtagtttttagccatgaatggaggacagaaatagtttccttgaatattaatatcctttttagagaacatgctttttctgctaatggggtggtagagaggaactcagttctttagaagtttgtgccatccatttctttactctaaatgcttcccatgtggcaatgtaattctccacaaaagtcattacttatgagaaacaatatgtaggataagattatgataaatgaaaataagcactttctacattaagataaaaagtatctgtggagacagtgtacctgaggaggcactttcacaattaaggggaaagctaaggtagactgtacctagggactttcacagaaattacccaattcttctacgcatccatccagtccattggagtttggattgtgggctgaaaaatggaagaaagtggtaattatcttacattgtcagactagttatatgtgatttaaatctcttcattttcaaattgtagtaatttatttaaatatatatgtatatatacattcgtttttaaattcagacgaaaaatatttagataaatataaaatatttatgatgcacatctaaataatgtataagactgtaggtattttggaattaggcaaccactata

SEQ ID NO: 60607 - DNA, 1050 bp, Homo sapiens
caattaaaaagcagccaagcatttgtttggttttcttaaaatgctaaatagagaattattgttttccttgattattattgaaacttcctgttttgtatacaaatttgcaataggatttgaattgtcacagtgagctagttctaaatatagcactttaataaaaaaatgcttctgtaaatttgtttacttccttggggagtcatgtgcatgtgttatcattcccaagagggacaaacataaacatatttcatgaaaaaattcaaagaggtgttagaaaatgcagattattttgccctatgtttgataagtagaaaaacaattatttctatataactttttcaaattaaagttagaaagaagtagtggaaatccctcagatcttttctgagttgatagaactgagagtatatagttaatggttatttaattatactttagctaaattcagtgtccttgcttaatactaaaaaattaattacattgcttaatactaaaaaaatttcagagagatgtgtttttggatgatcctgtgaccactgactccatgaagctgtagagcccttgaaatgaggcaagggtaactgaggagctgaatctaaatagccggtgtggctagtgactccatcgtctggggacttgatggaaatgcagagtctcaggccccatccagacctattcattcagaatctgtatttttcatgaggtcccttagggctgatatgcaatgctgtctcttctagagcaataattctcttctagagctgtcttggctgcatgttacaatgacctgaagagcttgtgaaagtaattcctgggcttcttcctagaccaaattttcagtatttctgatggggatcctggaaccagcattttacagagtattcccacgtcattttaatgactggtgaagtgttagaaccacatatataactcaaagagtatacaaacaagtgtgacgtttggatggggaggtcttaagtactgccctggattttccactttttgttgaggttagtataggaacagtatatgtaagaaagagttagtctg

SEQ ID NO: 60608 - DNA, 1052 bp, Homo sapiens
ttatcggaagcagaaatagttacttacacttgaaaatttgtaatgggaatgtagctgtgaatatgttaagaaagcctgtttaaatcaaagcaagaaatcccatttccaaatggtagtaagacgtgtgttacatggagaaaataattgcctgaaagtgtttgttgtatttgccaagattagattgtacactggtcaataaacaagagttctttttttttgtttttatctttcaatccaaccaggtacttgggttcgtttttctgttggtgcatgtcacacagagacccatattgtggattattttgtcagcatgaaagcctggcagatacaattctttcccctcttctcgctgcacttgatatagatctctcctttacttcttgataatacgtttgcttatttatttgttcgttgcttttagtgtcagcagtggctttgtgtcctcagttctgtttgctcctgcctggctcctctacccagctggagaggtgcctcatatctcagaatttctgagtcactcccaatcagtgactcctttctttttcagtgactaagagaaagctgcccacaagccagcaaggtgctgataagtgtgcctctgagattctcacctctaacttttccatggaatggacagctggtagtctctctctgggctacattttaaaggaaaaaaagaagtctaaatcagtttattaattcatggtgttattttgtgtttactcaatttatttatattgattggtaaattagtaatttacaaactattatttgtcaatttattgcctacatatcaacaaatacttttcttttttttttttttttaatcttggggacaagcacattggctcagcctgtaatctcagcactgtgggaggcagacgtgggaggaccacttgaggccaggagttcaagaccagcatgggcaccatagtaagatccagtctctacaaaaagagtaaaaaatacaaatagctgtacctggtggctcacagctactcaggaggccaaggcaagtggctcgtttgaaccaaggagttcgggctgcagtg

SEQ ID NO: 60609 - DNA, 1056 bp, Homo sapiens
ggtgtgcgcgatcatgtctcctgagtgcagatccacttcctggggatgtgtaaagaggttgagacgttactcagcccaagtaactaggacatgtattctggaatgggacactactggccccttaggtagatggagtggaacttttacagagtcaaattggaaccatgtctgtgatatacatttaactgtctttattttcaatattaacaaatcaggcttagatctgaagctttcagggtcacacagttcaggtgcaaatcattgagtccaaggctggtgatattttgtgtatgactttttcactctatgattttttttttccttcagttcccaaggactttttgtagaagtcagatatttgagggtagcccaggtttaggtcatggctagattccttttacctcacaattcaaatttttaaatatctcctctggaagatctagactgaagaatgaagtttcctttgaaaatgatgtaagcccgaggaatggtgaaatttctggaaatggtgttgctataaaaatttggggaaacaaagtatctgatttatttcatttctttttttgctgccttttaaatcttttgttatttttaactttttattagctatgttaattttagttaatttttatccattacttgggaaatttgtctgaaatgatggtatttaattaactgataagattttactatcttcctaacatttagaccttaaagaaatatcaataattgttatagaaagcttgtacctaagttagtgccccctcccacttcttgatttcttaattttttttcttagcaagcatatacagattgattttgtctttctagaatatccaacacctttggtatagagatctgtccttctaacatttgctggtatcagagtactattttctggatctgatgtaagtacatattgcaaatagaaataatattcctattgtatttccttttaacttgtgaagtggagcatggcatacaaatggtattctcagtatttcaaataattaccttcttactgtgcaagttctattcagcatataaaacccatcc

SEQ ID NO: 60610 - DNA, 1077 bp, Homo sapiens
cagttgagccagtgtctcccagagtggtcatacgtgctaggtgctctgatttcttgatgttcctgttgtttttaagatctcacatggaatatttgatgctaggaaccctaacttaccgaattcagaggtttttcttcagtattactttttatgagtgggaaactataaagattacattttatttatttatttatttttgagacggagtctcgctcttgtcacccaggctggagtgcagtggcggatctcggctaaacaattcacagtcttgtgcaatattctgttttgttcatttattacacttaggatgaagtgtcacactttgtgaggtgatttttttcccttgtcatttgccacttgcctaagtgtacttcgctgtctgacagtactgaatcaggtcagtttttaggtggcagcaatttataaataaccttctctttccaaagaagaagcaacagcttattagtggtttgtttatgaagcttgcttttagttttaggcagcctggatgttaattgtctaatcagagttgtgtttcaccataaacactaatgtggtcagtgtttgagtttctgtttctctttcttggactggtattgaaagacataactgattttagatgtctaagcaatggcttttctttgtatttgctgtcatgtctccttattaccatggtctgtggggactggtgtatgaaagtgattttattgtcagagtggcttccagttcttggggcattaagacatttccagtaatttctgtggttgcagagataaagttgttagtgggaagtgtggaccccagtgtagtcaaggtctgggttggttggacttcgaatctgtgaacacccattgtctccttggctttggcagatgcatcctggttgctccttttgtagtactgctcttatttccttctgtgtcattggctctctcattcttcaccagaaattgttttttcattttgtttttaattttctttacccagaatataactcaattcagaattgactaggtcttcaagagaaggaatcaaaaagttagaatacgggccagacgtggtggctcatcccagtgc

SEQ ID NO: 60611 - DNA, 2311 bp, Homo sapiens
accacccaagttctgttgaaacacatacccataatccccacagagctcttctttcagaggatttctcatgggaacaagttctactgctagtagttgaattatctatgttatcacaattgtatgaagaaacatattggatcaagatttctactgtttgcgaaaatatcggctacaaacacacagaaatgcaactgtcgagctctgagttacctgttggttgcagttttgttctcctgctgcagcccactctctggaaatgctggggcagccactgtttgatttgtttggacctggctgatgtaaggtctaagaatggatatacctggattattcctgtccaagtagttgaaagtggactgcttttttagagtgctgaacaggaattgaatttgggacgtgatagagaccaaagaaagacttgtaggaagtgaatgtcatttttgttcaaagtatttgcaaaactaaagccaataaaaggctgccttctcggtggcccttttatttagttcctggctttttccttggaatcagagaaaagtatggcaagtttccccacagaagagagtggaatgtcaaggaagattgttcataaaccacattcattgagtgactgctgtgtttagggtgacattttaatgccagctggtagttaattgcatgctattttatttttttttctgttatcttaaaatatccttcatacgtgaccacgctattttatttattagtttattttattttgagacagagtcttgctctgttgcccaggctgcagtgcagtggtgcaatcttggctcactgcaacctctgctgcctgggttcaagtgattcttgtgcctcgacctcctgagtagctgggactacagtcatgtaccaccatgcctggcttttttttgtgtgtgtgtgtgtttttagtagagttagggttttgccacattgcccaggctagtctctaactcctggcctcaagtgattcacctgcctcagcctcccaatgtgttgggattacaggcatgagccaccacgcccgcctgcccatactattttaaacagtggagaaacttctgtaggaaatgagacggacaaatgaagagagaaagagcctgcctgtgacctacagaaaatggagtttcctggattaattaatgttattgcttacaatgtttgaagtatagcctaactgctataacctaaaaaaatcaaatggaaagactgtgtgcttgatcagtagaagatgagtggcccgaaggtgtccatacctttgtataatttgcttgtcaccatctggttagcttttagagcccattgatgtgcaacaatatttatgacatcatggggaattttttatgttaacacttcataatgtaggctattttttcagtagttatcaacacgtagggccagaatttgctggttaatttaatgcttaaattttttaagcatcatcattgcctgaaatatgtttttttcttttttccatctgtgcagtgcattttttgtcatcattaagcaatagcattttaattggagtcaccacttggtcaatagatgtcaggtcatggcatgggaagaaaaggaaagcgcactcagtgataacctgtcctatcgggaactcacccaagtacttactatccactaccctgccttcagtgatcctttctatgtaatgttaaagttaaacatgtcatttccttacagagcataggagctgtataactcaacgtaataaatctcgacgagttcttggcaatgatgcccatattttatgtgtgctaagattatctctagtcataattatttaatacatatggtatatgtaacatttatagccttcccaaagggaaaaatgatgtggcataattctggcagattgtttatattgttcatgtttaaaatgtattgtaaaaaatgctatgcatgtgattttgaaaccccagtgttctatttttaaatgcttgtatgtctgtaagaaactaagcacagtaagtaatccagtttttaagtatttcctcttgtaaattgctgttaattgctaatgttcattgaattgacctgctaatgggcacaggctgacaaagggagtatccctctagctttttgatgaactgttcaataatgtcagacaatccataaatttgcatgaatgtttaagtttcatcagccgttgtggtctaggcaaatttctgtgttcttattatcaaacattgagaaactaaagtttataaaaaataacttgttagagtgagctaaacatttaagaagtattgcttttgtgtgtttgatgggctaaacaattccttgtcttttcaga

SEQ ID NO: 60612 - DNA, 1085 bp, Homo sapiens
ttcttgtcatttttactctttaaaatagtacattcaaaaaaagagtgttaataataacacttaaagatatattcttatctttaagcaatattggcttcaacagcagtcacatcagtgtcttgtgctttatttggcctgatgtgggaatggatggtgccaattgtaaaaaaaactttggttaatttatttagtcagtatctagatagaactctataagactatgatggggcttttgtgtaatattttctattgtaaaagcaaaagaacacatttcttgtgcatttaggtaagagaaaaaactcacatatttaaaacctgcttttttgcgggagggtggagataatacacaggtaaatttttattttggtttgttttgcaccaccttctttccatttttggtcagctgttcaggctgcatttccgggataatgtatttaccatgcattttagtcattgtacctctcagcctccagctggccttcccccagggtatctttgcacttgcaggtcagaaaagaccaagttatgaatgtgatctcattttcaagggttttaatctgtttttggaattagtcaaaatctgtgttttgctgtaagattaagcttgtgaaaggctgcaaggctttcctctttgcagatgctttgaatgacttgtatagaaatgtcccacagaggtgcttcctgttgttttcacatccctttcaggaatacacaagcccccctgtttgtccatctctgagaaagacaaaatagctcaatacttcttgcaaaatagaaaatgtcatttgttggttgtggtggtaacagggccggacattattcctcattcccatcccaaaacattgttgactcagctccagacctcatgtagtaagaacagccgtcctcctgtgttatcactggggtggctccaggatcgatggaatgtattgagttggatcatcagtgccagttcactggactgtatttaatcattgaaaaatgaagatgtgtattttccttttgacacaatggaaaatcagttgaatcacgactttttgttccttgaatttgaaaaatggaacaaattatgaaaagccaattat

SEQ ID NO: 60613 - DNA, 1034 bp, Homo sapiens
ttagtgatgaaattttttttcatccccattttacagacaggagatgagccatatggtgctcattttacgatagtgatagaatgatggatttagacagaaggaaaggtgtgtgaacagagacacattatcgattctcattcaaatcggattcattctgctatgctgtgttgccttcagctgagtgtccagcggtttgaaacatttctaaattttgatttggggccatcatgcagctcagtgcttgtgcttcggtgcaaggtctcttgggcagagatgctaatttaagaatgttgtcggtttaaatgttcctaagaggattaagcaaattctacagcatataaatggacatatttggaagatttttttccccaagcaatttcagaaaacacacatgcatcatttgctaaaactctgcaggtgtattaatgagttcatctcacatgaatggacagtcactgagggaacttcatatgtaggcttgagttcaggtatatgaaatgcaggctaagttttaattagaatttatttacagctcgaagctgctcctttgtttttctgcctgaagtcagtaatgaaccattcctctttgcctagtcattagtattcagagctccatcagcctgcagttcaaaccctttcccttgtttttgtcagagaagatgatggagcaaggttgcttagaaacacttagccacactctcaacgggaattatcaatctgtgctgtatgttcacccccacacgcaggggagaaaattgagttttactgctgatgacgttaattgattgcaagttgttttagtgggagtgtgatgttgaaaaccagatttcctttcatttttatgcattagatgcagagaagctatacagtgacatgttcattccactgtaactaaaaatatcatagaggtatctaaatttggttttgtatgttttatattcagatcttgacactggtcagcttacaggattatctttgggttggagactgtttctgtagtgatttctttagttcccagtaaattcacacagtca

SEQ ID NO: 60614 - DNA, 1064 bp, Homo sapiens
ttcagtctctaaagcaataatggtgggttgcccttttgttaaagagtctcatgtcaacaaattcatgtctagtttaggctaggaagaaataatagttgggaaaacaatagcttgaaaaatcagtagggcatgccaggcatccttgtatcttcacatttgtgtatcacgtataatctaagtgatactaaaaatttgttacgctctaataaatgatgatttatgtataccaaaggctctaataaaatatctagaattggtagcatcatagatatgaattaaatagatggagatgaagtaattaaaattagttcctaatttgcactgattttttttaatcttcaattttgtaggaaaaaaaaattggagcattaaactgatagaaaattgtaaagaacattctgcttccggtagggaaaatggtctgttttcttttcttactttaacataagatcaatactaatgtcatttatattgtactttagtgtttacaaagtagattcacatatattctcttatttcatctgtgcagtaacctctggaagataaggtttcctcattctgttttttaatgtctgtttcttaactctgtgtaaaggcagattgattgggcctcatttcctcaatttagaaggctggactgattgatggaacattaaagaaggcagaggtaaataagggatagtgattctaaaaataaaagtgacacttgaagtggtttgactagcagtctcacttatttttccaaaggcaaaaattaaaaaaaaatcaaaaagacaaaaattaaaacccagagatactaataaaagcagggagcacatgtatctttctgatcctaacacttagagtagcagctatcttgacagcctatttttgtgaatagaacacttagatgtccatttttaaggacaactttgttttttcttcctggtgttttgttgttttactggcatatatctaaatttgatttaaatttcatggcattaaaccaaaaacttagatggttatatcgtgtcatttgttatatttattcagtatttgttggtgcattttggtaaattttttac

SEQ ID NO: 60615 - DNA, 1064 bp, Homo sapiens
aaagaaaaagaaaaaaaaagaaaaattagaaaaagtggtgagccttagtactagaaatagtaaagaattagcaggtgaagtttagcagattttttttaaattaacattgttagtttaatttcagttcctaatagattgatgaaataaacattaacaagaatgtgtaaacatctgtaagttaatgggtgcaggactaaagcattttaagtagtaatcatcatacaaaaacctgattgctttccttgatagctctatggaattacttaattttaaaaaggctatagatgttaaatatcacgattttcgagtaagtgattttttgaaatcttattcaccaaactaaccgaattggataaagaaatgtcaagtgtgtaataaactgtccaagagttagtggcaattgaaaacatatcaagttgaagagaaccacaggataatgtgtatcttttcttttaatgatctagaagaattagctaagcaatatattaaatctacagatgatcatgaatgaggtgttttctttttgttttttatgagtgttactgagaatgaagcagtagggtcaaacatgcaagtttaataaaatggcaaaagatgaaaaaaaagtctttgcaaaaagctaactaatgtttctggggatggataaatccctaggaacaagagaggggaagacctaatgagcctgggaaaacctaatgagcctaaagtgttttattccatgtaacgaaaacatatcaaacagtaatcttgggtgactagcctatttttttgtctgcccagttagcttaattgacagccatcattagatggcattatgattgggcaaaccaggaacttctgcagtaatggaagttttcaaaaaaaggtttgtctctcaactgaaaaataatagacaaacatcacagagacgcttaaaaattgattgagtcaggtaacgtttgttttcatgtgaattattaggaaactccgctcgattagttggacaccatgtacctctctttttcaaggtactgtacacaggagcttgagaagagatgaaatggggccaagaaactagcatctga

SEQ ID NO: 60616 - DNA, 2255 bp, Homo sapiens
ccaaggtgctacatggagaaactaaagagagtcacatggccaagatgtaccacactggagatgccaaaacttggttaaaagccctcatctgactgactttatttatttttattttattttatttttttgagacagggtctcacacttttgcccagcctggagtgcagtggtatgatgtttgctatagccttgagctctctgggcacaagtgatcctctcacctcaccctctcaagtagctgagactacgggcatgagccatcatacctggctaatttttgtatattttgtagagttgaggtctcaccatgttgcacaggctggttgacttattttgaagccgattttctttttgtcgtcctcctctaccttcaggacttttcaggtagtataatcctgtcgtcgtaattcctggcatcacttactccattcttgaggttttctggtctcttgcatagccaggtgagagctgagttgaaaagctttttatacaggcttcatggatatgtatactggtataagtgcatcacacagttaataaaaatattggagaagaccatttagttcacttctttataacagcagtgcctgtacacactttcctcaagactttctggtagttggaaatatgagtttaaaagtaatagtcattaaattaagtggaaactgtgggtcatttcaaagacattgtttttacaaattgattatacacatactaggtccttccaagagcatgcttaggttgaacagaaagtcttactaacaaaacacgtgccctgtgctctgtattgtcctcagggcatatgattgactattacagtaataaacccttgctttctctgaggtgcaaaaagaagctatagtctgagtgcttgggagaggcataagtcataattgtaggctgtaataaatgcaaatctatgaaaaatgggttagcttcaaacagctgagtcgcagagtcttgcaaaaccatgccccattattcctctctggagcccagatcatagaagaattatccatcttttttaacagtgggatttctaaggcttctcagaaatctccggtctcttggtttccagcaagagaacaatatcgagtcttaaatgacagaaatgaattcctaaataagttgaactttttcaagtttttaccaaatttaaataataatgctcatatgaatggtagctcatgtcttccctgtgcaggtggtactgaactaacattctaaatttgaaatggcaggctctctgttcccctgtctgggtaatctctgataaaacattaatcatctcaaggttctattcaagtccattgatggaaattgtgaaatgtaatttagcttgaggaattgaattaatgttttctaatagccctgagatattcactgatttataggtttgaatgctgggaggtgcatttgtgtttctctgtgtgtgcgtgagctcatcctagttaatctaaataggtgtttagaaatgatgcacattctatatcataaaaatatgtattatctctgtgactggtgaatattggtatggtttatttgtgtctgtcatggaacttatacattgctttatacacctggtataaattcgtgctcaactgagaaatatttgttgaattttaaaaatcctttaaatgtatatgcatatatatgtagacatggaatcacagatgtatatatttagttctaatgttttattttcaagcaggtgcagaatttatctgatttgattacttacactatgtgcctctgttgtgcaaatactagttttctcatcctttgtttttctccttacagctcctttatcactttgcaatatctagctctgctctgtaacatttctgcctcaaacccacattgatggcgtacttgtgtctttctcactaccctcttcctttacaatgttacagcttaacaatgggtgcagcatccatttgtctttcatttcattcccttctgcatgtgtagcgtctgagaagtttctggcccaggtaggcatgcagtaatgtattgaatgaatatggtaagggaagaaggaaaaaacatggttccaagatcctggggaggtctagttgaatggactgtgccttttttgtgtcaccttggagcagtcatttcatctcttgaggcttggtttcttctctgtgaaatatgcatgattattattatatagtttttgagacagagtattgctctgttgcccaggctggaatgcagtggtgtgatctccactcactgcaacctccaactcc

SEQ ID NO: 60617 - DNA, 1134 bp, Homo sapiens
tgatctgtagtgactctcacatttaacttgaattagagcttgggcacaaaagcaataatttgaacaaagtttgattcttaaagagtaatatggtatccacttccccacttccattgtttttcaagaaaaagttggtatgcaatacaagggtaatattaagcttttatcttcatcatttatttatttatttttataaagacagggtctcacaatgttggggaggctggtctcgaactcctaggcttaagcaatcctcccacgttggcctcccaaagtgctgggattacaggtgtgagtcactgcacctggcttcatttattcagtatttgaggcagaataggaaaaaagaaaaccaaggaaattctaatgtataaactgtgacagagtgtttttttttaacctaaataatgaattccttatatttgaaataactaagtgaaaataaaattttattttgtgtctgtttcaatgtaaaagcttatttcattccactacagcatacagaaactttattctttttcctagaaggttatagtaccagacacccttcttccttgaaatagtttagatgggactgactgaaaagaatcactgtaattggcatgtagagtgtcactgggtactcgttaggataagaaaatgtagtgaaatcaacttgaaatttaaccaaattgatggcattgtgccttgtaaggtgctttatggaatgtagtcacattttatagtagacttaagttctagttttaagtaaattttttttatttttacattttcaaatgacttttaacaaatactctgaatgaatactcagtaaatacttaggccattaatattttgcaatggaaatttctattgtagtttcagttcatgaatctttgctccttaccccatcccacaagaaagacttaaacattcaatgagaggcaaatttgacttcttcaaagccggaatggaagaagggagacagaatgtcacaaactgtagtctgaacttgacattgtgatattcttagagaatgtttttacttttaagccttaaaaagtattcatgttcttgaactgtggaactccagtctcaagtttggttgtttggcaagtaaattaagactaatcattataacagtcctttgctaca

SEQ ID NO: 60618 - DNA, 1650 bp, Homo sapiens
ggatttttgtggttggttcaagatccagattttttcctagacagcctataattgtattccgatttgccttatgagaagtctagaaggaagggattctaaaatagtattaatcttgtgatttgtcaagttaatttttctggtcatatttgaaattaaatttaaaaggcatcagaaaatcccgaaattactcctgcatgtgtcttttccttgccttccttggtgtatgctctgcgttccttttgatggtttggttttgatctgttctgccttccagttcggatagtacatggttaggtaatgcctaaccaagggttagtaaactaagtcagctaaaatgtttctaaaatgtcatactaaaggtacaaagttgtgatggaaaacatttatttatatgtatgttaccttatgttgtagaagtagctagtaaacagagaatacctttgaaagctataattaattttaccagccatcacagttttcctttatccgagcactgaagcattaatacatgtaagaataaactggcccttattctgcctcactcaaggtgcatgattttcatctatttttgggactgagtttggaatgcatcgttaacatagaccggtttcaactctgctaaactgttcaaagactagaatattttcagcaactaggtattttttaaaaaggaaaagaaagcaacttactttttctgtcattgcatgaatgtatttccctgggagctgcttactttctaaaatcattaagagctgaaaatttcaaactcccccccacctctccccatcaccacacaccaccctttacagacataaataggtcttgtatattttcagtaatcaaaagctgtgggtacttctaattgttctattgcatatcaaactttataaaacttagagtatacctactagttaatcatacatacacaatgtttagcagtttaattttgctcagaaacaataaagattataaactgaaataaaacaaaatgctgtcagcaaccacattatatatatatttcaaaaaaggaaactcctaatctgtctagcgtattctaggaactccatatttcacccacgatcatactggctcctgagaattttcctcacactgattcttggttacaggcatgcttatttttccttctttgattaactcaggtccacacgtaaccctttttgggttactgggtcatcttcctaactgctctaagcctagatttctgtttaatattagagtattctgttcccataatgtccgaccaattcttgatgagtactggcatttttaaattttttaaacagtgacagaatgtagtgacagtttttctttgtatgtatcagagcatttcttatgataatagctgtatcggtggcctcctaatcaagagcattcagcaactttcacgttccctggatggtttgctaggtacctggattattgattggaacttcaggagagtttaatgactctcatccttcttgccacatgccctagccgatatatttaatattacttccagtcgttgccaatagaatgcactttaaatagtgtaggaatatactaccagagattagagtagatgtggatgaatctatcatgaataaccagagcttcaataaaaggcccctttggtataaaattctgaac

SEQ ID NO: 60619 - DNA, 1084 bp, Homo sapiens
aggcatgagccaccgtgcccggcctgctttgcgttttttaaagtcaggtagtgggatgcctctagcttcgtttattttgtttagtgtcactttggctatttgaggtcttttgtggtttcatataaattttaggattttttttccatttctgtgaagaatgtccttggtgtctagataaggatgcattcgatctgtagatcactttgggcaataggaaatgtacttaatttttatttagaaagttaagcaaaaatatcaaccagtattaaaaatgttttaaatatgtgttagacatttagacatctttaaaatcttttaaatatatgtagacatttatatttaaaacatttaaaaatacatgtctatgtttagttatgtttatgcctgcatgatttaaagaaagaaatgatctgggtccaatgagataacttgttaataaactgtttatcattcataatcagccttgttaccctagaataggacacttattttaatgtctgacttggtttcttttaaatttatggcttttatttctttttttcccttaatcttctgactactcattgttagagaacttcttgatattttcaattagtttccagagcttctgctctggttagctgtttttttagcgccaactctgaaataatttcccaggttcctggtccttcctctgagagatttagtccttcatcccatgtagcggagcaaaaggagagaggtcattggcctcacattacttttctatgttggttgacttaatattattacttttcccaagaaggaatacatttttacagtaggaaaactttttttttcttttcttgaatttagctgtttgcctttgaaagctagatcaagcatacaaacacatgtatgtatgagtatacatgttctcatgtttccctgtttataaacttttcctataaggatagcctaggtagtacattcttaatgtttgctatagttttatatcttgaataagttagttcaggaaaagatttgctgacaatagatgataaattcgtagcttgtgatgcaacatcattttaaaaagcaagtttaaaaattaaagttattagaa

SEQ ID NO: 60620 - DNA, 1034 bp, Homo sapiens
ttggtggcatttgggagcaagaacacagaataaccaaggggaggtgagattataccacatgccagtggttgatgatctgggcatatatggcatgggtgattatttgaacaatatctatattttatgcttatttttaactccatgagagtggggtctctgaggaggaggtggtggtggtgtgtgtgttctttatatcccaggtgcctggcctcaaggtatttgttgagtgaatgcatgaagggatgaaccttcataagggttcattctgctattatattatgcagaaacagagagaggtaagcttattttatacaatatcagggagaaggctggagagccagtgtcaggaacagtttcctgaagtcagagctctcaaacattgaggttggctgcctgtggaggaagggagttcaggtaaagggtgagcagtagaaatattgtagaggacattcaaagatttttaactggtagttaaaccagatgatcctaaaatgctatttatattctgagactccattaaatatttgagcacctactgtttccataacaatgtgagcatcacagcagacagattcagcagtgtgagaaacgagatgactacccatgctggagtattccaatctcatggtggtggtggtaaaataaaaattaaaaaagaaaaaagttggcaaataacattataattctatacaataaaatgcaggatatttaagctatttattcattcaataaatatttgaatgccaataaacttcataagtgtcagcatcaccattgtagttgaagagagaacaacacaattttttaggagaaggtggagttgagctacaccgtaaagactttatgggactgtgggccgggcatgatggctcacatctgtaatcccagcactttgggaggctgaggcggacagatcacttgaggtcagcagttcgagaccagcctggccaacacgtgaaaccccgtctctaccaaaaatacaaaatttagccaggcgtggtggtgcatgcctgtaatttcagctacttgggaag

SEQ ID NO: 60621 - DNA, 1357 bp, Homo sapiens
catttttaaatttttggttgttttccagtttttcactgcctcactctctaaaattatattgctccaaacacaggtgtatctgcctctctgtccatcctggtcaggcccatcagtgctgcgcagtgtggctgtcaaagctttttgctttctggcctctgtctctcaggcgtgatgaagccactcactccagggcagggctgccttatctccccaacggctaaggccaagtgcagctctgttattggagcacagccacacccactcgtttctgtaccgactgcagctgcttctcactgggacagcattgagcattggcgattcttgggacagaggatatattgcctgcaaagcctaaaatccatactctgtggccctttacagaagcatgtgctgagccttcacctaaattgtagcaggaattcaataaatgttgactgaatggacgtattagagatttcccaatcaggttttacttaatatgtacacagagtcactggtccctggcatttgactacttgaatactctgtagtaaagacacagcagagtatgtgcttgagcttatttcttgtggatggatcatcccatcccgttattactaaatgaaaatcttgtctaagctcctgtgcagtatctctcaacaggaaaagggaataatttggggagagaagttgccagagtttggaaagtattcccacgtagcatgggtgaacatcctgcatttattgtgaattggttccttcatcatggctgtgcaaatcccaggagagtggggcagattagggcacaacgtgtaaactcagcacctcttctgcctgggctttagagcagaaagcagactctgtccaccaagagggcttgcagcaactttggactcttcatgaagctgatgaggcaacctgtgtgtacccacctctgcccatcatttcttcctggaatcagtaatcttcccacataacactttaaactatttcagtcagagggcttatgtatggtctgttagttttgaagggacgtcataacaaagtaccaagaactggatggcttgacacacagaaactcattgtctcacagttctggaggctggaattctggcatcaaggctttggcagggtcacacccccctccccaaaggctctagagaagaacctgctccatgcctgttcctggcttcggaagcccaggtgttcctggccttgcaggtgcatcagtccagccctgcaccttcacctggccttctccctgtgtgtctgcacagcatcttccctttgcgtcttgtctgcctctgtgttcacacttcccctttttataaggacgttagtcatctcggattagggctcaccctaatgacctcatttt

SEQ ID NO: 60622 - DNA, 1359 bp, Homo sapiens
aatttgagaacagaggaaattttagacattatgctaatggcatgaggatcctaggcctagttagaagtcatctttgaaataacttcatagagccgtatttcatatttctcttctaagaattgtgaaagaacttaattttatttccccagagagagaactataaatcatacgtatatagtaacaaagacaaagaatgtttgtggaggattgaactcaatttagaactgatttacacatcagagcaagcctgctgaaagcataagatttttacgtggttttgccagacaggttgaagggactatattaaggataaatagttgagctgttttgtggtatttttatttcaaaatacccagaaatggaaagcagtacttttcttgtttgggtgtgattcatggactgtccagcagagggcactgccagtttgtgagtgagcatccttgctggcagctgagtgagcctgcgcctgcacttcccagaggaaatgggtctgagtgtgatgtggaaatagttacattttattttagaatgttgtcatgaaagttatcataggtgtcataatagcatttgtaaggtgtcacagaagatattgctgtttcctgctacctagatgtactgaacattttgcagttagctacttagcatggtttagctaattggggactgttactgacacatggctggatccctactttgcctctcctccttgaatttgagttatataaaggaaatctcagtacttaggaatttaggggaaaatgtttaatttttgatgtgtaaccaagaagaaagcatggcagtttcttattggtggcttcatgacttactgtgaatttttaatttttctgaaatctcaggtatttctttccttgctgtgaatcctgggaaatgattgcatttgaagtggagaatcacacagcctcctttagtccactctccacaatgtccaaattatcttttggttattcttttgtctaccagactatcacagccattatattctgtggactgaattgtcagttttctccactgtaagaatggcgggtgcacagtccgtgtgtcttgtttatgtgtacacttgcagatacagagttgtttttgcctcagcttttcctatgtaaaagttttaagtactgtgtaaacatgcttgtatacctggcttttgaatatatttcacgcctgcaaacttaattatttgatgtgcatggaagttgtagaagagatcacttggtttttctcttaggttcacttctgtttttgtttctcttgctccttcaactcactgatgacaggtgctttccaaactgccggcctgatgcagaggtgctgattccccatttgctctgcccttctttaggg

SEQ ID NO: 60623 - DNA, 1069 bp, Homo sapiens
agctgggactataggcgcatgccaccatgcccagctaatttttgtatttttagtatagagagggtttcaccatgttagacaggccccctgagtagctgggactataggtgcatgccaccacgcccagctaatttttgtatttttagtagagacagggtttcaccatgttagacaggctgatttcaaactcctgacctcaggtgatctgcctgccttggcctcccaaagtactggtattacaggtgtgagccacggtgcccagccaaaaatgccttttaaaaggtgcatatgattttcagttccagcttcactgagtattagaatcttttaaagaacgtttcagggtgcccagaccctttgctcttgtaggattcacgcctgcagcctccaggcccagggatggggcaggtgtgctgtgcagttgctgtgggcctcactgtgtcatggtgcactccaccctcattgctgtagcctcgcttgttctttcttcagttgtacaagaggaagactgagactgctagtcagagggattggtattttcttctgttctgaatatagaatcttgggaggttttatggagagaaattaagggcatgtctgtcttttatctatgtttgtatgtaacatggtgtttaatgaatataacccatgtgctaggtgcttcacataaatggattctcataacactctgcgaggtatctgctcttttactgtgtgtgtgtggtgtgtgtgtgtgtgtgtgtcttactctgttaccgaggctggagtgcagtgttgcaattatagctcactgcagccttgatctcctggcctcaagcagttctcccacctcagcctcccaagtagctgggactacaggtacaagcatgtaccaccagctaattttttattctttaaatgttttgtagaaatggggtattgctctgttgcccgggctggtcttgagctcctggcctctagcagtcctcctgctttggcctcgcaaagtggtggcattagaggtgtgaggtacagtgcccagtctgttttccgtgttttgtaatttaataagatgtgagcctcaagacca

SEQ ID NO: 60624 - DNA, 1009 bp, Homo sapiens
tttacctctattcagcaattagattccttacaactcataaactgtatgagaaattgaattccactgtttttgtcactgagaatgctcttgtcctagcagacctgtgtgtgctaaattaaggtctgatctccatcagtcactaagatgtggccaaacataaaggcttttcatagttgttataccccgtaagtgatgaccctgagaaatgagagtgagactgtcaaggtacatcttttgtccttattccctagattagttcttgaaataagccaccagttaagaattttgggatttcctgtgcactggcagtggttgaagggtttaacatgcctgaaaccttgagcacaaatccctcctgcagctgccctgggccatgtcagccggcaccagccatgctgtggcaccagagaataagcctgcacttaatgtcatagcatttcagagaactgtcggagcgtggggctggcccttgggatttagctgctgcttgtatgaagcagttttaaaatattaagcttagaaaagtcccactgagctgggtaaagactttgtgtcctttgggtccctctctatgttttatcagttttcagctgcagggcagatgtctcccctgggctgcagtcttaggcactaagatgtgttgctggcagatttgactctagaagccccaaagggcaggcagggataaatagttttgaattttgtttctagtctcttctgtgttgtattggtttcagagttcagtatccagtcacagtggacagttttgtagtattttgcagcctaaaaaatttatgcaagcagtaaattaaaaatctgaaaaacacacgcatacacatgtgtgcacacgaaggcacatacacatccctccatggagtcttccactcttgtgtgttttgtaattctctttatttttatttgtttacttggagacagggtctcgctctgttgcccagggtagagtgcagtggtgcaatcatagctcagtgcagcctccacctgctgggct

SEQ ID NO: 60625 - DNA, 2148 bp, Homo sapiens
ttcatggtgagtgccctgcatgggcataccatcattcaccctttataccatatgtttgactgtaccttgtctatgtttggatgcacaaatacttaccattgtgttccagttgcctacagtattcaagacaataacacgttgtacaggtttgtagcctaggagcaagaggctatgccatgtagcctaggtgtgtaggaggctctaccctctaggtctgtgtaagtgcactctagcctgatggcacaactatgaaatccctgaatcacacatttctgttttaccttaattaattatggagataaggccttgctgtgtttcccaggccgatctcaaactcctgagctcaaataatcctccttccttggctcccgaagtgctgagattacaggtgtgagtcctgtgcccaagccatgcgtctctcagaatgagtgtgcccctgttaagcgatgcatgtctctgtatgctcatgtcatgcctggcctttactggctacttgtacagtcatctgtcagctgtgacttttggggctataaatccatcaaagttcaggaatctcccaaacttggttcatttaatgcttagcagacgtagctccacagccatatttaaaactgatgatgatggtgtcccttgtttggaggattcatttgtaagtgaccataatgagtttatcctggccattccccagagaacagcaggactcctggttcatctaggatgtgtgaagtgactggccctctgagattgctgggcttccttaaaaatgtcacatacaaggacatagattttcacattgtgtagtattgtttatatcaggggtccccaacccgcagaccactgtgtggtactggtccatggcccattaggagccaggctgcacagcaggaggtgagcagcaggggagggagcattactgactgagctccgccgcctgtcaggtcagcatcggtgttagcggaactgtgtgtgagggatctaggttgcacgccccttttgagaatctaactaatgcctgatgatctgaggcggaggccagatggtttcatcctgaaaccatcctcccaagcccccatttgtggaaaaattgtcttacatgaaactggtccttgttgccaaaaaaaagttgggggccactggtttagatcttgcagtattgtgaagtaatttttggtcttctgagagactccaagcagcacaccagcatgaaaagatgagccattcacggcagctcttggcattggttttaagatgaaatacatcaatattaaaaataactataaaacattcatgaaagtttttggagtttctttgaagaatgtctttgaagctgacttaacattattgcatttattacagttgctctgcagttcaactgggctttataggtttgcatctggggttcacatatgcattttaagacgaggtttgagtctgtttgtataaatcaaatgcagtcctcagactcatgtgcaggccgcatggcgatcccgggatgaagtagatatttctatttataaacagattcctgagtacttcagatattatttgtatgttggactcctgtctagaattggcacatatctacatgtacagagaagaataatgaaatgtcaggggtctcactgcaccctcctctttgatcccattctctgaggttttaatttgggcccaggaagcagcacttaaatatccctactccagctgctagcttcaaacaatacaaagctaggcttccaaatatatttatcatttcttggttgaatatttgcaaaaactgacctaccctacgatttctctcaaataggccttagcaactacaaatatggatgagaagatagaaagggaagctttatgtttgcttgcattttagctaaaagataattagaagtgcaatttaagttatgataatggaaaaaaagagctacacgttaagtgtggtgcattgactgcatcgagaaaaggtgcagtctaaagcccagcaaagcttaaaagagaaaaactagaaaaaaagaactttttggaatataaactgtgacagattttttgtattttctgtgggcttgaaaagtccttaacgttttcgttgttactgccctggtactatttatgtgttagaatacagaacaactttaaatttgtggagtctta

SEQ ID NO: 60626 - DNA, 1082 bp, Homo sapiens
atatcacggcagagtgtctgcgggagagtgacttgggaggagctgtaggatggaagatcttgaaagctccacattagaggtgaacttggagcatcttgtgattgcagggcaaatgggttgtgggaaatggagaagtaagaagtagattgtgattggtttttgtgttcaatgtgatataacttagcaatgcaggagtttttgtggaacctggaactctatttttgtttttcatctgttgaacttgtgccattctgtagagagttatagatatttttccatagaaaggcaggcagtgcagcttggattctagagcagagagtttggattctgttggcttgagttcgaagttcagccctgctgtttattggctgtgtgaccttgggcaagttacttaaccttttagcacgtctgtaaaatcatgataacaattgtaccgattgcatgggatgttgtgatggtgaaaacattgttatatgatatcaccttatacatgttagctattattcttgccatttttttgtatttgcaaattctttcccaggagccagtagtggaataatgtttacagtagttctttgaacttttttttttttttttacagttttactggcaccaaatgtgtttatctacacctagtccccattagaaccatgcaattacattcatgtttgtataaaggttgtcagtttaatattcaagcaattaataaagacaaggtgtgagtttttctgttaatgcacctctgtcttaatgtgaagcaacgtataagcatgcatcttaccataattggtgtgcatgtctgtgtacatgggcacaaacatttctctttcagccctgtaatcacatctccaagtaatctaagtcaaaaagagcaaaatctaagccagtggacatgctgaggctatctcagggtcttctggaatgatcaaggccagaaatcccatcttcatatacattttttttttttttttttggagtcgaggtcttgctatgttgcccaggctagagtgcggtggctattcacaggtgcgaacatagctcactgcatccttgagctcctgggctcaagtgatcctcctgcc

SEQ ID NO: 60627 - DNA, 1035 bp, Homo sapiens
aaatgcatgcgcggaagcaaaaagtacctaccattgaaggcccttgggtttgtgttttataacctagatggcctggcttagtaaaacaggttctaactaggtacctaacttgcactacaggaagaagagaagtaaggctttactgagtcaggtggtatgaattagaaattaatagtattatcctgagtggagcttggtggctttttcagtggagtcattttcaccatccttttacattaaaaatgtaaattgattcacagtggggggaaaataaaaagtgatctagatgtgtaccttaaggaaaagaattcatacacctttattcatgtatgctattatgtcttcatttacatgttattatgtatcatctagcattatcctatgaaccattaagaaatggcctctgggtgctacaatgtgagtggcacttcctttaaaataccccagccaaaaataaaaaaagtgaagcaatgaaacagttttggcgaagattaataattactacagctgagtgagtgatacataggagttcaataaattatcctctctacttttttgcaagtgtggcaaattagatcattaaaaaaactaaaaagtttttgtaattaacatttttaaatgttgggaacaaaacccttagaaataattttattcttgctctgttatttagtggaggaaactcagggcagatgacatgtgttggtttgtcctgtgtgtcaaggctccttggaggcagagcctcttgggaggtgcaggtttcctggttcctcactttgtgctgggtgtgcctttcaggatctgattcctgagggtgtgtaccaagccagtactgtgtgtgcgcttgcattgccttactcttcactaagaacatggaatttgtaggtaaattctaagcagtgaaattgtagaaactaaaacactttgaaaataatatatataaatttagcatgtcttctgtgacatgcacaattataaatgctgtacttattttaacacacgtggtgaactctgtgaatgggctctggtgttttgtcc

SEQ ID NO: 60628 - DNA, 1048 bp, Homo sapiens
gagcctgaggcaggagaatcgcttgaacccgggagacggaggttgcagtgagccgagattgtgccactgcactccagcctgggcaacagagagaaactttgcctcaaaaaaaaaaaaaaaaaaaaaaaaaatcaagagcgtgcaggtggtagaagaaaacagctgtattgaggctgtagtgttacagctctgtggctgctcccgcagagcagggctacccgctaggcagtgagcgcagggtggcagctcaggggcagttctacagtcatgtttatacccacttttaattaatgcaaattaaggggcaggttattctgatctttctagaaaaaggtggtaactttcaggtgttgctgtggcagtgttaaactgtcgagctggtggggatgtcttgtggagaggtgctttttatacagtcgttctttgtacaatagacagtgctacttcttgttaacgaagaaatacagatataaccaggataattttgagtacagaactgttcatcaaaaaatattaaaacatacctatgttctggctaagtgctgtgttagaaaactacttgctaagaatatgtaacaagttgggaattagaactctcctcctgtttgtttgtttttttttttttgatgcagactctcgctctgtcttccatgctggagtgcagtggcacgatcttggctcactgcagcctctccctcccgggttcaagtgagtcttcagcctcccacatagctgggatcacaggcatgcttcactatgcctggctaatttttgtatttttagtagagatggggtttcaccatgttgcccagactggtctcaatttcctgtctgtctgtctgtctcgatatcttttcttctctgtctcttgtttgtagtagagagaataactttgattcctaaatagaaaacagaatatatatgtgtggatacttgtattgtgttgattgtcttcattactagtttcctaatcgtagcagaaaaggtggtgttggctactaatgtcaccccagccctaaaggagtaatgtgttcttgataagtttgtg

SEQ ID NO: 60629 - DNA, 1001 bp, Homo sapiens
tggaataaattaaaacctagtttcaatattgaatcaaagctaagtggcctccctctccctctcaaaggttaataagtttttcaaaccagagtgcgtgaataatttaaaagatagcatatggaataatttcctttgcaagaaaatcagactaatatttttaggtaattcagtttactaagcacctagtttgtaccaggcattgggcttagtgctactatactctgtgtgtgtgtgtgtgtgtgtgtgtgtgtgtgtatgtgtgtgtatatatatacatgtatatatatgtgtgtgtgtatatatgtgtgtgtgtgtgtgtgtgtgtgtgtgtgtgtgtgtgtgtgtgtgtgtgtgtatgtatcatcaagccaaagtcttatagacatgtaactgaaagaccagcaggtgttaagtgatcaggtttacatttgagaaatatccccctggtggctgtgtgaagaatgaatgaggaggcagcatggaaggcagaggccagtcagcaggttttctggaaccaggattcgaatgcaggcagtgtgtggctcctgccagttttgtggaaggaggttgaaattgatggcgattgggctgggtggagatggtggggcattcaccaaggtagggactgctgcgaggttgccagactagggatgggagattacattcagtgttgtcttctgtgagtttgagtgtcttggagctgttagttcggcagctggatatttgggactaaccgtagataaatctgtgaatccaatataaatctgtgaaaagtcagtttaaaacaatgtaccaaatataatctaactttagtgcaataattatatacattagaaaaagtttgaggggtagaccaaaaagtgtcagtactggtcatctctgaggacagtgtgtgtggttcactgttttgttttcgttttcactgtccactccatattctacttctgcttaattccagtaggaaagaagcattaggtttagttataaatatagcttagaat

SEQ ID NO: 60630 - DNA, 1031 bp, Homo sapiens
acaattctatgagtaagggactcttgttactcacatttctcagatgagggaaacgggcagagagaggttaagtcatttgctccagctatgtccagtcttcactgttaattcctaggctccattgcttgtactgaatgagctgatgcttccttcatatttgtaactaatcagctcactgagcggattttagaagctctagcatttctactgctccagcatttgctccgcagttacgttgttgtcacttgggctacagcatccagtagactgatgttcagggctctcctgcagactgctgctgcccgtggtagcacagcccagctgacttgacctatccccagagctcttcttcacctctacacccctgcctttgtcctgagttaataatataacataacagtaaaaacaaaaatattttgtggtcagttttctagttactgggtttaatgacaactagccagtttagcttatatatattcactatagtatttcctttagttctatgtgctatgtttactgtgatcatagtaaaattattttaaatacttgattgggattagaacagggcagcctcttatatataacttaatttttttactagcaagtttagaaatttaccagcaagtttataattttttctagccaatgtatgagcttataaacaaaacaaaaaactctttagttatgtaagagaactgaagggaaattacagtgctatcttcaccactgcaagagggtaggtgcttgtataagcttttaaaaatgggcatgacttgcaaggctattttagttgcatggagaaagccatagatcacaatgcagtttccaaccatactgcattgacttaaaaaaaaataccctgagagataaataattaaacaatatgggatgcatttcatagaatcttcaggattacatgcttattttctcacgaacactgagtttatttgaattttggattatgtatatactgtccctgtgctccatacgaagtttccattaagaatgtgttcttgctttaatgatgtgca

SEQ ID NO: 60631 - DNA, 1428 bp, Homo sapiens
ttagctgtacttttgttaatgtgactgttttgtagtttaatgttttcagaagattgcgtttctttttttttcttacctttcaataagcgttctcaggttgaaagagtgcatatctcaatgatggtatgtaatgttttcatcgaatagccctttggcagccggccttttaaagttagagacagggaaaacaccctgctgtcatatatttttcaagaaaagattaatagctgtgattcattctgcaaatagctattctttttgagagttagtcttgcaaaatttcttcccttccttttattgttgtcctatcaattctgagaaactgagaaaaatgagccttgggattatttctcattatacttgtctcactgaatttagtgggcttatttcttcactcctctcttgtaaatatttgcagactcattacagcatttgcctttcctgtgatttaaattaaaaataaagattttggtaagctgtatgtggcatgatgaaaaaactaggagactgtggaagaaggaattaggagatgggaatgttggatattgctattcaactactatttgattgtgaaaaaaattacttcttgatttttgaacttcaacttttctcaattgttggtgacctctagagtctttgcaatccctttaagttctgtgattttaatggcaaataagtacttttattttacgacctcaaaagtgtggtcattttatgagaaactttataggacatgtagctataggtttttgtgttgctttcagacaaacttggaatgatagttcaggtaatgtgctaatcactacaaatttgtctagtcagcgctagagcagcaagtgtaacttttatagctgtccatgtcagtggattgtgtaaagactaataagacttgaaaagactaagaggtagtgaacagctctccaaatgagttgattgaagtctgtaggcaactgagggtctcatatcagaatacattttctttgcatacattttatgccatgcaagttgaaactcaggcctgctctgtagaagaattcctaaaagaagatgtcttaattttatattttgactttttttctgatttggaagatcattataaaggtgagagaaaacagcgtaaaaaaattgctcatagcgtattcaacagatgattataatgatgacttaatcaagtatgcacaaatatctttatcatatggaaaccctgcccgtagaagtttgtagctgtgaaattcttaagtttggggcacaatgttgtgtacttacactaatagagctatataaccgggtcaaattgtgggttggtttaagaatttcacaagagaaatgaatagttgtggttctttccttgtgtgtatgcgctcattaaggctgctggaatcctcacagcgtctactcgctttgcaggacctaatggagtacgttttt

SEQ ID NO: 60632 - DNA, 1416 bp, Homo sapiens
aatcttcatgtgaaatggaacaatgacttcaagttcagatacccatcactggcagtgctgtatgtacaatctatcaaggctagttaggatgtctttgtggctcgagaaagcagatttttagatacgggagagtttggttacttgtgtttgtgattctgtgctctctattaattggcatgggattttcggacctgaaatttagtgtagatttcagtttattctgaaagataagtgtgaggttgagatgtggtcttctgtgtgacaggtgctgatttatgttggagtcctattaggatagatgcgtcccacattcagttgtatgtttcttaggtcaatcaaagaaactgatctgaaggtgtaccaccaccttctctcccaagatgacaaagctgtgttgggtcattggttgggagcagtgcagatgagaagacaaatgctgttgacaagttgtgtgtctagttccttaggaaaccagtcacctggtgttgaagacagcagcagaggagtaccgtggcctagcatggagctctgccatgcctttggttctttctgtggacacattttcatggaacctagagattttctggtttggggaaggatacaatggaaaaataattatgagatgatgatgataagatttaattgaatatttgctaagtccagtgcatactattaggccttcaacatatgaatttataatccaatgaattagatattacgttcctttcttacaaaaggacattgaggcttggcgatattaataaatggctgagtggtacttggcacccaagaccgtgtgactccgaagctcctgctttcagtgaaggagcctgtggtaggaacatagggtctgcagtttcagatgttgtggcctgctgtgccttgttggtgattgtagattcttcacgatcaatatggagaaggctgcctgcattgtctcccttcttcttttgaaaaattagtttttacagataattgcaaacaatgcaaaattaaggaatgcaatctctttttgacgttttactccctagtagtgactggtattaaaaagcctccacgcagtacaggatgtgggtagatcaaccctggattggttggttgggatgtgattcattagatcatctatgagattctctgttttttaggtcagagtaattgccattgatcttatgatgcagttctgcttccaggacacttaatgaacacggaaactgaaaagtaaagaacttggcctgtagggtctgtgagacgggaccacccctgggagccgtgttgtgtagaggccatccagccaaggactgcaaacgtggagatctgttgtggcagtggattggattaatctctattaatcagtctattaatctgttgatctctagctgaacaatctcttttgttgaattgttgcattatgatatt

SEQ ID NO: 60633 - DNA, 1011 bp, Homo sapiens
tctcgatctcctgacctcgtgatctgcgtgccttgacctcccaaagtgctgggattacaggcgtgagccaccgcgcctggccgtttcttaattattttctaagaattactgtgccatttcctttacatagtatggactatagtggcgtgatcatggctcagggctcactgcagcattgaactcctgaaatcacttgtaatcccaaagtgctgggattacaggcatgagccactgtgcccagctacaattttttaagcaatagaaggcctgtccacattgccgagtcttcctttggtgatggttcatctgaggattgcatgcccaaagccctggagtgggaggcttagattcttatcctagcctttcctccaacagtcgacaccccagagcgtgtgtattcatttctttcttccctttcttctctctctctctttccctctctctttctctctctttccctctctctttccctccctcccttcctccctctctttccttcctttccttccttttacttcctttcttttctatcttttgtagatatagggtctttctctgtcatccaagctggagtgtggtggcatgatcatagtacactgcatcctccaactcttgggctctagagattctcctacctcagcctccgaatatctgggactacaggctcatgctaccaagcctggttgatttttaacattttttgtagaaacgagatcttgctttgttgcccaagctggtcgcaaactcctggcctcaagtgatcctcctgccttggcctcccaaagcactgacattacaggtgtgagccactacaaccagccttgtttttcttatttgtaaaacgatgaggttggttgctaggttattgctgttgatttttctggggtcaggccagagactgggttcctgggagaccacagggtccaaggggtggtcgaggatgcagagggtcctagttgcccgagctcctgggtgtgcacccacttccttcagtccactgcagctctttgg

SEQ ID NO: 60634 - DNA, 1052 bp, Homo sapiens
aactgttgggattacaggtgtgagccaccatgcctgactgatttgttccttttggtggtcaatcttggttcagtagtatataaatttagagtgctgctgtattttgagcagctgctctgtcatatgagcttgaaatattgggttctatgctgcttctatgttgtgtaagtctccaaactgaaaggatttgtgactttaaaaaatgcccacttttgctcatattttttgtttcctttatttgtttggcacttgttttcacagcggtgacttcagagcacaattactgagaaaccttgagtgttgatgtaaatcctccactgggttctactattacatacatcttcgtaactaggtaaacttccaggagtcactgaaatttggtatctgtaaatgaaaaattatatcaaatacagataccagtgaaattgctagatttcattgatgatttcagttcagtattctaaagtctggatgtcacttagtacttggcaggattgcaaagcaatgacatatgtgcatgcaggtagttttaattcaagccaattgtgagaaggatgttttattggtataagatcagtgtagtgttgagttggttgtggttttcaattgctgcttttgttttggttttaaattataaattagttcatttgtctttatcatcagtttacagttgcattgtgtcatgtgcatttaacttatactaattcaagtctcaatgtttgcttaaaaataattaacaatatgtatttttttcatgcaacatctccttaaatacaggccagatgcgtttcttctggtattcaaccatagaaacagcaatcccttccaatgctgcaggaaaattggcagggttaggctttgtgaaaggtaatgcagcactcagaaaaccacatgtgcttactgtgtgtgctatttaagtaattttcaaggataattttgtcttaaccttagccttgattttagaagccaagccttgcctaaaaggtgactccgtgcagtttgtggagagttctttggccagatctataggatgtagtgctgtgtttttagca

SEQ ID NO: 60635 - DNA, 1031 bp, Homo sapiens
acagttctgtttgtctaaaacgttcaagaacatttccactgccctctgcatgtttgtgatttttgggccattcagttcagtctggattatccgatagagcacagtgttctgtcattggttcaggcatttggctgtcttaccccacagaactgtgtgttctaggtcgggggcaatattttatatcttttacactctgtgtatagtgctgagcatgttacagttggaaactgttaattaatttttgttctattttcctgcactcaacttttcctcccagaggccccacctgaatttaagaacaaataagttattataaagtcttgtaggaaaaggcctggtatatttagagaatcagatccagctgtcacctaccattcatacagaaccatactaaccttttcctaaaagtaccatcaggctgttggttttgtaagttttctttcgttcattttccttttaaaccaagcctcatctgtgaaaggaggctgaaatctggcagacctctttattatgctctatttgtccacatgtggaaaccaccagaaaccagtaaaaaagaatgggaagtgaccaaagagcagacagaaaataccagttgccctagggagcacccagctcttccaaggactgcatgggtcctggtcagaggggcaagtgaaataccgcagctgcctcctgcagaggggtatctcttttacttgtgagcagcgtctgcagctgtgcaggctctcagcagtgcttagtgtcagccatgtcccttgatttatgctcgtgtgagcctctgcacatgtgggtgctccagcaggctagaggggggaggggtgccccaggtccccagaggcacagagctttttttggataccgagcctgagctgagaagcgtgggatgcaagagtgatgtcctgctccaagttcaaggaaagtacaaagtaagcggaaatgcatcccttcaaatagaggaaatcccaagttgcttttatgtttcccgttatagctgtgtgaagtcatatcttgaggtttagctttcacgt

SEQ ID NO: 60636 - DNA, 1081 bp, Homo sapiens
acagagtacttaaatagaaacattaattggatcagtgtgtggatctcatggagatctgtccctgtcatacgctggcaggcacattccatttctttctaatccccagatgtaataagatgcctgggtctgtggttacttgcatttgccattcataaaattgctgatcagtcctcccaggtggcactgttgtttataaggctgttcaaaatgtcagtggacttctgccatccctaagagcctccttgttatttctcttatggggcctaactgctgtaaaatatgtattttaacatctagtgggatatatttctttgtttctttgggctattccttcatcatctgttgaccacttttagtcaatagttatgggtcaaagctttggccagaacacaaaatacttgataggaagagtcattgtgagaataaataacatgtagtggaaactctgacattgggatgggacattgagtgggctcatctgctgagaatatttgcaagatggagcttccacagagcctcatgggcaaagcctaaagagatgagttagctgggtgagagggaaaaagtaagttgtcagagttctgtatttcatatgtgatttcgtttgtatgtctgcctctgtctgttgacattacgtcactgattattggctttaccacacacatgagtgaagaagaggaagatgcgcagggtggggagaaatgcagggaagacactgttccttttttttgagacagggtcttactctgtcacccaggagatgacacgtaactacatcaactggtcctacattttcaggcgaacatacaaagtgcttctttgaactagggttctgtataaaatagtttgaagagcaatgtatagtattaatttttttttcttctctggaatgttacgtggagtgaaattcaaaagtttcctaatgtctagataaatttctctctgtccacacggtccgcccatgtcttataagaccttcacatgagcctgtcccatttgtgccttataaatgcacattagtgatgtgatctctgctcactgcagctttgaaatcctgggctcaggcaatcctcccacctca

SEQ ID NO: 60637 - DNA, 1944 bp, Homo sapiens
tcagggcagtgtagaatgttacacagtgatagtttatgtctagccaggttttgaatgctcttactggaaacagtcatatttcctattatctaactgaatagagaagtaagcagttgagaatacagttgggctgcacttgtctttttttccaagtgagttattttgtattttttgatactctgaaatgatcagtaagtgtgtgtgtctgtgtgtgagcccatgtgcgtgccacgcatgcgcttccctgtgcatgcgtgtaggaggctgggatggaagggatggccataactgactgttggaatttccaggaaaggcttggaatttatttttgggtcacaggccatttttttggtttctttcaagcactaaatgatttttttatgtaacttcacagattaaagaaatgcagtcagtttttgtatgacttagtaaatcttaaggaaaaaaccctacttacattaggatacatttgctggaatatttacacaaatcttacaataaaacttttcatcttttaaaattttttatcaactcagccataacttatttattttttgcttcattttaaagagaatactcattctttttttcctctttcctggtacttcagcttctcatttgcttgcagcctctgcattgcatggatgctggtttttcagcagttctggccctaacagaagcatcctaaggataggaggatttcagtctgggcttgctagccttatcagggggagagcagagttgctaagtttccattctctgtcactttcagttactctgctgtggctgctcagtgctgttcccagtgaaataattttagcatattttttcctcttgtttctgcatcagcgtcattactgttcatgcctccctggggatcagactgattggtaaattagtgccagcagaggaagtagaagacaatgtgtgagcgtgttttatttaaacacatacactctacaatttgttttattggattttgtcctttgagaacaccacaagtaatcccattacagtctagaaactgcttgctcaccacgcctccacctttgaaagcacataagtctttaataaatgaggcaatttccagattcatcaataattaacccagaacatgacaagttttatcacaactcaaagctttcccatgattcaaacggtctgctcctgccactgaattgtctgtatagtttctggttcagcttcccagagctcaggattctgccatggagacactggtttgagcaagcatactggatgttttcttgaaaaatgttaagctttaattgtttataataaaataaattcatacttattgtaggaaatgtggccagcacagatgattttaaagaagatagtaaacacccatattcttaccacccagaataatctacaaaagagcatttctttcatttctttgcattctttctgtttgtttgtgtatatataaatacaaatgcttatttttttgggggggcgggtggtaacaggatcttgctctgttgcccaggttagagtgcagtggtgctatcagagctcatggtggacttgacctcctgggctccagtgatcctcttgcctcagcctactgagtagctggaactacagacacatgtcatcatgcctggctaactttttgtatttttttttttgtagagacagggtctcagcatgctgcccaggctgatcttgaactcctggcctcagacgatcctcctgtcttggccagccaaagtgtttcgattacaggtgtgagtcatggcacctgaccaaatgcttttaaaaatattgataattgaaatcataatgcatacacagttgttcctagttactttacttaatttatcggtgtcttcccatgtctcgcaaaaattttggtaatttttttcctttttgagacaaagtctctgtcgcccaggctggagtgctgcggcacaattcttc

SEQ ID NO: 60638 - DNA, 1162 bp, Homo sapiens
catctttgtagggtgtcatggagattaagttattcactgtagacaatgcccctttcatgtaatagattctgtcagtattagatctttttctttctcttcaagtttcaaacatagattaggcaaaattttaatggctatttcacaaaatcagcttgattcttgtttatgacatcaagtgttgtttttccaggttgtctgttaaagggctacttttttttttttctaaaagtgctttagaaattccagtgttagtatgtatgcatcatttagctaagaatgaagatataaagatcacccaacagtttaagctgattcttttacaggtcaaggagaattgtgtttgtctagctgtcttagccgtgtaggactttctacttgttacttcctaaataattgcagccgcaacactgctacttcaaaggaaattacataaattttatttgctgtatttaaagtacattaaaaggcatcacttacacatttttcattaaaaatacttttaaaacttggaaaggataaaagtataaaatgtaaatactgtctgtattaataaaatgcagagatgttttaaaggcctttagtgtttattaactagtaatagttctgagaataccctggagctcaaatagataatctgtgttataaaataaatgggaaagttgacatttttgtgacttttctaatccttactatataggcctctataattcatgtgcccataacacttcttaagatgtgattttgggcatcttaagatggtgatttcgggcagctaaatcagcaacaaaggaacacagaacatcttttgcttaggtaggtagttgtaagggttgacagattgatgcaacttttaatactttagtttggctaaaggcacccagtgcaaatcacctgaagacttcacccaggagttgacctatttatcatactaaatagggagtggcgtcttgaaggctcattcacattctgggcttggcaggcagtgcgatgaagtcagacttgcagttatcaacaccctggctttgtattcaagaggactacctcctctcatccgtctttttcataccacagtattgaaggggttgttttcctctttgaagaccttaaacatctcattaattaaagtaatgcttcttccctctccccatatgcatttagggaa

SEQ ID NO: 60639 - DNA, 1043 bp, Homo sapiens
cagacactgtaagatttaaggttttggaactcagatgtatatttttctagtgtctggtttttcccttcttgtatttgagacggagtctcactttgttgcccaggctgcagtgcagtggcagagtctcggctcactgcaacctctgcctcctgggttcaagcgattctcctgtctcagccttccgagtagctgagattacaggcgcctgccaccacacctggctaattttttgtatttttagtacagacagggtttcacaatgttggccaggctggtcttgaactcctgacctcatgatccgcccgcctcagccttgcaaagtgctgggattacaggcgtgagccaccgcgcccagcctttccctttttgttgattgtaccgcatccctttagattagaaaactaatctatgttatagggtttatatatttcaaaaagcctctttgagatagactacactaaaaatcagtgtttccttcttcaacacttaagaaatcaacttgatattatgtctcaaaaacctaaaattgctaaccaatcaaaagatgtgtattaatattaaaaacacaaagaaaggagtgttgtttttgtgttggtggtatatatgagactagatttttttgttcaatttcttttacatagacaatacaaattggaaaaaagtttttatgtctgtgttttaattttcttctctaagtccaatgttaagtccaaaattaaaaaataaactctttagaagtctgagggacaaaggaaaaaagaaaactcttccaggaaacgtattttcttataccacaaaggcatttaacatgtgtcatttataatgctgaaacccagtgtgcaaaaccatatgtgaataatggttagccagattcctgcccagcagggttatactctaaacttggatttcttttattacagacagcagcacctgcagaagaaggaggtaaaatgtgcaggatattggttcctgatgtactacaacacaggatgtgactaatcactaaattcattaatgttgaacataggatttggtacctttac

SEQ ID NO: 60640 - DNA, 1052 bp, Homo sapiens
aatgacatatatatgtgtatcagagatgctcaaaacacttcaaatgaaaactggctgtctttaggagttttccatatagtgtggaatccctgctttctcaggcctgtccaatgtgtcctgtttagtgtctggtaagctcctggctgctgagcctccaggtcccctggtctctgtgtgctaccccctaccccctctaagggcttcaccaattgttctttagccagagactccttctacccagctcgccagctacctttgtgcagtggaggttgagaatgccccaaggatgcacgtaatggaccagcctttccagcatttggctttggctcccagaaattttgagctttggcaaatcttacaagctctgtgagcctctgtttccccatgttctcatattcagaggtgctgggctggactcccactgccagttccctgagctgtgcagggactcctgctctgcatggtttgttttggtgctcatgggaccataagtgatgtgcagtggcttttcagatggttatacagggtccaggacctcttactgcttccctccatgctgtgagaatattttgcctcaccccgacccccccaactttgaaatgacggggcttgctctccaggtcaaatggatgctattcagagttagggtaaattttgcttagggttggctgggtgagaaggctcacgcctgtaatcccagagctttgggaagctgaggtgggaggattgcttgaggccaggagttcaagacccagcctgggcaacatagtgagaccccgtctctttttaaaaaaattagccaggcataggccgggtgtggtggctcacgcctgtaatcccagtactttgggaggccgaggtgggtggatcacgaggtcaggagttcgagcctggccaaagtagtgaaaccccatctctacttaaagtacaaaaaatagctgggcatggtggtgcacacctataatcacagctacttgggaggctgaggcaagagaatcacttgaatcctgggaggcagaggttgcagtgagccaagatagcgacactgcact

SEQ ID NO: 60641 - DNA, 1075 bp, Homo sapiens
gtcaggatcaaactgaggaggacagaatgccagggcaagaccctgagacttcgtgcagtaggaaggactgtggtgtttagctaagagtcagggtaacaagtagttctaggaggatgacctgagcaaccttagatgaggtttggatggataattccttagcatttcattctaaataaaggttgctgagtgaccaaaaggggaaggagagagtgaagggcaaaagtgagggcaaggaggtgctggagcccctttgctcactgttcccacctccctcatagctctcctctcagcctgtaggggagctttggattgggtttggtgacttaggtttacaagccatttaaccttgggtataggggagctttgtattgggtttggtgacttaggtttacaggccatttaaccttgggtacaccaaccctacggagccccattatctcaagtggaatattccctggcagggttaatgtaagtattaaacaggatgatgagagggaaactctaaagtcctgggcccggcccatactagctgctccgtaaagatgaatggaatcaccaatatgttttatccaccaagcagttttacacccagggaactttcccaggtgtcccactattgctgcttggatttttcctgtttacttaaaaacgcagcatgtaatttcattgaaggataggtaagaatgtgagattgaatgacgtgcagcaccacaatcaggagaacaaaattgtgtgttgcatgtgtgtatgggctggggaagtaaaagctgcgggtattggcttgattacaggttgattattggggcctctggcttctgtccccaagcacatcactttagagtgatttaatagcaacctgttgttattacaggttgagcatcctttatccaaaatacttgggaccacacaagtattttggatttttctggactttgggatatttttgtatatataatgagataggttgaagatggaacccaagtctaatgtattgttagaatttatgtttcctacgtaccttatacacatagcctgaaggtaattttatgcagtatttttgtgcttgaaaataagt

SEQ ID NO: 60642 - DNA, 1052 bp, Homo sapiens
atgtcccctgctggtaggggccggcaggggcggcccgtcgcgtccgggggctgcagggtttggggagtcgccggcttggggtcggggaggcgttcccgggagggccaccgctggcacttggcactcgcttgcgagcatttactgagctgatcccacttgctgggctctggaaagcacaaccttggaagagtcgcggaatgaaaagttttcctgcgaggacctcagctcctacctatcccgggctggttccatgtggctgggctgcggggccgggcctgacttgggagttgagtggatttccctttttcctggtggactgataacattgtctccacttcacagcattcctctactgtgtgtcagaagtgaaaaggcgttttgttaaattgttttaccgactgtgtctgtgtttgacaacagcccacgctgaagtttctcccaagcacccggggatatatttcctttgtagtagagtcctctttggtggggagcgcattcgtttgggtgcagtatttcccatttgttcccgacagtggcctggcccctgtgggcttgggggctgcaaatgacgttggaaagtggcttggtcagccctattgagcgtacacagggtactccggtggcatcttcagttctctcagaaattaagaagtaaaagctttttagacttttgttttgcttttagtatatattggaaaaaatagcataaatttggccttttaaagataattttgggggacgtttggagacccgacacaaggatggaagacgttggctttagtagctctgttatgttccttacagttgaactcttttattgaaaatcaaataaaattagtgggaattgggcacctgtttatcttgcaaagctgacaaagggaaagaaaaccatctaaatggacatttagcatttttaagtgttgtttatgtgtgacagtttatgctttaaatgttccaaaagagtactcaaattgttcaggcactctggaaaccaacaaaacaaattgtgcaaggaaagagaaataaagtaatatgcactctgcagtacgtct

SEQ ID NO: 60643 - DNA, 1056 bp, Homo sapiens
cgggttcacgccattctcctgcctcagccccccgagtgattgggactacaggcgcccgccaccacgcccggctaattttttgtatttttagtagagacagggtttcacggtgttggccaggatggtctcgatctgctgatctcatgatccgcccacctcggcctcccaaagtgctgggattacaggcgtgagccaccgcgccctttccacattttcacatttttaaatagagccacagaagtgtcattcacgttttaagcagttaagttggtaaagatcctgtctccattttgtaagagatggattacattcaattactactcacaacagccaactggaaggttattccattgcttttgaaagattattccattgcttttgaagtactggttgggctggcatctgcgatggtagccaaataaatgagatttctgtgtaacacaagctggcactggacgcactcgttcgctccgcccttgttctgatactccacgatacagcggatcagttggtcattctcctcaaggagccgctggatagtctcttgattgacttccaccttgcccctcagccagtccactgacatcccgaggaagctccggaaccacagaccaccaagcatctcgttgttgaggatttttgcatctatgttcatgagagatatttatctgttgttttctcataaataaatgtctttgtctagttttggcattaaggtatactggcctcaggatgaattgggaagtattccctttgcttctatcttctaaaagagattatagaaaatcagtgtaatttccactttaaatgttttgttgaattcacctctaaacccatctgagcttggtgctttgtgtttggaaagttaccaattattgattcaattttaaaaataaatataggcctatttggattatctatttcttcttgtatgagttttggcagattgtgtcttttaaggaattggtccgttgcatgaaggttatcaaatttatgggcatagagttgttcatagcatttcattattatcctttaatgtccatgaaatatgaaata

SEQ ID NO: 60644 - DNA, 1047 bp, Homo sapiens
tttccacattgtagttcctattttcatacttaatttggcccatttgttgaaacctcagtacatttgaggcactttaaactgattggttaaaagtcattacttaatagctgaagaactggcagtagtttgacttccacatctcttccacaggtgattagccagtcaagagctaggtttaatcccagtatcagcatgattaagaagtgtattgaagttctgatagacaaacaatacatagaacgcagccaggcgtcggcagatgaatacagctacgtcgcgtgatgtcgctctcctccagcgtggtgtgagaagatcattgccatcaccatttggtgtgttcctgtgggaaaaagcaggactgtgcctccataatttggtcatttggcagcccctgttttctgctgtttacaacatcaccagtgccacgtcatgagcgtcaaagaaaatgcctagagatatttcaagctcatgtcattatgacatttcttaaaactttattaaaagaatgagtgaagtattgctgaaaagtggaaattcggttgggtaccatgctttttctccccttcacgtttgcagttgatgtgtctttttttttttttttaatgtatcttaaaggacataaaatttaaaaacttaaatattgtaatatgacagataacctaataattgtatctacattaaaatgacaaacatgatactgctgcttgtcaaataaaaaaaaaataaagaaatagaatgccttttttatgtggatggagtatcaggttgaccacaaaatatattgactcaaagcagctaatgcatctttagttgcgtttttatctgaatggtttaattcacttgtactcctatttaaatcctacatgaaaaatgtctagattattgttcttgactgcataggactgcattcagcataaagaatgctttatttttatggattagatatattggatctaaacattttgaatcttgaagatgtaattccatcagcagtttctggtggtgtgctactccacagacatcgcagagtgtgagcaggatgcttgg

SEQ ID NO: 60645 - DNA, 1680 bp, Homo sapiens
gatccgcccgcctcagcctgccaaagtgctgggattacaggtgtgaaccaccgcgcctggcctacagctcatttctttcaaagaaaatttgtcagtagaaaatgcttcttaaactttcatatgcaaatgagccacctgggcatcttgttcaaatgcagattgtgatctagtgggtgtggagtgaggtactgacaggccagtgtgaggaggggacttctgctcttcattattttaactcagcagtgattgttgctttggtctgggatagactgtttctatcacttatgcttcctgattgcctccggtgtgcagtccttgggctgatgcaggatgtgaagataatataagatgttagaccctctccagaaacttaattcccgatggggggagacaaatattaactgccatttactttgaaacctaaaatggtcaagattccattttcctccaggctaataaataataatttgcaatatatagattgtattttgtctttgaaacgctgtgaggagatcctcttaatgtggcatggtctgcttctatgccttgcttctgtgtttcttgagctccgtggagataggccccctctcctggcttctctgcttgagccacataaaatgccacttcacagctcttccctttgaagcctgatccagtatgcatttggagctaattactgcagttgacacaactccatctaaaagcgtcatgaaagattctgtaatcactgataagaaaatgatcttgcaaattattgctgtgtcctcctttattgcctctttaccttaacagtacagtttacaataatgtaaatttttttctaatctttcaactttaaccctagaaattgtagatgttttagcagtggttatgtgatattggcacaacataactatataatttgctcaatattgtggtgcatacctgtaatcccagctgctcaggagtctgaggcatgagaatcacatgaacccaggagatggaggttgcggtgagctgagagcgagtcactgaactccagccaggacgacagagtgaaaccctgtctcaaaaaaaaaaaaaaaaaagtatttgcactcactgataaaatgaattgaaaacaagttcagtgacttaatgtcttgttgggtcttttttcttttcttctgtaaaacaggaaatggagcagactagaagtgcagttgatgaggaccggaaaatgtatctccaagctgctatagttcgtatcatgaaagcacgaaaagtgcttcggcacaatgcccttattcaagaggtaaaaggagggcagtcctcagggcttcttagggtagagggcattgtcattgtacagattcagtctctttcttcttaaagaggatacagaaataacctgatcctcagatagcataaagaaatgtttcatacttaatcagaatcgtactcactcacaatttcagtattaaattcagatttgcaggctgggcacagtggctcatgcctgtaatcctttttgttgttgttgttgagacagagtcttgctctgtcgcccaggctggagtacagtggcgtgatcttggctcactgcaacctctgcctcccaggttcaagtgagtctcctgcctcagcctcccgagtagttgggaatacaggcgtgcaccaccatacttggctaatttttgtatttttcgtagagacagggtt

SEQ ID NO: 60646 - DNA, 1020 bp, Homo sapiens
ttttgttactgcggcatttgtaaaaaaaaatgtggttgctttttcaaaatggggtgatggaaaagttacgcactttggtgtttcataaaaattaaaatgtcaaactctaggcaatgagcttgactcttattttatcaaaaagtagtgtatatagaatagtaggaccagaaaatagcttattcccaaacataaactgcttaagattctggcagatgtaaaagtagaaaataattgggttttttcctgtttgtttgaacaaaagaattatttttctcttaaatttggtaatctataatataaaagttatgagagtggaggcttttttgcttggtcattaatttagcagaattgcttgcagcaaactcttatttaaagattttggtttttataaatataaatgttttatttttaaatgtaggaagatattgatgcagaatcttcgttttcattaaatatgaactttagcagtaaaagaacaaaatttaaaattactacatcaatgcagaaagacacaccacaagtaagtgcttttaatgtcaagttttttttgagggggaaacatttaagcattggactttacaagtgtttacattgagattgtgcaaaactttgcacagcaaaattaataatgggatatgtcttttctggtttgttgttggcatttattaaccttacagtcaaacagaaatctctacttgtattttagttttttctaaggaaaagggtatggttttgttgtatttgctcttaaaccattagaatgtgtaactatgcattctctccgaaaattcccacattgagaagtaataaaatttcatatttttcatttgtaaaataagggaaagttctccagttcatttttttttttttttttgagacggagtcttgctctctcgcccaggctggagtgcagtggtgtgatctcggctcactgcaagctctgcctcccgggttcacgccattctcctgcctcagcctcctgagtagctgggactacaggcgcccaccactatgcctggc

SEQ ID NO: 60647 - DNA, 1064 bp, Homo sapiens
atgcctggctaatttttgtacttttagtaaagatggggttttactatgttgaccaggctggtctcgagctcctgacctaaagtgatctgtctgcctcggcctcccacagtgctgggattacaggcgtgagccgctgcgcctggccttaaagactgttttaacctactggtgaagttatgatagttttactgatttataccatatactcaaaactaatagacttccatcctcacctccccaagaaacaaaatgactaccttgttaacagcagtggctttacaacaatttaataaaattattggttcactctttccgaagaaaatgtctgaaataaagtaaatttgaaatgtttctttgaatggtcaattcactgtcagtttttgttttaattgtaggtgaagttaaaatgaactatttgggcaaaccatatgtagccatggttacaacataccaaatggcagttcttcttgcctttaacaacagtgaaactgtcagttataaagagcttcaggacagcactcagatgaatgaaaaggaactgacaaaaacaatcaaatcattacttgatgtgaaaatgattaaccatgattcagaaaaggtatgtagtaatattccaaagaatttaagcatcatcagcattaaagctttttcatgagatgtttgcagttttaaaataaggctgtaattgttattgtgctctggaaagcacttgtattcactacgttactgtacgctccatagagctgcgagcgttaaggcatcacagagcatgctgtgtgagttggtgccatgtgccgtttatagtttgattttatttgtcctatactgttacagcttattgaataattgtaaaagaattgccatctggaagattttgattaattgagattttgaaactagcctttaaagactttccaggtttttggttttataaatgtgcttaatttcatggttctataacaggaaatgacagcctgttgatgtctgtttgtacacatatttaatatgtgtaactccattccaagtgttcttaatgtcagcactcaattaactgtcatctgttt

SEQ ID NO: 60648 - DNA, 1291 bp, Homo sapiens
tatatcagttgctttattggtcaataagtgatgatttgatatttgacttgttctttttaaaaatttaccttatgatgtatattttatttagtttacatttatgattattacataaagctttagaagcctggtgtggttgtgcatgcctgtagtcccaactacttgggaggctgaggcaggaggatcctttgagcctaggagtttgaggctgcagtgagctatgatcttgtccactgcaatccagcctggcaacagagcaagacccggtctctaaaaaaaacagcaaaaattctgtccgctgatcttaccttgtatcaccactttgcctcctttgaggcgtgatatatacagaagcaccctttgtaagatttattatcaatttctacatgagcttgctaagtactgtgacaacttactgaagaagtcagcgaaagggatgacagagaatgaagtggaagacaggctcacgagcttcatcacagtgttcaaatacattgatgacaaggacgtctttcaaaaggtatgttgtgaacagaaaagtttcatttgtattttggtcaactttatttctgaatgctaaatcattagaaaggaagtaatcttttaaaatatttttaaatgtagttctacgcaagaatgctggcaaaacgtttaattcatgggttatccatgtctatggactctgaagaagccatgatcaacaaattaaaggtaatgtaagtctttaatgtggtattgtcctagaaattcattcacaagcacataaagatgttcattgcagcattgtgtacagtaacaggaaacaattcatctggttaaatgtgtatttgtgtagtcacacagtgggatatacaaatactgtattaaaaggacaaaatgtatatgtttatatatgaagattcacaagataatcagtattaatgataaaagattattactacttataaatgaatacacctaaaatattcctttaagtacagattttggagtgcaattccatttcaatttatttttacatcatttcagcttgcttacataccgataagtggtagcaggttcatatttatcctgtgttattcaataaattttcttgcatagtagacattttgaatataatatgcattccttttttcctttttctttttttaagagatagggtctcactatgttgcccaggctggactctaactcctgggctcaagcgatcctcccgcctcagcctcctgagcagctgggacaataggtgtgcaccactgcacccagttgctgtgtgctcttttttaaacctcca

SEQ ID NO: 60649 - DNA, 1050 bp, Homo sapiens
gattgcaacattgcaatatcaagagactggaaaccacctaaatttccatcagttgttaagaaattatatccacataatggagtactgtgcagctgtaaaatacatagaaatgctttgtgtactgataggaaaagaccactaagttaaaatgtgttctgaagctacaaataatatacaaaatacagtacactgtattaaaaggggcaaagggaagaatatatgtattcacttgaatttgcacaaaatatctttgggaagatgttaaataaccacatccctttcctgtggggagaggggcttgggtggctgggaggtgggcatgggggacttttctctgggtgctctgcacttggatccgtatattgtactcctgcacttggatccatatattacctaataaatgaaaatatttgggagttaaccctcagatgtctttttcctctcagacatggcaaatatgtacgtcttactccgtgctgtgtccactggtttacctcatatgattcaggagctgcaaaaccacatccatgatgagggccttcgagcaaccagcaaccttactcaggaaaacgtgagttgtgtgggaaactgcaatgttttcctcctaatcagatccagcgtggagcctttcctttgactttattgttttgaaagatgaaagaaaaagtcttaccatgccaacgaaagaaatgtctttattcaaatgttttaaacctagaatttgttggactcattttggaattatcagattattagaaagctattgataggctgctgcttagccatacggagggtgtccattgaacagttgttaactttccacaggaaaataagctcgccatttttaaataactgtgtttttgtgtaattggcattgataacgtagtttgttgtcatggtagtagtattaatcagtggtaatatagacgacttgcaatttgcctcctttccatatcctctgaatttggttgtccaggaagcaaatttagattaaaataatcttctgtaagtatatgcttgctgccccaaatacccaaaacaataaccctc

SEQ ID NO: 60650 - DNA, 1046 bp, Homo sapiens
tccattttcttacctactgattgtgatcttttttgtttaaaaatgaaaaattgcatttcttcctggtgattagaatataaattagaaagctaacttgacttttatcttttaaccattctctgtttaatttttggaaagtggactttatcttgactttcccaagaagagtctgggaagtagcaaacgagattatagaaattctgaaacttggataagagctgttgggctagaagggtattgtaagggcttgcagagaaaggtgggctgataattttaatttttattatatttctaatctctacataattcatttcttttggatttgttagtaggctattccatggcttatatgtaatcttaaaaatattcttctaaagttgcaagtcatttgctttcctactgactttaacttaatatccattgatattacatttattttccaggtatctcaacacccagtttattaaaaagaataaattaacagaagcggaccttcagtatggctatggtggtgtagatatgaatgaaccacttatggaaataggagaggtaggacattctttaagtgactagcaaacataagtatgtttttatacactgaggtaatttgattgcacatcattttttaaggacactgatttggctagcttaaaatggtcaagatttaaaagatcctaaataaaatgctatagtgatttcctaagaatcctcaggaacgaaaaagatgtgacaactactcttttgataattaaatttataatggatgaatgatagagttaatggttctgcattgtgaaaaaactcagaaacaattataaagtgttgacggccctgtagttaaaaagtgcaggggacaagtacttaaaagacaggctagaggagaggaaacacaaatttatggatacaacaaatttattgtaactttactttaaaagtaattaaattcagagtgaaacaattaaatgggcagtttggtccattcaagttcttgaggtacagtgcaaattaaaatatggaaaattatgctgattgtgaaagaagtatta

SEQ ID NO: 60651 - DNA, 1012 bp, Homo sapiens
tttcattttgaagactcacatctttcccagttgtttcatttttaatacgtgtagttaatatgtgttgtgtaaatgtaatttgtacagctagaattatgtaaattattttagaacattaattttgatacattttattgttgacagtgaaaatgattattgcttttcaagtaaaaatatttttcctctttatatagagagttttggagtcagaagaacaagtacttgttatgtatcataggtactgggaagaatacagcaagggtgcagactatatggactgcttatataggtgagtgtgcctttaaaatctagacaagctaagcagcgttgcctgcattcagtagttgacaggataatttttttattgcctatttctcattcacatatgcaaaactaaagcattctctctgacatggacttttctctgctgtggggaaaggtctatagtcagggtaaggtgggtatttaggagccagggagtgtgtggaacgttctgtgaaaagtaaaactgtactcgattgcatggctctgtttcttctgattgtttacaacctgtagcacatgtttaatctcaacagagatcaatgtgaaaattcaacttgcatgaaacttagtgggaaaatctcagctcatgtcccctcgatatgttcttatttgactctagcattcagtattttatgtttgatgcaaacgatgttagataaattactgggttattttccccttgaagttctgcattccccatggtctaggcatattgaattacttgtagtttcctaatggcccatggtctctcccatcttcctgcctttcctggtgctgttccatctgcctggattgcttctctttctttttctatttttctttcttttattttgtccttttttttattttttattttttgaggcaggatctcacctaggctgcagtgtagttgcatgatctcagctcactgcagcctcagcctcctgggccctagcaatcctcccacctcgaacacccttctccccag

SEQ ID NO: 60652 - DNA, 1006 bp, Homo sapiens
ctccttgcatatatcatgctatttaattatgtagtgctttaaaaacaaataactggccgggtgtgatggttcatgcctgtaatcccagcactttgggaggccaaggtgggcggatcacgaggtcaggagatcaagaccatcctggctaacacagtgaaaccccgtctctactaaaaaaaaatacaaaaaattagctgggcatggtggcgggtgcctgtagtcccagctacttgggagactgaggcaggagaatggcgtgaacctgggaggcggagcttgcagtgagccaagatcacgccattgcactccagcctgggcgacagagcgagactccgtctcaaagcaaacaaacaaaaaacaacaacaaaaaaactaagctcatggaattattgctaacattgttattgttttttaattgacagatttcaacactacacttgcacaatgtctttgaaaccaagagtagtagattttgatgaaacatggaacaaacttttgacgacaataaaagccgtggtcatgttggaatacgtcgaaagagcaacatggaatgaccgtttctcgtatccttttaatggcagcttgatcaatgttctaaaattgataaatttgttgaaaactgagaacatgttcaatgttatggaagaactttcccatgtaactattttctaatatattatcatctacatttccaagttcatcacctcttttatggcaatcagtatttgataacctttcattcaacaagtatttgttgagtacttagtatctgtcaaggactactttaggctttgggaatacagttggtgaacaaaaaaaaattcctttctattataaaaatagaaatagacactaaacaggtaaaaaaaaaaatctaatgtcattgctttcaagaagaggtcgtgataaatgaaagcaggataaggacgtgggggaggcttggagcacctgtgtgggtgctgctcttttagaatgggtggccaaggaaggcctccctgaggatggt

SEQ ID NO: 60653 - DNA, 1032 bp, Homo sapiens
cctcatgattcacttgcctcggcttaccaaagtgctgggattacaagtgtgagccaccaggcctgtccaactatcagttgtttttaagtaaattgatgacaggatcagccctagaatcttaatattatgaggacttatgactggctcatgttaaatcttggaaaaacaagcagcgatttggaatgttatgagatttataacaagttattgatctatgagatgtatgactgaaccctctctcagtaatcagttaatcacaatatctattcagagtgatttggctctgtgcctgggtttgaatcttactggtaacgtatctgtcatattgcagttagcataatctttgggttacctttaagaatgtatagatttctatatcagtactttatatttggcttttcattgggaaaggcttattggagacaatccctttgattcttaaaagttttgagacagtagtagtgttaggttaagattgtggtgttggatctgtagaaacttccggggtgccttgaaccctgttgatttttcttttggaggaggagaggtggaatatttccttttgctttaagctttgttattctggagaattaaaaattcagactgatactgtgtcttgtttgcttgtttgagacagagtttcactcgtcacccaagctgtagtgcagtggcgcgatctcagctcactgcaacctctgcctcctgggttcaagtgattctcctgcctcagcctcccaagtagctgggactataggtgtctgccaccacacctgactaatttttatatttttagtagagatagggttttgccatgttgaccaggctggtcttgaactcctgacctcaagagatccgccctctttggccttccaaggtgctgggattacaggtgtgagccactgtgcctggcctcttttatatagtttaacattataaataatgttagttacatctattaattcagtgacttagtctttctctattgtaggttgcttttcaaagaatgaaacatggatttgccatatgtaaatt

SEQ ID NO: 60654 - DNA, 1001 bp, Homo sapiens
gtttcagattttggagcatttcagattttggatttttggattagggatgttcaacctgtatttccaaatacttaagatagggccttaatttgtcttcctttttattgtcttttcagacaaatgaccatggaaacagttgaatcccagcatgatggaagtataacagcttctttgacagagagcaagtctgctcatgtgcagactcagactggccaaaattcaatccctgctttagctcaggtaggcaataggcaggcaccgttgaaagtcaaaatatatggaaatgagaattaggtgcagattctgttttcttgccattgatcttaaattttccatgttccctggttatcagccattcttgcttatttgattgtgaagaaaagatacgtgttgtaattagccttgcattttaacagacattcagcagtgccccatctccattgccaccaccactatggaaggaaaaacaaaaacccttcctgaatatgtaatcctcaaagtatgatttgagagggttgctaattcgaaattgatacagttctgatgtccttagctgttaagatgacagaaatcttaccattttccccgtatatatttgtcttaatcattactttcttttcagttaggtctcgaactttgaattggtttcattcagaggtcaccagtatcagttagtacctgtttctagatcctaaaatttatttctgagatatctattaaaaatatagtaaaaataaacacatttgttagttcatcaaatatttattgaatgtctgctgtgtctaattattccggatgcatgtggatatgtagtttcaggacttaaatatcccatggtttggtagggtagacagatattttagcaataattccagtagggtaagaagtgctgtaagatactatgtagaaaatgaataaggcctacagaagagggagcagccagctgactaggagtgctttatatatctcctttgagctaggcacaaaggatgagtaggagt

SEQ ID NO: 60655 - DNA, 1365 bp, Homo sapiens
ccagagatgtattttacccttaacatttcttgaagttaaaacattttttccatcaatagatgtaaattattaaatatgcattttttaaagtatgcatcttaattactgaatttatttttgttcatttttaaggtcagttattatcctttaaatgctgaaattatttgaacctaattgatgacaaaaaaaaaaatctgtgaggaaaatggagacacgtatacatagtatagtccttttcttgcgtgttcaagtagtttatcacagtagaatgataagagtggcgacaagatacctgatgtgacaaattcacatacattaaaagcttgattatctttgtggcatgggtattttctcctgtgtttcccagaagtgtaagaataattctcatcattatctttttttcctgtgatggcccctgattccaagagtttctaattctttctgacactaattataaaacaagaaagtctttccaacctcttctttgttttatgacttttattgaggtccacatatttctacttagttttaacctggctggtattggaagaaagtattgtctattattattatttattatttaatagagacagaattctcagtatgttacccaggtttgtgttgaggccctggcctcaagtgatcctcttgcctcagtctttcaaagtgctgggattacagatgtgagccacagcacccggctgaaagaaagtattctgttatattcagtagactttgtttggattttgttaagtgaacgatttaattgtccttgtagaaagaggtgccagtggatcttgtcctagaatacttacgtgttggatcatggtcaagccacttaatctctgtgcatgaactttaattttcacctttctaaaataggtaaattaatagcctacctcacctaagggagttgttatgattctatgacagatgtgtgacagcccggtgtaaaatgataaatatttaatatttggtggtgatatatgattatctgaggcaacaacatttttctcagtcctgttgattgggtgtgtgtgcttatgtgtggggcgttcatgagcaaaaacacgagtcatatgtggaggtgaatatacacctccgtgtacttcgggaagtatatattcttgcttgcattgttgatattttaataagctcttttgattttgtccaaatcaatttcccatgtaattataatatgaagtgagttttgtaaactctgctaccctaggccctcaaagtattaataattgactgaatatatcaaaatcagtcatgttgttgaagagattcattattttagttttctgacttctttaataatcatatcactgtattattacttgacttgaaaaatgaaatcat

SEQ ID NO: 60656 - DNA, 1458 bp, Homo sapiens
ttatgatacatttcagaaaatcttgtattataggtagcagcaattgcagagacagatgaatctgcagaatcagaaggtgtaattgattctcataaacgtagagaaatcctttcacgaagaccctcttataggtaagttaaccaagtttcctaatgtaaagatactttttccaaaatggtagaataattatacatcaaatcaattcttcctttatagcttttctgttttaagacttattcatgtatcttagtgacttaccttgttaaattgtattttaggaaaatactgaatgaactgtcctctgatgtgcctggtgttcccaagattgaagaagagagatcagaggaagaaggaacaccacctagtattgctaccatggcagtaccaactagcatatatcagactagcacggggcaatacagtatgtatgctgcaattcgatatgatacagtgctagctttaagtcttctctagttatattgaagcaactcaggttttggcattaaattgttccattttaaaatgcatcattaatacctaaactgtatcatagaatgaaagtatatgttaaaaagtgagatctttgtattgacagctgtcatataattttgaaaagtaaaaattttgactgccgaatatagaagaaaattttggggtaaaaaggagaatttttcctatttacatgtttatattaatctctagtaaaacattgtttttgttgtctttatgatgcatgcgaacataaatgtctgtatttcattcttgttggcttttgttacccacaattacatactattcttactaatctgagagttttctaaagtatgttttcaatgtttcactactctctactctgttaatttgtgctacagtttttcctaaaagagaatggaaaaatgatttaattttttaaactgtagcaattggatagataattttatttgaaattttacacactgaaagctctaaataaacagatacattcacattcagtcttgtgcattttaatggaccgttaattctgtgctttttgctctgattaaagcactagtttttttcccaaaagaagagtgtttgatacgtaaaaagcaagagctagaaagaaaagaaaaaggaggagaaaggttagggatatcacatatcctaagctagccccttaggtactggaataatgtgatattcctgtcctttctgaagtataaattgtccatggaagttgtctaaatcaatttcccatgtaattataatatgaagtaaagtgagttttgtaaactctgctaccctaggtcctcaaagtaattgaacaaatatattgacagcagtcatgttgttgaagagattcataattttagttttctgactttaaaaagagctacttaggtactggaatatatgtgatattaaataatgtgtttatccaaataaggtattaagattttagatatattctttgttttt

SEQ ID NO: 60657 - DNA, 1027 bp, Homo sapiens
cctaattcattaaatttcctcttgaaacaaaggttacttaaatcctccatcctactatacccaacctcttcctgtaccaattaaagactatcacccaagacttcagtttttttcccacaaatggcccttgtctctgcttgtgcctattgtattttacgaggaatcttattagagtattaactcatctttctggaattcttatacatgaaaggtaagtgggtcaatctaaactgcaccattatgaaaagaaaaatatgaactttgtggactccttataagaattcagaattctcaggaggctcacgaataagcaccaattcaacttcttcataaagggaattagaacataataggcttacacattcgaaagttaatccagttgcagttcttaatagtgacgttgtttacatttctctaaggcaactgtttcaaaattttttaaggcactacttaatgtaactctggcttttaaactttgatgttgctattgttgttatagcatgatttagtcttccttctgctataatgcacctcttggcttttaaggtacaagtactcataggtgctctcttatggtcactctgaatttaaacctgagaattcattggaacaaaggtctgtttgctgctgtttttaaagttaatgcagtgagatttcatttatgaatctttggattgcaatttggaacaagagtggttttaaatataaacatttacatgtgtatgtattttaattagctcatgtgtataaatttaggattagaagtatataacatgggccgggcgtgatggttcacgcctgtaatcccagcactttgggaggctgaggtgggcggatcacctgaggtcaggcattcgagaccagcctggccaacatggtgaaaccccatctctactgaaaatacaaaattagccgggtgtggtggtgcacacttgtaatcccagctactttggaggctgaggcaggagaatcgcttgaacccagcaggtggaggttgcagtgagctgagatcacacgattgcacttc

SEQ ID NO: 60658 - DNA, 1038 bp, Homo sapiens
agcatattaatgtgactcctcaaaagtcacctgacattgacacatgaatgcagtgtcacgtgagtacatgctgctacacactgcttataaaacatataaaatgaggttaggttaatattattttaagtcgttaaaatggctttttttttttttttttttaagacagagtttcactcttgttgcccaggctggagtacagtggcgtgatcttggctcactgcaacctctgcctcccaggttcaagcgattcacctgcctcagcctcccaagtagctgagattacaagcacccaccaacacacccggctaattttgcatttttagtagagacagggtttcaccatttggtcaggctggtctcgaactcctgacctcaagcgatccacccgcctcagcctcccaaagtgctgggattacaggcatgagccaccacacccagcctaaaattgaattttttatagattattattactctcataggacagtagagcatatatttgctattatatggaacattaaatttcagtgttcgtaatttcccatcttttatatagactgacttatagattttcacatactgaactttaaaaggtcccttatgtataacttacttagctggattgtaataatttcataatgtatgcatatgtgaaagcatcacattatacactttgagtatatacagtttttgtcaattatacctcaaagctgaaaatattttggtgagttaattctatgtggtctatgtgttatagtgattgtagcaaatttgaaaatgatcagtgcttaaatagccatttttatgtagggtttaattttcacagagaagggaacgtttttggcagtgtgggataccaggcatggaggtgtaggatctgggtattaggagcaggtggtggtagacaggaagagaaccacagcagtggtggtgatgtcagcagcttaccagagctagggatagaagccccccacttagaagtgtgacatctaagttaacctctgctgcttacttaaaggtgtatttaggattagtgccatg

SEQ ID NO: 60659 - DNA, 1048 bp, Homo sapiens
ttttgaagactaaaaatctccagtgttgatatttaaggtttttgaggattaattcttataatcatttttgatcgaataaaattaactcattatgtcggagtatgtgccttttgggagacaaaaataattaagagaattgaaaggatctataaatgtgtttgtagaaattccacttggggatgtggtcctattgtagtttactgaaaacagttgtgggcattgttaccagtggaatgtgtgccctaagaaaacaccatttgtgatgaatgctgggcgaactgtgttctcaaatcattcctgttgtctaatggttatcttacaaaaagcatgtgcctggttatgtttgttatgtggctttgtacagtccttacctaggatcgattggctgttgagttcggggggcagaagtgcactgacccactgtggattgtgttggaaggctgttcctgtagtcatttgccttgtgttgcttccagggaagctgcccgggagtgtcgcaggaagaagaaagaatatgtcaaatgtcttgaaaatcgtgtggctgtgcttgaaaaccaaaacaagactctcattgaggaactcaaggccctcaaagatctttattgccataaagtagagtaactgtctttgacttggaccttgtttactctaatcaaggcaggagatgcagcagtcctacttattgccatgtggacttgtgggaaggacacgtgtgacccttaagaatccagtttggattagtgtttgaaattgaattgggaatgttgttccaggatgtggaatgcagccgtgatcacacttaccgagcttactttgatctgtttgtcaatagcatgcaaaaaatgctttgtttgccctttgcttctgctttttttcagggaagctgccaaagaatgtcgacgtcgaaagaaagaatatgtaaaatgtctggagagccgagttgcagtgctggaagtccagaacaagaagcttatagaggaacttgaaaccttgaaagacatttgttctcccaaaacagattactagaaatatttaactatgaactgaa

SEQ ID NO: 60660 - DNA, 1044 bp, Homo sapiens
gactatccaattacttgggaccaccagcaacagaagccccccttcccaaacccagtggtttaaacaataaggaaatacactaccttgcaaaacaagaagtctagtggtaagaaatcccaggcttgctaatttagtgacaacgatggcatcacgaccagatccttcctcctcattcttttccctctacctgctggttccccgaccttaatattgctgccacagtcccaggcatcagaaatggaaaagacagcaccctttttggggggatactgcttttttctttgttttttgttgtttttttgagacggagtctcactctgttgcccaggctggggtgcagtggtgtgatctcggctcactgcaagctccacctcccagcccaaagactgggctgaaaggcactgggttgctcatgaggattcagcccctagggttgaggatcttccaggctttggggaagcatatggccatcaatgtcgaataaaactgggcttctggaagagtggcttgtagacactggggacgtctggcactgggactgagcacttaccctgtacaagaagtgaggaacagcttgtgacaggctggggcttgagccatgctcccagacctgcatgggaactcttattcttgctcatgaaatgtatccctgaagccaagcttctgctaccaaaatagcacgatttgacagcagtgctttcagccttacagcagatactgcctacgacctctccctcaacagaacctgcagtaggggaagctttgcaggggggaacgttgcacatctcgcacacccttgcgcgtgggatccacagcgctcccacacccgtgcgcgtgggatccggagctccccgcacacccgtgcgcgtgggatccacagctctccccacacccgggcgtgtgggatccacagcgctcctcacacccgtgcgtgtgggatctggagctccccgcgcacctgtgcgtgtgggatcgagttctcactgcgtgtgtctttctttgaaccctaaaagtttcatctggactgctgggtatagaaattcc

SEQ ID NO: 60661 - DNA, 1034 bp, Homo sapiens
ctttctttctttcttttttgagatagggtctcactctgtaacctggactggagtgcagtggtgagatcatagctcactgcagccttgacctcccagtctcaagcagtccttctgctttagcctcccgagtagctgggaccacaagtgtgcaccaccatgcctggctaagtttttaaattatttgtacatacagggtcttggcatgttgcttaggctggtctggaactcctgggctcaagtgatcctcctgcctcagcctcccaaagtgctgggattacagtcatgagctaccacacgtggtgggtatatgttccttttgaagtcagtaggtagtttagttgaacttgttcgtagcttagtccccaaagatttaatgaattgtgctcattaagaggacgtttgttggaaaagagatttcacaatgatggatgtgtactggagtttcatgtatatttttatatactctagattctggagaatgatcactcagttttagtgtggaagacagaatagacatctttagaactgtaaaaggaataagctatttttgttgagtatgagaagaagatagccttcgtagaatcacaggctgttcagagcatcaaggacctcatactgtaggagatcctcatgttacagataggacagctgagctgccaagaggagctgctcctcggctccccaaagctggttcacagcagttctcagtctgagagcaagtcttctgatactggggtcagatcctttcactgcaacacactgtacctcttttaaaccagttcttatagcaaggtaaaagtttctcaagaagaaattgacctatcttaatgtttttcttttttaatgtgatgttagtctaagtaagaattatgttttagggaattgtattagttgaaaagctgtacaagaaattaccccaacatttagtaacttaaaataacaacatttgttgtctctcagtttttgtgagtcaggactcccagtttagctgagagcctctggctcagggtgtctcctgggattacagctgagct

SEQ ID NO: 60662 - DNA, 1262 bp, Homo sapiens
gtctcctgcctcagcttcttgagtagctgggattacaggcgcccaccaccacgcctggctaatttttgtatttttggtagagacggggtttcacaaattggccaggctggtctcgaactcctgacctcaagtgatctgtccgtcttggcgtcccaaagtgctgggattacaggcatgagtcaccgcacctggctggaagccatagtcttataacctgagcttagaagtgacatttcgtcactgctatttgatagaatcaagtcattaagttgaggggacagtattatattaatacaagagtgtgaataccaggagatacattggggcccatcttggatgctgcccacgacaaacatggattaagattctgttcattgtgtttaacagaagttcactaaaactgacttccgcaaaacagacggggagtgggagagagaataactatgggatctgaggatttttcatggagacaaagggtgaggagcataactaagtctcatgaggaactggacttggaaggtggacagtctgtaggaactgaggcagctttctccttcagtatcttaatagtaaattctcctatctttctaagtcagtcttatgtttcaggtgtctcaaatttatttttcttttaatctttattctttataaaatagctatttttctttgtctacacatggtggaaaatggccaccccagtggttctaggaccataaaagactaatgggaagaatttctgtgtcccaggagagaggattgagtttcctttgccccactagtgggatggctccccctatgaaagttgtccagtgagcagggtcaaggtttaggtttggggtacggacatgagtgcaggagccttactctcctgtgtgttgtcagggatggataaaggggatgaagttggaggggtttagtgaatggttgggacagcaaatttcagagaagagcatttggaaataattttctcaaatatatatttttaaaatccatatttgatttttttccctcagggattcccaagcatagtagagctaaaatgaattaatttgggtaaaagtaaagttaaggctaagttaggaaacacttttaaaaacaggaacctgctgcgtgcggtggctcctgccttgtagtcccagcactttgggaggcagaggcgggtggatcacctgagatcaggagttcaagaccagcctggccaacattgtgaaaccccatctctaccaaaaatatgaaaattagctgggtgtggtagcgcatgc

SEQ ID NO: 60663 - DNA, 1060 bp, Homo sapiens
ttgctcatggataggaactgtgcctttcacattccgcagtctctgcagtggctagcacatagaagaaactcacaagcataggggaatgaaggaatgaaggcagggcatcatgacccaccctgggcagacttgccgtggcacggtggcagtcttccctgagtagtggctttctgttttgtgttgcagctttaccttctcctaccttccctagctttgttagaaaacgacacatccattatttagggacaggaggatgtaggtttttttaggctcaggtggtgtatttgggctttcctattccgggtcagaactcagcatgaccgtgccaccctcaggccagctctcccctctcccctctgcagtcttctcttgaggtgcatgggggggggagggcaggtatcaggtttcttggccaggcctcgccctgtaagtcagaggcgctctttgggtgccgtggctcacttttcttgggtgcatcacctgactccagtatttcatcccttgggctttccagtgtggagaaagctgctgatatagtacaaactcagatgaaatcatttagacccagaatgtcagttttctccgtaccttttatcatatcctctctcctgacctgcgctgttcccagtcagaacattgctcagtgagcacagatccagaatagaggttagcagggataattcccccaggctggggggagtttgatgccccgtctaccacagccttgtcctactgttagacagcacctgtggcctgctggtagccataaacttacttttcaattctctttttaaaaactctgagcacctgcatttccccttcagttggcacagactgataaccttgtaaatacttttcatagcttaccatgtttatagcttaccttacgtggcttatgtttttggctggctgccccgtgacatctagggaggcagctgaatttcaggataatctgatgcagtcaccatgtaagaatagttaatgccttggaatgattgcctgaagatagcgatcctctggaatcagactgcctgaactggaggcttagatccaacactct

SEQ ID NO: 60664 - DNA, 1058 bp, Homo sapiens
tatctctgtgttttccaagcaagcttttaatttttatttgcagttgcattttcttctttatatggctctgtattttccaaattttctgcaataagcatgcatttcttttctgattagcagaaagttttaaatggatgccacttagctgaagtttctgtgcttctgaagaaatcctttggccttagatattctctgtgagaaacagaaaacctctcaagtgtgttggcagcttaggtggatatttgttctttgaatagttttctccttatgttcttccttcgtctacttcctattctcttccctggaattttctcctctccatgactggctgtgccctcaacatcttagaaatgtttctatgtcttttcatttttgtttcattggctttgcttatttagatttcactttgaatgcacagaatgtcacgttcctctgtgcccagatttcgaaataagagcaggtcctggacagttcagagcaggccagaggtctaattggaagctcccttcctgcagcacaggaggtgtgccttggggggaaatggccacaccaggatgctttgttctgggctccaaagtgtgggtgatgttcctgctacagtgcactttgtgtcctggccgtttgtgttcatgacgacttccctgtcagggcaggagctcagcagggcaggagcctccatgtgcattctgaacaggggctcaacagttgttttgaattgagtgagtgagtgagtgagtgagtgaattcactgaattattgaaaactgtaggaactgtgtggtcatctcaaatttactataagaaaagttaatagtaaacttttaattttattgttcaaggcctgatctgtgctacccacaggaaaaaggaaagggaaatgaaaccttttcttttcaaccagatctttgtgatctgcattggagctatctcagcaatcagcttcgtatatccaaacaaaattctgtcattctttagttgaagcctgcctcttgtgtggcctgccagtccttcacatccagagtagttaatcagttaagtaaattttctttgtagaatagc

SEQ ID NO: 60665 - DNA, 2097 bp, Homo sapiens
actcgtgctctgtgtgcgctagtctggcctcatgcatggccagggtgccctgtcctgtgacagcagggggctgatcgcctgcacatgcgtccatccgatggcttgatggagctgccttctatgtgtcagtctctctttttaaagtactcaacagtatcctcagactaatttttgcttttgcatttttgcttttgttatctttgagatatcaagagtggaaggcagcattcattccagagaggacaagacttctaaggaaaagagaagtgtttttttgtgagtctaagaacagcatatgagtgatagaaaaacagttccatagtcccttcaacagatcagcaggaaggcttttgaaaacagtagtgaatcttctttgcagaggcatggactgtaaggagaaaaccttcttctatcttttgtacactgctgttttagggtaccccaagataacattgttgattcctggggacctaggatgttatctccttgaatgaaacctattcttcatgtcttttacagtaacgaataaatgtgttgatggattcatctgtacccacaaaatgagccttcagaaaagaaaatgcaaagttcagtgatactaggttattacaagctcttcgtgttccctgtgactgacccttctacctctctggggcagcaggctcccattctgagaaacactggtatctggggacactgcaggctgagctgctcagcacaggccatgcatgcagtgtgagaagccaccttgttagagcagtatcaattatggtgactgttagagcagtatcaattatggtgacctctgtcagccttatggggttggggttgggtgccacaaggagctccaggggctcccagacagaagcccagctgtattcaccagcacccagcatggagaataatgggtttccatgataagtaatgctgctgatgtacatcgtcttcctggatctcaatgctttctagatattattgttatttatatttcccttatatactgtggagctttatgggtctggtagggttgggaataaatagtcctatcatttgttaattatgttaaactaatagatgcatatgagttttatgagggttactaattacttttttattcagttaatggaaatctgttaccccttaattgatttcagctgcagttattttgttagggtgctcttgtttaaatggatgtatatttccctctgtgagccaagttcattcagatctgcatttgtgcaggtcctgtattcttatgtttgataaatgagcaagtgggtatgttggttggtggaaggacgggaccacgacacagaggcccagtcctcatccacctgccaggggttggcatgcaggcatataacatttctgttgcatcttttgttttcacagtgagagaaaaacgcaagagtctcttcattaaccatgtaagtgaagctgtctccctgtgttcttcataatgactgtacagtgtaaagagctaaaataactgtctgtgatggatgaaaatggctcatgtgctttgtagatacttggaagaatgttgcagtgtacttatgcttagtttggtttgtaattggacaagcatcactcagtatttgtccactgtcccaaatatttttccagaagccctagaccactattgttcatgagatgatgtgtgtgaacaataacatatcaaacatcacccagcaagtccaagcgaaagccacttctttttaattttgaatcctttcctttctctaccctcacccccaaattattctttttctcttgtagctcagttccatttgaataaacacatagttgttttccatgaggctctctgtctccacacttgactcttcccatttgttgtttgtgggtccagtagagtctgcgtgttcttctgatgctccaagaaaggataaacttgataacactaaatttaaaaaagatgttcaaacatttggctggagtcttttggccattcttagccatgtctccctcccctggtggccaggtgcaggtgccccattgagatacttcatccctcttccttccttgagcagagatgtagctggctggctccagcacctactccacaccctatatacc

SEQ ID NO: 60666 - DNA, 1942 bp, Homo sapiens
tatgttttagatgtaattaaagtgaacaggtataggaaggtttttgttgttgttgttgttgttgttgtttttgagatggagtctcgctctgtcacccaggctggagggcattggtacgatcttggctcactgcaacctccccaacccgggttcaaactattcacctgcctcagcctcccaagtagctgggattaaaagcatgcgccaccatacccggctaatttttgtatttttagtagagacaggaattagctatgttggccaggctggtcttgaacccctgacctcaggtgatccacccgccttagcttcccaaagtgctgggattacaagcatgagccactgcgtccagctaggaaaatttaatgcatatgaaagatacacgtatttttaaaaggctgtgtaaagggatttatgtaaagtttatttaaaatttgctgacattttgactttgcttttttttttttaaggttagctgtttttatgaatcttttaattaaagtgtaaaaatctctgattatagattgtgggtgacattgtaggtggttggagttaagaatcactcctgaaaaaaaaaaatcactcctgaaactcagaatgtatgctttttaccttagcctcacttttctatgattatcttcctgccacctggtgatagcacaccaaaaatgaatgggttattctaagaagttaaaaaaaaaaaaaagatgtgaaaacagaatgaatgaggagttgaatagccagcttcctttgtcttgtttgccataggtgcactttgaaacgagaaagccagactgggaattctgtgtagtgtgatcctcaaaaaaaaaaaaaccaaagcatttgtctcaacactgagtctggtgatagttgaggaaactttgtgaggaagtaaagcaactagggagagttacttatcagctaagcaagagtcacattattattagtgggacttggagccaaaagaactttgttcaaaccctcgttctgccacctgctaattgggcaatcttggaaacatcttgaaatctcagttttcttatctcctagggtgggtcataattccagacctacttgactcaaaggtagtgatttgcagcctaattataacaccatatacgtatgttgtattattattgtccattggaatttaggtaaaattgatttaattttccaagttcaatatcaaaactgatgaaagtctttctggtattttgagtatggatatagttttttcataatcattaagaccaggattttctgggaggagtatattctgttcagctccctttggagaatactgacttgaatcatttgctcctcttaacacagttcagttccaaatcagtttctgccttttagctttgagtgaggtaggaataggagtccttgtaaaaaggtgtctattctggttataggcttcatctgtaagtcataaaagtcaagtaatacagtgagctacatctaggaactgaaatttaaaacattttaaatcttgcttttgcctctggaatagaatgagagtttattgagcagctgctgtgttagcatcaatgccatatgcttggaggatgtgaaagaagactaagtttttaaaatatcagtaaaaattttaaaaatccaataagattaaagaaatccagcttttactttgaaataatttcaaatgtatagaaaagtaacagcaataattgagagtacaggattttcatgtgactaaaggaaccttagatgctctggttctcagaccccctgttctgcttcacccagggatgttgacatggggtaggtgttttgttattttctctcttctttttgttttttcttcttctttttgcggaatgtctagaaatgataatgataatgttacacacactggtacattgagaagcttgggtaggacatcaattccttaagtgtattggttatgtctgtggaggac

SEQ ID NO: 60667 - DNA, 1768 bp, Homo sapiens
tgcttcagcagcgcagtgctaactgtgatttaagaaattggaaccccaaagaagtaactagtatcatttgttatctagttttgagaagagattctgtttataacattgtttatatatttctcagactgcctcacattttccttactttattactgaggaaaccttattaaatgagaaataaattttaagatattgaacagggcatttggtctctaacgttgaggcttcctttactaaatttgtgaactgtgtacacccagggtgtgttgcaggcgggcaggtcaggcagaagacattgtgatccccaagggattattaagtttttttgttgctgaaaatgacacttagacattcaacatagcatcaggcacgtggaaacttgtttgcataatttaactttttttctagtttgcttttgatcaggaactatccagattgatgtgtactaatcatattgcccgattgttgccagaaatctatttagtgttcaactaggtgtcatcagtgtgtgctataaattctatttacttcaccagtaccttctagaaggaattctgttctaaagttctccaaagagcccaaaagttgtacagttatgaaagaacctgtcataagaccacacaaagaactatctaaaggtcattcattggttgtattttcaaaagtatcagataatcttcccctttaaaacttactttgtccttaacaaagcaatattttttcattataactttacctgctgaaattcaagcagattaaccaggagattctaaattaacattggctgcattttccatggcccctaaatcaactgtatttcaagagtaaggaaagtgggtacagtggacacttgtcttgatcttagtgcgtaaaaccaggccaccatctaaattgcaggcttttgttagtttagtagatcccatgtttcatacaagccatggggcaggtgatttttgtggactctgaaacatgctttttgatgcttgattgcaagagtttactgttctcctgatgcaggaagttagggactaggtgtggtcctggtgacttttatatatggaagagcaaggaagttcattttatgaataaagtgtttttgtactgttcttggtggtaatgttgacatttcttgctaagacatttttcctctgtggtcttatctcaagttaagcgggggtgatgtttcttggaagaattctgagccctgtgtaattgccttaatcttcttgctgttgttttctagcatcctccaggacaaatagcaaggaaatacagttcctgctccaccattttcctagatgatagcacagtcagtcaaccaaacctcaagtatacaattaaatggtgggtatatggatttatttccttccttccttccttcctttttttttttttttttttttttttttacttaactgaatgctttttctgttccttaacctgacagctaagctggttggttgtggggtctgggagtgataagattggatgggtgggagtaggggtagcactgataattcaggaaatctttttaaaaaatgattttggtagttaagtgtggggtattgaaatatttttacatagtactatttacattaaaagaccagaatcttaaagtattttaaatgtagattacttaaaatatattttttatttttgttcatgctttctacccttgcactttttattgaagccatcctggcataactccactaactttttaccttctaaataaaatgagactcctatgttcccagttggagacccg

SEQ ID NO: 60668 - DNA, 1053 bp, Homo sapiens
attaatgcatcctttccaagttttttttttttttttgtcagtagtgagaaagcttgaagacatttacataacagatgagtataaaatttttccagttttgaccacacctaatctacagcaaatttatttttagtgatttccttttatcggatctttccaaagcgtcctccttcgttttcatgaggacatagccactctcatggtaatcatatttcatgcataatgtgacattcatgtatgttacacgagtctgctaagcacagctggtgtgaactagtttgggaacaagcagagccaccacatgctaagtgcagagctcagcccgtgggagccccacacgttgtcggtttacaaagcgtggttagtcagtgcaggggaggttggatgacagcttctaatgaacagtattggagaaaacacgaatatccagaagcagacacctagaaagggattctctatgatcacctatttccatactgtaattgtgattcatggttctttatggtgcttgagaattttggatttaagaacttacaaaacagtgcaactttggaactctaaatcttgaattagagtaatgtatcagtgaaagtgtagattttatcttgttgcctatttctatactagttcaaaccttttaaacttgtaaggcttaagaaacagtgtaatcccattgatgaagctcagttgtgctttcaagacaattttgcattagaatctctaagatatttctcagtacttacttagactatgatggatcctgaagtgaatgtagccagagctgataataatgagttggctttgtgaagcacctactctgactgctctggtcagttctttacatgctttaataacaactccttaaggtgatactggtatcttcattttacagataaagaaattgaggcacagagagattaatttgactaagatgatacaactagtaaattggggaattgggaaatgaattcaatctaccactcagaccattaatctattgctctcctagattaatgatgataaattgcaccaaaagtaagtgagtggaagtag

SEQ ID NO: 60669 - DNA, 1044 bp, Homo sapiens
attttttttttttttttaagacagagtttcattgttgttgcccaggctggagtccaatggcgtgatcttggctcactgcaacttcgcttcccgggttcaagcaattctcctgcctcagcctcctgagtagctgggattacaggcgcccgccattagtcctgactaatttttggtatttttagtacagatggggtttcaccatgttggccaggctggtctcaaactcctgaccttaggtgatctgcccacctcggccttaatttgaaaatttttatcccaagttttagttgttgtaaaggatgttatttgcaatatattttatatagtagggttttaaagttaaaagtattcattagagactgaatataccagagtaatatgaaactcacagttacccattttcttagaggtgaaaattttacattgctgctttttctccttgaactcattattttctttctagtttcctcacacattagcctcttcttcaaaattctccatatcaaaaatgtacatttaagtcaaaattgcagtagtgttttctggatgataatgttctaatttattaaaaacactttcaggtctgagttgtcattagtacacagttgatcaaaatatagacatactaaagctgggtgcagtggctcacacctgtaatcccaacactttgggaggccgaggtgggtggatcacttgaggtcaggagttcaagccagcctggccaacatggtgaaatgccatctctactaaaaatacaaaaattagctggtactggtggcgctcacctgtagtcccagctactcaggaggctgaggcaggagaatcgcttgagcccaggaggcggaggttgcaatgagccgagatcgtgccaccgcactccagccttagcaacagagcaagactccattttatatttaaaaaaaagtcagtataaattattaaatatacaaaaagtaaaaccttatgggaaatagatttcttaatgagatcagtagtttgttctttcattagtttatatttttgtgtatgatgattattgaaacc

SEQ ID NO: 60670 - DNA, 1507 bp, Homo sapiens
atgagtaggtgaaattttgaggagttttattatagtagtgtcactcaagtcttaaaacagtttttgaattatatgctaaaattacacagccatctattagtaaaggctatttaaatgagcctaccaacccctgcttcagtttgttgaaagcaaaaactggaaaccatctaagtagcctgtcactagagtcattcacttttccagcaccacatgttgggatatagtccctttcctgggttcctcagagggagttccccctgaggcagtgaaccttagtaagggcaggtgagcagcctgcctttcccttccagggtaggagaagagcaactgggaaagaagaagccagaaggagaacctgcacacacagatttgttctccagcaagtcagttttaggagagtgaaatgaaagttacagatctagaaatctctttcctaatgctgtgttctcaagcatgcttagagacactttctgtactataaattgaatgcatatcccagcttgaagtccagagtcccgctgagtcctgtaacagatgctattcatgacatgggctgaattgtctcctctaaaatagatgtgtgaagtcctaacccccagaccctcagaatgtgaccatatttggagatatattttttaaagaggaaattaaattaaaatggggtcattagggtgggccctaatccagtatgtctgatgtcctcataagaagagattaggacacagacaacacagagggatggccatgtgaggacacagagaaggtagcgtctgcaagccaaggagagaggtctcggaagaaaccaaccccactaacaccttgatcttggactagtagcctctagaattgtgagaaaataaatttctgttgttgaagccacccagtctgtgggactttgttacctgtgctagtctgtagccctagccaactaatacagattttggtactgggaagtgaggtgctgctgtagcaaatacctaaaaatgtggaagtggctttgaaagttggtaaggaatagaggcaggaggagttttgaggtgcatattagaaaaacccaagactgccttgaagggattgttggtagaaatgtgggcattaaaggtgattctggtgaagactcagaaaagaggacagctgtagaaaatgcctctaccattttagatgcattcacatgtcatcatgaacagaatgttgttggcaatatgaatgtccaaggtgcttatggtgaggtctcagaaagaagtgaggagcatgttcctgggagctggaggaaaggtgatccttgttaaaaagtggcaaagacctgaccaaatagcgttctagtgttttgtggaaagtggaatgtttaagaaatgaatgtggatgttttagccaaggagatttccatgcacagtgtggaagtcacagcctagtccctcttgttgctcgtagtatactgtgagaggagagagagaaacagaaggaggaggaattatttagtaacaaggaaccaaatcttctagctgaa

SEQ ID NO: 60671 - DNA, 1054 bp, Homo sapiens
catcatctgggagttccttagaaatgcacattctcaggccccactgcagacctactgatccccacagtgtgaaggtggagccccctgtctgttctaacaagcccaccaggtgatggggtgcgtgctcaagtgtggaaactactgcttccattcttcccggcttgtgagttctctttttaagagactgaggcagagactggacaccctccccccataatccctgccttttgcctaagaaagcccctacacagttcctcccttcttttctccctggaggtagggaggggccaccgaggaagccaatgtcctctaggtctgcagaggctgagtgttttcctctgggcccctgcggaagggccctcactggactccacgtggcagctcttggctgctgcatccaccctttgttagcagcctgtcctcacggagacctgcagccagagcctgctgtgtgtgtgttagatctcagtgaagtgattcgccctgaaacgcttcctggtgatgatcccagttaaccagtcctcatccttctgggcaccagatcaagtggatttggcttttaatcccaatatggtggtctaaccagacatttacttagatcactggtcttcctggaggatgcagttttctggagtctggtctccagcaacttgccttggcaggccacgtggcctggtgtggcagctaagcataggctatttttgtctttgctttgcaggaacgagctagagcgacagtttcttgaattgctgcagttcaacatcaatgttccttccagtgtctatgccaagtattattttgatcttcgttctctggcagaagcgaacaacctgagctttcccttggagcccctgagcagggagagggctcacaagcttgaggtaagatggtttaaaacagcgttttgtggtgcagtgttgccaatacatcatctgagtaccagagatgcatgtggtcacattgatcatttcccccactacatgatgtaaaataaagatgagctactaggatatatagctgggcagttgattatgatttgttctgcttctttttt

SEQ ID NO: 60672 - DNA, 1173 bp, Homo sapiens
ccatccttttctgtggagtccctagctggtggtctggctgcagctgtctttgccgccagcggccgagctctcctctctgtgaggctcagctccaagcccgtgcttcatgccagccctgccaggatggtgctgttcttgccccgcttgcaggtgaggacgccaaggattcaaaacagcacgcgtgtgggtggggcccgtcccacacccctagatggggagccagcgttgaccctggtcgggccgactgtgaggtgacactgtactgttatttcacatcctgagagtcttttctcagactgtaagctcttgggaaacaagagctgagtccacactcccttcgtatctccctgctgccagcagagagctgggctctgggccggagctccacaggggcaggggctctgcctgtccctcatgcagcgccctcggcgcccaggacgagtgagcaatggacgcagatatggcccgccctgacccacactgtctttcttgcccctcaggccatctctcgcctctgcgaggacaagtacaaggacctaagaagatccgcgaggaagcgctcagccagtgcagacaacctgactctgccccggtggtccccagccatcatctcttaactacggaggcccgccggaggccacaccatcccttagtttctcctttagtttgagaaaagacagacttggggtgggtttgtttttgttttttctttccttttctttttttacgcatagctccgtcaagctgcctggatgagcgcccatgcagcaaggcttggaggaagcgtcagtgccctggagatcccagctcgctctccccactgtcagcaacagcacttccttcgtggaggaagtggactcgaatcctggaggaggaaataaagggaaagggaagtcgtggagaggcagggaaaatggttaagcagcccggccctctggagtccccatgggggcggtagctgaagttggcgagcgcagcggtggatgcagagctggctgcacccagggctgggccagtgtgtcctgtaagacttcttgcattccttctgctgcttttttgggatgggggtatttttgttcatttgtttttgccctgttttgattttggtcccacagagcaggggatgtagtttgtacccaccatggcgcagacttccaaataaatagtactggt

SEQ ID NO: 60673 - DNA, 1461 bp, Homo sapiens
ttgtaattgtgatgatctactctgtatgggtaccaaaatcaccttctctcttcaagtcaaagttgaatttagaactttgaatacaggtcaaaaaatgtagaaaatatcattttatattccctaatctatatagctgaaaaagggttgtattttcttagctgaatatgaatacctcttaaacataaattagttcctctccagtgaagtatcttattttaccaatccatttcaggaaagaggttctgctgccgtaaaggcagaaattttatttttatcccttttatttgaatgagagatttgaaaatcgaattatgtaaatatttcaatgcatctgctattattttgtggagtttattaaactactttaaaaaaattgtatagtctatttattgtatgtatgtacatacagtctgatacctaaaatttaaagtggattccataaaaccagactcaagtcttgtttagactactgaatactgttttagcctgtgccctggattctacctctgtataggaaaattttccatattcattaattagtgttgatctgtattaattggttatgtttcttgcactaaggatgtttaaaactccgctgtaagtgtagattttagttttactggcaggatgaatcacttgacacataggtagatacttgaggttcattttcttttctttttctacatgatgatgaatagttatgttttcttctctgatttgttcaaagtttgccaaaagaaaacacaaaaccagtacagtacttactgataaatcgtagtgactgtaatttgtttgtaaggcgaattaatgctctacaattaaagctggattactattgaggaacacattgtcttagtgtagtttttgaatggaaagtttttgtcattaaggatgaaggaaacgacacaatttgttactttaattttatatttgatttaaacaacaaataaagtcattgggacaataaatatatatcccgatgaatctttttgatttgttttacttttcttatttttttttttttaactagaaaaagggaaagaagaagtcaggagtttaaaaccaaattggagggcagatgagaaatcctgccaagatcgggatgtgccttcatgcatgaggtgaggccagaggtgtgggcacctgtacctgcctcctcttctgggctggctttcctgtctgcctgctctcgggcttgggcagagccatctccatcctggggtttcctttaagctaagctgaaagcaaaatttggggagtgaatgatttaaacttttcctgctgcttttggtaacttctcacctggggccatattttacagatttgaatttttttttttctttttttgagatggagtctcgctcttgtcacccaggctggtgtgcaatggtgcgatctgggctcactgcaacccccacttcccggattcaagcaattctgcctcagcctcccgagtagcta

SEQ ID NO: 60674 - DNA, 1364 bp, Homo sapiens
ttacaggcgtgagccactgctcctggccaggctaatttttaaattttctatagaaatggggtcttgctgtgttgcccatgccggtcttcaactcccagcttcaagtgctcctcctgcctcaccctcccagggtgttatgtctttagctgcatggatttcaagccaaggcctgcaaacagcttggttaaggtgctgacttgctgttattgaatgcagcgccctgctagagctgttgcacccaaacagggctggggagatgcccaggagtgcttgcagtcacagtggtggggctggagttcgtacctccaagtcagcaggctccctgcctgttttcctgttagattttcttactaagtttgcatatgtgaaggggctaaaggtcctgtctgtcactcttctcagcagtgatcaacctcaaaatgagcttcttaatctggcagctgctgtctctgtgcactgtggcaggtctgagctgggcacagcagctgggtgaggacttggcctggcaactgtatctgtccttcataggtttttgtgaaaagagttctgcagaacctgttacagtaagaagtgaactcaaacatgatgtctgacttaatgatgttcagattctacaggtctcaataaactttccagtgtcctttaagggacttggtttcagtggggggctttccttttaagaatttttgttcatataaataagttatttcaaataagggataaaagaatggcattacaaaatatagtttgggatagaaatattaaatgtagcgagaatttatgcataagatgttaacatcggtattgatttttttgtcatggaaccttgggttttagtctcagtccaaaagattaacttgctctgtgaccttggacaaattatttgacctctctggacctctcagtgaccttggctgtgagggagactcttgttttcatcacctgtcttagtctgtttctgagcacactctgctcagccattcagccacaattgttggacgctcctctaaatgtagcaagggtggacatagtaaaagccaagtgcaagcctaacggtgacagaaaacccaggacgaggggaagtcggttgtgttctccaggtcctctcctaaagaagggtggccatgggtagaagcagcaggtcttacaggacctgggtacccagttttccgctgctgtcccttcttccccagctctcccaagtacagctgaatgctcagcgtggcctctagttggccattcctggacctggtttgtgagttcttgtctgcattggtggatcctggaaatctcgaaacagtggaagtgggtgtgtgaatccactgccaagtgcctctgtcctgaagaggatgctgcttcatttc

SEQ ID NO: 60675 - DNA, 1072 bp, Homo sapiens
cgtgtaaaaaggatcttggtaagtgtcaggagggaaattgagtggttatgatagtaactaggaggtggcagcttgatggacatgaccttttgagtggacgtctccgtggaagagatggggagaagggaagatggatggagatgtggttggagaagagctgatcagcccaggcctcacaggcattgctgaggaacacagatttgaagaccaatgggaaactgccacagaatttagttagttctggtgctcaaggagtgggtgtgacaggcagcacggttcccgcctggacggccacaaggtggagagaagggccacatgtacttcagaggttacacataggaaaagaaagaccagttctcgccacacttctggggtgaaccatcggtaagttgtaacagataatgtgttcctgaggttagtccaaatcctgagtaccggtaatctaccatgcatcatacacaatgagactgtgtcaagatgaaaaacccggacccctgctctcaaaagctgtgtttgggctggatcaatgaaaacagacacattttcatcctaaacacatcttcatcctagcatgggcatgaggtggaatctctgaacctgtctttggtaataaaaatgtagacagagcggttcttgaacatcatttcttcctgcaggcacttgtgggttatatagtcatttatcttgtgttcagtatttttttagtaccttgaagctaatgtgattgctaccaagaaaatctaggagaaacaactggaaaattataagaattcagtaagattatagttacaagattagtacacaaaaattgagttttctaatttaccagcagcaatcaattagagaatataatggagatgccattcaaaaatagcaacaaagtgttgctattttgctgcacatgcctgtagtctcagctactcaggaggctgaggcaggaggatcactttgagcccaggagtttgggactgcaaagagctgtgatggcatcactgcactctagcctgggtgacagagcaagaccttgtctcttaagaaaaaaacccaaaccacaaaataggagcaaattatg

SEQ ID NO: 60676 - DNA, 1105 bp, Homo sapiens
cctcccagacccagccccttttcctccattgatgtgcggggagctcctcccgccacgcgttaatttctgttggctgaggagggtggactctgcggcgtttccagaacccgagatttggagccctccctggctgcacttggctgggtttgcagtcagatacacagatttcacctgggagaacctctttttctccctcgactcttcctacgtaaactcccacccctgacttaccctggaggaggggtgaccgccacctgatgggattgcacggtttgggtattcttaatgaccaggcaaatgccttaagtaaacaaacaagaaatgtcttaattatacaccccacgtaaatacgggtttcttacattagaggatgtatttatataattatttgttaaattgtaaaaaaaaaagtgtaaaatatgtatatatccaaagatatagtgtgtacatttttttgtaaaaagtttagaggcttacccctgtaagaacagatataagtattctattttgtcaataaaatgacttttgataaatgatttaaccattgccctctcccccgcctcttctgagctgtcacctttaaagtgcttgctaaggacgcatggggaaaatggacattttctggcttgtcattctgtacactgaccttaggcatggagaaaattacttgttaaactctagttcttaagttgttagccaagtaaatatcattgttgaactgaaatcaaaattgagtttttgcaccttccccaaagacggtgtttttcatgggagctcttttctgatccatggataacaactctcactttagtggatgtaaatggaacttctgcaaggcagtaattccccttaggccttgttatttatcctgcatggtatcactaaaggtttcaaaaccctgcattcatttctggagtccgtgattttgaaagcacctggtgttccagggagggaacgcattgctgaggtgtagaggttaatgttttaaaccatagctcaccctttacagtagaagtcacttgacaatctggtaggggagcaggcgctcttcaatggattaaactaacgggttaacatcttaataaccttcagtgcttgtgtatac

SEQ ID NO: 60677 - DNA, 1053 bp, Homo sapiens
aaggtagcaagcaaaaattgattagttggactgcatcaaaccaaaaagtctgtacataccaaaggaaacactccatatttaaaatgtcaactttttgaatgggaaaaaaatatttttaaaccatttatcagataagaagttaatttccaaaattcataagaaattctcacaactcaataacaaaaataaaaaaaaatgggttatagacttgaatagacatttctcccaagaagacatacaaatggccaacaggcatatgaaaaaaatgctcaatatcactaataaccaaggaaaggtgaattgaaaccatgagataattataatatattataatatattacatatatattacaatatatgtgtagtatattataatatattacacatatattataatatatgtgtaatatattataatatatatgtaatatcctattttgtattacctcacactgttaggatggctattatcaaacatcaaaatactaaagtgttgacaaaggtgctgagaaattggaaccccttgtacgtatttggtgggaatgctaaatagtgaagtcaatatggaaaatatagggattcttcgaaaaattaaaaatagaataaatctgatccagcaaacccacttctgcatacatatctcaaagaatggaaatcagaatcttgaggatatattagcactccaatgttcattaaagaactatttacaatagccaagatgtagaaacaacctaaatgtctgctgaaggatgaatggataaagaaagtgtggtgtataaatactgtggtatattatttagccttaaaaaggaaagaaatactgaaaatgttacaacatggagaaatcttgaggatattatgccaagtgaaataagccagtcacaaaagaacaaatactgcatgattataatatataaggcatctcatagagtcaaactcatagaatcagagagtagaatagtgcttgccaggggcagggggaggggaacatgggaattgctaattaatgggcataaagtgtcaattacgcaagatgaataaattctagagatc

SEQ ID NO: 60678 - DNA, 1095 bp, Homo sapiens
gaaatatactctaagtaacaaaggacacacacacaccttcaatgacttctttctggacattttccttttcagaggatggactcatagatcaaatgccatcttgtcacctcccatttctatactggctaccctttataatgtttaagaaaaaaaaataaaatagttctttgtaattggagtttcactctttggatgaatttagaggagagcaaatatgttgaatatgttttattaatgtaagttttgcttgcagaaactgtaaaaaagagaatgtatataggcatgtatatctaaatgtctctgcagacatttcggcagagatttttatggctatatgaattctcctttttatgctttctgcaagaaaactttggggactcatttatggttgtccccttaggcccccacccactctgtttgcttcttcagtgctttgtgtactggtgggtaagtttagttacatgtatgtttaattattgtgccatttcttaaaatagtcatctatcaattatgatccgataaaaactgggtgacataagagcccccttctcaatgcatcaaatgtacacattgtcctgttacatctgtgagggactcatgcctgctgaaaggagggagtatcacagaacaaaagggtgtaatctttaatgtgaatctgaatcaactcttaagctcaagggactgaactgaaaaagctataattgaaaactacagctggactataaatgcagcccacttatgagatgcacattaatgggactataagaatattagaactattatttgtactcatttatctcaaatttgatgctaatggattttttttctaagatgcatgactttgactaagtcatttactctttctaggtctcagtaacttactatgcaagggactgaataatttctgaagtccctccccattaaaattattgtaatggttctatgacatatgcggtgtccaaaacactgctgtagctattattaaattcaaattttaatgataatctttgggacattgcaacaaaataatttaagagtcagtttcagttctcaaccgttaagataaacccaggtatttcctttcttagtatcata

SEQ ID NO: 60679 - DNA, 1072 bp, Homo sapiens
gaaagcatcactttaatgacagaagccacatttggtactctgcaaatctggttaataatcctgctgtgtgctttgcggttggccatgatgcatagtcacctgcaagcttatttaaatttagcccaaaaatgtgtggatcagatgaagaaagaagcagggtgaataagtacagttgagctacagaaaatggtggcttgagtcttttattatctttttgtcattgcactgcagtatgtggtgcctctggtaacactgtttcacacaactctgcttttgaaaacactaggtaatcattcctggggtatttatccagaatctgtctctaccttaccagtggataatagtctactctacaattctgtttactctgaattaccatcagctgaagagaagatgaaggttactgttacacaaataacagtggcactgagcagcttaaaaacatttttacacttcttgttttttgaggacttctgtcttttctgacctggtagattgctgcttgcctcttttctacaagcctttttgggcttttttatcaccagtatctgactgtggcatgaatctcagttaacaaaaaagcatatcaaaatcacagtttaaattcaaatatttgtgcccttaaagggctgacgaaaaccagaagaaagcaaatacaatggaaaaaaatcagaatatcttgtattaaatgtttcctctgtattctcagggtgaattaatgttaaaattacaaaatagattgttaactgttacactgtggcattggaattttaactgttggtatttactggtatgagggctatctacaagggtaatatttctgattaccttggcttacagaaacctccagcagtctttgaaacatctcacatgactccagttattgattgcttttaatggtattatggtactgctggtcgtcatagtggctgcctatagaacaatcttcaaactgagccatgctttaggggagagaaaggggctaaagtctcttctgttggtaatatattagttactcttgaaacgataaaatccaacagaaaggaagagatagctactgtatattatagta

SEQ ID NO: 60680 - DNA, 1063 bp, Homo sapiens
ttcttcttagcactattctagctgcatgccagattttttgacacattcttttttattaagttgtatatatttttattaacttcctttgatactttctctttactcatggattatttagaaatattgtttaatgtacatatttttagagattttaaaaaacttgttattgatttctgactttttttgttttgatttccagttttattctattacagtcagagatcacattctgtctgatttctataccgttaaatttgttgaggtttgttttatggcctaggataaggcctgctttggtgaatgtctcatgggctgtcctccacactgtacctgctgttgtttcttcttcggaattctaaggtaattggttttttttttttttttgccttttttccacagttaatagttgttcttcaggaaggatggtctgtaggtggggtacattgctataattaaaagcaagacttctccgcactttttagttccatctttatttctgtatgattttactttcttctgtttctttcctgagtataatcagtttttgttttatttcttcctgttctttgtccatttctgtttttaaaatttttgatccatagtattttttaatatctccaaatgcttgtttaaggatatttaattctgtttcattgggttagtattttcttctcccttgtagttgttttcttgggcatgggagatggtggttattgtggttgtcagctcaaactttttttccctcattttgtttgcttcacttctcagcaaagtcttctggtcacccagtctaaaatttcatcatgcccctcatatcttctaatctttcttatctacctttttttttcctttttgctgcttattactatctaacatatgtattttacatatcttgtctattgcctttcaacctaccgaagtataagctccaagatgattgggacttttaaaaaaattgtttcgccactattaatgcaaggcacatagtaggcactcgattactgcttgttgtataaataaatatatgaacaattgattaaacaaaggtttatttgaattaagg

SEQ ID NO: 60681 - DNA, 2596 bp, Homo sapiens
ccttaattgaatgaaatggcatcctgctccgctttttttttttaatcaagctgtcagattttatgcagcccgatttcctaaaataactcactaattcagtgattgccaatttattagccacagattcccaggtaactcagaaatcactggaagggtctctgtaagttcatggggtctccaggtgtcatctagaaccagtcctatctcacacgtacagctatttctatttttcaaatgtatgtagataagttgtaatttaggagttttacagagtcaacaggtactaaaagtaatactgcgatcatattggaggttcataaaaacgtttcacatttttttattaaaatttaagttttagtttaagttaggaaaccacttcatcagtccagttgatacctgggtctgagctgtccagtatggtagccacatgtgactatttggagttagaatgaaattaattaaaaactcattttttcagtttccctaagtatattgtaagtaaccacatgtggctaatggctaaatggctgaaaagtacagatatagtatatttctatccttgcagaaatagatactgctgatgttgacacttaagatgaataaaaagtaacttaaccataaaatgtaatcttaagagaggtaactcatctaatttatagcataacagagagaaatgaaattggggatggttaagcagtttctacccttgttcagtgaacaaatacatcatctcttcataaagaaataaatgaaatttactgtttttccctgggtattgcctggattgtaaaatgcttctcccatctccttaccccaaccttcttccttgtaggttagagttacttgttattggtaaatagccactatggaggctaaggaccagaagaaacacagaaagaaaaacagtggacccaaagctgcaaagaaaaagaagcggcttctgcaggatctccagctaggagacgaagaagatgcccggaagagaaatcccaaagcttttgcagttcagtctgctgtgcggatggctcgatcctttcacaggtatgttaggctacggtctggtcattcttccattgattctttttttaaatagtaggagcctctcacaggtgacatttggattcacgagtctagtccagctccaaaggacatggagattcatggtgtgtggctttcactaaaacgtgagaagcttttcccatagaagctgccttgcctccagcatctgcatactggttagtgtttattgcccaggatacaagaatttatagactttgtttgttcctaaattttaaactgtttctatggtgataagtgtgctttttccccccaggtatgttttacatagttgtaatataaaatacaaaaattacaatatttaatactaacatagctttatttagtgagcccttgtgatatgcctagcagtgtactttaaacattattcaactaaatccttccagcagccttaccagagtaggaatcattcttgccctcattttatgggtaagaaaactgagatcaagaaaacaagttacctccaatcatataaccagtaagtaggagagctaaatgtaactccagcgcctctgctcttatctgctatgatgtactgcctcgctatttaccttttggttttttaaaaaactattaaaatcactcttaaaacagtcagatttaaggagtgtttaattttcgctctctatagtattgaagtcatcttgttacatctttattgaacagcaattatttggatggggccagaagttagcaagttaataattgacaagttaattatatttatatattgtctgttgtactctctataaaatgtgctaaagtactcatagctataagtgtaccaaaaaagtctacttataaggttgataccttttactctattttgaaaatgagtttactatttatttatttgtttattttttaatgaataggactcaggatttgaagacaaaaaagcatcatattccagtggttgatcgaactccactagagcccccaccaatagtggtagtggtgatgggacctccaaaagttggaaagagcactttgatacaatgcctcattcggaactttacccggcagaagttgactgagatcagaggccctgtgacgattgtgtcaggtaggagatgccaccacagacacagagttggcgtggctgttgtcatctgagggacatgcatgcgtttgttgttttcttgagtggaacatgttaaatattgtcatatcatgggacttctcttatacttagtattactaagttggctatagcttcagaaaagggtaagttcccagagataaggatgtgataatgttcacatttcctcccagcactctgggaggttccaaggcaggaagatactcgaacccagcactcgggctggaaaatcaagctttgctgctcgattgcgacaccagccacagtcctcttcctccgtgtagaaggatgtgtggtccagcctcttaaggtgatgctttccttttcttcctggtttcctcctccattttttgtatgagaaatgataatgttcactatgtcttatcctgactgctctttggctttgccaaacatgtt

SEQ ID NO: 60682 - DNA, 1053 bp, Homo sapiens
atttggctgcaggagccttcagcctgtctcctgtgtcctttcaactgtctctgttagtctttgagcatttctcactttctgacagaacaagaggatccaggctcattttgccttctttctgctttgggcctggacttacccatttctcttaaggatcatgtgtttttagcttagaaattaatcagctttccaaaagatctacaaaacagtaacttctcttttgagcaatttttttctaaaattagatttttgttttttaagggttattcctttattctctctataagttcttttgaagtgtggtgttagggaaccatgcccgagtttgcttcttaactcttccaatgtttatcaaatcatattttccctatgctatgtcatcttaaacaattccttgacattttctatttctttgtattttcattgactatattgccatttctagattagctgattaatgtacaaattgaattattttgtatttccttggtaatacaggctaatgatgccaaaggaggaaaaacaaatggacttgaacactggtcgaatgcgtcggaaagccattttcggagatgaagatgaatctggagatagtgatgatgaagaagatgatgaaatgtctgaagatgacgggttggaaaacggctctagtgatgaggaagcagaagaggaggaaaatgctgagatgactgatcagtatatggctgttaagggcatcaaacgacggaaacttgagttggaagaagacagtgaaatggatttgccagcatttgctgacagtgacgatgaccttgagaggagctcagcggaagaaggggaagcggaggaagctgatgaaagcagtgaagaagaggactgcactgcaggagagaagggcatttcaggatcaaaggctgctggagaaggtagtaaagcagggctgtcaccagctaattgccagagtgaccgtgtgaatctggagaagtctttgctgatgaagaaagcagctctccccactttcgattctgggcattgcacagctgaagaggtgtttgcatctgaagatgaatctga

SEQ ID NO: 60683 - DNA, 1039 bp, Homo sapiens
ggccaattggtgaaatcccatctttactaaaaatacaaaaattagccaggcttggtggcgggtgcctataatcccagctactcgggagactgaggcagtagaattgcttgaacccgggaggcggaggttgcagtgagctgagatcatgccactgcactccagcttgggtgacagagtgagactctgtctccaaaaataaaaaacaaaaacaaaagagtgtccattgtgtatactggaaaaattgagattgggattttgatgtgaagtgcggaaatgtggattgggtccatttagtttacctaaacagatgatgaaatactaactgttttacaaagcattccctagtgcaaagttttgcctgtgtgtgtagtgacaggaacagtgagaatgaggcttggaacgcagagcacactgtgggcctgtggtaggtggggccagcagcacatgcatacctggctcacagagcagcctttgggtgttcttttcccagaggagctctacggtgactttgaagacttggaaacaggggacgtgcacaagggaaaatcaggccccaatactcaggtatgactttgtcgtagctggctgttcttggtcattgtgttctgagagaggcccacattgagaaatgcaaatcttacttgtgatgtgtgaagattgcagactggatagatagattccttcctaaagggtggggatgtggggaccaaagagaagctttcttgtttacttgttaagttttggatgacagttactaccgtttcttgccatagtcatttgccaagtccactgtgatttttcactcacggaagtcttagcttcttggacttacattcaaccattggcatcattctcctttttttaaatttaagtgtcatttaaaagaatgaagtccctgttctccctagtatttctttagaacagggtctgggagcatctgggtgagggacacgtctgttatttttattctagtttgtgttcccagccagcttaaggattagcagctaattgtaatgcagatgtaaccatttcctgtagc

SEQ ID NO: 60684 - DNA, 1078 bp, Homo sapiens
ttgacctttgaaaggcatgactaggctaactctgaagtttttgcttcacaccatttacaatttaaaattacctagagccttgtgggccattggaaaagactgaatgtttcactctgaaatgggagtccttggagggttttgagcagaggagaggtaatcagatcactctgccaagagatcagtcgggtggcacaaaccagaaggctggcagtggagatgagagaaagagtcaaacccggatagactttatttggaagctgggtcagtaggatttcctggtggactgaatgtggggtgtgtgagaggaaatgaggatgtcgactggaagttcctggaaggacgggttgttgtaagttagataggaaaccctctgcagatgcagttttgggaagatgatgtttggttcggctgggtatcatgcagacaagtgaaatgtcaggtctggagagaggtctggccagggacttagatgtagatgccctcagcatgtagatgccacttaacgctgtgaggtggccgggagtgagtgcagagtgagtgggaggagcaagactggcatgggcgagatggggcgattgtggccgtgagtcctgagcagtgcctaggagggagaagcagtgtgagcatgcaggcacacaggaggccagttgtacatggaggcgaagcattgttcagatcctgctgccatgttaactacggtgaaggcagagttcaccactggaggagtccttcagcgtggaggccttcagcaatcttggcaagcaccaattttcatggatgtaggagaatgggagcagaggaactggaggctgcaactgcagaaaacttttgtggggttttgctgcagagagaagcagagaaatgaagccgttgttggtggaagaagtggaatcaaaaggttttgagataagagagagaacagagggaagagctgttggaataaagtccaggaagagtggatggtgtctagtgagcaagtgatgtgtggccctgagtagaggcatggacaaatattctgtgcctgagctgcctgtagaactttctgtgatcatcgagatgcacgtcagtgcttcccaat

SEQ ID NO: 60685 - DNA, 1049 bp, Homo sapiens
ttcaaactcctgacctcatgtgatctgcccacctcggcctcccaaagtgctgggattacaggcgtgagccactgtacctggccaaatgtgtagtatttttaatagggtaaagcctacataattctgtccacagttcctttacttagaaattgctcatttgttcatgttaatcttatgtttattacagataacagcatacaggtttttttattccccatcatgtacagctgaatcgcgcagaatttgaagatcaagatgatgaagccagagttcagtatgagggttttcgacctgggatgtacgtccgcattgagattgaaaatgttccctgtgaatttgtgcagaactttgacccccattaccccattatcctgggtggcttgggcaacagtgagggaaatgttggctacgtgcaggtgggtccctttgctacatatttggtgcctgaggctctgtggatttcccctccatcaatcatcttaccctctcgtcccctcagatgcgtctgaagaaacatcgctggtataagaaaatcctcaagtcccgagatccaatcatattttctgtagggtggaggaggtttcagaccatcccactgtattatatcgaagaccacaatggaagacaaaggcttctaaagtataccccacagcacatgcattgcggagcagccttttggggtaaaatatgattacaataacttgcctgttgccaagattaaaccttacaggctgcgttattatagctttgtgcttttctttcataaaattccactcctaagatttttctcttttctgggagcggggaggtggtttggagtatatatgtaaatctatatccaaatctaaatgtccatatccagtatgttaaactagaatctaaaatttgtggttcgctatatttctttttttccttttcctttaaggccctatcactccacagggaactggtttcttggcaatacagtctgtcagtggcataatggtaactatcttggatgatttcttttacagattggtttgagaaatatatcctgggtgtgggttatt

SEQ ID NO: 60686 - DNA, 1839 bp, Homo sapiens
attattggggatgatgtctttaataatacatttcaagataggagaaacttgttctatatagttgactttaacaaaagcctagggcaaaactttcaatttattaacagtatttatgaggcagttaagaatttgggtcatcctccgtctccactaaaaatacaaaaaattagccaggcgtggtggcgggcgcctgtagtcccagctactcgggaggctgaggcaagagaatggcgtgaacccaggggcagaggttgcagtgagccgagatcatgccactgcactctagcctgggcgacagagcgagactccatctcaaaaaaaaaagaatttgggtcatctcaattaaatatagaatttaagattaccttgaaaattcagtgcagagtattttgccttcatctgttgtttgagtctcccttcttttagccatccttccatcagaaatagaataccaagttaaacttcttaattagaatcaggaatcaggactctttggctgctgattgaaggaagaactgtccttaaatccagagtgggccagttgtggtggctcatgcctgtaatcctagcactttgggaggccaaggcaggtggatcacctgaggtcaggagttcaagatttcaagaccagcatgaccaacatggtgaaaccccatctctactgaaaatacaaaaattagccgggcgtggtggtgtgtgcctgtagtcccagatacttgggaggctgagacaggagaattgcttgaacccaggaggtggaggttgcatgagccgagatcacggcactgctctctagcctgggcgtcaaggcaagactccatctcaaaaaaacaaaacaaaacaaaaaaaacatccagagtggttgatagtcaagacaaaaagctagattatttttgttagtctgggaaataagcacctcagtggcccaaagacaaggcctgaaatttccatgaaaagaaactgggatctattcatctgttctgttgagaccccatagttccataccatagaaatgggcacagtgggttttggggggagagttgtaagtgtaagctgtctgttcctctgtttactgagaattgtgggtgtccactgaggcagttcatatttggcagatgattgagtcctgatttctcagggccggcagactctggtgttactaatcttgtggaaaagtcaacccattgagaagattttatgcagaagttttaaatgcacattgatcataatttgaatatgtcacagtctttgtttttcttttcagccaatcctgaggcaaaagaaacattttaattcactgcacattccaaaagccttgcagaaggccctgccatttaagaacaagcccaagacccaagcaaaggcaggcaaggtgccaaaggacaggcggagaccggccgtcatacgcgagcctcatgaaagaaaggtactgttgcccatgctgtactgcacgctgcgtttagataggaaaagaacactctcaatagcacacttcctgtttctactgtagtctcagttattcagggcactggaactaaagtcagaggaagagccagagtccatttccctttctttgcctggtcctgctctgccctgtgcttttcatgggggataacaggtacatggctggggaacccttctgtctcggttagctgcacacagtgtccacagaatgatgaacagaggtggtaaaggtaaaatgggatcacacctgtgtctccatgccaacaatgacttcctagcacaggatgcattttcatgcagttaatattcatttggatcgtgggttgcctctagtcttagtgcttaggatgcgagtgtgtggtgtctgagagcatt

SEQ ID NO: 60687 - DNA, 1409 bp, Homo sapiens
ccagtctaaagccatgaatgaggcctctcactcccacctgggaatgctggtcttcagggaggaaatagagacgcatcttcataaacaggcatacaggacaaacagtgaagctgttggttgaaatcataattaatgcgttactgtatgaaccacaaaacagcactatttatttagccttacttctacttccagatgcagtgcctcttttggagaagacatgtttatttttcatgttctttctgacattactttagcaattcaacttgatgtgagaagaaaaaacaaatgtttcaacacaaaatctctgttttgtgagaatactgcactatggaataattgacaaattgaaatctcatatttgtcccaaaagttgttttgagttagttctacctggtgcccatgttctgattgtgtgtgggattgcatggtgtcctgattgcatctaggtggagcggatggaatgtgctgggccactgttgggtggagagcagcacattcttacagaggagatggagcgttatgagcatagtatgtggataggtatcttcacctgcccgcccctgagtcagcctccttgacttgatagcttgaagaatccttttccactgaaatagaggataattaattgacacatctgaaatccccaatcaatcaatcaagagaaaggtagaactaaaaactccttaacttactgttgcttacacccctgaaagtctgtttttaagcaaatgggtaatagtagaaaataggttagaatctatggcttgattaaaaatatgttattacattatcatgttcaggattaggattagtagtcagttgctgtaaactattttgaacaaacagaaaagaacacggaaacatttttaacagagcatttaattatgttggaatacaggatcctagctctgtctgggaacattagtttatttgagccagctctatcagggtcttcccatggtggttcagaatagatgagcatagcatggttttgtttgtttttgctttcaattttctaatttggcatggatccatatgtatttactatcctttttctaatatattaatatatgctacatttgtatttgcattactataatactttgagttgaaaaagagtttcattgtggagagaaaaagcaaatggtatgccacaagatcactctgatttgagaaaagggaggaggggaagatagtctgaatggaaatctgaaatacggaatgttttagagaaatatgtcacttgcatatagaatgttttaattgaggtataaattaatgagacaaagtgaaaaagaaattatattcagataggactgcactacattatttgtcacacatggatctgttaccatcaggtcaattcctagtatgcataaattttttaacccttttaaaagagacctatg

SEQ ID NO: 60688 - DNA, 1480 bp, Homo sapiens
accacacagccaatatcgctctgttttttttttaggacatttcattaccatccagaagtgtctcccactgaaggcatccgtggttgtttttaaggtaagctattttaagaagagccccttttcagctgcagtatttatatttgttatactcaaatttgtttagcagcctggagtgaaaaaagttttgtccctaacattaaccttgagcaggacaccacagggctcttttcagcttgagttttagttaatgaaaagccttaggacttctgagaaatggaacagaaaaccaattctggagtaaaaataagcagtaagtgttttaagtgtacacatgtgttttggaaaggaatggtctcttcgccttgccttcagagaggaagtaattttgcttctgaaacatttcctgatgcaaaacacttatgacatgtaaaagattaggcattttaagtaattcttctatgaaatgtttttattttttatgctgcttgtatgtctttttcagcctagccaggccactgccttcttgaggaaggtgttgacccccctacacatgggcaacagttaatcctggctaatcttggaccagctgggtcaagtctgtgctgaggatggggtcatggtggccaacaaaacaggcacaagtttctccccagtaggctcctattgtgggtttaagacccctttaacaacacaagagtgctgtggttagtgtagagcatgagacttaatttggataatgagaagacctttgagaaaggtggtgtatttgagcttagaccttaaggattagtgggatttaggtagacagaaggttgaacagagtatatttggggagagaattaaccatgagtgtcaactatgtgcgtcacatccctgaaggggcagagagcttgccacattccaggagaaaaaaggaagtgatgtgagcttaggtagaagagtgttgcaggcaaaagttgcaaggcctgagggaccccattgggcctgtggtccttgttctgaggtcagtgggaaaccactgaggacttggatgcaggacagtaatgagttttaaaagtacacgtgagccgtagatgggattgcagtaaggcctagccactgtgcttggaaaacttttttttttttttgagatggagttttgctcctgttgcctaggctggagtgcagtgacgcgacattggctcaccgcaacctctgcctcccaggttcaagcgattctcctgcctcagccttcctgagtagctgggattataggcatgcgccaccacgcctggctaattttgtatttttagtagaaacggagtttctccatgttggtcaggctggtcttgaactcctgacttcaggtgacctgcccgcctcagcctcccaaagtgctaggattacaggcatgagccactgcgcccggcctatgcttggacttatttaaaagatatatcggtaatctggaattggctgtttgtacatacaggaattagaa

SEQ ID NO: 60689 - DNA, 3096 bp, Homo sapiens
tatttgtggctctaaaaagggtcttttaaagaaataaaattacagtataatgacaacaaaatttacaattctgcaatataaaatgtcactgatcatattatcgaaattgctttatagttgttctccagttcatttgaattaagattcagaggtccacaaaattgcgttagttaaaagtttaggaattgcgttaaaaaaattttttttcaaagattttttttcaaaatctttacgtgtgtccatggtcaaatgtacaaaccaaggtacgtccgctagttccattttagaggcggcctcccagagaggggctgtgtctaacttgctggcttctcttccactctgcactgcccgcccttccccgtggctggcactctggactttccccaggtcgcgctcgcgcctggctcccttcgggagaactcggagaaatgtcttcccgccgccctgactctctccttcccccacttcctgcctgggcccagcgcgcgggccacggggccgcacctgcaggcacgcgtttcccattggtgacatcttggcgggcccggcaatggcacttcctcctctgcaccccgtgacccacgtccggctgccggtcttggatcacgaggcctccgcttcccggactccggaccccgcgcctcctcggggccgacgggccagtccctggcgtggtgagccgccgcgcgggcgccccggccccgccactccagtcccggccgccccccccaggtccctttccgccgccccggtcgctcggagacggacgcagacctacgagcgcctcttcccttccctcccttcagccgcgctcggcccgcgggtccccgagctcccgcctaggcagcgctagcttggcgggccggggagcagcccccaccccaccttgccgtcgccctcgctctcgccctcagggccccggaagcccgccaggggccccctcccctcccctcccctcccctccccctcccgcgaggcgcccttccctccgggaaccctcccgtccctgcccccactctccccgctgcgccgctcgctccgccccccgcccggaagctcccgcccgagcccgcgcaggccctggggccgaccttcctgccgggccgggcggtccgaggctgctggagtgccgtgagcaggccgcgggaacgtcgccgtcaccttgtctcggggcctcggcgctgcttcccgccaaaacacgtttaccgcgcgcccgggcctcccaccttgcggaagggaccccaccaccacttggatttctgttgcaggttgagaacaaaaacatgcacctggagtttccccggagccctctgcgtggttgagcttcggtggaatttcggggctcttggctgccagccgcgcttgcctggtagcaacagaaaccagtcctgctcgcctccgtggtaagtctagagcatgaaagtccgcgggcccggccgggtggactttggtttgagagtggaactaagtgagtaatgggggcggcgcggccagacgcgctcccagcctcctggcgagagtgctgcccggtttcccgggggcacgggagtgtgtctaggaggggaggccaggatccttcctcgagtcctgtcctgaacaaaagaaaacgaggtgggtggtgcttgaacggccctgtttactctgcagatagccgaactggtaggactccggcgcgccctatttatcttgattggctctgcctgaaggcaagcgttaatcccgtccaacctgtatcactgcgaagagctcgttcgggagcgctttttggaaatgcagattcttagcccccacccagatctgttttagggttggtgttttaattatctaggtggcccccgtgcaagctcgatctgaaaacctccgggtccagtcacctgggggagctgagcagccctccccgcccccagcgctttcttggcgctgcggacggggagaccagactcttcctctgcgtgcgttggcggtgcgcagtggccgtggtctacaggcttacagcggctggtccattggggtaaatgggtgtacgtgggtctggttgccagcttgtgcatgtccccagagacgcctcagggtgttggtctgtggatcacgcagggataaacaagggcataagtggatcagatcattaagatgactgggttccaccctttagatccttgaacaagtcggattgttgaagccttttgaaaacctgattccagagtacttgaaactgtttcacccctgaataggtttcctaataaatgtaatgctttccatttgtacacccccccaatagtgtcttaagtaataatcactggaagtttgcaagacaaggcagatttgattatcttcatgttaagacaacaggttcagcataattagctggttttactaattccacatttccaaaactcaagcagcttagttctcagaattccatagccctcagcccgtgtcctagtcctttggggcagcgtttttactgggatgttggtgatctagtgattatgatgtatgttctagtgaagcatatttcaaagaagttacccaataaaactgaaagtgtcttttggatgtgtctccacactgcttacagaggggttcctataaatcagactgaacaatttctagcaagcacccttgctccttgcccatgctatcccagtgaaagaggggtcttaaggtcaagtcccctgtggttgtcacttctcccccacccatctccctcccaagtgccctgcccccgatatttaaatttcctcccagcacttagggtcctcagtgtacaaacttagaattgggcagaggcgggcggatcacctgaggtcaggagtttgggaccagcctggccaacatattgaaatcccatttctactaaaaatacaaaaattcgctgggtggggtggtgcacgcctgtaataccaggtactgaggcaggagaatctcatcaagagtaaatctcatcaagatcaataaggcgtttcccttttgttgtgctctgtattgccctgtgaaaagataatacttccaaaatgctgttaggtggatggggtgtgagatttaatttaaacccacgggctatataaagggcttcccagctgtttctgtccttac

SEQ ID NO: 60690 - DNA, 1631 bp, Homo sapiens
cagggggctgaggataccccacaggcctcctttctctccagctccagggtttgactatgcacctatttaggggctgcttgctcaagggagagaggtacaggaggtggtctgggaaaaacaaaattgatcttcctatcaattgtatttttgtttagcggaatctatacacacccatttctttggatattatttccagttactccagctaatccaaataatgatatttgccctcagttaagaacagattttatttttaggaacagaagtctagtagcagttttgctttttattaacgttttaaggaacatttaccttagatatcatgattcttgggcatttgcaaaatgcagtcaatatcaaacagcaatggttgcttgttttatgatcggtcagaatttgtcccttatattaatttcagtacaaacagtatagataaaatttatctaacattacattatactactcttgatgctttttagtaacacagcttttgagaaatgaacgctgagggaagcagtgtgttatccccccagacttagctacagcaagtaagtgaaaggacctgatagatggtaatggaaaacagctttcctgttgcatgcagatcaggacagatcccctttggtggatataaatgtagtaataatggagtaaacatttaaaatgttaatatatgctccatctgcagcttctcagtcttttttttttttgagacggagtctcgctctatcgcccaggctggagtgcagtggtgcgatctgggctccctgcaagttccgcctcccgggttcacaccattctcctgcctcagcctcctgagtagctgggactacaggtgcctgccaccacgtttggctaatttttgtatttttagtagagacgaggtttcaccgtattagccctcctgacctcgtgatccacccgcctcggcctcccaaagtgctgggattacaggcatgagccactgtgcctggccacttctcagtccttaatagcttttaggatagctctgtgtattgaatttggcacgttgtgtgaattgggttagaattctcacacttcagatacatgtgcccctgaaaagttaagtacaaatgtgtgcgttggtgcatttttttaaatggaattagtgtcttgtatcataattcttgagttcatgacagcaggaagtacttaagagtgactgaataggaattttataaaattgctgggttggaagatacttttgaggccattaaacccaattttcaatatttccaacagaaaaggaaaacatccataacaaatatggtctatgatctgctcacatactatataccatgatggggaatttttgcccccaagatgcatcttgtgcttctcatgtggtgaacagacacgagcagcagaagctgtgtcctaaaatttcttcaatctaaaggattcaccacgaaataagaatatgaatacaaagcatccagcaccaaaatgtatcccagtaaagggctttggtaaaaaatataaataatttgaacaagtgtccagaggggagataatgtacagaaggaaaaaagaataatgggcttttaacttcttttttttccctcagtttttatctttttcctatatagagatgggagtctcactatact

SEQ ID NO: 60691 - DNA, 1062 bp, Homo sapiens
cttgggcttctgtttcctggtgtccagggcaaagggctgagccgggcagtagggcctagtcggggcctggctcgccgggagcaggagggcttccggcaaagccgcgtgcgctcgacgggcaggcgctgaggattggggccggcagcgcgcctgaccccgcccctcgtaggctccgccccgtgctcgcaggcgggggtttccatggtgatggtcaacaagcctcaactgcctctgctacaactgccaagttccccgcgtcccaccctcctctaggtgctccaagggaccaccggggtgcctgatatgagagcgggagtgtagagactcggaggccgaggtgaggggcggccgaagtctccgaggtcgaaggccgcacacccgggacctagcggggaccgggtccccctgggggtggggacggggggtgggatttgagattagggagactatccgaagtccagggccccgtacccggactacctggggactgggcctattggggtggggatcgttgggctggggctgggatttgggatcagggaagagcgatctgagtttaagcgccgcaaacctgggaccgagcgaggactgcacataatgaggggccgtggcgctgagatttgggtgacgggattcgaggtcgaggggcccgtacgtgggaccggcaagaactggacccactgggatcgggagacgcagcgtcggaggtcgagagccgcacgcccagacagtggtcccacgcggtgagcaccgcgggctgagattttggagtcaggaaagcgcggggaaggcacggacggccgggtgcgttagtccggccccctggcggggagctggcgactgccggagggctctgaaagtgagaacaggcctggcgcagtgggaggcccagccgggaggatctcttgagcccaggagttcccgacaagcctgggcaacatagactgtctctactgaaaagtaaagaaaaaaaaattagccacgtgtggtggcgcgcgcctgttgtcccagctactcgggaggctgaggcgggagggtcgcttgctctgaggtcgaggctgc

SEQ ID NO: 60692 - DNA, 1018 bp, Homo sapiens
gtgtgggaagggcttcagccagagctccaaccttcacatccaccagcgggttcacaagaaagatcctcgctaactgacattagcccattcaggtcttcacagcgctcatactgtaaaaactgttaaatatttagtatcactcttactttatattctacaaaggagagagatgtaagggttatttagatatgttccctcactgaaaaatcactcattcaaaatatttaagtatcaagcactttgttatgctgtacaatgaatggattgttcttgtttctcagatgggtagagtaaaagtgtctgtactttacaattcaactacatgttctacccagcattttaacggcaagaactttatatttattctcaagcagggcatgtttccctttgttcacattctctgagaaattgaaactctggtttctcttcaaattttgtgccttgtgtttttcatacttctttccagtcctgattagccccctctaaactatgattgtacactgcgtccattttaggccaagagggcagttggaaatacaatggacatggaaattattgtgtttattgcaaaaagatataatagtttgtagccacacaacaaaaagctggaagagagttactcatgtagtacattcccatataccattttgataggaagttgaacagcccctcccaggcaactattcaggaacataagtagtcctttttggtgagtacagctagtttattgggatacttccagagtgaatgtgaggaagggtccaaagtaacatgcctggcactttgggaggctgaagagggtgcatcacttgagcctaggagttcgtgaccagcctgggcaacatggcaaaatcttgtctctataaaaaagtgcaaaaattagctggtgtgctggcacagacctgcagacccagctactcaggaggggtacctgagagcaggtgataataacaaataggttccagaggcagagctggaaaaatgaatacataaggagcagggggcagcttagaggctg

SEQ ID NO: 60693 - DNA, 1041 bp, Homo sapiens
taactacagataactggagagctgattggctccaaccaatcatgaaggctgaaatgttgttttcttagattctgaattcctctggggcttggagggaagaaagtagtaggtggttaggtggggaaccaaaatggaagatcccaattacatgccaagaccaaagtgtaaacaggagtgactattaacttgggattggcaggaagagatatatgtttatgtgttctctgctttcccacatcctgcttcctcctagactcatttgtgtgtggtcctggtacctttgggcccattttgcagtgatattttagtaactgacattatgtcaaacaatctaggtttcttacattcacttatgtctcaacaactgttgactttttccttctcacatatcaattattctgccctttcctgtttgtttctgtttgtttttctccctcaggtgctcaggaacagcccatggaagaatcatatgaagaggtggtgactgaggtcgtaagcaggagtggacatgtttggatttccaacagctaccctgctggactgtcatggaagatatgcccagaatgtagcgttcttcagtgagtgagtcagttgatggctggatgcgctcagctcacagatattcagtgtccctgttctcagcactggtcggcagtctgaggaagcagaggagaccttgctttggtagagcttgctgttcctagggttataagaaaagcctgtgagctggagttagaagtaatagtagaaacagagcaagagaaccatcttgatatggaggtagcgttgaagtagtctctgagaatgaatgagcagcttaaatctcagcactgtctctgaataaggcaagggaacaaggagaagattaccctggagtgacagacaccaagaaaactgttaatggtgatgaatggacccatatttaaagtgcaccaggaggctcagatgcagggcagtattcggaaaaaaaaaagtcaatatctgcatagagaataacttccaaaccaaaattgatttcagttttgccatagcttagtagac

SEQ ID NO: 60694 - DNA, 1042 bp, Homo sapiens
ataaccaggaccactgccatagttgccaccatcacctcctaatccattatatccacatcacctcctccataactacctctgctgccaccacctccaccaccatagcctcctcttccaccaaagtttccatcacggccaaaattacctccaccacctccaaagtttcctctgtgacccatacaattgccagatccacctccacgacccctctgtgatccagccggctgcatcacttgtttagcaagggcctttttcacttcacagttatgcccattaatagtgtggtatttctgaacaacaattttatcaactgtatcatgatcatcaaaagttacagaagcaaatcctctcttttttccactctgcctgtcttccataacttctatggtttcaatcttgccgtacttttcaaagtagtctctcaaattatattcttctgtatcttctttaatactgccaacaaaaattttcttcactgttagatgggcaccaggcttcacagaatcctctctagaaacagctctctttggttccactacacgcccatcaaccttgaatggtcgagcacgcattgctgcatccacctctgtaacacaagaataagtcacaaaaccaaagcccctggaacgttttgtttgggggtctctcattaccagacaatctgtgagtgtgccccatttctcaaaatgttctcttaaactatcatctgtagtttcaaagctcagaccaccaataaacagttttctcagctgctctggttcctttggatcatggccctcctccccccagtggcgacggcgactgccggagtcgggctgggggcaaccaggcggcggttttacctccattttgagacaggactcacctcttccaactcgagatcaatatgggaccgagaggaaggtggccagcgttttcatttaggcaactctgcctggatcagcacactttccctctgcagttcaggacttactctgaacttcattgataacttgtgacttcaggaaaaaccacactgtcttgcagtatctcaattgagcca

SEQ ID NO: 60695 - DNA, 1001 bp, Homo sapiens
gatcttctcgcgtgcttattggccatttgtttatctttggagtgacggctatttaaatccttcatctattttttaaatcaggttatttgtctggatactagactcttatcaaatatattatatacaaatgttttctcccatgtgagttgtcttttcattttcttgataatatcttgtgatacacgtttttaattttgatgaagttcaacttgtctgattgtgtgtgtgtgtgtgtgtttggtgtcatatcttaaaatgcaaggtcatgaagatataccctatttttttctatgagaattttatagtcttagttatttcatttaagtctttgatccattttgagctaattttttatatggtgtatgagacagaggtccaacttcattcttttgcatgtggatatccagttgtctcagcaccatttgttgagaagattttgtggttctcatttaatgatcttgacactctcataaaaaatcaattggtcataaatgtgagggtttatctatagattctcagttctagcccattgatctctttgactgtccttacccaagtatcacactgttgcaattgtcatagctttgtagtaagttttaaattaagaagtgtgagtcctccacattttgttcttttgcaagactgttttaactatttaggatctccttgcaattctatgtaaatatgagaaccagtgtgtctatttctgcaaaagaggaggttgggaatttgataggagctgcatttgagctgtagattaatgtaggaagtattgccgttttaacaatgttaacttattttatccatgaatgtgggatgtgcttccacctatttagttttttattttttatttttgagaaggagtcttgctctggcaccaaggctagagtgcaatgtcgtgatctcagctcactgcaaccttcacctcccgggttcaagcgattctcctgccttagcctcccaagtaactgggattacaggcacgtgtcaccacacccagc

SEQ ID NO: 60696 - DNA, 1049 bp, Homo sapiens
ttcattggttctcattcagttcccgccatcgaaaggccccgtcccgcagctttccacgcgcgccccactttacgcctaaggtcctcagtctctccagtggggccctgtcacagggacaataagcggccctccagccggcgtcgctcaggctgcggacctcactgcagaccgggccagcggtgcggggcccagcggagcctgagaaggtcaaaggccggagcgcactgcgcctcgggagcacagagggagcggaggaggggcgaaggggatgggtggggggtgccgccgagggagtcgcgcgtcagagaccccggccacggccagcactcggctccgggcccgcccctcaccgcgcgccccgccccgccccgcctggctctcccctctaaagcgcccggcgcgcgcctcccaccgccgcactttcactctccgtcagccgcattgcccgctcggcgtccggcccccgacccgcgctcgtccgcccgcccgcccgcccgcccgcgccatgaacgccaaggtcgtggtcgtgctggtcctcgtgctgaccgcgctctgcctcagcgacggtaagtgcgctcggcggggaggccctggcgaggctctgggcttcggctcccgcccggcgcagagccgcggctcctctgcctgcgcccgcagtttgcgccgcccgacacagtgggggtggaggcagctcgcttagctgggcgctctggtgcggtgtcgcgttcaaagccctacttttgcgccgagggtttgtgacctgcagagagcgaccgcctgacctcaagctggctgcagagcgaggtcagccgggacaactgggcaggaacgccccaagagagcgttcgggactggcgcgggaaggcgcgagggtggggagccgcggaccccagacccctgcctgcccaccctccacccactgccttcccgctgcgggctcggtttccacaggcgaatgggctccgaggtcctgctgcgcacagtgctggaggtcgggcggtgcatggcgagagcgcgctttgcaaagttcgcctcatgccgcgacttga

SEQ ID NO: 60697 - DNA, 1045 bp, Homo sapiens
cctggcaagtggacgctgctgctgttggaaggcaccgggagaagggtgaggctgagacacagctaggacagagagtgcccacttctcctctggtgggtgtgggaccctgccgggcctggtggccataggacctggtggcgcaggaccccctcccaggtgcagtgtgggcagagaggtcccctgcttggcatgagcagacaggctgtgcgtccctggaaccacttcttcaccgcggtgtggacgtgcctgccggccagcagctggcttcctgtgggacacctgactcagccactgtgttctgcgctgtgcccctggccaggcatgagctgagcacatctcaggctccctcccacagggcctggtcacacgccccagggcacgtagtggctgatggtccttcctgaggggatggggccactcaggaggagggatgtgcaaggcctgagtgttcagagcatcccatccctagggggcacagggaaggtaggcagctgctctgggggaagggctgatgtgtggacccccacaggaagaagggactctgatcatcgaggggctcctcaacattgcctgggggctgaggcggcccatccggctgcagatgcaggatgaccgggagcaggtgcacctcccctccacctcatggatgcccagacggcctagctgccctctgtgagtacccggtggcttctgtgacacctgctcagcctgagctcccgggttggggatatcccgagcctcagggtgggagccctgttcccttatgggacactggcacaggagggtgacccagcctcatccccatgccctgtgactgcctcagtccacagcctcgcccagggtggcctctccctccttcctggagaacattccaggctcccatgacctctatttctgtttctcaaaccttcctgcaagccaccttgctggcaagaagggacgactacagccaggggggctcccaacacctatgcaagccgaacatgtctcgccatctcttgttctatctttaaaattcacacgaatttagcctcttactactctg

SEQ ID NO: 60698 - DNA, 1099 bp, Homo sapiens
tttaccagaaaatggaataaagaccttcccactggcaaaatagagccagggttcacccaggatacatctggccccttagtcccatggaaacaaggcccaaagcttatccagtctgaccagatgatttgtggaggaaccagccctgcaaaatgtgtcccgggtgtgtaggacgcaggtgccttgcagctgcggaggggcagcgggatatccttgccaggtgcagtggtgggcagcatccccctgccctcagttcctcagtggtgatcagacaggaagcttggtcgatcagagccaagcaactgagtataaaaacagccagatgcatgggctatatttaggccctgagagctgcgattgtttgggatcaggctagctgctcacgtgccctgcctgagactcacgttgtgcagggtagggccctgtgccctcctggtcaacttttaacagagatgttttctcagacctaggaatgggaactcccagggttttctttcccagagagtccaaaggaaacagaaagccaagtctcaggcttggtggaaagaaccattgttcaggatccctgggctgagagttcttggtgggagacggaccactgttgttaccgcacatgagccacacctataactgcctttctggcacttgggctggggatccatgttgccaaacacagacccaaggcagcagtgctccctgctgagacagcgtgtgtgtgtgtgtgtgtgtgtgtgtgtgtgtgtgtctgtgtgtgtgtgcgcaagccagtggtgtgcaggggacaaagacataggaaaatgaaactgtcttgccaggatttttctcaccccagaagactctttttcctggaatgaacccttcaaataccactgggctcagggacacactggtccctgctgggtagtttcccagagatgtcccagccactaagggatctggcctctcttgggccagaatccccagaaatatgtgcagaaagatgcccagactgtgtccaccccctgcctcccacacccttgttccctttctcccttgtgttttgtaaatatcatgcgtgaccattttcaataatttaatttgcataaaaattgcctagaatccc

SEQ ID NO: 60699 - DNA, 1100 bp, Homo sapiens
ttcactgcactggtagggtttctccccagtgtgggttctctgatgttgaataaggtgggagctctggctgaaacaccggccacactcatcacactgatagggtttttctccagtatgaattctctggtgctgaatgagatttgagctctgtttgaagctttctccacactcatcacatttgtagggcttttcccccgtatggatccgtcgatgctgaatgagattagaactctgaaagaaacttttcccacaatcagcacatttatgggatttctttccagtatggatcttctggtgttgaaaaagagttgaactctgactgaaactcttttcacattcagtacatttatagggtttgtcatccaagcttcttctgagtctactgaagcttgagtcaaatcgaatagtcatgccccacttctgccgctgccggcctgttttgcgcttgttctcataggcctttccttggcttgagctccgagaaatacccgctttaggctttgctaacctcatggtgaataaccaaatgtatttgtaagagagtttacaggcttcttctgaactagtgtttcatttcctagaggtgtacagctcagaattttctgtgtgtagaaggaaaaaaaatttagagatgatcagaaaaaaaattacagatatctgttaactattcaattttaatatctcttcaacccaccaaaattgcattcatgtttaaatttaaaaagtataaatgcaaacaaagataatatggggggaaatttgggggaaatacttgcaaagtaattctaacaattccagagtttaagcttaacaaatatcaccaaattttgactgagtttaccactggagtttctgtctattgggacaagacaaattaaaagtgatcaggtgaaatataaatcttccaagcattaccaaatgagtacataattttgaagaactaaaaagtggagataaggtaaatcttaatgggaatggagtaactccaaaagacaatcaaaatttgtgtaacagaacattactatgctttaatatttagttccatgttaaacttctactaactagtaactgcctaaggtatccaaatgaataagaaatga

SEQ ID NO: 60700 - DNA, 1263 bp, Homo sapiens
gcatacacaaaactaatgtgaatagcattgatagatcctcaaaagggccccatagccacaatcctgccaaggagtgacttggatataatagggcggccaaagatcactgctttcataaaaaactgtgatcacctcatgtttacaaaacaccttgtgaatatcttgttgaatggcacttgtcaacaaggccataacaaggccaacttctatggccctgcactcaaatgcaaggccaggaggaaggcaaagttcaagtttgaggaaatcagaaacaggcaaaacaagtgatccatccaaaagctgtgactttagatctattgtctaaataattaaaacaattccccagaagaaaaataaacagaaggtagtagtatacaaaatatttcattttttattttcatgaataattgtcattaatacagcagaaaccgatatgattataaaagataccaaaaaatcagaagaatgttagcattcaatagaaattaaaacctgagctgagggctcattagagtctgacacttggcaccattctcatggaagtgaagaaacatgtttgccggactccttaaaacaattcatgtaacacagaaagagttaaatttcaaaggagctacaatgtactgacacattacgactcttgttgttgacaaacatttaagcagggctatccaaagctcacagtcttgaaggcagggaggtgtgtaaattgtaggtttttaattaagcagtaagcaagctgagatttttcttggtaaaatagtttgtttattcatgtagatctaaaaggctggctcagtttgtcagagcacaggagaatgccagaagaggtcaagggcatggggatgtatcgacatgaatccatcccaacttgtggaaaacaaacgacacagcagttaccatcacaaagaactctattagtaggaatagaagacttgaggtccaattcagttctcatttggattctatagtatctctaagaatttggttaaaaaaaacaaaacaaacaaaacaaaaaaagggaaatccttactcctttcattaacaactgtccacaaggagaagaaataaaagacaactaatatagataggccttactgattaaaaatctgtgagcttgaatacattttaatatgttgaatctagagtgataaaccaatggttaatatactacaaaactttacaaacaaaatctcatctgttgcagaacttcaaaagtagtggaattgatttcttctcccttttttcttccacagaaagtcc

SEQ ID NO: 60701 - DNA, 1009 bp, Homo sapiens
agtccaggctttctcatcctgctgtgctcccagaacttcatcagccattggataaattcttcaaacaccttcgggaccaggggagacagaactattctctttttgaaacttggcatgttgcaattccgcatgtactgacttattcataccagtgaaactgaagagatccagctcctcagagtcaaggtgcccaagagattagctggttccttaaggtagataagagatgatgaatgttgagtgcctccagaattacccccatagccaatgataacagttattgtcaccattaatactcagcttgccttctgtggcctcaagcctcccctcctggctggctttacatccccaggggaggatgcagaggtatcccgttaatattcctttttggaccccagttccaagctcaaggatgaagatgtctcagcctggaagtgctgtcgggtggacagctcagaatgtggcctgagtgtcatctgagaactaactgcgtccaggtctgcaattagatcagtacagaggttgaagcctatagttccagcactttgggtggctaaggcgggaggattgtttgagtctaggattttgtcacaagcctgggcaatgtagagagaccccatctctacaaaaaaaattgaaaattagctaggggccgaggcgggtggatcacaaggtcaggagatcgagaccatcctggctaacacagtaaaaccccgtctctactaaaaatacaaaaaattagctggatgtggtggtgggcaactgtagtcccagctacttgggaggctgaggcaggagaatggcgtgaacctgggaagtggagcttgcagtgagctgagatcatgccactgtaccccagcctgggcaacagagcaagactctgtctcaaaaaaaaaaaaaaaattagccaggtgtggtggtgtgtgcctatagtcccaactacttaggaggctgaggttggggaatcacttgagtcctgaagttcaaggctgcagggagctatgatcat

SEQ ID NO: 60702 - DNA, 1086 bp, Homo sapiens
tctcctttctgtctcccagggcacatccagcccgtgcctgtgttcactgtgccccgaagtgcaattacccataccccttctcagcctggggaccccaggcaaccacagactgtccactcaggggagctgaatcccaggtcagccctgccaatgtcccttaggaactgcccaggcaaggcccctggttttgtatacttgttcctgccacccagcagtagatgagtgtttcaggtgaagaccaggatagattttctaagtgtgaatccccacttcacatatggaaccccttatgctgaacttgaaaagcaccaagacttcctgtagacaagaaagtgcttaggtagggacagcccctgggcatcccacccaatgtagctggcaccccactatggcaaaggtgccttgataactgagccctgtatccctcccatgcccagccagattctcatgggaagccctctcccttcttttctgcctaacaccatctcatcgtttctggcctcactgtggacaatccacacacattcttctttcctctcctggcggggcacagagccacccccttgccttttcttttcttgaaggttctagttcagctcctgattcatcagacccttctagccccctgcatctagcagtgaagcatgaagcctggtggggatgtggtactcccatctggtgtggccaccagctctgccaatgttcctgtagccttggaaaacttgctctctcggttcttttgggtgctgtgtactccccagcttccccccttccccccccattttgcacctgggtttagtgaaaggatggcatttggttgacccatatagaaacccagaatgaggtctcagggccaggaggcctggtatttgtaggccagggaaggggaagaggcaagtggtctggggtatcaccagccagccctctctgatttggcctctactccccataagtcacagtaccataagcaggcttctggcctcagcaatttggtctttgtgcccaagtttattgtgagaatttcctgaaaactctataaaaggtctcttcctactgtaggcctctaatgtttctcccctttttgct

SEQ ID NO: 60703 - DNA, 1067 bp, Homo sapiens
tccagcgggattgacactcaaaaaaagtctcacttagaaatcttcccttccttacctttgtatctcctttacatcatgagagatcaaaaatccattttgccttacatatgctaagaagcgtggcattctttctgttcataaaacagactcatgacttttaagacaggacaagcaggccagaggctttttttttaatcacagatctcatgggaattagtggatgctaaatggcaattaaagcatgattcctatgcttttgagcctgttttatgacaaggtgttactttgtagacctggcccatacatttcttttttgtcaacactgaaaaagaacagtttctgagatcgaaatggaaggaaaggaagtgagtaatgacaacaaaactgaatatttaaaaaatattcctttatagttaaatctctccagttggtgttggcttcacattgaaagagcagccatgtgccaccctggccggggtgtgtgcactgcatgcaggttctcccttgcatgcaagatgggtgctggcccactgtgaggcttctgctcggggaagttctgtggagtcactaccagggccaagaggcaggtgggctggctctgggacgagggccaggtgtgagcaaactgccagggtccgctgtgccactgctccccggccacatgcccgcccagctgtcgccttaaccagactgaacagacaggatccttcagggcccttggccccactctcagtgcattctgtcatcagggattaccacctgtaccattttcataaaacaaaaccaaaatcactaccatcaaatggccttgtccctctaaaaagtctgcttaaaattctgtttttaaaacccagtttcctagttttccaggcaaatagttacctccgggaaagttgctgggggggcctgaagcacaatgtagcgcagatgcttcctttccaggccattctctcacccagcctgcacggaggagatgggagatgctgggggtcctgccctcagtctttttgggccttaggcgtttcgttcatcctgctaaggggatgaagcaaacacgaggtgattcc

SEQ ID NO: 60704 - DNA, 1105 bp, Homo sapiens
ggaaagccaatcttacctacctacaatgctctcaccccaccggagcccttccccagaagcctgagcctcacactctgtgttgtctttctagtgggagaagttgcagatgacgtccagcgagcgcaggaagatcatgtgctcagtgacattccacgtcattgccatcacatgtgtggtctggtccttgtatgtgctcattgaccgtactgctgaggagatcaagcaggggcaggcaacaggtgagttctcaggctggagcaagctcagcatgggggccgggatagctcacaggagtcctggggtcagaggattttccagttagccaaaaacgtctgggtttccggaggagggacatcagttaggaggcactagcctcctttttggcatttcttttgctgtggtggtagtttttgaaacccagtcaggagagttcatattctggagcatgagaatctccgcaaactacatcctataaaagcaggaagtagctggacactgtcttccactcttctttgactgagcaacattggatgagttgtgaatccattggtcagtggtgcaggcttgtggtccccagatacttgaggctgagggatggaggattgctgaggctcaggagttcaaggctgtagtgtgccatgatcacacctgtgaatagccactgcactccagcctgggcaacatagcaagactccatctcttaaaaaacaacaacaacaacaaagaatcagttgattatgggaagttcagaagttgtgtttttctttacttcatatcttaaataaaatctaataggctgagtttttcccttccaggaatcctagaatggcccttttggactaaattggtggttgtggccatcggcttcaccggaggacttctttttatgtatgttcagtgtaaagtgtatgtgcaattgtggaagagactcaaggcctataatagagtgatctatgttcaaaactgtccagaaacaagcaaaaagaatatttttgaaaaatctccactaacagagcccaactttgaaaataaacatggatatggaatctgtcattccgacacaaactcttcttgttgcacagagcctgaagacactggagcagaa

SEQ ID NO: 60705 - DNA, 1048 bp, Homo sapiens
cttcaggctagtagctacaccttgttgcatacttccttggaaatagagagtgctttcaaattaatttctcacttattgctattagtggtcccaagaaaaagagatgaaattgcagcatcttgtaatggtgagttttttaggtctaggagagaggtactgtcatctttgtttacttgctgagagacgacagaaatgtgtagttgtggggtatgaaggtaaagtcagtgattatagctaaaaagcaaacgtcatttaaggtcactggtatttttggatgttggaatgcaggttttgttttacatagaaattttccctctaattattttaccatcttatgttctggaaaatgattccatgttgctttaaattcatctttcagtgaagttcttatttcttaccaaaaaatgacagctttgtcatttcttacatcgttttttcctttctgttgccaaatgccctccagactttccatgttggtgcggtaagctagacatttttagtttgtagtgattgttttcgtttgtgtttgtatgtttttgtgcccatagtcacttctgtaatgttcgtttctgagtttcctttggggggattaacctgccactgaagtgtcagcttccctgtcatgggactgtccttggaatgacaggttttccttccaccataggatctgccactgtgaaggagatgatgagagccccctgatcaccccctgccactgcacaggaagcctccacttcgtgcaccaggcctgcctgcagcagtggatcaagagctccgacacgcgctgctgcgagctctgcaagtatgagttcatcatggagaccaagctgaagccactgagaaaagtacgtgggaggaagggatgcttcacccttcctgaaaccagtgacccccagaaagctggtgtctcagatcatgaggtcatggcttgcctgcgttcatttccttaaaaagctggggctggtgcttacatttgcattgtagagattgttgtttctggtgctgattttcaagtccctcttctcaggaagaagctctttctgaccat

SEQ ID NO: 60706 - DNA, 1032 bp, Homo sapiens
tgattatttttcttaatttacagtttcaagattagatctgttgggagcattctgtgctctacctcagcccctggttgagctatggattggtgtcccccatggtgacgtggtctggactcccttttgtgtgaagagctgtggcagggcagtgaggttttgtggaactcagggagcatctggcactatgtatgaggttgtgaggtgggagagagctcttaaatctaccagccttgttgatcttgggaactaggagagagtgctagggaagccagtgccagcaggcctggagcctcatatttctttggcatttgtatgataccttctagtacttcgttttttgacttatatatgaactaactcaatttagatgcttagaaaataaacggccactggacctgcaagagattagtagtggtgttccatagccttagacatttcttacacttttatccacagataagaaaaaaatagtgatatttgatttgttttgccaaggcttagaaggatctaatatgtgttactcgttgagcagcgggaagcagcagacatttctagggtttctccctgtcaccattcaggagacagtgcacacaatccccttggctcttacctgaacactgaccacaggtctgtcattgcaggctgggagtcctccgtcagcatcagctccggctccggtgtcctccttctctcgcacttctatcacgccatccagccaggacatctgcaggtaacactctgcttcagatgctgccatgatcagtgtgcagccagaaataagcattagtgtctgtaggttcttgaatttccatttgcttaatcaatctgcctttggtctaaacagttggcgagttttatgtgtggtttgctcaccaagttacccatgctagtctcatttcttcactatgatgtctattctcttttaaaattgtttttactttctgtgcttttatcccactgttctgcatgcagttccagtgcagtgttttctgagtgttgtcaccacagttccgtgcagtctgctgttgtctc

SEQ ID NO: 60707 - DNA, 1083 bp, Homo sapiens
acagaatggcctcttttcttttaattgtggctcatttttgaagttgaatacaactgggtatttatcgaaagcagagttactcataatgaagcattggtttgacagagtaacttctgtgctaagcagaaagtttgtcaagatgtaatctcagtctgcacattgcaatatgtaaacaccaagtgagtttatctggctctgtggtatgaagtcaggcctgccgagttgaccgttaggagcagatccctatctcttagtttggaagtgggagggcagtaaccgctagcaatctcatgagcaggaagcacaaataaaaaagtgatctggtgagcaagatttctaaaacggcccccaaaaatgtccccacaattgcctggaacctgggaatgcattgctattattactcctatgatcatgttgtgttgtgtggcacagttgaccttaaaataagggagattatttggggttataaatacaggcccaatggaatcccacaagtgcttaaaaagcagagaacgttctctgactggtggcagaaagggaagtcagagagattgataccgcaagtgggctttgaagatgggaaggggtcatgtgactgcagatgcatgtggcctgccccaggtggagtcagccagcagacgggccctcagtcctcaagctttagggagctgtgttctgccaacaacctgagagaatgtgtaaacgcagtcctccccaggcctccaggaaggagggagactgaccagagcagagagtctcagcatgcgcatgtagactcctagtctgtgggaactgtgaagtgatacatttgtgtagttttaagccactaagttttgtttacatagcaacacacctcttatatgggtggcaaatgctttccatgtagaggaaaaccttctttctagagatctgtaagagccatttgcttctagagcctctgggccaacagccaacatgaactcttgatttagccatcttcttcttttatttttttttgataatttttattttctttgtagaaatacagtcaggcagtgactttcaagtgactttgaccatgatccaaagtaagaagtagctttt

SEQ ID NO: 60708 - DNA, 1047 bp, Homo sapiens
tctttagatatgactcatttggaaatatgtaagcatggacaaattggtgaaaatgaatattcatgtacttcctagaagaataccaatgagatggacgatttatttatagcctgaaaccaggaaaattcctccttgaagcagtttgtttcctggcattgatacgcagagctcccctcccccaccctgtgatgatggtctgcaggaactgatcttttactaaatgtaaatactgacctgctgatcacagggcaagcattttgctgctttttctgcatccagaactcattatgtagggtgggttttgtggggaaaaaaattttgttttgttctgtcagacatctgtggttaatcatttagcttttctacattaaaaaaaatatttcaagtaagtctgggtgacaggttggcacacaggaagagcaaacagatcctgtaacatttactgtcattgacgggaaactgagctttcattccttgtatggcaccaagtaagtcttagaatcgttacattgcagattgctatggggagactataggcagaggtgaaattggttgctagaatggacttgtcatgaattattcattcactgcctcgttccttgaaaatcagctggaggaagtagtccagtttgatggcaggagtggtatgctgagggcttcagcaagccctcacaagtccagctgcgacagccagccatgtgctgctgctggcagctgtagggtggcagctgctgtgcaggcagcgcctgttccccggcatcaagcacagggaccatgttgcggggaagcgctgcactgagcgcacaccaatgcattcttgttggaaaatgaagcttcaggtaggagacgtgccctgtcagctgtgcctggtttctcactgattcagggatgccattaggctttatggaacagacgtgtagaacccagagttgctcaaggatgcctcactcttgaggttcccagccagaaaaacttagcagtttaattttaatttcattttcaatgatgtactttgtttctaacaaaactgtttcttgaaattgcgaa

SEQ ID NO: 60709 - DNA, 1085 bp, Homo sapiens
caacatgtatttctaagagccagggtattctcttgcataaccacagtaaaattagcagtcaagaaatttaacaattggtacggtgttgttatctaattcatagtgcagtttcaacagttgtccctataatgtcctttattgcccttttgttttccatgtccagtatccagtcctgaatcgccatgaaattatcatatttctttagtctcctttaatctggagtactttgttaacctttcattgtcattcttgacattgatcttttggaagagtacagatcagttatttttttagaatgtccctcactttttacttgtctgaaatttcctcatggttagattcagttcatgcattttatgcaaggataacaaaaaagtgatttttatttttctcagtgcagcatattaggagcaacctgatgtcagtttgttctaatattgctgataacatcaaacagttggtttagttggtatctgccagatttctctactgccatgatactgtttttctctttgaagttaatatttgttgacaatgtgttaatatcctgttcctcatcaaactttcacccactagttttagcgtccagtgatgactttccaactgcatgcttccttctgtagctattgattggcattctactgtaaggaagacctttccctcctccctccacatcccatttatttatttgttcaattatttatttgaatgattcatatacatattcttatttagtggtctgtaactcattactgttattatcttgatactaaaatcatcccaaatttggtctgtgtaaactctttcaaactggcttctgtgttttcatatgtctccagaattctttgagtacctatttactttctggtgcaacaagatgatctgggctcattttgtatggcccacccctcaaatcagcttttcttcgaggagtattgttactattagtgaggaaaaaatggtatttggaaatcaagatctggatatatgatgtgcttattgtgactgatgtgtcattatttctaggcctactcagtggccacagctaggatatgtttgtttgtgtgtaaatagatatatgtata

SEQ ID NO: 60710 - DNA, 1022 bp, Homo sapiens
taaccctcacataccatacttcggggcctttttggccccaaaatttctgataaagacgtttctctttccatgtttccttgcatcccagtccctggggaagtaagtgtatgtttataatagtgagacttcattcctcattgctgatttagttgctccgatacagaatgggaatgggagacttttgaggccaaccgaatgggttaggacatatctgaaaaacatgaaaacgctaaaaagcatgaaaactgaaggagtatacgaactcaagtcgttgagagtcatgaaataatgtgaacatgctcttgtgtgaaatcttgagaccctggagcaagagaattttggattttgagagaactgagttcaggagagaaggatgtcctgtttcatatggtgagtgaaaatataaacagtatgaggtggtagtgtgtagacaaaattatcaggttttttttttttaagagtagcacatagtttcctaattgattttggagactagggttttaagagatgtactgaaacttgaagtttaatgttacaagagggaaaccatactcttttacaccttgtctgcttggtgcttctgtgagttgagcaagaattggaagtggaatgtactgtaagtggtacccaaggtgacctagtggaaaggttttctcttttcaaaaccaacttacttccctgatctttggcttaagcttaagcaagtcagttcctttctttggttctcagtttctgctgaaaaatgaggaaattggattgattactattctaccttttggctccagctaggtttgccagataaaatacaggatgcctagttgatatgaatttcagataaacagtgaatttttgtaaaatttttaaaataaatttttactataaatattacgtgggagcatacttgtactaaaaaaaagattcgttgtttgtctgaaattaaagtgtaactgggcttgctgtatttatatttcctaaatctggcagccttagctccaacatttttgtctcctttaaattagtgc

SEQ ID NO: 60711 - DNA, 1052 bp, Homo sapiens
tcatctttccaaggtttcttccttcttagctcctctaatttttcttgcctcagttggtatccactgaattatccagcttttcttatattttcatatattttatatcttctgtaagtgggagcattggtatgtcataaggtattccatcccatcctcatgcctgcttgctaccatttttgcttatttttaagagctagatttcttgtgtttagttctcaactttattcataagatcttgaatttttgtggtactttttaaaaaatctaccatgccagagggcaccaagaccaccccaggtgtgatggtttgctaggaagattcacagggctgtagtatgttgctgtatatagttgtacttattacagcaaaaagatacaaggcaaaatcagcaaaggtaaaaggtgcatagagccacgtctggaggaaaccaagtgcaagcttcctagagtcctctttcagtggagtctcatgagatgtgcttagtcctctatcagtgagttgtaacaatatatgtgaaatgttgtttaccggggaggctcattagagactctgtgcccagggattttactgggcctcttcattgtaggcaccctctgcctagcatttgcggttcagactcccaaaaggaaagcaagtgttcatcatgaactgtattattgcgtaaatagtttggcacaatgaacgactcttatcagttaggttcatgggaaccctcctgaacctcctgaaatagatgttcccaaaagccagccaaaggccagtgttgccagcaagtcttttcaaggatagcagtttagcccttttaactttttttttttttttaggattgataactttttttctgtgtaccagtccaatgaaacatttattcaacatagtaggaaaaattgttggagatctaaaataggtcagcaatgtcatatctaatataatcagttcattttctttgtagtaaaactctgagaaacagcagtaaggaaataaaacaaaattatttttctttaatattcccagaaaagtatactcagtgaaggaaaatagcatcttctct

SEQ ID NO: 60712 - DNA, 1145 bp, Homo sapiens
ttctttacttttactatcaaagtctcaatggttgccttttcctttcaatttaccccttctcccttcaaaaagtgatgtcttcttgaagctacctcctttatcctgaacaactttaatgcccggtgtggtggctcatgcctataatcccagaactttgggaggcagaggtgggaggatcacttgaatccaggagtttgagaccagcctgtcaacatagggagaccccatctctacaaaaaatataaaaattagctgggcatggtgatgtgtgtctgtagtcccagctgctcggaggatcgattgaccctgggagggtgaggctgcagtaagccattattgtaccactgcactctagcctgggtaacagagccagaccctgtctcaaaaaatacacataaaaataaagtcacttccttttaatttctcggtagcctgtgtttgatatcccatatcttagatctatttttagtatcttcataatcaagtgggattttgtcttttgtggatttttctttgttccatcagcaaacctctccttttctttctttattttttttccctttttttttttttttttttttggtgaagctccatacttctccatacttttgcctgtctgtcaccacaggcataggctttgcagatgagtttcttggattggggaatattttgaagttcatatcatatgtctcccagtttttctgatgcatgggttatgagtgattttatttgtgtatgttgttgatctgtgtagtttttctggagcatggagaaattcagttttaggcagctgtcattaatttcaacagcccagaagtcatatccttaatttttgaagaattttttgctggataaagaattacagattgggccaggcgtggtggctcacacctgtaatcccagcactttgggaggctgagatgggtgaatcacctgaggtcaggggttcgagaccagcctggccaacatagagaaaccccatctctactaaaaatacaaaaattacctggacatggtggcgggtgcccataatcccagctactcaggaggctgaggcaggagaattgcttgaacccgggaggtggaggcctgagattgtgccattgcactcctgcctaggcgacaactctgtctctaggataaaa

SEQ ID NO: 60713 - DNA, 1348 bp, Homo sapiens
tctagcttttggcttttatcaataaacttcctttgaatattctcatacattctttggtggacatagcacttgtttctttggagcatatacctagcaatggactttcggagtcagagggaagatgcacgtttaactttagtattatgccagacaattttgccaagcattttttggtttttttgtttttttgttttttgttttttttcttttttgagacagagtcttgctctgtcacccaggcgctatctcggctcactgcaagctctgcctcccgggttcacgccattgtcctgcctcagcctcctgagtagctgagaccacaggcgcccgccactacgccgggctaatttttttttttttttttgtatttttagtagagacggggtttcaccgtattagccaagttggtctcgatctcctgacctcatgatctgactgcctcgacctcccaaagtgctgggattacagacatgagccaccgcgcccggccaattttgccaagcatttgaaccaatttacattcttcccagcaacgtgagagttctagtttatgccacattcttgtcaacacttgatattgtcagtccttttaattttaaccattctggtgactgtgtaaatggttttcttttatatttctctaatgaggaataatattgacttttcatatgattattgaccattaagatacgttttttatgtgaagtgcctgttcaagtcttttgcttatttttaaattgagttctctgccttttgcttactgatttctaggcatctttatatactatgggtacaagtcctttgtcagatatatgggttgcagatacttctaacactctatggtggcttgttcttttactttcttattctttgggtgaatgtttttaattgtattctaatttatcagttttgttttgttttgttttgttttgttttgtttttgagacagagtctcgccctgttgcccaggctggagtgcagtggtgtgatctctgctcactgcaacctccacctcctgggttcaagcaattcttctgccccagcctcccaaatagctgggattacgggtgcgcatctccacgcccggctaatttttgtatttttagtagagacggggtttcaccttgttggtcaggctggtcttgaacttctgaccttgtcatctgcctgcctcggcctcccaaagtgctgggattacaggcatgagtcactgcacccagcttacttttatgattatcatttttgataaccttttgatgaaatattttcctaccacaggtctttaaagctttatgattgtttttctctcacttaggtttagtccagctgaaatttttttttttttttt

SEQ ID NO: 60714 - DNA, 1028 bp, Homo sapiens
aatgtttttcttttgaactcttagatcatgtctgtttttctcctgaatagttcacattcctagatttcattatacatcctgaactttagatgcattagtttggtactgtatactactttaacctttatcctctgatacatttattttcccttttcatttttcatgtcaagctgtttatctcctgccttttgaaatcctcctattatcttcttgcctacttttctcctttctttgaatattgaaccattccttcctggctatgttcctttctttctgtttttacaagagttttggataagagagaattgttcttcccaaagtctttcctttctcattaagccctccttttgttactaagcaatgctgtgtgcaccagtgactaccaacgtactttctgacactttgtctctcttatttctcccctctttcacataattcatcactcttttgttaagaaaagagtaaaaggataagaggcagtgtggaatagctgtaagagcactgagagtcaggagaccttgttatttttctattttctgttttattaaatagatttgctattttctgcactttgggtctccggcatgccacttttgttctctgggcctccttttccttaatgtgaaatgaacaggctaaaacacgtaatcacagaggtcttttccagtatgtttattcttggatttctttatggcttatgagaatttgtttcaccttttttattatttgtaccagtaaatatgttaacattttatatgtatttacattgctatatctttttatattttagagagtggccactctgcctgataagccagcacataattatgtgtacatttaactgaatgcattttgatgattatgatttatttttgtgttaactatccacagcatttcagaagggtgtaccttgaagctagttttggctatgcgtggcggacctataaatactagaagaggtaggcatatatatatattaaagcaatttgacagtaacattctttatgtcagttagtatttttatagcc

SEQ ID NO: 60715 - DNA, 1500 bp, Homo sapiens
cttagggatctctagcatttgttttcaataaaggatacaccaggccttttcctattaaacagccatgtccattacattccacttgtccctgtgtcagtctgcaggtccctttgtttattctgcccttccttcccccagattggttggggaatgggtcttgaatgtggcatctgacctgaatgcttgcttcagagtaaatctagatccagggtgctggcctagagaatgaatgctgtctgccgcagacatggacagacttgagagtggaggcccagagagtcttttgagggtgtcagtggactgtgccagggggttagtgtgaaattcgtcagactgcctcacacttcgataaagagggtcagataaacttcatgccagtttggagacattgcagacgccaacccaggaatttgagttccggacccgtctttaatactccttgcaaaacattgctttctgtttgctagatgaagaggataacttattcgcaccccccaagctgaccgacgaggacttctcgccatttggctctggaggtggcctgttcagtgggggcaaggggctctttgatgatgaggacgaggaggtgagtccatggcactcagcaacactccctgcagctagctgtgtcaggggtccacagggaagaaataggctttgcttgtttagtggggaaaaaacagtttctcagttggaagttgcttctattttcatattttgggacattttgaactaagaatcacagagtgagaaatgccgtatccttctgtgctttgttaggtgaggagaagatgtgcacgtgttaatgtgaataatttactaggtgattgtttcttgccttatctgttgtcttccacgtttgtttttaattcctggacaggcctaaattattttagggtctgattttgccatagttatcactttgcaactgattttctggcagagtagtaaatatgtagctttaaatcttgtaggttatttttccttaggaatcctcacatgcagctatgctttctcctggttttttgaattctttgtcatataccttatttcaaccagagtgacctcttcacggaagccccccaggatcggcaagctggagcctctgttaaggagggtaagctggggctgggcagctgcgtctccgtgtgcagagttccaaaactgtctttctcactaggagatggaaccctgaggttgttcccaagccttgtttctgtgttaagcaggaagctgttgtttttactgcggtccagttgaaagtaattcatcttcactaattcatgtcttggaaaaaacagtaccaccggtaaacccataccacagtcttgcctctttgttaggagagaactcataaaaagtcagacaagaaaagtaccctagagcaatgttgaggatgattttcattgaatgaagtttaatttaaagaaacgtttttaacattctgtatataagttggagaccagtaattccccaacccagtgtgcattaaaatcatct

SEQ ID NO: 60716 - DNA, 1697 bp, Homo sapiens
acatggtgaaatccaatctctaccaaatataaaaattagccaggcatgatggcaggtgcctgtaatcccagctactcgggaggctgaggcaggagaatcgctagaacccagaaggcggaggttacagtgaggcgagatcaccccattgcactgcagcctgggcaacaacaaaattactcaaaaataaaaaaagtaaataaataaaaatatttctctagtaacagacaattttgatattttaatattttgctttttatattcttgtggttacattcttattaaagattgcatttttatttagatttgaagtaaatcttgtgtattatttgttccagcacatcttttgctttataacttactgcatcgtgattatgattattattttaaacagctgttacgattttgaaggaggagcctaaaggctaagtggcagtatctcttctttagcttaataactagtagttctaatttggtattttatactcttagcacatcacacaagtgagtgatgaggaagaggatgatgatggctgtgacctttttgctgactctgagaaggaggagaaagatattgaggacattgaagaaaatactagacctgtaaggaaggctgtagttgctatcacttggcagggttttagaaccaatgactttttttattttttattgtgacttactttgtacatctctcatttttgcatatttgtcatttcatctacactttggaaaataatggcaagcatctcaaattgcctcacaagtaccactttcttgtccagatgttatgattttatgagtcagatcattcagaatatgtctggttccagagtttgaagaccatagtgctcctgtctccctgcccatgacctttttcttattttcttatttagatttttaagtattaaagtcaagtattaaaaaaataaggaaataaagagcatctccctttgaaggaacattttgagtcccattccttgggtgagctgtatagggtacatatgtttaagttcatttaattaaactcagttttctcctcagttcaatttctttgctcttgtatacataatgttgttaggtgtccaaagtgaagtgtactagtttgttacaaaaaagcgattcttttgatttctcctgctgtagaaaagaagcagacctacatcgtttgcagatgagctggctgcccgcatcaagggggatgccgtgggccgagtggacgaggagccgacaagtgagccccagccgcgttgatggggagtaggggaggggtagtgcagggccctctgctggcttcaccaaaggcggatttctctttttattagtaattaccacatatatttattagtaattgctacatataatttaaattgtagtgcttattccttttttggttaatgagctcctttagataactgaacactgtggacccacaagaaaaacgtacatgtacacatgtagataaccctttacatataatttcaggggactaatggaaactccagagaaccatgggcaacagcttaagaattcctggctgaatatttactcctatattttgaacacgtaagaatgtgctatatagcatattctagttataagagagtagaaagataacataataattctttcaacaaatacaatcctgttatgcacatgagcctgggatgaaagcagaagccttctgccttacaaagagactc

SEQ ID NO: 60717 - DNA, 1062 bp, Homo sapiens
cgaggcaggtggatcacctaaggtcaggagttcgagaccagcctggccaacatggcgaaaaccccatctctactaaaaatacaaaaattagctgggcgccgaggtgcacgcctgtaatcccagctgccgggagactaagacaagagaatcacgtgaacccaggaggcagaggttgcagtgagccgagactgagccattgtactcgagcctgggagacagagcgagactctgtctcacaaacaaacgaacgaacaaaaccaagaggggacttagatggatgccacagtgttgtctgagatggagcccacttgtggtggtcttggtagtcccctgggcatatcccaaaggcctgggctcctctgctgtggcagcatggcgggagctggactctgtacgttgactcaaaggtctctatgtttgggctagtctggaagtgtctgagaactgggggcttttactcaaaatgacattggttgattgctacataggtggttgatcttccagttgctgacaggtggaacctgaggcagcaggacagcctggcattggccacgggacatcggccacaaccatagcaacttcggcatcaaatggggcaggagagagaacattaaggtatcgttcaaagaatactagaggtcttggatacttctgtatgcctgttctttatcttgtcctaaaagatcttccgagggtccctttagggcaaaaccagaaccttctgtgttgttataaaggcagggtgggtgtgccattctgggcatttaaagtgcagactctagacttgtatgcatgcgtagcctcctaggttaacatttaaaataggctctgggaaacctagtttggtgatagggagactggggacactgatggtgacctggtcctaggatgggatgaaggtagcgaggatgggaagctagaggaggctaacctttggggtgtcttgatggcttctgaaaagggcctctctggcccccagtactaatacttgttataccatgaacttaagctgctcttgatgggaggggaaagagaagattattgttaacaaacactattgca

SEQ ID NO: 60718 - DNA, 1030 bp, Homo sapiens
ttggagttcactgttgatgtgtttgtttggctttgaattcaaaacagatacaaatttggaggtgagagctttgccagaccccagcagggatggggcatcggtcctgactggtcttgtttattttgtcctggtaaattctgttctttggagcataaaccctggagtcctagagccccttgcctcagcaggaatcccccctctgtctgctccaggggctccctgcttctgcccacctgctctccttccatggcattcaggacccccgacagctgaagcctctcttcatatagcttgtcccctctgggcctgcctgtcttgtgtccaggacacaagacacgcatcccttgtctggccccaggctgccatcactgtcacaagaaactcatagagtagagctggtctgaggtcacagtgctggtggtggtggaaaagcagggatggcctgttccactgtgatcttacctcctgtgtcacctggattgggtctctgtccccttagacatgctagatcctaactttacaagggctgaaggggtcttctacacgcaggtcccaacactttgggctggggttggccaccgtagcttagtgggctaaagctggagtttgaatctggatatataggatccacacctatagccatgtgatcttgggcaagttacaagccttgatcatcttcctcatctgtaagatggggatgacaatggtgcctccttcacatgcttggtgtggagattaaatagaataacccaagtagtgcctggcactgagttagtgctcagcacacaggctggtagtgttgggcacccctctcatagccacattcaggggccacctcttaccctgccagcttggctgtgatcacagcccacatcccacttccttaaaagtcccttgttcagagcctctttccaggttcctcgccccacagctttgcaccctgcctgggacttggccctctggctggggcttctgaaaatgtagttcccagagtgcattgaggagggctaccctagccctcaccactcat

SEQ ID NO: 60719 - DNA, 1132 bp, Homo sapiens
gttggaccacctaaaaatcccctgtgctccgtccattcacccctcttaccttccccaggactcctggcaaccactgatctttttactgtctctatagttttcctgaatgtcacagagttggcttcatgtagcatgtagccttttcagacaggcttctttcacctagcaatatggatttaagcttcctccatgtattttcatagcttgagaactcatttctttttagtgctgaaaaatgttctgttgtctgggcatactgccatttattcatctaccaaagggcatcttggttgctttcaggttttgactattatgaataaaactactataaatattcatgtgcaggttttgatgtggacatatgtttacttcagttggttaaatacgcagggcaacattgctgtaagactatgtttagcttcataagaaactgccaaactatctctgtacaatttcgtattcctactagcaatgaatgagagttcctttttctcatataaaaataaatatccttgtatgtatagttttatgttcaggtgtgagtatatctgtaggataaatttttcatcaagtggtacatgtaaaatatctaccggtattggcaaattgctccccagaaagattgcaccaataatacatgaaaacgcatattttctcatacccacgccaatatttgattgttaatcgaactttaatattttggctaatttgataagtgaaggaacaatgtcttcctagttattgtgatttgcaatctgttccctgtgagtgaggttgtggtctgccggactgcgtgagtgagaattcctgttctggcactctcaagctgtgtgatgctgggaaagttgctgaacctccctggacctcagtttcttcatctatagaatgaggatggtaatgggtctttaccttattaattggattggaggatttaatggcatcattcatgtaaagtgccagcacagttcctggctcaaaataagggccaagtaaatgtaagctattattattctccaatatgttcataagcacttgaatttcttcatttctgatctgcctatgttcatatcaatttcccaggattttttcttattgattggttagagctctttgtatattaataacatacgtt

SEQ ID NO: 60720 - DNA, 1029 bp, Homo sapiens
ccagccagacagatgcctcagcatgaagggcttggggacttgtggatcattccttcctccctgcaggagcttcccaagctggtcacagagtctcctgggcacaggttatacagaccccagccccattcccatctactgaaacagggtctccacaagaggggccagggaatatgggtttttaacaagcgtcttacaaaacacttctctatcatgcagccggagagctggctgggagcccttttgttttagaacacacatccttcagcagctgagaaacgaacacgaatccatcccaaccgagatgccattaacattcatctaaaaatgttaggctctaaatggacgaaaaattctctcgccatcttaataacaaaataaactacaaattcctgacccaaggacactgtgttataagaggcgtgggctcccctggtggctgaccaggtcagctgccctggccttgcacccctctgcatgcagcacagaagggtgtgaccatgccctcagcaccactcttgtccccactgaacggcaactgagactgggtacctggagattctgaagtgcctttgctgtggttttcaaaataataaagatttgtattcaactcaaagtatctttggatgtttagcagggaccagtgtaggaccaatttaatttgtcagaaacagagctttggggagccacgaagcctgagcgcctcgtgggcatctcccagtgggaacactggatgggctgtacctgagcacctcgtgggcatctcccagtgggaacactggatgggctgcagccaccgctgccctggggacaactcttgcaaatgagggtagattctattcacctcctgatgtgtaggctacatccttgtatctcggggttagagagggatttaaagtcagctggtgctgttccaacctgtggcctgactacccccttggcatccacccaggggtggtccttggtgtgcttggggtgcacttgggtactcagggtgtactggtgatactcagggtgcagttgagtactccg

SEQ ID NO: 60721 - DNA, 1117 bp, Homo sapiens
tcttttcaataacatagttggtaggcagaagcttaggtgtcattcttagaggttcttagttaattctgaggtccttaagatctcatgtctgcttccagggaaggctccttactgaaatctgttacctcactgccagtcacaagaacactgccatccttttgtttttgtttttaattgagacagagtcttgctctgttgcataggctggagtacagtggcacaatcatagcttattgcagcctccatcttgcgggctcaagtgatcctcctgccttagccgcccaagtagctgggactacaggtgagtgccaccacacctggctatctttttcttttttttaatttttggtagagatgaggtctcactgggttgctcaggctgccctcgaactcttgagctcaagtgatcttcccacctcggcctcccaaagtgctgggattacgggtgtgagccactgtgcctagccctcctcctatttaaaaaagatattcttccccttgtcaaagcagagttttttaaaaattataaatgtgactcacaaatttgaaatgaaaccaggttaaacattttactcaatgtattaattagtgaagaaaccaggaagatggcaaaggtagttcaaagaacagtttgaggatctaggtttttcactggcgttttgaaccaatgttagagtaagaatgctagattagattaagaaaacctggttaatgccagacagaaataaattataatctttagtgttaccttatcagacagaaattatttgtatcactgctggacaaaaatctataggttacgttgtaattgcattaagtctaggacttttaatcagtagtaaacaatgaactgaataaagtacaatttccccacataagtaatctttgggatggcctgtcattattttatgacattgaagtgacattccacttatcttttgccttactttcacattttaatttagtttaattttattttttctgccacagggtctggctctgttgcccaggctagactgcagtggcatgatcttggctcactgtatcctcctcccaggctcaagccattctcctacctcagcttttcaagtagctgggaccacaggtgtgtgccacc

SEQ ID NO: 60722 - DNA, 1117 bp, Homo sapiens; identical to SEQ ID NO: 60721

SEQ ID NO: 60723 - DNA, 1117 bp, Homo sapiens; identical to SEQ ID NO: 60721

SEQ ID NO: 60724 - DNA, 2046 bp, Homo sapiens
gaaagaaagaacatgaattcatcaatccattcagcagctattttgaacgcctcctgtgtgccagatgctgttctagaagctcagaatatctatgaacgcgataggcaatgcccccatatgccaaggccctcatatgctagccttgactcaaggaaaactgtaggatggggtaggtttcatttttggaagttgtggaatcagtacttatgttttgaatgtgttaggtttgagatgcccagtaggtttttcccaatagaagacataagcatagctgggaagaattttgcagaggactctgaccacctaccacctacaggtgccatgaatatttagcacatttgatttttcacattacctattcaccttctctccatttatcagtcacctggtagttttttttagtatggtgaaatatacacacataaattatctagtagatatttgggttgagatatcaaatgtgctttttagaaatttaaatctgaagttctggaggatgtcgggctagagttaacctttggaatcggcatcatatactgtacatagtatttaaaatatatgggactggtgaagacatctagtttaatagtgtacacaaagaagaggaggcgaagccaaaaaagggagggaggtagtggtcaaccatgttgaatgttaccgtataagatgcctttggtaattaggaggattttaatcattttgacaagaacaactttaatggggaagaggggccttaaggttgggtagagtttttttcaagatagaagaaagcagaatgtttatatggcaatgtgattaaactcgtagaaaggaaaaactgctgcagatgaaagaggggaacattgtaaagggtagttgttgaatacctgagaaaggagaagaccctaagcaggtgagtagttggttttgaaatgagcagggacacttactctgttgtaactagaggggaagctgagataacaggtgcagatacagtgggtggtgggaaaagagtctattggtataggcatccatcagcttagagggagggcagcgggggagaggaaaggtgtgggaacttggaggagagatatgtgacagagtcctagagagggtgaaagtgagcgtactagagaaatagagttggattcccaggcagtgctcagggcccatttgagacgtgtagtcttacatttaaagtgatataaaccagtgtggttgtttcatgttcaactttggaagggtgttgtgaggattaaagaaggtaatgcatgaaaaacatttaatagagtgtcaggcgtttaatgaatgttaacgctttttatttgagccctcgttttgtttttcttttctgtttatacatatgtgactgaggatggctggcaattaccacttgacaggctgttctggggcatgttctcccatcacagagaactgcagtttgcagctactcagaagtctggttcctgttgtgtttacatgtacacagcttgataattgaagatgtttgctttttagagccattgtcctggactgtttgggctggggtttgtcacagtgacagtccttaagtttttgtgaaaatcttttatgactgcatttcatattggatctgatgtactggtaatctacagaatctacaaatctaagattggcaggaaaattttcagtttaatagattttcatttctccctgaccacttgagctgttttaaaatacaaataataataatggctgacagaaagctcttaaaagtgccaagtacttttctaagcacatcacatgcctaatcttgtttaatcatcacctcagctctacaaggcaggtacaattattatcctgatttttcagatgcaaaaataggctccaagaggttaagtaatttgcccaaggtacccataccctgacctccagtttctactgcagacaataactttttctttttttttaaactgcttggccatcactcatctgcattgcagtggagtacttaagatgttggactccaaagccagattgcctggtttcagaaaactgccacttagtagctatgggactttgggtaaa

SEQ ID NO: 60725 - DNA, 1468 bp, Homo sapiens
gcttccctgtcgccgttcgctgcgctgccgggtgagtgcggcggacgccgcagggccgggacggcaggcggccccgtcgtgtttatgttattgtgccgctgccgccgccgccgccttctcctcagccgtaaccccctcctgggagtgggggcgggagcgcgcggtgggcgggggcggcgcgggaacaatagcggcgcggaggcgggggccagccgagggggcgtggggctgcgggacctgggtgcgctccgctgcccgccagcccgcctgccgccgcgagccccgcccgcctgtcctctcgcgtcctcttcgcgtgggtcctgcctccgcggcgggagaagaaaatggagcgggggggtgggtggcaagttctgaaacacttcggcaagggtcggacggaggtgtctttgcggcccgccgcgccctggctgcctccggggcggcggggagccggggagagcgcttctgccggcaggtccccaagcctgccccgcgcccatagggaccgtattttgcttctcgatgctttctttgtgctaacgttctgggcgaacgcaggcagcagcgctgaaaagggccagagtggcctgcagctctgggctgcagggcagagagcccaggcccgtggctcgggtgggaggtgtccatccagcttggcccgagcttcggtggtcagcgcgcatttctcttgagggtcatcggtggtgaccttttgactttttcaccccaccctcccatctctttgtctcgcatttgtgttcccgattcagagatggtagaaccaagtccattttaaagtaccctgatgaacactttccgtttttatttctgaaagttccctgcttggtctttactgcgaatttaataacatgttgactacatggcattgtccagtgattactatttttacctctgaaatccagcgatctttccagtagaattctggtccgtcagtccattgtgttttgagataagcatccagcaagtacctccttggcaattagaacatctgttttttcattcattcattcattcagcagctgtttagtaccgtactcagatgaagaggtttggtgtgaaggtaaagtatcctttcatggaagaggatgctttgactgaagtataatagatggacctttaaatgagacagttacataagtgatgtctgttaaggaaggtatggttatattctgggtcattttttaagcagtatatctggaagttcaagtgtaataggaagtagaattagatttggtctaaatatacaacagcttttatttatttctaaattttattttttccagtcttgcagccttacagtcatttgtaatggttacctcagattcccctgctgtggttaacgttaaacctaggaggtcagatgctctaagtgaacatgtttagtgctgtgcctgacaaaagcaagcaatcaaaatgggacttccttgagggcaggcctgtcttgcat

SEQ ID NO: 60726 - DNA, 1664 bp, Homo sapiens
aattgttgagttgaattttttctttaatatccagacttagaaaacaaatggaaggcttcaccataagctagagattcttggaaaggtaggcttttatttattccacagcatcatgccttctaatgagaccgtatgctcccagagactttgtggaagacataaaatgagttcattatcctcaggaagcttataatcaaggattagactgaaggcatcgctaaacagttaatttatgctcttttaaaaggtatatgaaagggttcccgccaaacaaaagcccacttcacatctctgtgcaggccaaatttcactgaaatccagtttttaaaattgtgtgtgtgtgtgtgtgtgtgtgtatgtgtgtatacgtatgtgcatggagagagacagagaggagacccctttttggaaaacttagtagcttccattctttttcttggaggtgggttatatcacaaatacaagagatacctgtgtttcctgttaccctttattatatttcagatttagttaaaatctgccattctttagaaagtcaaggaactcaaaccttacaatgattgctagcgtgggttttaaggtcagccctgagttctaatcgtgctccaatctaactgtggtataggctagttcaggttatataacatatttgggcctgttttattatctgtcaaatgagaataataatagcacgtaacctcatagggctgtgaggtttaaattaggtactgcatgtaaagtgcctggcactgttgtggtggctggaatgctagatacaagtattcaggtagtttttgctattgttatcacttatatttaactttgaacaaacataaaatgccaagtaaacgtcaaaccagtttaatgcacagtgtccattctaattctccagaatatgccatttgtttcactctgcatctctggggggtttatttaaaattcgatcatctcatgtaatctgaattgactgagatgatttatattaacatttggaccagtaatcctctctatcttaaaatttggaaatgttccagaagcaaatattgaagggaacatatttgccactttcacgattttttgccttttcccacaggagaaaattgcctaagctttcctaggtttgttatagacatctaaaggaatgagaatttaggagctacgaatagctttatcatgtgacacatttgaagaaaatggaatgctgtcacatcttttaaatttagtgttattgggatcttcgattctgtgaagattgcagatttgtcagagacctggtaaccacaacaattcattgaggcctggaggcctcttaaaaaatgagggagattatttattagtaccacttagaaatattatcttttctgtattttctgtggttttctaagtcttctgtttagcgtttctatgattataatggtggattaaatttcttgttccttctcaagagcatctactatgagatgacactggtttttacttcggcagtatttactgagcattgcactatactaatccaggtattcggtgatgtaggaaccaaaggaaatagaagtcagtttctaccctcagtgagctgagtataatttgatagaagataaggattaacgtaagcacatttatgtcctaacacaaggaagcaaatattgttagtcatttcattagga

SEQ ID NO: 60727 - DNA, 1005 bp, Homo sapiens
tttatgcctaaaaaacaaattcccatccccaagtatcatcgtcagcaaacatttttatatgtgtgtcatgtaacttgccatatactaggcagtaaaagtgattaagacacagttgtttctaataaggattctctgtggtagggatgaggctgatgtgaaaatgagactagattacagtgtgctgaataccataacaacattagaagataactggggacaaagtagagagaatagtcaactctgtcaagaactaggagttgtcagaatctacaaaagaggttcacctggaagataattaagttgagtagataaatgacaagcatagggaatagtatgtttaaaagcatcaaaacattttaaaaatgacattcttaaaactagcatagctaaagtatgaagtgtaatataggacttagcaggagatgaagtgagttgatggcatatcatggaggcttttgaatatactgcaagggagtttcagaatatatttgttggctttaaatttttgaggaggtaagtaatatgatcaggtctttcttttaccatattataggcagtaaatggtagctggatttgtagaaaaccatcgttagtgacccttaatcagctcaggccaccataacaaaatactgtacactgggtgtcttaaacaacagagatttatttctcacaattctgtaggctgggaagttcaagatcaagttgctggtcaatttgattcttgatgagggcctgcttcctgacttggaggtggccaacttttcaccttgtcctcatttgcctttcttcagtgtgtgctcaaggagagggagagaaaaattgctcttttcgtcttcccttgttttaggccactaattccattatgagcgccccactctcatgacctaatctaacccttattaccttccaaaggccccatttccaaatactatcacattgggtgctaggagttaaacatatgaattgtgtggggtgtgtgtgtgagggacaatcaatctgtaacac

SEQ ID NO: 60728 - DNA, 4140 bp, Homo sapiens
tgtttacttgggtctgcagggttggctgtgtgacactgctccaaactgtgggtcaagttcaggcttgtcccatattcaggtttcagcatctaaactgaagcatacaccagagacatccttttctcatggtgaaaggtagaagagcaagagctatgctgagtcaaacacattcccccatattccattggacaaaataagacaagtgactgaacctatcgatagggtgaggacacagtctggggtgagcaggaatatttgcagaacaatctaccatactttcttccaggggtctagtagcatttagcttttccaaaatggcaagaccctgaaattctaggctctgttcccttttatttctgctttaaaaggtggctacttcttttaaatgcaaccagtagctaccaacacaaactactgaagttttgctttccagtcttttctagagcagggttcaacaaactttttctgtcaaagccatgtagtaaatattttaggctttgtggataatagtctgcgtcacagctacaagactctgccattgtaacacaaaagcagccataggtgatctgtacttgaatgagcatgactgtgtttcagtatcagcactttctttacaaagcaggcaggccttaatttgccagcccctgtgctagagcttcaggttcattgtacaagtggctgtgcaggtgacagcttcatgaaatgttttgttactacgtaacctagatcacctttccagccttcgatgtgagtttccctgctgctcaactgctaagccaggatcttatgtttttataataattaacaccccacctctgacaccagtttcagtgttagaatagactcagctgtactgaataacagataaacccttaattctcagtggcttagcacgactcaggcttatttcctttgctgaatgtgtggtgcagatcatggtgggtttgtggactgtgcgtttacatagatgatcagcaacccaggctgccagagaatcctctggaaagttcctaatcaccaaagcagggcaggagatgacaggaagttgtgcactggcccttctcttctttacttccactcacatcccatgaactagaactacccacgtgcccttgcctaactgaggaagctagaaaaattgggggaagaagacagaatgttgggttagttccactgcctgcataaattctaagttgctattcttatatatagttagcagtgtaattaacagctgtaaggtacatattgatatatatggatgaatttcaattaatagtctttgaggctttttttgacaatttttttgcttaacaaaaatatctgtctttaaaaattgttactttgctcttaattttttcacaatgaagtgcttgaaattggaatgttatttctaaattggaatctgctagtataaagagccagtaaccttcaaccatcacactaaacattgaagtagtatcaaagcttgtaatatttattcttaaacatgcagtgtttctttgctgaggtactgtattttagaagtattagcaacattatatttacagaataccaataatgaaaatttttttcttctgtttcattaagacctttgaattgttggtatatttaatttcataaaaccactagattacatatcttctaaacccatccatgattgcctgtcgaaatatgttaaagacaacatacatgcttttctgtatgttaacattacaaaagtaatacaaaagtaatagttgtctttcaagcaggctattttccttttttgtattaatcggtgatatttaatatgtatactgcatgtcagtacaggtaatacagtgcatttgtgttgtggatttatgctttcttcgttttttggtcctttggcttataatagtattcatcaaagctaacaggcaaagtatgttaaacatgaagccatgagtgtttatgctgctgcctgacttttgatgggcacagcacagaatatgttaaagtaggggccaggtgaaaaattctgaattattcagtagtatctatagcaagtaattttatagattagtggcaccaaggcaatggtgtcctacttctacaaacagacagaaattttatagcaaatttgtgtgacttcaggtgggaaatcagggatggaaaaatggataatgactcttctagtcctttggaactgggtatctgccagtctaaaagatcaaataacatttgttaggattgacaagatggctcgttgttgacttaaaacatctgtataaagcttattgtgactttaaaatgagattttaaaaatattggtaatatgttatgcaaatgaatataaatgctaacttatgactttcttttactatagtagtttttttatgtgagctttgcgatgtcttttcaaatcccttttactctaaccaaaaatgtctagctaatcataatttctagcaattaaaacattactaacttctctaataactgtatgtattcataaattttaaatcccataaaactgacttctcaggtttgccttttaacgatgaatcagtgcagtaatattacagtgagaaaaacgaacaattaacatgaatgttttgcaagggatagtataactttattgtgaactgtaggattttcctatatatcatggcagtcattttttaatttttattttctgaaggacttaaagcccagtaatatagtagtaaaatctgattgcactttgaagattcttgacttcggtctggccaggactgcaggaacgagttttatgatgacgccttatgtagtgactcgctactacagagcacccgaggtcatccttggcatgggctacaaggaaaacggtcagcacacacatttatttgaaatatttttctgatttagcttttttctttattcagtagatttttaatgtaaatacttaagcagaagtacgttgagttaaatgtgtatcattgtttgaaatgtgtatcaaaagtttgcaggtaactataaattttttcatcaatgtttggaaaaacttggggcccttatttgtttaaatacggatacataacatcagtactaccattggatgaagaatttgttgccgtggccctgagacagaatttatgctctttgcttgcctataacttgaaaatgaacatttctaacatggtctcagggatgtatagtgtactgacagtttattattagtgtacatcagtgatatttgcctatatttccaaccccatgaaactaaagctcatagcagtagcactcattgtaaattttaagagatacattaaggcctctgcaaagctgatggataattaaggtgacctcttgaaggaagcagtaaagtttcattaaaacgttgtatccagccttaaggaaatgacttttagtattttgtatgggtatatccagttgtatcaatcaacctaagaatcagtgttgaacaaaattatctggcatgtagatcatgaatttaaacattttgtatgcatatacctacttatatttaatttaggaagaaattttgttgagtcttagaaatttaggagatgaataaatctgctaagaagcatgggattttatggaaataaaccatcgttttaaaaaatgtggtgacttcatccaaaatactaccaagaataaaacctagacattttttctggcaaggaatctggaatagcagttcattttgaatcaggaaattgtaataagtcaacttttaagattctttttttataaaagatacaattaagctgagcttgattttctgagctgattaaaaacaaatactttaaacatttgctattaattttttattcttaagtaaatatgctgttctttttacttacactctacctgaaatttgaagttttttattttttgggaattgataacttcacgtgacccaccagcatgaagattgcttttgcatttgctgtaattgattgtcatagatatggtgttatgtgtcagtgtcctataaatatgatcttaggatagctccctgccagaaattagcactaagaaaaactgtcatatatagaattgaggctgggtatggtcgcttacacctgtaatcccagcactttgggaggccgaggctcgtggatcactcgaggctaggagttctagaccagcctgagcaacatggcaaaaccc

SEQ ID NO: 60729 - DNA, 1022 bp, Homo sapiens
tagtcagagcacattcactgtcactcatttttattttatactgctttttataattttaaagtatacatggtgtgtgtgattttatttctttctttttttttttattttaaccaaaatctttatgttaatgtcattgcattttgttttcagttgacatttggtcagttgggtgcatcatgggagaaatgatcaaaggtggtgttttgttcccaggtacagatcgtatccttatctttggcctaaaatgtagtttctaaaggtcaaaatgtatgatagcacttcagtttggtcaggtataatgtattttgtctctccctaatatattgttaaattactcttaaaataccacctactatttgacatagacttttccttccgttatttattgtttcatatgttaattctgaaccctgctcaattgtaattatgcacaattacttgctggctttgagttgatttaacctaaatcaaaaatcatggcttgcattaaaaatttataataattatacacttaagtctagaaatacgtacaacttaatatgaattttggagctgtctgttgcttctggccatccttttgttttgtcccctacctcctttttgttaatgttctgtgtggtttgtgtcttttgattgttgtctcattactcacataacatactgaccctttcatctgagaatttcagcagtagtagttttgtatggtaacgatagctttggattcatactttttgttcatcccactacttttaatatttatattaacagtgatttgttatgtgtttaccagctagtaacacttagaattgtttcaggaggaagaatgggaaaaggcatattcacaaggttacaataagtgagttttaggccttggccttcagggtcctggagtgtaaagactagaggaaaggagaccaagaaatcctaaccttacaacttagcaaaaaactgaatcttttttataagggtcagagctttagaaaatttttttaaacctaagctaaacaaagaatggcaaaaga

SEQ ID NO: 60730 - DNA, 1102 bp, Homo sapiens
gccacttttatcgaagcctttatttttattacaactgattattttctgttagtgtagaaaactcagtaaaacaggatgtgttctagaaatattgtctaggagatataatcatgttttctgataaattgacagaaaaggaaaaattttgtatattattatagcattgtgtgcagtttgcagttagagccactatggatagtaattgtcattattcttagttgcttatcattttatttagaatttgtgagtttaagcttccattttaaggtaaaatcagttagtttgaacacacaataaataaggttaataaagcttatttattgatcatttctgtccacctacaatcattgccttttgcagggtgcctgtgagatataaaatttataactgccacatcctttcttaggaatttttaaatttctattttcttgtaatatgaatatgactaatgtattgaacattagttatggagtatttttcttagctacttgatattagatattgatcagtggaataaagttattgaacagcttggaacaccatgtcctgaattcatgaagaaactgcaaccaacagtaaggacttacgttgaaaacagacctaaatatgctggatatagctttgagaaactcttccctgatgtccttttcccagctgactcagaacacaacaaacttaaaggtactttttacaaatatgtacatttaatcccatttggggtgtgtagtgtgtgtgtatgggtttgtgtgtttatatgtattcatattcttatgggacatgaacccaaggttttctctggatggtggggaaaaaaatgaggtttttgttttttttttctttaatcttatatattttaatcatatgtataagataattttacagtaatatttttaaaacatatgctttttaaaaaatctcaaattgctgaaagttattaataatttgagaatctttacaaatatatgtacattaacaccattatgtttgcagccagtcaggcaagggatttgttatccaaaatgctggtaatagatgcatctaaaaggatctctgtagatgaagctctccaacacccgtacatcaatgtctggtatgatccttc

SEQ ID NO: 60731 - DNA, 1026 bp, Homo sapiens
ttaattttaaataaaaatgtagatacatgatgatgatgtttttctgtttcttcatgaagactacgtcaaataaactaatgaacatattcgagcccctcctacacaaaataaagttacctcccactgttttttgcaatcttgcctggatacctaaccagagaactaggatgttgaatgctctgggggaacatcctaactcaggtataaaacaaattactgtatccaaaggaaaacagaattctgtgatctgtgatataaataaaatgtggcaatttcaagagctagaagaaaagaaaaaagacagttaaacattttatttcctgcaatgaaggagtcttcctaaactattatgtctgtataagtaagttgatgattgatcagtcttgatctaatgatatatttttataagtcatctgtgtggctaatatttcaaataactacagagttaaaatactcccagcatactgacttggttattattgccttgtgtttttcagccaccaccaaagatccctgacaagcagttagatgaaagggaacacacaatagaagagtggaaaggtacattcgtcagattcttagagggaaaactgtgaaggagcttctggtttttatatggtgatttattatcatgttagagaaatttgtgactttaatatgcataaccgaaatgtggtaatattaatatttttacataagtagaaagtaagtctgcttccttccttaacttaatcttaagttcccaagtttcccaccccagacacagacacattagtgctctgtctcatatttttttccatggtttgtgaatacacaaatgtgtttagtgtctcccacctctcctcttccacccttttaaaatcacgtatggttgtgtacggtgtatgctatatgtacttgctttgtttatttattatatatttttttgagttggagtctcgctctgtcacccaggctggagtgcagtggtgtgatctcggctcactgcaagctctgcctcccgggttcacgccattctcctgcctc

SEQ ID NO: 60732 - DNA, 1045 bp, Homo sapiens
tttatctttcattctgatttgttgtgaagcttttgcacactctaatttaaatcttggtagcatatatctagttgagtacccacagtgcaccaggctctattccagggcccaggaaatggaagtcagtaagacacgtggttcaagccctccctgagacagatggtagtacagaatggtatgtggtatgatgtgctgtagcacaagttgctggtagagtgaaaaagaaagcttctaccccagcactatcaaaccaacttcagaaacagtgaattacaggaaagattagtacttccttttaatatgatccattgttgagtgtcaaggaattgttattaattaacatccttgaatcttaggccgacatttaactgactgtcattgtaaggacactgtttgaagtacttcacatgtataaaaatttccacttaaaccatacatgcgttgtgagattggctcttagactttgaaaagttcatttttgtttacttcttttacagaattgatatataaggaagttatggacttggaggagagaaccaagaatggagttatacgggggcagccctctcctttaggttggttacaatataagcttggttaagattacagtttacttcttgtgttgtaatcttcagtggcctgaaacctgcagttcttcccatatttacaaaatcattattattccaggcttaataagtataaggaaatacagttttgttttttctactaatacattatactaatatatcagtaactgttcataagatgcacatctttttctatgatactgacattctgaagaacagaaatttaaaaactttttgttggcattgttgctgggtctttaaagaggaaacttctcaaaattcaatatacatacctttctatgatcttgacagtctttactttggataaataaaagcttcactgcaaaatttagtacatgtaataccaaattgctgtctttctctttttgatattattgatttgttgaatgaaggcaataacattaaaaccatcactagaaagtattctttctctaaga

SEQ ID NO: 60733 - DNA, 2799 bp, Homo sapiens
aatgtggttcagatgtaaaattcttgtcttaaactgaaaaacacattcattgaaaggataggactccacgattctagacattttcagaattctcacctcatagctgtcaatgaagagtgtttttaagttagtgtgttggatatcatttgcgattatttttagtgagccttcgaaacccaagagaaaaaaattaccactggaggcagtcagtgcagtgcaagtagcttgatctgcagctgtctgcaactgatttgctgttttgtttctcatagcacaggtgcagcagtgatcaatggctctcagcatccatcatcatcgtcgtctgtcaatgatgtgtcttcaatgtcaacagatccgactttggcctctgatacagacagcagtctagaagcagcagctgggcctctgggctgctgtagatgactacttgggccatcggggggtgggagggatggggagtcggttagtcattgatagaactactttgaaaacaattcagtggtcttatttttgggtgatttttcaaaaaatgtagaattcattttgtagtaaagtagtttattttttttaatttcaagtgatgtaatttaaaacctaagttgtgtttcaaaacagcaacaaaactgtattgtattttttttgctgtaattaactgtataatgtaaacctaattattttatcatggtttaaattttttgcatatttgctttatcttatgctgctgatttttttaactgaatttgtaagattttgtttatcaaagcaactattatgtggtgacttgcctatatcatgaattatttaagatttttatagttttttttaattagaatttatttcagatgttttgttcatgatactatccttcagggttatgtgcttatcaatgaaataaccccagaggagtgagggaaaataacttgtagccagttatattcaggaataactactgtaaatgatgaacgtgttaggagacctccaatatttgctacttgccaatcctaatttagttacaagaattggtaggcaatcctacttaattttggcaaaagccccgtcatctaaatggcagaataactcagagcatgtctttgaagatgctgggcgtctaccaccaccttatgtccccaccctacccaacaaaaataagtaaaaagaatatggtgtattctacaaatttgtggcatgctcaaagtttatgatcacataaaggcaagaggatacttcatgaataatacatttcaatgcaaataaacagatggttcacttctactagctatgagcctgtttttgtatacactgagttaatctactcaggctgtaggtcccagcaatgttctagagtctggtctttccctttcctgcagcttcgggtccttggacctttcctgtttcctattacttggagtgtctgtcagttgagcaccagttgttctggtgtttcatttgattctacttgtagcataatcatttatacgagctattgggaggttccaaaccctacctagatttgtgtaggtgatgtatcaaatgagcaatataccgttcatctgaaaatagtagcacacagccatatataggatatcattttctaaggactgtttcttcacattgagcagagcaggcataaatggtggttatttagtctaagtcttttatttttttatacctgattttcaacataacacgcaatgtggatgtcgagtagtgttaagaatggtgctgctcctgacaagtgtatgttaactgtttacattttctatctgtagaattatttctctattactgaacttttcctaagtaaaatgtctttgaagtctcgttatttctgaaatacgttgtctgtaatagacccaggcaccttttaaattatctctggaacaagagggatttcatgtaatgaactaggaaatgcatactcacataagcaacaaggttctaggcagaaagccccttggaatttgtgaccaacaggagcaagaacaggtgcggctcaacatgcaatgtctgaaaatttgcttggcattttattcatatatttagtgcaaaattatttttgagtgagatattttacatcactgttaatgtgcaatatttaagattaaaatacattagcttttttatatactttgaagtagcaagtttgttttcgatggcttagagtcatgatttccagcttcccagcctttttatcagtcccttttctaatacaacaaggtgcattaatttgattaggcaaattagagttctaagacacttcttgaattgtagacagaaaatattggattcacaatttcagcagaaatttgagaatgagtgtgtttatattaatttcacaattagctgtattttctgtagcatagattatgtcactgttgcactttcacagcagacatgctttcagaaggttctcatattttatgtttgattgctgataagccatctctattgatacagattttggttaagtaaggaaaaccaggtgtgtgtctgtatcatttattgtaaatgccagctgccacttgccaaccatcatgttcagttcaattcaaagaaaacaaactctcattacttagtgtaaactaaaatacttaacaaattatatcctaaaaacaaggtctctttgttaaatgttgcatgccctaggttttaaattactacatccaaatacagttttcgtcttaaatttgttaagctaaatatatgttggttctttttattttggaatcctttaagcatcttaaacattttttttttgaagagaagttacaaataacatttctatcaggtagtacttgt

SEQ ID NO: 60734 - DNA, 2306 bp, Homo sapiens
cacctttcttattctataattttgatttttcaattttatatacttaatatactcactgtcttactatcagaaagttattttgaccaagatttttattatcttcatagattcagaaagagatgctaattctgtaccaatgtcttcctggttactattctcttccctctaatatatactggccatttgtaaaaccattgtgttgttgggatcacttagttatactatacgcagatagagcatctcaactctgtcatagtgtttgctgaacagttttcagtgtcatgcacctttggctgctaattgttcctgacgtgcactcttccgagttggtaaaggcacagtgtgttcatgccagacttctaagagaaacaccagcctcttaaatcagaagcctacacacaacccccttaacaatccaaagaagcttgatggtgtgcaaagaagcatcctgccagccttgtcattgttctgttctatgctaatcctgctgtgttgtctaaaagatggagggaagaggacatcagtgtctgatagtgaaatcatcagcaggaaagtgaagctctttccttggttacagataagacttggtttacactattggccagtatctgctaaacatatgaagacttaactattcagtgttgcctaggcattcgcctgcacaacattttgaggttagaacatagaatattttcagaaatactgttgtagtttgtgagtgttgttcattagttacacattagctatagagtggatgcatgaagccccatgacaccagtaaacttctcttaccagtaggtaaaccaaacaccattctgtcattagcagccctcttaaatgttgcctctccgtatcctgttgcatttttgtgtgcattgtgtttctactgatctctcttaggtttttacggaatcaaaggaaactaatttttccttaatagcaagaaagatgaagaggtaaagggcattgaagcagaaatgtatagtttggggtacgattagaaaactcgtaaggaaaacagaagtcctaatttcaaactgactgctcttcgttaagtgctcttaaggagagtctagtaacagtaacactttctggccatttctagtttagattctcttcgttactgaaacttttgagaaatattacctgtggattaattttgcacaatgttctattctcataatgacttacaaattaaactaggtttttattgaactacctcacactaattttctatgctttcccaagtaagctgttgccctgttagatctttactgagtgaattataaatgtgtgttaaatactttctagccaatgttgacacaataccagtaagtatgtaaagtatataccttacatcagtaagagacacgtgtaaaatctttgactgtatgtcttgcaaaattgtgctcgttgacattattactgtttttgtaagtagaaacctgctcgtgatatcggtccatttacattttacaaaaggagtaaatcttagtaaaaattttacgaagaaataaattacttttgtaggcccaatatttggtatatttttgagaagctgttaatcttttagctgaataatgaagttagactgaattacgtgtctccctggactgtgacatctattttctcattacagtttatcctggtcagcagggtgtcacacctggaaacctgagtatgatagctgacatttgcttttctccctctgcgatgtcattcctcctccattcctctccttccctgtgttccgttccctctcctttcctctagacaaaacaaaatggggcactttttagggaatgctgagatcattattgtggtttttcatcattcatgccctagtcattaaacatgcaccactggaatgtaaacaatgttatctagtatgtcaattggttataatattttaaataaaaaagaaaaaagtggtatgaaaattatgaaattaagagttttttcattgaaaacaaaatctgtttgtggtaaagtttttcttggcaattttaggattgtccgtggattgggataaaaggggtcttgctagggccggtttcttagatttggattttgtacagattgtaaagagcctaaatgatcacgctgattatctggttgatctggtcttggatttctggtgtttgaaattgctggataaactttatctaaaaaaggaactttgcttcaatgcccttaacctagttcttggtagacatatgagagaacagccatcgtgaccacttggcaaaaataagtacttaaaattggggtctgtttcaaaacaagcaagaggttttagctttgac

SEQ ID NO: 60735 - DNA, 1059 bp, Homo sapiens
cacccagtgggcaaaagcccacaggcagcagggctcagcaggggtgtggcggtgcgtccaggccgcacacaggagactgggcatcacaacttgcttctttgatgactgctgcttccttactttgcaggtttctggatgaagttcaggcatactcaaatgtcaacaagatgagtgtccagaatctggcaaccgtttttggacctaacattctgcggccacaggtagaggacccagtaaccatcatggaaggtaagtgggaggtgtacctggtggccctgggtgctgccggggtctgggctcatcttggtccacggcaagtccttggaaccatcccagcccagggccaggccagcaggaggggtggctcaggtggcacatctccatctctggggacttggcaggaacttctgcagacctcacccccgacccccatgaggttcagctataagataaaaaaggaactttgccctgcgatgggcagcagcaggtcactgggtgcaattagaatagccaggggtttctgtggatggaagaggctggagggatgggagaggtcagcacttttgcccttgaacacagacatgtttgcttttcttttacaattaagcaattgtcataggttcctggatgtcagctttgcaaaccctggagaatttctctatgataaataacaataagtgattaaaaatagcagcaacagcagccgctttcagtaagcttctaccaagtgctttgtttgtatcatctcatttcaggctttacaaccagcctgtgctgtggtaatcgcccccactttacagatgaggaaactgaggccaagagaggcgaggggactcaccagaggccagtcagccagacttagcaaagggcacaggtgtaggctgccatagaaaagacagcccacctcatagggcccatggaacactgtccccagtggagtatgcatgagagacgtgctgctcagacaggaagcccacagctgaggctgttcttgcccttatcccatgttgagggacgtggcggagtgcttttgctcaagtccgcactttggtcagccct

SEQ ID NO: 60736 - DNA, 1158 bp, Homo sapiens
tcttggccgtgcttcctccggtgacctacccccaggctctatcaatggcaagatggcacagcagctcggctcccctccttttgggttctggggacaggagagcgagtctcctccatctgctctggggccggggccatgtccatcctacccatcatgggggcttacccaggccctggatgcccctgggtggagccaactatacccccagcctagggccgtttggggattctgtttcccctgacagtgcccccacccattatggggcagttttttcatagagttctctctacatcaggaaaaactaccctccatggggcttatgccctgtcttcttggatctgccccaggatgggcccaccaggacctgcaggcagccctggcctcccagggcttctcctctgggggcagaacactcagcccctcagctctttcccaggcccgtcactgcagccaggggagggtgtcagctcctctccttagatgtggagtccaggactgaccactgttccctagcggtgctccacccagggaggtacgggggacccttcctctggagctttgtgaagctccatcccagtgttgacgctcagtgagcttgtcgtccattctgaacctcagccagccaggcctcttccatcctgtgtctcagcgttagggttgcagattgcttcaaataatgtcacctgggtaaggcctgggagccgagacttttggaagctccccaggatcagatgctctgccctagtgcctgatgctacctgaggggcttctgcagacacagatcagaccttgccactcccctactcaaactctgctggggctccctggagtggcacaggccgtctgcgcctcacccacactgccaagcttctcccatcctgctgggggggtctccacctgggcacacctgctctcccaaggtgtggttcctggcatgctcagcctcctttctccacctggcctgcctgctgaagcccccttgagaggcagctgggcaccctagggtgggttccatgcagacctgactctcggcctcccagcagcctggggcagccttccctatgtcttggaggccctcccctgtctgccttctccctctctggctgcttctaccctgcttctggaattgtgtcaggagggccatctccatggtgggca

SEQ ID NO: 60737 - DNA, 1760 bp, Homo sapiens
aggttttatacactttgtttttgggtcaagcagggtgaggaggagcatttactgtgttctgctctgtgccaggcactgtatcagggaccgatgtatcttattccaaaatagcccctgggtgggaagctaagtaagacaaatggagccccacttttagctggctcagtgcccaggtctctgagaagtcccaagcctggacatggagctttggcatcttgcccctggaacaccccacaagccaccctgcagggaaggtctctgcacagtgggtgtgaataatgtcagacactccaaagagtcaggcacgcaccttgtagagcttaggggctggcacaagtctgtttctccagttactgtgccgtggtgtagacagctttatggatctcaactccttcccttctttgcctgggctgccaggaacctcttagcctagtgatatatttagttttcatagattttctcagaagttcctctgcctccttcctctctccctctattcctcatttggtgtcttgtcatgtattgttttagatcattctctctctgatttcttttctttctttttgctaatgttatttaagagtaacatgcagaaaagcatacaagtcataagtgtacagttcagtgaattttctcaagaggaacataactgggtaagcagtgctgggggagagacacagtgttaccaggaccccagaagcctttgagccccttccagtcactgacccaccaagggaaccatgtcccggcctaacagcacagatgcgtttgacctgtttttaactttacatacatggagtcatgcagtgtgcactctggggtttggcttcttttgtttctgatgattttttttgtcttctaatttttaaaacatttcataaaatacacttagcataaaatttcctgtcttcatttttaaagcacacagttcagcagcattacattcatttcaattatcgtgcaaccatcagcactatccatctccagaacactttccatcttgcaaagctgagactctgtgcccattcaattctaacttgccatctcccctgtccccagctccttgcagccaccattctactttctgtctgtgaatttgaatactccaggttcttcatataaggggaataacacagtatttgtccttttgtgaatgatttacttcacataatgttctcaggttcacccatattttatcacttgtctgaatttccctcctttttaagggaattcaggcttaaggctgaatcaagttctactgtatgcaaataccacgtcttggtactccattcattgatggacacatggcttgcttccgcatttcagctactgtgaataatgctgctgtgaacatgggtgtgcaagtatctctttgagaccttgcttttaattcttttaggtatatacccaggggagggattattggtaattctggttttaattttttgaggaactgccatactgttttccacagcaactacaccatcttatcatcctgccagcagtgcacaaggaagggttccagtttctccacatccttgccaacacttgttactatctgatcttttgatagtagccatcctagtgggtgtgaggtggtatcagatagtggtttggatttgcattttcctaataatgattgatgctgagtcacgactatggttttcacattactatgtcatctgtcttgtccagtgagctgtgcctcatttattctcattgctgcactgtgttccatggtaagaatagaacacaggaga

SEQ ID NO: 60738 - DNA, 1038 bp, Homo sapiens
tcttccaagggctagtgggaaatttgcccagaccgaagaggaaagcgctacccagggagaaggccctacccactcacaggcccatgaaggcagacggattcatgccactcaagcagtgggcagagctggaggaaaggggagggaggcaggaggcaggcggcaggcaccaggggcactgccaggtcagcccctcccctcatgggaccctctgcccatgggcacttcctcctggatgccctctgcctgctcatttgaggtcctagcagaggcctctggtcctgagaggtgtagcttcccattgctacctttcctacttatcctggccccagtgtccttgggggaagtctgtgccccagaggtcaaagcagaagaggtgaacgaatacctgtcaagaccacatgagaggagcatgggccaggttggaagtgagaggggatggtggagactgcggagaagtagcaagtgtgagtcctatcaaaagggcacagatgctactgagctctgcaattgttgctttttttggaactcaggcctggtgtcaccacgtctggattttttaagagaagctgggaatccagatttgtatatgaaatctcttgattataaataactaatttaaaaatgtttcaaacatcatgtgagctaaacaggcacatctgtggacctgtgtggcccactgttaggcatcagatgttgagctctgactgaggtgagagacagcaggggctcagtgtcactggaccagcccaggccactcttgggatggtggaaaggccaggacgctgtcagtggtgggccctggagcctcctcggactggtttctcacagctgtccctggcagctagcaggccaagcttgcagcaggatcacctcctgtgctcaaggctgatgaatggccccttgggtcccatttctgggcaggggcgcctggtcttgcccaccaggtcccaggtgggagcagctttcccttcgtgttagtattgcaacctctgcctgttgtctgttcacatgacccatgttttcaggaactgctggtgc

SEQ ID NO: 60739 - DNA, 1051 bp, Homo sapiens
taagggaggccgggcccagaagccccagcacagggtgcctcccacaggagggccgcggggaaggaagcctcttgggaggctaagctggaatgagacctcacagctcctggcagctcccctccaagggttccagtggccagctgggaatgtggggccagtctgcagcctggtggtacctgggggctgggcctcagggaagtctcgccctcatagcaccccctaaagacaggtgtgatcctcccattttatagatttcatagatggagagactgagccccaggaaagggaggcagctcctctcctcagtgggttagccaggacgtccaccagaccagtgctggtgcagacccagaatctttgtctctgtgacctttggccttgaacatcgcctactttcccgtgtccccacctcagccccaccatgccagggcagggtgctgccaaccatgctccttcacccctgccctctgacgcccatgctcctccatcatgtgccctgcacccccacccgcctacctggcttcttcctgctcatctttagacgttggcttcagcatcacctcctccctgaacctgttctctctagaagtgcccaggaccctgtggatgtccctttcctggctcttccatccctgttttgggaaagtgttcaggaaggcgccatgggggagcagaagggtagtggttgtgctggggctgggagctgcttggatgtgcaggcactgtacaaatggtgggctggcccaggctctgcacccctagggtctggtggagggagtagggcagggccttgcctgcttgccaagtttgggctttatcctgaggacgatgtgtgtgggggaacagggagcaggggaggccccagggagatttatatgtttacagccttcagggcagctctctaattcctagagtggggccaggcacaaagtataggggttatggaaaggtggatggacagacagacagcaggagttttgggggtaggagatgggacagcaggccgggctggagccaagagatggctgggtggaattacccatgctccatg

SEQ ID NO: 60740 - DNA, 2749 bp, Homo sapiens
ccccctgcctgtcctgagccccaaagaccctgctcactgaggacttgctggctgcatcctgtgcttctcacagcaggctggcccttccactgccagccctcgggagtcacccaacggctgccgtgtactcacttcctcctttattgaaaactgtgtattagacatctaaatgtactggattctattccaggggtgaggaattcatgaggataggccacacctccgccttccctcatctccattctctgtgggagggatggtagacaaggacatgtgtctcgtggtgtccaggggtgagacatgtcacaaagccattgaagctcagtgagaggacggcgggggtgtggttaggtggagtggccaagcaggcttaatgcagcaacggggagccaggggcatgctggggaagagcattccagcagagacatggacacgtgcgaaggccccgaggtagggacgagctttgggaacacgaggcatgtcaggaaggccggggccccgagggagtgaagaccaggcgagtgggagggcctgaggtaagagtggtcaccaaggccttggggtcctggtggggattttttattttgttctgtatacagtgggataccaggagagctcagagcaggagacacacaggacctgagtcagatttatgtaaaaggtgccctggccaccacatgaggagtggaccatagagggacagcagtagacacagcaggccaggagagtccatggggtgggcatgcagctgatggtgcaaagtggccagctgcaggtgtatccttaaggtggagctgccaggttttgcctatggtctggacatggggtatgagagaaatgaaaggtgactcccagccgtgcagtcgctatctctaggtcggtgtccatatgaagtggtcatgaaaagatctttcataatgggatcaccatggcattggggccagggccaccgactccctgctgaatgtggagactgggagtctgaaagctggctgggctctgaccacacaagctatggacgtcctctttctccctatggtgtttgatcagcacacagtctgggcagggactcaccttttggggctctgggccagtctccagatttcacaagccacatgggctgagccccttcctttgctcctctgtttgcccactctcctctcccacccctggctatggtctacctgaccacctttcattgaatgataaatccctcacaaggaagagtcaatataatgttgagagtgaaagttgttctctcaggcttcatgaatgatatcacactgtcagccttggtctccttgatccctgaaggttgcagcacatttgacttagggccctagattaatggcctggaaaggtctgagcccacccagggatttctgcagcctcacagtggctttggttccaggttgctgaaagtgaaccagtggaacagaatagagcccagaagcagaatcttacatagttggactttgatgtatgacaggtggcacttttgagcaccagggaaggaacattatcataatcttggggtagagaaagaatttttaaatgagttacaaaaaaacactaatctattatgaaattgttgataaattatattttataaaatgaagagcatctgtttgtaaaaggtagattaagaaaatgaaaagataagctatacattgggtgaaggcgtttgcaacacatgtggtcatcaaattactcactccccaaactcctacaaatgaatgaggcaaaaacagacaaggcagcagaagcgtgggcaagagacttggacagccatttcctaaaataagaaatcctcatgaccagtgaacataggctcctgcgcacaacctcatcagtaatcagggaattgcaaattaaatcacaatgggatacttgtatgcacccaccagaatgactaaatgactgaatgaaaaagacagtttcaagtcgtgatgaggatagaaagctatagaaacttgcacatattgctagggaaatcagcagtgtctgctgaagttgatgctgtgcacacctgtgtcccagcaattccatatgaagcatgtcctacatagaaatgtgtgtacaggtatgccaggagacttggatacatgggatgttcatggcagccttattgatgatagcctgacactaacccaagtgcccagcaacaatacaatggataaataactatgactcagtcttacagtgggaaactccacaacaatgggaatgaatccactacagtgccacctacatgcatgaatcttaaaaacaatgtggaactaaacccaaacaaacaaaataacatgttgtattatctacctatataaagttgaaacacagggcagaagtaaacttgttatttatagatagataggcaacagaatataaagaaaagcaaagaaatgaatgctatgaaagtcaggatagtagggaggagggaagaggttaagatgggatgggagaggggcatacatatcttaaatgttctctagcttggcttgggtagttacacaggtgttccttttacaatgacatgtttatctgcatatttatgctttaagtgcttttctagatgtgtgcatataaaaaataaatgaaacaaagggagaaacttgggtcaaagaagtgagatgacttgcccaagatgacacagccagcaagggggcagaactgagaagtggaggtggatgttctggcctcaaagactgtgcttggtcctggcccaaatagcccgtccaagagctgcacc

SEQ ID NO: 60741 - DNA, 1699 bp, Homo sapiens
tctcccttgcacagcgagggcgccccttcttcccattctgcgcggggaggccaggccggtgtggccccccacccctgcttggctcccagggaggcggaggcagccccggctccgtggcgccccctggcggctcctgggagagcgcgcggcccggcaccccgggagagtaacgggccgtggggagggcgccggcgagggcagggagcagcgcggggccgccccggcgcgcggagataaaagcgggcagtggcgcggcggtcgcgatctgcgcgttctcctattgattagcagggtctgcccggaggccggcatgcccgctgcgcggggccgcggtggagtgtgagggcccgggagccgcgggccggcggtcccgcgcaccctgcgcccagctgggcactgcccgtgggccggacctcggccgcgccgccccggggcgcaggcggcaggcggggagaggagccgagcggcggggccgcgggcggctgccatggggctgtgctgctgcaaggactggaggggacacctgcgagcgcccaaaggtaactccggcgcgcacgtgcgccccgctccctgcggccgccgccagaggctgccagccccgcctcggggactcgccacggggtgtccagggccgcccgcacctgcctcagctttggaaagggctcaggtgcggctgctgctcctctgagtctcctaactttggaaggggaggctccccttcactcggggcgcgggggcgcatcctggggctcctcggtccccatgtgggagtgggggtggggtccggcccctgggcgggagtgggtagagcggaggggagggtccgccctccagggcccggggctggccgcggcgccggctgcaggtccgccaagtccacggccgggacggaggaacccccggcgcccagacccgctcgcaggtctctgcaccgcgagcccggcgcgcgccctgcgccgcccctgcggcttaactgccgggagagggaccattcattctcgcccgcctctgtcacaaacttggacggtggggccctgactcagagttttccaaaactcgcggcggcaacctgcgagcagagctgcttgaggaatgcagcagtcttggagagggcccaaagcccagaaacacgcttaggacgttggcggccgccggaggtccggcctcccgggggctggggcccggccgacttaacccttgactgactgaaatgatccctgttgatcgttgggaacatagtggtgcatccctttactgcagcgctccctaaactcacctgaccctaacactcacctgccgcgcttattaagcatgcagattcccaggccccaccctggcctgctggataggctctggggaaggccttgggaaactgtgtgtttaaggagttccccaagtgactcctatggccaggtgagtctgggaagccttgcctgtaaaccatatagggtaaggcaggctctgccagaatgagcactaggtcttccttcctccgaaaagtgtattctgcatccagatacagaaaaggtcaggcagccttcgaccttgtccaggtgagaatggtgccatcaatgtacaggctggtttcacaaagggtttgaagtagcttataacatatataatacttaactatttaaaaacctaaacaggaccccacatttacacaggacgtagagaggtcaagggaaaatggagccca

SEQ ID NO: 60742 - DNA, 1113 bp, Homo sapiens
gggtctcccatcttcctgcaccccctctctgcctagcacctccatccatgcagcatgctgctccagccatgctgtatcatttacttggcccgaggcactgcccctgggacttccggtgccgctcccggaggcctgcggtcaggtgggaagaacagagctgcaggcatccaagagaccgaggagaggacctgctgcttcccccctgtgtgcgccaccttgaaaagtcacctcatcttcctgagtttcactggatggtgacagtaatgacctttgcaggcccttggcagacattttggaatacagcagtgcctggcacacagcagatgctcaataaacatgagaacctcccgtcaagtcagcataggaaagactgagaattccagcatcctggagaaccaggcctcccctgatgggcttgggggcagagctggagcatgtggggacaggagcaacacacccatagtgaggctggagagggatgtgagccacttatcctcatcacatgtacacagcccgaggatgaggagagggctccaggaaggggctctggtccacagtcttccatgtctggcacagagcagggctccacaaatcctggtggcaggaataacgctggagaagcagaggaccctctggctgatgcaccagagcagagctgcaagaccagccaccccgcaagggctgccctgaaggaatgtggaaaccagaaggatttctttcttttcattttttaaaaattaagagaagctaaccttctttgtcctgtgaagggtcacttaagtggccctcttagatatgcaaatgcaaggctagaaagcagccggcctcctgggattcctgtataacaggaatttttgcagcccttggtgatggggttttttttttattgagtggcctggcaaagattgtgcccttctttggcctgcagaagaggggtgattggttgagagagcttggggaggaaaagaaatttgtggactaatttgcacaaagagcccaggttttctgaaaggaatgagacaaatacaccaacacagtgttttcacacttttttgacaagaaatagacattacattgccccctgggagcccagggcaacagaagctgaggctt

SEQ ID NO: 60743 - DNA, 1191 bp, Homo sapiens
gcaatcttggctcatggcacctctgcctcccaagttcaagcaattctcctgccttagcctcctgagtagctgggattacaagcacacccaccgcgtccagctagtttttttgtatttttagcagagacagggtttcaccatgttggtcagagtagtctcaaactcctgacctcaggtgatctgcactgcctcagcctcccaatgtgctgggattacaggcatgagccactgcgcccggcctaggccctctcttttgatgatctcaacaatccttgccagatggtgttcgtatccccattttaaagaagagaaaaaaagagacatggacagattaactgattcatcaagggtcaagccaagctcatcagtggccaagcaggcatgggaagccaagtgtgactgcagaggctgattcaagaagagtaactaaaaaatacactcacccagcccgattttaaggaatttagtttcacacggcgaacaaagtaatttcaagcactggtaatttcaggaagtcatattttgtcaccaatttgaatttctcttgagaggaaatgtgagaactaatgagtcacagtgaccccctgtgccaattgctatttcaggatgtgctccccaaaacattctcactgcagcagcttccatgccaaccccagacctgccctggagatcggacatgggctcctcttaaccaggagcttggtgaggggtccagggttctttagcatccaggtcacccttttacttcaaagggctttgagggatagaggtgttgcctgacctggacaatctgggtgcctgatgtactgcctgtcctgcagcccacattgttgcatttggagagaagtgatcactcagttttcatggccacttccaatccaaccttcaactgaggcaccattgcaagtatgccctagatgacaatcattcactcaacagataactaagtggatgtggattaaagcccctggagacacagagccataagaaggatgaaatcttttctcgacaaagacagtaagaaagctaaaatacacagagctagaatcaaaactgtgaccacgcagccctccctcacattgccagtcagacccaggctgccctgaccagtgctggctgaccagctgggcagcagagaacagtgggcacttcctaggtcacttgaaccagggactgtcagccttcaaccat

SEQ ID NO: 60744 - DNA, 1032 bp, Homo sapiens
ctctccatctggcctctgcctgtgtccctccaggcaggctctttagcagggcacacagtggctccgggcccccacaggcacaaaagcagaagctgccaggcctgccaaggacttaggcccaggaaaagccagctttggtcaaagttagtcaggggctcggcttagacttagtgggaggggacaaaagcctcctcttctgtgaggggtgacaggtgtgtgtaggtgagagatgcctatggggaaatatcttcaaagatcagcagctgtcattaccttactcatctaacaaatgggtaaaaacatttgacccctaaatcccatcttgtagcccgtgaattacttggagtctgggatcttacattctctggcttggtatttaagccaggacctacctgggacaacatggagactattacacattagacatcacctctgtgccaggaatgctatttctccaatcttcacagcaaccttttgaagtccatgagatgcttcccattctgcaggtatttggggctcaggaaagttgtttggctttctaagattgtggtgatggtgaggggaagatctgaaacacctctggcccaagcttaagatgtgttggatctttgcagctctcacagactgcagggtcatgcattctgggcatggcacacctttccaggtacaacagccttattgtgagggcatctggcttccttagctgtatttcatacaacgcattgtacttgcaattggaaagacacagccagtggtctgggtggtcttagcagtcaaacagttgctgatggatgtattctgcaaaaatccactgcggcctcttacaggcctggaaactccatggatgagcctcagttttagatgaattccctgagtcatcacatcaccatatggggaagaacctctgctctttgcttatcctatgacagtaattggacaaatgaagtatgcaactgataattccatttggagcgagttactttttctatattcaggtcacaataagtaatttaggaaaagtctaattctccc

SEQ ID NO: 60745 - DNA, 1046 bp, Homo sapiens
cactgtgtaagtatgaatagtagttatatagggctattaaggggcatgcgcatttttacctatatgaatacacagtttccaattgcttcaaaatgctgtggccaacttacactgcaaccattaatagacaaatgcatcatttgcacaacaatcttgccagcattttattttactattctttttaaatgtaatacataataagtgatgttaaccttaacttgcctctccttggtgacttgtaaggctggacatttcatattttctggacatgtcactcgctcatggactgagagaacattggttgcatttattaatccccaggtcaaaggaagagatgtttctgaaactggggcctgactggttcctgctgctcctgcagggccacctgcatgccagcaccactgtgctggcattgaagctgctgctgtactttctggcaagcccctccctccgcacacggtttagagatggcctgtgtgcaggatcctgggtggaacgcagcactgagggcgtggatattgtaatgggtgagcacgtggctgtctccagggagtggggcaccacctagtcctgggatgtgaatgaggaccaagccaggccccttcttatttgagaccatcacagctctgtgcagcaggatcacctcgagccctgactccaaggcctacatccaaatgagcccagcccccctgacatcctttgcaggatcccccgcagcctcactgcacagacactggaggctgccttccattcctcccacctgcttagccctgttctcctgggcactgtatactctgcttcctcttcctgaggggatgcctcttctcctgatgtggattcatcctgagatctcagttcaaatgccacttcctccaggagatgaggggtctccctgaattgggacacctctgttatattatctctgcccttattatttttctctttagtgcttcacaaaattcataattatttgagtatttaattgcttaatgtctgtccctcccactacaatgcaagcttcatgagtgcctggaattctgtatatt

SEQ ID NO: 60746 - DNA, 1069 bp, Homo sapiens
ggtgtagtattgtcgaagactcccaatcacagctgtgtgaatgttacatatgatagacctcaatttggaagtcaatcaggggaatcaataatgtacataatttagcttttctgagactttgggtctttctgaggatccatcctctatatggctattcagtttctacaagcaggaggaaaatgactatcttttctcctaaaagctcgttaccattttccagagcattcttccatatgtcatctgtgtttcagagtcctgagttgcagaaacagtcagcacagagcaaactgaaagcagtgagccagtggtagagctctgtaaaagctagggagcatttctgcctccagggagaaaaggcactattgaaagagcatgggtgttagagttggaggacctgggtttgaaaccaagtttcacctcttgaggaccacatgaccttggaaaagtctcacctctctggaatgcagtttcctcatttatgatatgggaataaaaataagtcatggtcagtataaggtttccttatgaggatccaattaaataatgaatagggaaatgcttggcaggccagagagcatgacagtcacttagcaaacatgtcctgagctcaggggaagatacagaggacggagagccatgggcaaagacctgcgccttgtagggtctgcaggggagagagaacagccagacctgcagctaaggtatggagaatattttctgtggttcccacaagcatgggatgatgggagcacagaggagtggccatgtcatccccaccagtaccttgacctgggatgctgctagacctaagccaaaggtaggaaggagaattgtctctgtggccttactgggagtcagagatgtgtaggagcagctcagctgagatccagatagagacattaataatggacaaaggacctcagccagcagccggtttgtattaaagcatcctggcagaagcattcagaaccaaagcggtgttttgtgtttgatccatcctaccacaatgcggcttagaggagagggcctgggagggttgttctgagaagggtctgcagagagcctgagt

SEQ ID NO: 60747 - DNA, 1049 bp, Homo sapiens
gtagtcactttggaaaacagtataaagattcttcaaaaaattaagactagaactactatatgatccaacattcccatatctgggtacaggcccaaaggaaatgaaattaggatattaaagtatctgcacccacctgttcattactcacagtggccaagacagagaagtgaacaaaatttccattgatggatgaatggataaagaaaatgtggtatatgcatacaatggaattattcaaccttaaagaagcaggaaatttttaaatttatgataacatgggtgaaattggaggacattttgttaagagaaacaacccagtcgcagaaagacaaacactgattgatgtcacttacttgaggaagcttagacagtcaaactcatagaagcagagtagagtgggggttgtcagaggctgggaagcagggaaggggggagttatttgtcaaaggaagtaacgtttcagttatgcaggatgaattagttctggagatctgatgtacagcaggtgtctgtagttaacaatactgtgttatgtgcttgaaatttgctgaggatagatattatgttaaatgctcttatcacacatacacaaataataaataaaagcggtgggaggaaatgtttggaggtgatggatagttttatgcatggattgtggtgatggcttcatggggtgcatacttatctccaagttcatcaaactgtacacattaaatatgtgtggctttttgtatgccaatcatacctcaataaaatggcttaaaaaaagacagtcccttgaggaagaggaacttccgcctttggatcatctttggattggagctgtgtcatcaactcttcctgggtctccagctattcccattttggacttgccagccttcacaatcactccagccagttccttaaaataaatcactccctctctatagccacatatcctattggttctgatcttctgcagaatcagacccatacagtgcctgaagttcagtggtgtttttgcagagtccttccctgatattccatgggtgttccctccttgctcatct

SEQ ID NO: 60748 - DNA, 1051 bp, Homo sapiens
ggatagctgtgtccagatcttctgtctgctcatccatgtgactcagagaggagggttctgggcaggggggccttgccggactgcatgagaggacatgagttttgctttctctgctctaatattttgcttaagccaagaatccttttcttagagatgttctatatgattcctgtcaggattttctagttttttttggattatagcttgttcatttcttttgtttttagtttggtttatatataatgagggaagaagatgattacattatttttgtcactttgccatcattgtttagaagtcatagaaagaatttttaaataggccaataagtcttaaacttgagtacttggcttagaagaaagtcaaaactccttcctttttgactaagtggtttgtttctggggagctcttaatttctatttttataatcattagcctataaggaaattgtgtcttccttgttctcagggtgatctgctgaccttgttcactcatgaagcatttgggtatcatacttatagtgtctgaaacataaactgtattgagctagacaaggtatagcctcctcttcaagtagcaaatactatcaaaagctataatgcagtaggagcaaggtggtccttgttccagtttttgtctcagttctgctgctgatgtaccatgatcttgggaaggtggtgtctcagtgtggagatctgacacattgttaccgtgcctcctggctggagggacttggagaacaatgcagttaagtagaatggttttaacaatacagagaaatttattcatttagataaaaatctgatttttagaactttaaaagctttgtacagtgtaaatagatttaatgtatttaacatgctttatcagcacaaataaaggattttaaaattttgtcaaaaaattaaatgttaatactatcaccattaaaaatgttcaagcaatagtctgcctccccacccccacaccatcttgcacctgttccacagctaagtacagccctaggtttggtgtgtattctccatgcatttagagaatcacatgacacaga

SEQ ID NO: 60749 - DNA, 1074 bp, Homo sapiens
ttttatttgagagatggtgttgttaaaaatagtaagagatacaggataatgattaaaccttaatgagataattagccagtttacagcacacattaattactttgctattcagtatgctcttttagaatgattttcctacttggaattgagaatggttcccatcatcttttgaacaagatactgagtggttctcattctgagatgcagcagttcctttttttttttctttttttagagatggagtctcgccctttcgcccgggctggagtgcagtggtgtgatcttggcccactgcattctctgcttcctgagtagctgggattacaggctcccgccaccatgccaggctaatttttgtatttttagtagagacgggatttcaccatgttggccaggctagtctcgacctcctgacctcaagtgatctgcctgcctcagcctcccaaagtgttgggattacaggcatgagccactgcgcccagccagcagttactttctaggagggtggagtggaagaatcgagggggatagagcagaaatggcatggctgtgaaagaataagcatgcagatggaaatgtttccaggaagaagttcattgttgaaagaatattttgatctctaagtctcaaaagcaaacatttaatctactgtgatgcttttccttttttaggagtagatttggtaagaaaaggaattctaacttctctgtgcagcatccttcatcaacatctccaacagagaagtgccaggtaatatagataacctttttgctttccagggtgagacttgcttgattgaatgctgtgaaaatttcacctgattctggatgtgaagaaaatggtcatctctggtgtaatgacacctgatatttgtgttgcacgctctgatttacgatgcacattcacttgaatctaaaaggacctgctgatttcctaaagacaaagtctttaacccaagatccgtagcagcatttctgttttgccattagaaggttgacacagggataggtgtgtcgctgctaggacagcctgccttgtctagagggaaagtgccagctccagagaccacaaccc

SEQ ID NO: 60750 - DNA, 1050 bp, Homo sapiens
attgcaaagcccaggtaagagagtttgctgagccctatgataggaaggttctaggcagggcaggacccttggtattcaagtcaaggaggctaagagagactatgagtcacatgatggcatgtgaaaaggtgtttcttgaaatgtgttagatcttggaggttgaaaaagctcattcggtgtaaataataaggtattatttctaatttaaattctgcaagacctgggagattaactgatgtattatatatttcctgaattgtaattttccaaggctgaaagtttgggggattatttagccattcatgcagcagctgttatcatctctctcttatattgctttataacttgaatttttaggtagagctacacattgttttataccagcttatcttttatttttttagacaaatcttcaagcagtttttgacaaatagagtgctaaaagacccaaaacaaaggcggtttttcaaatccaatgatctctatgagctatttactctgactagtcctgatgcatcccagagcactgaaacaagtgcaatttttgcaggtattacataaaatcatttaatttaaagtaatcaattgcacaagatgatacaatatagtattagtggtgtttttcctctttacaggaactggatcagatgttcagacacccaaatgccatctaaaaagaaggattcaaccagcctttggagcagaccatgatgttccaaaacgcaagaagttccctgcttctaacatatctgtaaatgatgccacatcatctgaagagaaatctgaggctaaaggagctgaagtaaatgcagtaacttctaatcgaagtgatcctttgaaagatgaccctcacatgagtagtaatgtaactagcaatgataggcttggagaagagacaaatgcagtatctggaccagaagagttgtcagtgattagtggaaatggggaatgttcaaattcttcaggaacaggcaaaacttctatgccatctggtgatgaaagcattgatgaaaagttaggtctttcttacaaaagagaaagacccagcca

SEQ ID NO: 60751 - DNA, 1687 bp, Homo sapiens
cctagctagtgtcttctccaaaagactctattgtataaataatgtgagtgtgattaggtcatttcagttcttttaaccatctctcacaatttcttatttcatttcttattggttgctacaggaggttcttcagtcattcacatctattcatctccatgaatctccccttaacttcttcaggtctttccaagttagggggtctagatcacactatccaggaaagggaatgcaaactacacttggaattgtaaattttctagtagtcacattaaaaaggaaaaagagaaacaggtgaaattaattttgatatatattttatttcatatatctaaaatacattttaatatgtaatcaaaaattaaaaatgattaaaaagatattttactccttttttgttctgtcttcgaaattgggtatgtattttacatatgcagcacatcacaatttggactagccacacttcatgtgctcagtagccacgtgtgactagtgactactgcattggacagtgcagattgaaaggaagaagaatgagtcacggatgactctggggaggtttaccaatgttcctgacttattcagatcatttattgttaatctgtttactgttgtttactagtgatagctaccctaccctttgattattggcttaatggtgatttctcctctgctcaagcttttagaccagtgagtttgatttgaatcatcctctcaaggctggaagagccccattattgaagttttgttaatgttcttttgtggggatgggccggggcactcaccccttgtcttctgtgcccttctgcatggaccatatctttcccattcgtgcattcctattcgtgcatttttcatgcagttttttttctgatataataataatctaaaggtaaatggatcctcaacctctgactcatattaaactgcagaacttttagtgaggtaattaggagtgtaatatttaaatgcatttgataagtcacatgactgatgtctccaaatttaggttgataggacatttctgatccatatttaaaaggcgaattccttttttatattaggtttataataccgtgaactgcataccttttttctagtgagggaaaatgaattatcagcaattgaatatgacccctgtagacgtgttcagtccagtagaatttttttgtttctgagaacttgttctatcagggaaacaagatgagtgaaagttaatttctcccagctcatgataatgctgtgactagagaagaaactaagaagctggtggagaactgttttttagtctgtgttataggttaaacagcctccttgcctagggaatcttactttacatggggtcatctgagtgtacatgtactctttcttaccacagattttctccggacttatagccctaagaaaaatttgcaaccaccctgatctcttttctggaggtcccaagaatctcaaaggtcttcctgatgatgaactagaagaagatcagtttgggtactggaaacgttctgggaaaatgattgttgttgagtctttgttgaaaatatggcacaagcagggtcagcgagtattgctgttttctcagtcaaggcaggtgagtgcacagacttcagacgggaaacaggctggttctttatgacagccatcaactcacaaaatgggattcaatctaaagtaatgattctgaagc

SEQ ID NO: 60752 - DNA, 1032 bp, Homo sapiens
cagcagtgaacaaagcaagttttgttctcatggggactcacatttattcttgagggagagtgtcacaaaaaggtatagaagatgtcaggtggcagcattaagtgtggagacaaatgaagcagggttgaaggataagctgggaatgctgagggcaaggatttggggaagtgggccatttgtaagggttggtcagagaagacctttgatgaactgacacctgagcagaggcctaaagaaggcgaaggagcaagtcttgtaggttttgaaggcagagcattgcagatggtgagctgtggcagtgctttggggccttcatagacagcagggaggccagtgtggtcagggctgggagcaaggaggagggtagaagaggaggagctagctgggaagactggggaggctggcacagacaggtgcatgaacagaagtgaagacctgggcatcggaaggtgagtagggtgacctggaaaggacccagtgtgtttggccactaggaagtcatgagtgatgcctcagtggcatcaacagaggtgcccgtgaggcttgctctgggtgcgggcttcaggagtgactggaggtgaggaagtggaggtggggatggtacctaattttctcaggaatgcccccatcttccacttggaggctaatgggtgaggcactgtactggggagaatgagtgggtcttcagatacagtgcagaggtggaagggttgccctccatcctgtacaagaacctcttcctctgggaataaaggaaaatgaggtggatgcagaagtagagacatgttagggagtgaaaaccagggaatcatgcctgatcctggtaggttcaggtttgattttcattttgtttttatttgtctgattgtttttaagtagaagttgagacagagttgcgggtggcttgggtggtgaggagcatgggcacagttgctctgggcttgtggaagatgctgggcgggcatgcgtagaggaccccctggagcaggacaggccatggcaggatgctgccatgtatgagcttttctccag

SEQ ID NO: 60753 - DNA, 1093 bp, Homo sapiens
cagagtctgactgtcacccaggctggagtgtagtggtgccatcactgctcactgtagccttgacctcctgggctcaagggatcctcccacctcagcctcctgagtagatgggactacaggtgcttggcaccacatccagctaacttttaaaatttttttttagagataggctttcaccatgttgcgtaggctggtctcgaactcctgggctcaagcaatccacccacctcagcctcccaaagtgctgggattacagttgtgagccactgtacccggctttttttctatcattttaaaatcattgcttttatatccttttcactctgtcctggaattcttgttatacattgttagagatcctagatttgtctgccttgtctctttggattttctcttattttcttgcttttgttttaaattaatatattttccatccacattgttgttttgacaagaatggacacaaaggatgttttgaaaaaataaaaataataatttaatatatgtatatatttataaatatatgtattataactttgtcatctttttgagagtctccttcccctaataacggctgtattagtcagcgtttactacttgccaggttaacaagtacacttccagtgctgataatgtctgtgattgtgcatgttatgtttgtatttgtgcatttttataaagtactttagattgtgtcatgattgaaagggtgtcacttcttatttaaaactgactttaccattttattgtggtctcaggagaaactaattcgagatgttgctcattgtcatggaattttgatcacatcttactcctacattcgattgatgcaggatgacattagcaggtatgactggcactatgtgatcttggacgaaggacacaaaattcgaaatccaaatgctgctgtcacccttgcttgcaaacaggtatgacctcttttaacaagggagatttccaagtggagaagaataattaattcagaataaactatctgcttttagtaacacatttattgaatctttccttgtgccaactgcacaagaaatttaaaatgtgcattttccttaatgcagaaaactctttatttttg

SEQ ID NO: 60754 - DNA, 1256 bp, Homo sapiens
gttattgcctcattggctatgtatatttcctgtgaactcttacaaactgtagaggggccctaatttgagatgattttggtgttgtaattttaaggaccatgaacattgaaatgggaacagtgtctctgtgataccaagaaacttcatggtaaaagaagtttgatttgttattttttaaaaaatgtgtgttgtatgtgtgtttctagaagacagagaaacatattgcttatggttaataaacatctgtactggttgctgtgttccccttcataatggatacaccaccttcttttcactttgccattcatattataatgataggcccctcaatcttataatgaaaaggaaataaattgactttcaaactcagttaattttttaaagtcttggatatcatttggtaattcctaatgttattgaatttaataaactttcaaggataaatattttactttgtagttcctggtaagttctgggtatgactagcagatttccatcctgcaggttgatatatttgaccatggagctattggctttccctaaatttattaggtaatcaatggtaatcaaagattaaaggaattgtagtctgtttggtaattgatgctaatcactgtagtacacttagccattactcatgttcatctcactggtattaagagttaggaaagggtggttcagttgacgatgtgactgttaatggagttgattgtcctgctgtggtccagcaacagtctaggtctgctcctagatctcaactcagcgtgaaaatctccaattttttctactaagggggaaaatggcagaaattaaagggcatcttgataatgccagatagatgttcagccagaagaatatactagccttagataacaaaatgtgagtcatcaatgtagcagtttgcagaaggcacattataaaagagaaaaaaatactgtataacctgaaaaaacatatgcatgtgtttatgcttatttgaatgtgagtttgttgtaaaaatattttagacagcttttgattggttgtttcctaatccctgctaagtgcatattgatgataactcttttattccccttggaggatagaaagaagctggtgcatttaatccttttagaaaggcttgctgccatggaaggggccaggcagagtcccactctccttggggagctcaaggggcacctggacaggccctgccttggtgaggagcatggcttagaaactctgtaggaagagtgtcggagtctcttgtagcctct

SEQ ID NO: 60755 - DNA, 2733 bp, Homo sapiens
ttgaggctttttttttttccccactcacgacaactagagtccattatagttatgtaaatgcaaaattagtctggttaaatgggtgcaccttctccacaaccttggtgtattgctaagactttcagatatttagatgaaatatatttccttctgaaatataagtgttcaccttattttatatctgaaagtatcatattactaaatttgtaacttagattttattcagtgaacacatttttttgagtggtagcactatcagtgcttgtatattgctgatgcctcttcccccagttaagtaatcagtaatgtgaacctgattcagtgattttgaccccaaatttgctttatgtttaaggggctttgttgttttatgctgtgactatcatatctttagaacagaaatagtaattataaatctattttttgttacatagtattgcggttgtgaagacactcaattatattgaaatttttactgaatcttttctaggactaatttcatgtcttacgaaccagcagagaaattttcccttagggtatgccagaagaggagcaagtagttttgataatgaaatgagaccttaaagaaatatttctagagcagctataataatttacataagaaatgaattgagatggctggagaagagaattgtttttcctctttgaatatcagtgttttgggtaataatggcagcattaacctaagagaccgttctaatttgcctgttttttcttgtacattatcaggagctatctttttaaatctgtcttgtgatcaaaataatggaaatgtgatttttattttcatggtaggagatggaataaactgagactgcaggacaaagagaaacgtctgaagctggaggacgattctgaggaaagtgatgctgaatttgacgaaggttttaaagtgccaggttttctgttcaaaaagctttttaagtatgtaccatatgttctttcctttctatttgctatcaagccattatgtacaaattaacattttaggaattacatagtagttacctgtgggccctgaaggtacttgcagcaatttgttgcaaaaacagatactgtcaaatgaaattatagccacgtgctgttcattaaaattggatgataataagttgactaaaatgtgcattgggtatgtttgtaaactgatgaatctatatggacctgcctcagcagactaaaagcaacacatttaaaagccatttatgttgaataatttttttgttcttagtaattttaaggtgccaaactcctaatttcttaaataagattaataggaagagttgcatattaaaatcaatattgggaaggattttttttcttctatgtggaaataaaaaacttttgacattttttttgagtgtcttatattgtacctgagggtataatatttttgagctgaccaaatgtgcatctaaatattttatgtaggatgtcattctaatgtcaaaagagaagatatgggcaacaccttgatgattaagttgctatttgaagccaggtttcatgtgtaagtggccaagcattggagatgaccggatgctgcctgatagatgtgttcatgttgtctctaagggctggccagtctcccgtgatgaatgtaaatactgaggaacattttcagtctcgtcactcctgggatttacttaacaagatactttaggaaggcttcttagatgcatataggaagttaaaccattacatagcttctttctgtctcttttgtataatcaatttgtagttgggagcaggatgcaaagttctttgttcgagatgattaagtttggtctcctttatagattcagctgtcagccatgccctaaacttgtggaagaagtctacttaaaaacagcatgctctttatattttctctcaaagagcttatattatagttttaatttttctctccattggggtaggggagagtgaagagtagtttttttatcccactaaacattatagaaagccaaactctaaagatgtgaagtgacttgatgtgattgctttaactggacagaggaacagccgtgtagaagttgaaatctgaatctgtagtaatatttacagaggtggttgctttgtttattgcttctcccaaatgagaattaactatggaaaggtaaataaaggccacttttattggcaactctttttgttttctctacagtgattctttgttaagaaacaagccaaataccatcagtgttgtactagcaaaaggaatacccaaattatagattaaattgatttaaaaaagacaggatacttctgtgtatttgtagtaagtgatttggcagatatcctcaaggatcaagttgagtctgcatttttgtataaatgtcagattttctagcaaagatatttcacaattaatagtactaaactttgcttactaaaagtatttaggattcagtgtattaacaaaactctatagtagttaatataaataatattcgttttttaaaaattagtcttaattgcacattcctggaaagtattgtgtttttttaatctctgcaaaaacaggattttaaatattttatgtcataaaacttctgttcattttcttttgctgtatgaaaaaaattaataggattgatagagtctccatttttcttttatgattgcgttttagcggggccaatttaattttaaactgtagatatatttttttactgtatttgctgcattctgtggaattgaattgacagggta

SEQ ID NO: 60756 - DNA, 1011 bp, Homo sapiens
tagccaaactgaataaatgtttggcccttttcatctttctttatgaagcggaaggcactagaatgcaatcgtttctgtagtggcttatgtggtttcctaggtgctgagttctgtggcgacaagatgcctgtatattttaggagggagggaggaggaggaaactgaatcttgtcgatgcagagtgatgtggtgggaaatttagcagccacaaagattgactggctaagtctaaggaaatggtcatcatatatcaataaagtttaaaaagtgataccctgtatataaaatatttaatggccttgtgccaaacttcaaaaggcaatatattctggtgtttttatttctccttctgtaaaattatcttggagaaattgcaaagtgaagtatgtttaagtggctgtgattcttccaaggtttatgttatccacaagtttgctaaatacaagtatcctttgttatgcagaagtttggctctgcgttcatagttttgataccgaggactctctcattatgtaaactcctcgactgctgaatttcagagtgagtagcaagaattcagatatgtgtatcaggaaagtgtatatatatcaagaattcagatatgtgtatcaggaaagtgtatatatatctgttcagtttctaagttttgatagtaagggatacctatatgccagggcttcttggctttgacattattgacatttgagacttgataactttttaccgaggggtttgggggctgtcctgtgtggtgtaggatgtttagcagcatacctggactcacctgcaagatgccagtagtagtatatcctcccgactccttccacagttctaacaaccaagaatatctctgggcattgtcagattaccccagggtggggttgaagggacagaattgccccctgtcaagaacgattgttgtacaccattgcatttaactaaatttgtaaataacatgaaacccagaagacttttatagccacctagagataattcattttgtccattgca

SEQ ID NO: 60757 - DNA, 1010 bp, Homo sapiens
aatacccagcttggtgcctgaatatatttttaaaaatcaaattgtactcattgtgcctctgttgttgaatttcttaaatggatattgcaataggtagagaatgatcttgaggttgaaatgtcactctgtattaagaatgatttaactgtatgatacacagctttttccttacagacggtgtagatttaaactgctctgtgtacaatgatccttgcaacataaaaatattacaatagagcagtaaggtctgttttgaattttgagcaccacggtaggtgacctccttgaagttttggagagggcatgtttattttattaatatgatctcaggcaactaatatttgataattcccattaatatgtgtattttgtcccttttgtgtgttggtatgggcagttgtgtacattgatttgtctagtataaaatgtgtattacatgattgttcagcctatattatgtatagttcaaagaactgctaaactgattttactgttacttggaaaagtttgcaggggtgtagtgaagagtgagttttgacttactttgcacactattaaggtggggaaggaatcatgttattgtacaaaaatgaaggcaatctttcccttctttaaaccttagtcctgatgtttttttaagacaacatttggattgaagttttagaatttggtttgttcttgtgcaattgctttcgttctgtggcagttagaggacccttcgctggcactgtgagaaaaggggtggtactagggagtttggaaaatacttttttgaagacagtattatgtaacagataggaatatagactctggaacttgattatctgggtttgaatcttttcccttaactcattggtaatcttggacagcttcctttctttctccctgtctgctttaattgttaaaaaaaaaagagagagagagagaataacaatagtattgatatggtttggctttctgtccccacccaaatctcatcttgaattgtagtccccatatgtcaagggagg

SEQ ID NO: 60758 - DNA, 2084 bp, Homo sapiens
ggtgtgatgccacaatgtgcagagaggctgaggacagggagggcaggtgggcttcactttccagccagctctgatttctggggagtggtagtctattcagggggctccgaggccctgtttgggtggattgggaagagtgtgcagttccttagtgatgtctatcataggcacagtggggaactagcaacattcatgctaggtatttgccagccttgacataataaaacagatgtcactgactcctgcctctttgtccagcagtggtcagcactgcttggtcaggctgcagggcatagatgggttgcatcctgagtgagaaaatgcatttccagatatgtttttgtctcttcttgctggcaggactagggttagtgtttatcatttgacttaaactcattcccccaagttcttactctattttcatgtatcggcagttactatttaagttgctgccctcgcagactacagtgagggcaacgagcacagacgagagcaaagcttccccacccacagactgattatgcagtgtcactgggagcccctaacactggagacgctgacttaggaagtgtagcgtggggtcaccgggcaggacttttaaaaaatgttcccagatggctctgatcactgtcaggtttgggagctagggatggaaataagtcagtcttatgtatttctcttttttggggctgcagcttttggctgatgcagtttgtatatcagtttctcaaaaatcctcttttatgtgccctgcacagttgtatgtacacaggggagggcctggcagggagccttagctaaatgctgtatgtcatagatcatctggttcttgtggggtgtgtgtgtcagaatcacatgggaaacaccttcagagggtaggggcctgggctcagcgtggggagtctgaggcagcaggtgcagagtgggaggagctgggcactgcacttgtgctttggctgagctcccgctgactctgaggggagcttggtgacattcttcatggtccacaggaccttgctcagaaagaactatgttctcatttaggagagctttgaggcagttgggaagcattgttggtaaggatgttgaggcttgagaatgtaatgcttttttctttactatggcccacactcagcaaataattgcctctgggataaatccccgacccatgcccaccccgatcagggaaacatagtggggagttcagaaacggactcttcagtaggcggtgcctgagtctcctcagatgacctggtgcattgggctaagctgctaaatgcatagcctgaagtggatttgagttggttcctctgcatggtttgaaggctccctcgccacctttcagcacttctgatgagtccctatttttattgtaaaagtatgacaacaatattaagatgaaaaaatgacctcttttatgtttttattttctacatgtcattccagtctttggttctgtgaatacacatctttacatggttataatcacggcccctccagttaattggcttgcccacagttttactgtgaagtagagctgagatttgaagtcggctgggccctctacatacatgtttccttccctttgtgggattgagtagaaggtgcaatatttaggtatgaccacagggtggtgccaaaaatcaacacatagctgcccccacctccattggactgaaaaccaaaccaaaaacctaagcctgtaatctgggaatttggatgaggatatagggagatggctcaggagtctagaagacctggcaagtatggtgtggatggggacagaatttacttcatggtctggtgtaacctgaatctgtagacttgatgcctgttgatataattggtttttaataaatttttgatcctaaaggtttttcttgtgccctattttttaccttttttacatgagtaactctgagatgtaaaggggtgataaagattccattcattgtgtaagtcttacagaatgtcttctaatagtctgtgagacataatctcctgcgaagataatactcttcattgtccttcccctgagcactgggcctctgtggccagggccccattgaaccctggcttgggag

SEQ ID NO: 60759 - DNA, 1578 bp, Homo sapiens
acttctaggtctttagttggatttggaggcaagtctaagatgaaaaacttaagggaaggctggggcaagaggcatacagagggctgagtgtgagctgtgtcgcctttataccgacagtcaccctagaatgagtatcaggaaaaagaaaagggtgaattaatgcatactggataggggtttctgttttcccttttgaagcaggaaagtaattttagagaacttttcttcaaaaaagagctgaaacttaagctttggcatagaaagaataagcttgcttttgtaaatccttcctttgtcttgagaaaatagtcatctgcataattataagccaccatcatgcaaaaagtgtactttgtatgcacagcatacctttcttttcactgttgttttttatgttagagactgactttggcttttagctccatgacattgtcattgtataaagcaagcaccataaaagggaaggtgaacatgtgaaacatgaagtctgaattgcatattgccacacgttttctgagagccaggaaaaataatctgtattgcaggcctccccatggtggcccactgaacactgtgctactgccgcgcatttcaagtctccttgacttagagctcacttagctctaaggaagtcaaagggaaaaaggaaccttattacttttaaaatacttgatagtgggatggctttttcccaatcctcaacagttttttcttatttctcaaggtgaagagacctagtttgttgtatttattggcctttgtgagtgaaggttgacctggtgttttttcttgttacttagaactgctcattaacccccgtccagacactacagacattccataacctttccgaaatagatgtgtcaattcttttaaacagtaatttgaggacctgtgacttaaatcctgttctttagagttgcggcactcacattctagtagcaccttatgtagtaatgcacagatgagggctggcttatatttgtcatccctcagcacagctttcgtttctgtgcacgtttattacctgtgaagttgtttgaggaatgttgcccagtactcttgaacagtgagcggtgtcagactttttcttaactactgcaaggaattaataaaagtgttaatctcaacatattgattataaatggagcaatatatatttttccaattaaattgggtcaatattaaatatgtttaaaatatatcagtattttgatcaagagcaatttattttgattgaattttaaatgtgggtttagttaatttgatggcaataagtttttcttaataatgttaagattgtaaaacaatttattatttccagagccaatattttgctaaagctacagtgaaatctcaaatgaatttcagaaatatcaataactcttaattgccaccaaaatacgatagctcttaacattttatagctacagttattaaggctgttaaactgcagatatccacattgaaatatttgttattacatctcctttggtgctgtttggtttgggggatgaaagaaaataaaatgctcaggattgagaagcatattagaactgccagtctctctatattttg

SEQ ID NO: 60760 - DNA, 1578 bp, Homo sapiens; identical to SEQ ID NO: 60759

SEQ ID NO: 60761 - DNA, 1578 bp, Homo sapiens; identical to SEQ ID NO: 60759

SEQ ID NO: 60762 - DNA, 1042 bp, Homo sapiens
aattgaaaatattgttagtcaaaaatgcattaaatacactgaaaaacctatcttaaagtcaaaatattgtaagtcaaaccatagttaagtccagaggctcctcagtttataatggggttatgccctgataaacccatcacaaagttgaaaaattgcaagtcagaccatgataagttggagaccatctgtgtatttgagaaaagttcctttttggtgttgcttgcctcacttgggcgcacttccttagttttcctgcatcaccatttctttggcctggcttagggtcacactggcctcagtctcctggtctcctgtgaactcttttctgcttagcccttgcttcctctaattgtctccactctgtttcttggtggtgcagccattgaccctcacacacctttgctgacagttgcgagagcttggcccttcctcccaccttgggtgttacagtcagcacccagccacactggggttgtacttagctttggaaaacttaagggtagggaatatttgttacttaggatattatttttatgaagtttgaaactttttttaaggatttatgtacagctttgtgaggtctgaaacattttttatgatttatgtacccctttgtgaaaatacattgcaatagataggaatgactagctgtaaccatttcagttctgccatcccaacttgtgcttacagttgattcactgcagtgagtagagtccttgcatcttttctttaagctctccaggggcagggctgtgcgttggttcagttcacgtggccctccttttattatactttccactcaccagtctgttacctgcactaccccatcttctctcacttgcttccagaatagcagcccaaaggtcaaagctagcagttgcccaaggcaggtgggtcctcccaaatcagagagaggacatctggtctcttgtgggagcatgtgaaattgatgtgcagagaccttcttgggcttctagtgggctggaatttcaagggtgtagagcatcaaacttgagaccacttcaggtcctagtctaactta

SEQ ID NO: 60763 - DNA, 1048 bp, Homo sapiens
ttcctaacatcgctgttcctatgcattacagttgatcttgccactatattataaatcatttgtgtcataatgaaatgaagatgctaacttggaaaacagcagccaaatgacttcagctgttttgaagaatattccatggccatcaccccaggattttggtggctggctttcttagctggctgcctaaatgtcctttgttgatgatactgcatttctttttctggttaatttttcttatttattatcagaactcaagaagatacgttgtccctttttagtaaattaatacttggaaacttgaatttatgtagttggaagattattacttgatcttttgagaaatcagtctgctctaattataaaatatttaagaactacaatgaatcctatataacgaaaaggcttataaatttttttccttttaggtagtctgtagagaatgccaaatgagggaatcccccactcaagtcaaactcaggagcaagactgtttacagagtcaacctgtcagtaataatgaagaaatggcaatcaagcaagaaagtggtggtgatggggaggtggaggagtacctctcctttcgttctgtgggtgacgggctgtccacctctgctgtggggtgcgcatcagcagctccgaggagagggccagccctgctgcacatcgaccgacatcagatccaggcagtagagcctagcgcccaggcccttgagctgcagggtttgggtgtggacgtctatgaccaggacgtgctggaacagggagtgcttcagcaggtggacaatgccatccatgaggccagccgtgcctcccagctcgttgacgtggagaaggagtatcggtcggtcctggatgacctcacgtgagtgcagcccatcttcttcctttcaaagtggtggtaaaacatgacagggatattcaggtaatggaaagctctagtattccagaagtttaggagatgtgtagaaccttttatttggaggacagagtcaataagggcagtcctcaacctcatctttgagtcccagcccttccccttaggagtggca

SEQ ID NO: 60764 - DNA, 1817 bp, Homo sapiens
tgactatgtccagggaaggacaggtgtgaggctggtggagcagagctgtcttggaaaatggtcctgggcagtagagggagggctgggaagggcctcagcatggacaggggttggattttctcccatgtgtgtttggatgtcccctctgtgcaggtgggcagctgttagagctctgatgtcgggactggactacctgggctacctgccctgtgctggcttctctcttgagggcctgggatccatttgtcctctctaccccagagtcttcacctgagatgcagggatgtgaggacactacagtagcttcctgagaggttttgcagtgtgcgtgacctggggtcaggatcatgggctcaggaaggaagaatggttggggcttggaggtgaagctcagctgccaggctgaaagaggaggagcatgcagcagcctcctgggacatctgcttagtggtgggggactgcagtgctctgcaggaggtgggcgcagctgggcagaagcaaggttggggcaaaggatgatgccatcatgttgccttctctgtctccttcagggcgcttcttattgtacccccacctccggtcaccttaaacgtgatgcttccagggctcaacccttgggtgtctccacccctctccctatgacagctcagggtgtcatctgccccctgctccatcttttagttcaagaggtgtccactgcagccacaagtccaaacctgcagttagtgtcagtggctaaggagagcctggggatgcaggcctggtcctgagctgccccagcccctctgggtaccaacgcctctgccatgtcctgttggtccctcagggaccagcttccagcgggtgattcctgaagatggggccgcagcacgggcccctgagcaggtgcagcggctcatcttctgcacgggaaaggtgtactatgacctggtgaaggagcggagcagccaggacctggaggagaaagtggccatcacgcgcctggagcaggtgtgcctgaaccccttgtacagtcaagtgatgggcaagctcacgtcgctggccccggctctggccaatgtgccaggcaggccagatgaaggccggtgaggccctgtgcctcctgtccgggggtgctggggacataccgcccctcctctggctatgctcctttgtttctgcctccccagatctctccattccccttcgacctgatcaagcaggaggcagagaagtacccaggtgcggagctggcctggtgtcaggaggagcacaagaacatgggctactatgactacatcagcccacgcttcatgaccatcctgaggcgcgcacggcccatatggtacatggtggggccgctgattgcccctcacctcggccctgaggctctgtcctggctccatctgtcccataggccatgctacccagaactggccctgcccttctctggtgatgagcaatgatggggcatcatcagtactggctttgtgtttgttctgcagccagaactgtattaaggaacctgctacatgtctcaaaactcctgccttagatcttaggccggttatgtagtccttggagccttagtccctgcatctctacaaagggcggtgataagattagatctgatgtatgtattagctctggcacatggtgcgttcccaatactggcatcatgtgttcctgggaagatgggagagggtcctgagaaactccaagaagccaaaagtatgtttgtccccaaagtctttgagttgttgcctcatttgttgtcctcatgggcaagtgcagtgacatggagggacagtttctccccactcttctgtggctaggtg

SEQ ID NO: 60765 - DNA, 1052 bp, Homo sapiens
atccgtgtaccttgacagctgtgtgatctgagtaaatgactctgagcctgacggtgtctgcaacgtggccaatgcttgccaagtggtacctgctccacccctccacaggctcggggtagccccttgtctcagctggaggaggggtgcctggccctgggccctcctgcagcatccctgccctccaaccaaatcaacagatggctgccctgctttgtgcggggtgtgtgctgagcacctacctacccgccccagggctggctgtcccttggccctcaggccagcactcctttcccacaggcctctctcgcattctgcggggccgtgcggacatgaccaagaaccggacggtggactgggcgttggcagagtacatggcctttggctccctgctgaaggaaggcatccacgtgcggctcagcgggcaggatgtggagaggggcacattcaggtgagcgcagtggggctcagcatccgcacaggagacctggagcagaagctgggcctggcttggggatcccgagggggcctttgttggggtgggatcttcacagcatccctagcccctgccctcaggtggcatcatcagatggccacctcgctgaccccccagggcaagtgtgcagagctcactgctgggcccaagctgtccactaaggtcaagctggtggccatctgtggtcctcaggatcatgtgtgtgtggggggtgtgtggtgagtgtgggcgagttgtgtgtggtgtgtgtgtgtggtgtgtttggtgtgtatgtggtgtgtggtatgtggtgagtggggggagtgtatagggggtgtgtgtggtgcgtgtgtgtggtgtgtttgttgtatgtgtggtgtgtatgtgtgtatggtgtgtgtggtgtgtgtgggggtgtggtgtgtatttgtgggtgtgtggtgtgttgtgtggtgcatgtgtggtgtgtgtcgtgtgtggtgtttgtggtgggtgtggtgcatttgtggtgtgtgtggtgtgtgttgtgtgttgagtgtgtatggggtatgtgtggtgtatgtgtggtgtgtgcgtgtgt

SEQ ID NO: 60766 - DNA, 1151 bp, Homo sapiens
acccagccgctcatgtacaagcagatccacagacaggtgcctgtgctgaagaagtacgcagacaagctgattgccgagggcacagtcaccctgcaggagtttgaggtgggcaggcaggctgcaggggcgcccaagacaaactttgggtggggaccctggagaggggttgtagatgttaccagcccagtgctgggcactaaggatttaaagaagtagccactatggtccttgtccccaagaggccccagttaccaaaggggaccaagaactaaggatgcagttacagccaagtgggacacagtgggtactgcaatgtgggggaagtccagccttgagcaggagtgcgggaaggcttcctgtaggaggcagccctgagctggggttgtccccataattatctatggagtgttcgtccttccaccttcatggagctctgagggcaaggactacaagtttccagagccttctccaagccccttgctgagcgcactgcaggcctgcccagcctcggggtacctgtacaggatcccctgaactctgagactttggcttctagccatgaggtccctataggccagagacagagagttctagaagaacttggtgatggggaccaggacttacgagtccaagtggactgggcgtctggctgcgcagggctttggtgctctgtccacatcttcatcctgattccaggaagaaattgccaaatacgaccggatctgtgaggaggcttatggcaggtccaaggataaaaagattctgcatataaagcactggttggactccccctggcctggtgagcgagcagtgtgtggctcagagggactcccctgggccttgaggtcttgcactgggatcaggactggaatggccctgggtgacagctgtcattgcctagtctagaggctgcaggctctatcactgagtccccaaagctgcgtggggccgattcctgcaagtcaaggatagcattgccctctgagcatggatggccaggtgctcactgaaaagggagggcatagccaggtgggagaggaagccctgggcactggatgcttggggccagggtgctcagagggcctccctggggggcagggttagaagagctgttaccctggggcccagaggtgggtgttgggcctgtgggg

SEQ ID NO: 60767 - DNA, 1026 bp, Homo sapiens
ccaggcttcttacagctaaagcatcccttgtgctggacattgggttgttctcatgagggtccttgcacatgtgtgagcgagtttatctgttagatggtgtccgagcagtgcagcggctggagctacgggggtgggactgaacgaccctcccaggagctggcagatgtcagcgagcccatccacagtgtgtgatggtgccagagcccccaccccacttcctcctacacgctctcgaatcctttcatctttgccgatataataggttcaaaagaggattttgttgtaatgcatttctttgttatgaattcagttgcttatcttttcacatgcttttgagccattcatatttttctgtaaattcctgcttgtggcttttgctcattttcctatggagtttttgggctttatcttcctgatttgtaaaagcgttttgtacattgagggaatttgccctttgcctgcatttgtttatgaatatttttctcagcttgatttgtttcccctatcgctgggcgtgggtttgctcccccatggcaaatttgctagaatttaggtgtcttttgtgttttctggtgttaggatattgtgtagaatgctgtaagtcttccttgcttcagggtcataaaatgttgtgtgttcctcattgctaccattggtgtgaggagtcaggggattcagcttcagtgtttgctggtggcctggccgagggtctctgcgctgatgcctaggcactgcccttctctccctgccttccccaccgctggatggccttccccactcttgtgctctcctgctccatggtcagtgtacagagaggctctgagccaaggcctggggtccctgccttcctccctcaggccagtgaggaggggcagtgtgatgaggagagaggggtcagagacagcttggccctctgaggcagtgggatcgggggaatgtgccagcctgactgtgggctgcagtgcctgcctgtgtatctgcctgtctgatgtgggaggggaggatccatcatgttcccatctccac

SEQ ID NO: 60768 - DNA, 1070 bp, Homo sapiens
ccaccagccaggaatgactcccttgctcatttgtttgcccagcagagccttgggaggtgaggatggttttccgtacccatcgacctgctgaggaaatgttgttcctgctcccaccccctccctgggaggcctgggccaggccttcagcccatactgcctagcctctttctttccttttctttttgagatggggttttgctcttgttgcccaggctggagtgcaatggcatgatcttggctcactgcaacctctgcctcctgggttcaagcgattctcctgcctcaaccttccaagcagctgggattacaggcatgcgccaccacgcccggctaatttttgtatttttagtagagatggggttttgccatgttggtcaggctggtcttgaactcctggcctcaggtgatctgcctgcctcggcctcccaaagtgctgggattacaggcatggagccaccgcttccggccactgcctagcctctttcaaagtcctgcccatcttccctttcggtggctctctgggtcccctgggcagtgagcctgtcactccctcctctgtgtccctttgccctcaggactatctctcctgctgtctccagcctgctgccgtgtgtgtgtgtgtgtgtgtgtgtgtgtgtgtgtgtgtgtgtggacccatacctactggctcctatcccaggtctttctgacatcctgttccttttgttctagcaccttcagccttctaagcctcactttgctcttccataaaacagggataaaagcgcatgcccgagaatggttgcaatgagtcaaagatgacctgtgtgtatagtggaaaacttggccaaaggatgtttaaaatgaaattactattttttttcaactgaaaaagaaatttgatcattgtgaaaacaacaaaacagaacaaagcttatacaatgagaatatgttcctcagtgagactccattcttgtggccaattttgtttgtgtgcttctgttgtgtttaggtgtgtacttctagaaacatttcatgctgatacaaacaaacctctttttccagtgcaaccttatttctaagaggccatg

SEQ ID NO: 60769 - DNA, 1207 bp, Homo sapiens
tgagaatgtcatcttggggatgccacacaggtgggtccccctccctgctgtgccttgcgcattctcctccagcccaggggacagaggtgggagagatgagatggaaatcagagcggaggtgttggtgggacctgggggtagaggtgggtttcctggaaagttctgagtcctgggcctggcctgctcgtcacagaaattgccgggtacttggccagagtcacctggggccgggtgctaaccaggttatcaggcaccctctctccctggccatgttgcctctgtccctagcaagggtgagatttcagaaagcggtacactatacttcttgaggttcctgtggacaaggagaggtggagggatttcttccagggaagggagggcagggcctgggcagttgttcccgggttgtgtccccaacagggaggtctgtggaggtgagccgagggtctctgacctggctgcaagctgactgcgtgttcccttgaccttgatgaagatctaggaggcttgctcagcagtggggcgttacctctgagctggagcctgtggggaagcaggagggggaatgcaccctgggggacagagacgtctgtggccaggggtcctgctgagtgggcatgtgcagatgtgcagagtggcctgtgggaagggccctgggcttttcccgtgaccagagagctgcttgtggttggactagcccagggctacatcagcatgagggcatccaaatgcatggtgcaggggtccccattcgtggctggcctgccaggactttggggtttgtctgtcatggggggcctgggaatgcccagtgtctggtcagagagttaggcagagctggcccagtggcctgaggcagcaagaaagcatggggctttaagcctcgggccattacagcagcaggagaggatggtgcctggtgattgggtggcctgaggagggctctgggcacgaaggggctgtattaggccaggccaggcctccacagtgggggagggaaccctgaggcctgcgggctttgccaggtgagagcccggcccctctggctccaggggaaggctgaacgtgctggccaacgtgatccgcaaggacctggagcagatcttctgccagtttgaccccaagctggaggcggcggacgaggtgggtgccatgcccaggtcccggcacccttggagagctgggtgtttgggaggtggactgtgga

SEQ ID NO: 60770 - DNA, 1017 bp, Homo sapiens
cctccctgggctcactctcacttctgctccccaggttggacccagagggagggcactggggagactgggaggtctggtgagactgcggggctccacctgggcctgacctccctccctccactttgctgcccggggctcggccacgcctccttctccagccttctatgaccttcaggaggctgaccttgataaggagttccagctgccgacaaccaccttcattgggggctctgaaaacaccctctctctgcgggagatcattcggcgcctggaggtgagcacaggcgggtgtgtggggtgcagctgaagcagctctttggagcttgccagaggacgggaaggcactgtcttttttgttctagacagcagggatgtcagccgtccctcttccccgctcctcatggggtcccaatgtgtctccccagaacacctactgccagcacattggcctggagttcatgttcatcaacgatgtggagcagtgccagtggatccggcagaagtttgagacccctggtgtgatgcagttctccagcgaggagaagcggaccctgctggcccggctagtgcgctccatgaggttggcaccacctggagggccaagtggctggaggtcctgctccagggctctatgagacgtcccacaccctgcctaagagagcaggagggtaccacaggaaggcaggactggatcggcctcaccactggctgcagggaggagagttgggaccaggtgtttaggcagtttggccaagagctggcccaaggcagagcaggtcaggtgggcagggatgaggctctaggagaacaagagagcggggacactgagcaaggccagaagtggcgggaagtggctgtgggaacatttgggcagaaaattatccctggtgtggagtgactgtggccacaccacctgtctgttcactggacttttctgaagctgggtcccccagggctgcaggggctgggggagcacctgactcagctgctggatgcaaagtggattcctgagcagcg

SEQ ID NO: 60771 - DNA, 1028 bp, Homo sapiens
aggaagacctgacactccttggggccccagcctgggccacccctgactcttcccaggccctgacctggctgcgttcttgtttctgccctgcctagtcctgggacagcttcttcagggaagccagcgaggaagccttttctggctctgctcagccacggcccccttctgttgtccatgagagcaggtctgcagtctcaagtcggaccaagaccagcaaattggtggaggaccacctggctgtgcagtccctgatccgggcctaccaggtgaggggcagctgaggcacagcctgggaggctgcactggctcctggggtgtggccaggcactgaagggaaggggtctcagctccaacatcatctccccagagagcccttctccttgtcctctactgagcggcacctactcctctagccagtctttgccacatcaccattcagagcacttaccacctgcttgaatttttttttgtgcatactgacttgtgtccttgtggtctgttccttgcacacaccatgccccgagtacgtggaggagcacttagtaagggatcaattccaaagcctgttgaatgaggggtgagtagattaacccttgttaattctgttttctcctctagaatgggcatcctgggagaacagggactgatacagcaggtgcctaattcatgtttatggaatgaatggttcagtaaacaattctcccccaccagttgctcctcctggagacttaggctctcccatgctgggcccctgctctgtcagagtcccagtgatggtgtgtgtttttggtcttgaccagacaggactaattggaggactgctgcggtgttcaggccataacaagcgtaatcatttggaatatctctgggaactgctggcaggaggtattccgtcagggaaatgtgaggcagcagcaagccacagcaaggctagggtacaggggggcattagcaaatggaaatgatgctttgcctctgaatgagctgcccaatctgtgggatggaacagagttccctgtacaccaccc

SEQ ID NO: 60772 - DNA, 1070 bp, Homo sapiens
gcccaggcctctaggatagtcagaggtggaacaggagttgggaccctggctgcctgaccccagagctcatgcctggcacttggagaggtgctgctcccagaggagccggccccaagtgccccgcgctctagggcttggcatcactggctcgtgggctgggccacatgacccgaagcctcaggggctgagcattggggagggaaacttgggggcactcagaggctcccaagctcacctccctcctccctgcagtggaatcttttttgttttgaaaattttctctgttcaggcttgctgctggttgccccaggagcctgtcctccctccattgaggtgacatcacccctttcctctggctcatgtgagttagaaggagggctgtgccctgccctctggtggggcctgaccttttgtggaaagtccagccagtgagtttctggtgacatggttgagctgatggcaggggtgaggcagaagggtgcaacaggtgttggctgagcacacctgaccaggagcgttggctcagggcctggcctgggcagtacttggaagccagttataccccagaatgcacattttctggggcctgagctgtccaggggtaggggactcctcccgcctgggcgaccccttgtggggtggtccttgcacccagcttacaagctgggcggtctgggcaggagggcattagctggtattcatggggagctgctctatggcagtggctgtgctggagcagaggaaggggttctgctcacagttgtagggtggggaacagaggtcccactttacacatcatgtgtaggatgaggtggcaggggtatggggtgatctgggacctcagtaggccctatcaacccctaacctgcctggatagggatatctggggggttctccaggattggcagagggctcttagaactcttaccgtctgcggaatagagaaagcccccatcactgaaagcccaagatttagatattttccctgggaaggcacaggtgacagagtgaggtgagatgagctgcagggcctggttccccgtggtctgggtgggcttccagtctgtacc

SEQ ID NO: 60773 - DNA, 1907 bp, Homo sapiens
tcctgcttcagcctcccgagtagctgggattacagtcacctgccaccacacccggctaaattttttttttgtatttttagtagggtttcaccatgttggccaggctggtctcgaactcctggtctcaggtgatctgcctgcctcagcctcccagagtgctgggattacaggtgtgaggcaccgcgcccagccttgtgttccccatttctaataccatgtatactgggtttataaatctttaatctaggatgaagctgtggcacaccagctggtaaagagctaaaggtatctaggtggaaaatgtcatgatatagccgtgtcttttctctttgcctcagccttaatacagatattggcagctgctgcagctgagcgagatgtggtttatttcacctttggggactcagaattgatgagagacatttacagcatgcacattttccttactgaaaggaaactcactgttggtaagtaggagatactcttgacacttggtatctagatggattgtacaccattcagtgggaacacttgctaaatctggatgaatcacagtgggtacgaagaaacaaaagcatggctctaagcaggaaggacaaaccctcagaggggcagcatttgcagagtctttttgttctggcagagtttcatccacagtcttgatagggtatatcagcttactaaagtaaggtcaagaagctgaagttggtgttcatttttacttttctgtctataaaaatctaaaatgggaaagatgaatgagggtaagttcagatctgagaagccccactgtcctgtttctcagacctgccagcgctcatccagtgtgcttgctacctcaggagcaaagtgtataacgagggctgccatgacagtgcataacgagggtgcatggacagtgtaccatggatagcctgttgttatcatgagcaaagaagttgtttctttaaagagtgttaaaaatcttgtttaatttatgttgggaaagcctttcaggcatatgaaattcatgctgtattttcaaaagccaagtctgagcatatgccatttagattaagataaaactggagtgttctttctaaggttttttcaattacatactttaatgtgcctctggtctgaccttttgctctccaggagatgtgtataagctgttgctacgatactacaatgaagaatgcagaaactgttccacccctggaccagacatcaagctttatccattcatataccatgctgtcgagtcctgtgcagagaccgctgaccattcagggcaaaggacagggacctgaggagccgagcgaatagcatctcctcccacctcccaccagagacgtcctgtttgagctgtcaggtgtaatatatgaattgacttaagttaatataaatgtgtacataatccacatttgtagtcaaggacgcaatctcttccacacatgtgcagttgtcagttggtacatctaaactccctccatcctgactcacgtggacttagatatgttttgtttctattttcttctatttcagtttttcattctttgatgtttatttcttttgtccatcagatctcttgtgaaatcccatggaaggttgtgctcagcctgtcgggtctctttcttcctgcccatatattataccagttgcttctgcagcccgcagatgccagcgatgccaggaaacaagttgaaatccaggaatctctttaactgattttgctaaaaatctccctgtgagccttccactcaactcttaatatgcttgcattgtttaagtttttaaattctgaaaattaataattagggtttttttcatatgtgttgcataatgcaaacctcctaggttaaaatagtttctttatttaagatagaataatttccagaaattgtacttttgaggtatcattttta

SEQ ID NO: 60774 - DNA, 1041 bp, Homo sapiens
tctttgctcatgataacaacaggctatccatggtacactgtccatgcaccctcgttatgcactgtcatggcagccctcgttatacactttgctcctgaggtagcaagcacactggatgagcgctggcaggtctgagaaacaggacagtggggcttctcagatctgaacttaccctcattcatctttcccattttagatttttatagacagaaaagtaaaaatgaacaccaacttcagcttcttgaccttactttagtaagctgatataccctatcaagactgtggatgaaactctgccagaacaaaaagactctgcaaatgctgcccctctgagggtttgtccttcctgcttagagccatgcttttgtttcttcgtacccactgtgattcatccagatttagcaagtgttcccactgaatggtgtacaatccatctagataccaagtgtcaagagtatctcctacttaccaacagtgagtttcctttcagtaaggaaaatgtgcatgctgtaaatgtctctcatcaattctgagtccccaaaggtgaaataaaccacatctcgctcagctgcagcagctgccaatatctgtattaaggctgaggcaaagagaaaagacacggctatatcatgacattttccacctagatacctttagctctttaccagctggtgtgccacagcttcatcctagattaaagatttataaacccagtatacatggtattagaaatggggaacacaaggctgggcgcggtgcctcacacctgtaatcccagcactctgggaggctgaggcaggcagatcacctgagaccaggagttcgagaccagcctggccaacatggtgaaaccctactaaaaatacaaaaaaaaaatttagccgggtgtggtggcaggtgactgtaatcccagctactcgggaggctgaagcaggagaattgcttgaacctgggaggtggaggtggcaggtgagccgagatcgcaccactgcactccagcctgggtgacagggcaagactccatctcaaaaaaaaaaaaaa

SEQ ID NO: 60775 - DNA, 2138 bp, Homo sapiens
tgtttttatatcatacttggaatcagtccacatactctaatagacttgtgatttattctcttctaacttttgatgcaagagagttcacttaaatcatgaggcataattgtgtagatttgcaaagatcttgggggtgttgtagacaaggaggcctgaagacagtgatgttttaaaataaacttttgtcagtgtttactgatgtatctaggatcgagattatctttctggaaatttcatttatgtatgtatagtctagcattcaatggagggaaaacaattataacagtgattatggatttctaaactctgacagaatcttcagggagcatctgatttaactccatggtgtagttgagaaaaatgaggcccagagagtaactggctagtcacagagctagatagctggcagaaggctgaagatagaacttggatctcctgcctgccagtcctaactagtctaacacgtgcttatggtacaatatgtactctaatagaaatgggtgtgaaatcaagaatgtaatgtgaattggttttactttttgattttctcttaatataaaataaattctataaagagataaattttaaatgttttttattaatacttcattttcacaaatggcaaatgactagagatctagtaggaaataggatgaaaaggactcttctttgggtctctgtcttttttaatagtaaatacttaaagctaaattttcattttcagtaaaaggtaagaaatggtacttcttggtggagaaagatgatgattcattcgttcccatttttatgtgtagtttaggttaattaagaaccttttgaaatagggtgtattgaaactttaatgtatggataagttggttgagcagttttaattaaaacttatctctattttgaagttaattactttcaatactctgagattaatgaggcatagtcatggcacctcccatgttgtgggtactcaataaatattagtttgggaattaggacatactttgatggtattttagggtcttacatatattatgtcatagattctttcccaaatctgggaaatactcaacgatatcaaattttactggttcaacttaaaattttttcttcctatgtaatttttaaaactttctatttaaaaataatttcaaatttataaaaataaaaatacacacctttatgtatgcatatatatgtatacacatgcacataatttttttctgaattatttgagcttaacttacatatactatgccctctttcctaaatacttcaatttgtatttaagaataaaatattatcttatataaacacattatagttattaaattcataaatgtacactgatatcttatttactctttcatctatattctcattttgtcagatgacctaataaagccctttctagcctttttcccctctagcacagggtccagggtcagctactgcatttagttgtcatgtttgttagcctccttttgaattgagaatatttccacagcctttttttgtctcttatgacattgatgtgtttaaagaatacaacgttctttgagtttgtctgctgtttccttgtgatgaggttgaggttatgcattctctgtcagaatgctgcatcagtgacactgtcaagaggcacttgatggccatctgacactactggtgatcttaattttgatcactgtgtcaggctgttgcccagtttccccactgcagagttgaggatttttttcctctcttgtaactaataagcaatctgtaggaaaacaaaggcaaaattttccctagatttggcatctgttaatgattcttgcctgacctttaccacagtggttgcaaagaaaggatgttcctattctaacaccccaaccacacttaccagttagtctttggctttctcctgtggggaagagctggcccgtctgttttttgtttcgttttgttttatccatttgagcactactttaccttctggtataacaaaatattttgaggtcatcttgtacctttcttgtccaaactatagcattaagcacttcttgagaaatctagttccatttagggggaatgatggtagagaccaagatttgggtgctgagtgtgctcattgctactgtggtgtctcccttttggccctttta

SEQ ID NO: 60776 - DNA, 1063 bp, Homo sapiens
tactcaacctgtgtcagcacctcagagatactgctgagttagtggacttggaaaatggctttaggaatttttttaactatctgtgagctgggatcagccaggtttaacagtcactgcattttctcttatggtttgcacagttacccttccatttattgcccttcttttaagaatgagaaaccaaggtttatagacagccaataaacctgtcccaagagagcagctagcaagtgtcagaaccaacattcaaacttggctccatcttcttaaaaaccaatatatgttcattactattgttattattagttgagaacatattgagtgcatactatgttctaggaattgtactaaatatattctttacctgtattagcacacaacaacctatttaggtaagttttcttttttgtctgtataggggcaacaactgaggcatcgagaggtaaattagcctagagtcatacagatagcaagtggtagtgccaggatgcaaaccaggattgaagcccttgtgtgcttttgttatttaatccgtattggctgcaggctctggatctggatctagatttgggagttaccattctagagatggtggctgcattcttgaagagagagtgtatttaaagcaggtgagaggaccaaagattgagccattagtaacatccatagtggaaaaggagggagtgtcaagatttaaaacagtagccagaggacaagaccaattggagaataagagttggcctcgaagagtgctgtgtggtagaaacaagaagtgaaatgcttttggtactggtgagcaaagctgagctctcagggtacccaaaatgtgagagctcacaaagtgagctcagtagaaggacatgcatagtactttcaaatctgtactattttggcctccttgacagcatgcatttaaatcgtttgaataaacaatgtaaagacattgctctggctggcatgtggtaaggtctgcttggagttgaccagggtggattgccacagcagcccagaagcagtgggcaagggcatgcattcttgagttggtggcccagtcagctccacc

SEQ ID NO: 60777 - DNA, 1035 bp, Homo sapiens
ttcctagaggtgagattaatgactcaaagaatacgtatacttcattttgatccttgtagatttcactctgaaaggtgatatcaattcacattgtcttcctcacatgaacagcatcaccaagacaggactttgttactatttttcatttctctaaggttcaacagttttcgtgtttattggccatttgtttgttttgtgaattgctttttcatgccttctgcccattcatctctttgggagtagtttgattttatcactggctagtaataactctttgtatattaaaaaatattaattgtttaactgttacatgttataaacatttttctgcttcttcatttatttcaaccgatcaggctgaagttactgagttagcttttatgtgttcacatttttgtggtgtgcttataaagatgtttcctgtccctttatgctaaagactttcacctacattttcttcaaattcaaagacaaaaactgcatggtgctattttcggtgtttgaggaaacctatttttcactctgggcttattgatcttacgacagatacttttttcctgtctttctcttaagtaaaatgaatgactagattcaagtcatcaatccagaagctaggtctgctgtaagccgtggtcatttgtgatagacagtttggaaagctttataaatgtgttcacttcttttccttttttctttttttctggcttaaaagcctttcagactgcagctgtgcttgctctggtgactatcaagcatagtagtctaagatttccattatataattcatttcctcaactattgagatttaaattttggagtaactgacatttccctccccttcattagcataaatattcattaaaaatttagaatgagtcataaagtccttcaatggggaattggttactaaactatgatgctaaaaaaaaaagaaattatggtacatttatgcaataaaatattatgcttcctttaaaaaccattatagaaatgtgtctgctgacagggaaagatggttttggaatattgacaaat

SEQ ID NO: 60778 - DNA, 1082 bp, Homo sapiens
atctccataactgagagagagaatgctgaggaggcataatagtgaccctttgcctgatgaaaaaaatagtgattaaagccttcaaagaaaaagaaaactgttctaacaagtccctttcctggtagtttttcctagtagtttataattgggatcctattagttcttgaaatatctgctattttcatttctgtttgtttgaagtggaaaaataaattgggacctgtattagtttaagggattttatgtgcttagcattcaaacaaataaatattagaatttatcatttcttagtctcttccttgcataatcccaggtttttctctccctttctccctctttgtttttccctctattttggcccctatggaaaaaaaaaatgagaaattgaacataagcttgataatggacactgatcctagtacatcagtcagaaacactgttagtgtctaggcactcacaggctttgataattcttttatcctgcaggcttactgtggatttctccgtcctggagtttcttcagagaatctttctgcagtggccacaggaaactggggctgtggtgcctttgggggtgatgccaggttaaaaggtaagttgttgtagaaaaggataaaagcattctgcccacacaaaaaaagttagtccttcaaaccagatttctcatgtcctgtcatgagaccacaaaaatctaagagaaaaggaaaaggaatatttaacactattttcttttttcctattatgtttgaaggaattcttatttcatttaccattttccttcagaggtcgcttatcactttgatcccccagacacagtattttgttgagtattgaaagattggcaggaggagaagagcatataatgactgcgaagtttcaaacctgagttttcactttcctccactggagtgatttttatggacagttatttcacagactcattcatccaccaaatttaatagcacctctgccactttctaggcacagtggtaggctctgagatacaaagatggagaagatgtgatgcctgctttggaattcacagtccagtgtatgagagagaggcagtatgagaccgatgc

SEQ ID NO: 60779 - DNA, 1723 bp, Homo sapiens
agagactactataactaggcctcaccttctagactttttgtggttcaaacttaaatcattgagaatatttctgcttttagaatagtctcctacatgcttatgcctgaatcactcttcttttgtgatcataaacttctgctgtgagcaaggtacctgttaaatgcttttctcaatatggcttttctgtttgatatagtttttcaaggaaatttgagggttccccacctgtgagacaaggaaatacctcgagtgtaatagagcctatcaacacatggactaactttgagaaagcacctagttcagggcctggcacatgggaaggcatctgataaatatgtgttcttttattcactgatatattccaaaaaatgtgttattttaacaaggaattagttttttaattctttcactgaaaaaggaaaaagcagtaaatgattttgttaaatgtcattggcaacttaatcagaaactaatccaaacaactttaggccttctagattaaagcatttgtcccttactagttacatttacctattaaaattgacttaagaattttggttatgagcagcaggagtctcacataaactgacagcacaacttggagacaatgtttaatattttatatctcatgttttacaaacttttagagcagaagtctgtgttaaatcactttagagatgacttgcacaattctgcttgtgtgtgtgtgtgtgtgtgtatatatgcatgccagagagaaaggaggaaaagaaaaaaaaaaaacccacatttttctacgcgaaaaagtaaaaccagttttcaccgtcagaattcagtatggatctctgacctctggggacctgtttgctacttttaagcattactcaccagttaataattgaaaagccaatcctacaaagtgctttccaggcctctggaaaaggtctgctccatccaggctccaccggtcttattggacccacatcgtgacctgcaagtagagttggtttttaaagggggggaccagtctccttctatctaactcatactgtgaagcaatgtttaatcctgtgagagatcagctgggtatcattctaaaggagaattattttagggttagaaagatttatgacttcagcttgtaaaagtggcaaatagcactgcaagagaagaaacaaatcacttgtgaaaagttgtatttgccatgttaggtaggattttaggtaggattaagtaatgaatatgttttgtggagctttctgaatctgagattgaacaaggtggagagatacaaatcatccctatttacctttttaaaaattgatctgtttattgatgtttttgttattattcaccaccgtatttggaataggactgttattaaaccaaagcctgaaaacaaaaccagtcagtatttgctgctgatattcctaagaagttcagcatctgagcacttacagtcttttcataaaatatgtgtcactttacttttcgagaatgttcaaaatgtatcatttgtagtgggttttcccttaagtttcccaatatatagaatcagaataacaattaaatacataacccaatcttggattttatacatcaggaaactaagatctgcatacttctttcattttatatattgcattttagaatagcaaaaacaatgtattaatgttataattattttagggatgaagtctaatctcagctactcgagaggccgaggcaggagaatcgcttgaac

SEQ ID NO: 60780 - DNA, 1060 bp, Homo sapiens
ctgcagacactggtttgtttttaatattttaacagagctaaagtcttggcaacctgacccctgagaggattttatttgagcgactacctgttccttatcttttctcccctttccttcctgtcccagggacgactggcagcggcgctgcactgagatcgttgccatcgatgctcttcacttcagacgctacctcgatcagtttgtgcctgagaaaatgagacgcgagctgaacaaggccagtaaccttatttcttagttcatctggcagctgtcatctatttactgccattttattaatgctgaaattaatgctttctggtaattattgcagtgtcagtatgtctgcccacagctctcctgatttaatggctctgtcagcttgtacaagatgtactttccattttgtaattgtttgattcgcagctaaggttgccagataggctgttgcttagttttaaaccccacacatgcatttatctcatcaagtaccttagctgctatgggacattatcaatgtaaaaccatatagaaacaaatgagctctgaaaatttttttctcagacctgcttaatgacattttctctacaaagtatgctatcagggttaaaacagaaaaactgaaaaagccaaatcaaatgttgttctattttaggtaagatttatgatggtatctattattttccgtaatacttagtgccgcctactatattcatttttttcttttttattacagaaatataaaaatgaaccatacctgttgttcaaattttcagtattggcaaccataataaataaactctgttacacaacagagagctgattctgttctctggattttgggctttcccaaaacagcagagattttctttttagttcctcgaattattcactcagcagagattttcttttttttctttttttctttttttttgagatggagtttcgcttttgtggcccaggctggagtgcaatggcatgatcttggctcactgcaacctccgcctcccaggttcaagcgattctcctgcctcagcctcccaagtaactgagattacaagcg

SEQ ID NO: 60781 - DNA, 1025 bp, Homo sapiens
ctcttggctcactgcaacctccgcctcccaggttcaagcagttctcctgcctcagcccccctagtagctgggattaaaggcacacaccaccaagcctggctaatttttacatttttagcagaggtggggtttcaccatgttggccaggctggtcttgaacttctgactttaggtaatccacccgcctctgggattacaggcatgagccactgcgcctggcctctctctttagttcagtgattccttaggatttgctatgtaaacaagcatgatatctacaaatagggacagtttgacttatttttttacattctttatgcctttttgtttattttcttgccttattgcactggctggagagaccttcagtacagtgctaaacagaagttattcttgccatgttatgaaaggtggaatgtttttgccatcaagtgtgaagttaatagtgacagattgtttgtttcaggtactgagcagtacagtgaatacacaggctatgctgagacatatcgttggtcccggagccacgaagatgggagtgaaaggtgagtctgtttctgtcttcagtattccatggctaaaagcaaaggaatttgggcttgaccctcacacactctcattctgtctacttgtatttcagcaagtgaacttaaaaagaaaaaagaaaagaaatcagcattacaggttcattggcattgaaaacactattaccatcttcctgtaccaaagggaagaacagagaagataaaaccaaaagtctaaagcaaagacaaagaggggcagaattctctacagttctttacctctgagctacaatcagaaaccgtggaggttaaattccatgtttaaatctgagtagaataggttctaattagagcttaaagcctttgaccaacttattaagttatctttaatttttctgtgaaattaggtggaggaaacctatgttgcgacagttgacctaatgccacaaaccagttgatggcagaacctgcggtgtgctttgctgctttgtctcctatatc

SEQ ID NO: 60782 - DNA, 1016 bp, Homo sapiens
ggaattacagaacaaaaaaaactggcataaatctattgttgagcaaccagcactttggctattggtctcatactattgtagggaagctctgcaggtttggaatatggctgtcttcatcatttacgtacatcaaataatactttaaaagattgttattccggctgggtgcagtggctcacgcctgtaatcccagcactttgggaggctgaggcgggcggatcatgaggtcaggagattgagaccatcctggctaacgtggtgaaaccccatctctactaaacatacaaaaaaaaattagctgggcctggtggcaggtgcctgtagtcccagctacttgggaggctgaggcaggagaatggcgtgaacccaggaggcggagcttgcagtgagccgagatcacaccactgtgctccagcctgggcaacagagcgagactgtctcaaaaaaaaaaaaaaaaaaattttttttttagctgttaaggtagatttggattgaacactgagaacaaaatatcccatcagtttttaagatgaatttacattcttgaaataaaaaacttggtaaaatgcatttaaacttaaagctaacttgtttcatttgcttaatttctctagaaagtagtaagaactgggctgggcgaggtggctcacccctgtaatcccagcactttgggaggccgaggcagggggcatcacaaggtcaggagattgagaccatcctggctaacacggtgaaaccccatctctactaaaaatacaaaaaattagccaggcatggtggtgtgtgcccgtagtcccagctactcaggaggctgaggtgggagaatcttttgaacgtgggaggcagaggttacagtgagccgggattgtgccactgcactccagcctgagtgacagagtgagactccgtctcaaaaaaaagaaaaaaagaagaagaagaaagtagccagtacattgtcatcctccattaatgttaatgtaaataaaggatgtcattttccttgggaataaaacagg

SEQ ID NO: 60783 - DNA, 1049 bp, Homo sapiens
ctgaattatcttcctaaaacataggtccaggtgttacttgaatctttcccagaaccttcagagggaaattgagtaaaaattccctagacctcagaccacctcatcaccaactgtaagcctccacctactctacactgcaggcaagcacaatgaatctgtttaccattcccctcatatagtgatttacatttgttttttttttttgccctgtgtccttgtgcagctatgccctcagcctgcatgtcagctgccacatccccttgtaaagctttcctatcttcctcccatgctccaattttagttaattgtattattagaaagtatcaaatacatagtaacaagctcttcaataatcatcttctcattctgcttatgctcattctgactgccatctaaattacaaatgccgtgaggccaggaaccatacataccttattcatctttgtatccagtgattcccagcacaatactcagtaaatatttgttgaattggacagtttaagccatgaatcacccagtgcccatagacctcatatgtagtaggtagctaattctaatcaacagactggtttcaccaaaattattttcctatttaagctaaagagttactctggttttttagcattggttttagtactccagaacacaaatccaaatatatgattctctctggtagctcaattgaagaactcctcagtggtatgttttagtattttctaagttctcctgtggtaaaagaagactgcttcgccttctattaatttctgtcttttgacatatatttttacatatcaaacgattcatactattgttttactattttgtaaaataggcttcagattgtcatttagtatcagttgctttagagaacactgaagttttaagaaatcgtatattttaaaatagtttgaaagaatataagcctcatggtatttagtaaatcctattttacttgtgtgtatgactatgtatatacacaagttgtgtgtgtgtgtgtgtgtgtgtgtgtgtgtgtgtgtgtgatctaactcctcagatagtctcactaa

SEQ ID NO: 60784 - DNA, 1028 bp, Homo sapiens
taataaggcaaataatgttaacaaatacttttgatacaatggaatttgttgttaatataacataagtcaatacctcagtggccatggttgaaagggaaagaaaataattatgccttctaaattacaggtactaagtttatctgttaaccttattaatagaaaaataccattgttcagaatttctgtcgcaggtattttcatcaagacacacacacacacacacacacacacggttatgaaacagtgaaaatagaaaatggaagccagaagagaatcatatatgatttattgccaaattttttctacatttttcctcagattgccaactctagccataacaaaatttcatagatcttaatttttttaatattttgtaatgtttttcaactgttttaaagaagaaaaactttcatattatttagaggaaaatcaggtttcaaactatgttatccaattttaatttaaatatgtatatttacatgtttgaataaaggaggatcaataccaagaatgttaacagtaggcatctgtttctgactttcgagatttggggtggtttcggtttttgaatagttacctatattttcacttttgtccgcagtgaacaacttgtcattaaaataataaataagggaatgtctttttatattgtagatgtgaaaaacccttgacacgattgcatgtcacttacgaaggtaccatagaagaaaatggccaaggcatgctacaggtaggtgaatcttagtagtgtctgtgtatggttaggactttttcttgtcaagcttctgacagcaaaagaaatttgaaaaactgtttatttgtctcctaaactgatttaatgcaaagaagcatgatagcagaatgaagaaaaacaccaaacagatcactttgacagccttggtaatgttgtgatttgccagtgtatactctctgtttcttatatgtgcttctctaaaaagcctttgacagaaaatcccaagatctggacagcatcagcctcttggttcagacattgatagtaggttgac

SEQ ID NO: 60785 - DNA, 1204 bp, Homo sapiens
atggcatgttagatctgaaaggaaccccggccgcctgctaaaactcttgatcagctctgtaatacctgcaacagacagaagactggatagcttcagtgatggcagatccgctgtttcgtatcagtttgttccattggtggctgcttgtgttatcatctcatgctttcattcactaaaaatgttttctacattcattctccaccattcctggttcttccttctggagctacataaataaatctgaatttctagttttctttaacatttgaccctccttcatgtatcttaatggcttcttaacctacttccctctctaacagtgcatacaagttcatactaaactgattcgtttcttctatttcacatgtaatatggattctaaaccctttatctctgctcttaacatactcccattcattgggccctcttaaaatatagtgcctggaattaaaagtaccattctgctgtgtcatctctatggtgcagaggattgtttttcttcactcttctattaatctctaataggaatgcatatgttttgttcctgttactttggtgtagattttatagatcaatctgagggcttatttttaagtcatccaggatctctactttgcatctgatattcatttggcactaatgtgaaagaacacccatttgtataccaccatgtgggagagaagggacaggtcaaaatgcagagactggcaaggctgctgtgtcaatgagacacagtaactttgcctctaagtgagacgaagattgtccccttaattttgataggcagaatttgacttatttttatttcattgatctcttttttgttttagttgctttataagtgagttggagaatataattaaaaccagtctcccagactccacagaaccagaaacatgcattcacttaaagagggagaatgaagaaaagataaggattgttggtgttcccaagcgtaaggggctaaatgggtccaggaacttagaggctttcctgaattccatgtttgtggcatgttatagttaaccctttgattatcagcaaatactttagccaggcttaatcacagagagccagaatcatctacgtctctgactcctggggcgggggtgtagaggatgacctactgggaagttagaaaatgcttcaaaacaaaaccaagaaaaggtttctagcaatttcgtgattttattaagagctatac

SEQ ID NO: 60786 - DNA, 1037 bp, Homo sapiens
gatgaagatcttgagactgaagtattttaaaaagccttctgaattaaattactttctatatagttttagataaagtgtcttatagatgaggtttttgaaaatttatgacctgtatatagtatatattgtgattttatgatgggaagtatttgattaatcaaagtatcctattctgagatgaaagttgccttgttacgaaaaaatgctaacagacgtgctctcaaggcatttttgttaatctaagaaaccatgttcttctgccttttcttgctttgccagcagtgtttatgaatttcttttagcatctcttagtatatattaaggacatttgatgttcttctctgctaagttaccgaatgacaagagagatgttttctattatattcatggaattgcttcactagtgtttgagttgtttgaccacttacttgtgagttttaaatatgttatccatttatcttaaagttaggtatctaaaagacgtaagacccatcttaacaaaaaaatttgttttctactgcaactgctccatatggtttttgagtgtttcctgcttttgactgagaacaaggaaatgtggaattgtgcacaggaatgaaatgatggccaggctttcactgggttatacactgtcatcactaatagttcctgacatctctctctttccttaagagcttttttgtattcaagaaaacagaaatggcatggcctttttagtttgttctttgatttgaatcagacaaattacttctggccagctgatttattagtttcttttgctactagctttaaaaaataaataaataaatctgactagaaaaggatctcatcctctaaaattattgactacattaatagtacttcatttagatcctcccagatttattgctccttgaaaaatatgtcatctttgttctgtaaactcttagaaccagtaatttctcctctggctacgactgctactaacaagtagagtgattgcccactatttaagcctgagacttagctgtactaactccagaggatgtgcaaatgat

SEQ ID NO: 60787 - DNA, 2734 bp, Homo sapiens
tgagccctgatatcttgttatacctgcctgtgtccctgcccccattcccctccactctcatttcctcacaaacactcagataaggattttttttgataccgtttttgttacttatcaaactacgtagtaacattatgaattataaatgtttttagccattgagaaagtagctgtgcactgactgactgaccccagttgactgggagggctggatggtgccttctctgtggtggaagataggttggagaaatgtggttggtagtaaatgatgtctgatttgagcagctttgaagaagtctggttctagttggtttcagttctttccagatgccatttgaatctaaaccaattttccagttcttatcattacagaattgtcttctggaagaattatttctttgtattacttggtagcaatatggatgtagttttgtgaatcattaaggcattttaacttatcttccattctcttttattttttatctcttagattgtttgagggacgttcatcaaggaaaccggagaaacttaaaacgctcttctgctactttagaagagtcacagagaaaagtaaattcctttcattcttactgtaatttttcttgctgatgggaacagttcaagtcaagtgacatgtgaggaacattttgtgtttaacgtaaaccttcctgtcccaaccacattgaaacactagtaatgatgcgacaatataacctagttttatgcttatgttgtgtataagcataaacgtgtgctaaatgtaggggggcggggtttacatactctgaaatcggacccatattctctgaaatctgtaatatacatcaaaagattttcatgaataaaaaccagagaaagtatattgaccaggaaataaattttggatgctctttatttaaagaagtattcactagtttatttgcataagtcaactaacgcattgcttttctacccattcctctcttttgtgcccccctaagccctttgtggagttcttataaaactgttttgtactgagttttatatctccatcttcctctattgaaccttaacattcttgcttccccaaaaactgatagcagctaagacagtaatagtaaatgtccaacaaatactggtaatgaccagctgataatagattggtattgccactcttatctcagaagctgaatgaccatggtcaagtttcttgacacctctaagcttcagttttatcacctatgaaataatataataacggccattaccttacagggtagttatagatattaaacaagaagatacatgcttaataaatgtaagctattatcaatgggtagcctttcctacaagtggatgtaaaccagaacacctcaaaagtttctttgtgctaagtaggtaaggtcaacctggtcaagtgaaatggctttttttcagttctgggtcataggattgtcttaaaatatgtctttgaatcattttaaggtcatttttctcatatccttcttttactcttgcattacagtgtacttggcatcttcccccttgaatgtattgctattggacattgttaaatttttagaatgaaatcaattatcaggattttgatatttaagggaaaattacatgcttctctgatatggaattatctcatagcttatcgaatttcagttttgtgccctgtactgaatgaaatattacaatgcagaatcatttggacctatgagacacaaaatcaaattagaatttgtaatgacttgttaaaaagatgactacgtaaggccaggcacggtggctcacgcctgtaatcccagcactttgggaggccaaggtgggtggatcacgaggtcaggagttccagaccagcgtggccaagatggtgaaaccccatttctactaaaaaatacaaaaattagccaggcgcggtggcgggagagtgtaatgccagctactcgggaggttgaggcacaagaatcacttgaacccaggaggtggaggttgcagtgagctgagattgtgccactgcactctagcctgggcgacagagcaagactctgtctaaaaaaataaataaatgactgctttttttggctattctaggtctaattagaattattactattggttttttttgttttgtttttacagtactttgagttgccattttaagtagaattattataacgaagtagtacagagtttacttttttgtcctgggagtcaaatcatgtatgtcttctctaaaaactaacttggctttctaaattttaggatttcagatactttgaggaaaaagcttaaagtttgttttttcagctggaaatgtatatgccattataagtattgggaatttgaagaaataaattataactagacattttattttctgactttttcactgtacatgttaattaagttctttgtagaaatacagtacaacattgctcttggtcttcagtgtgtaaagctaatggtttgaagaggaaatactaaagagaataaaagaggttgcagtataatgagtggttgtgtagaagttctggagcctactcaatagacttcagaagcttatttaaggtaccgtatttcatcgaatctgagatgtcatagatgactttttaaaaatgctcttatattatatacctctaagaaggaaaaaacactcaggacagggagtttagtaggagacatgacccacaaggctggtacacctaaggataaatgagaaattaacttgaccttccaggaaagggac

SEQ ID NO: 60788 - DNA, 1459 bp, Homo sapiens
cagccaagtctgagaattgtcacaaggattttaaacctgcttcatctcctctgactttatctccacttcttacccccgacacccaccacgacacttcccccacttccccctgctctatcaggaagatgggaaagtgtatttggttacacagtgatttgaagttaggattggagcagtgaataaacagagtacattgagattctgcttgatttgtacctttaagatttgtacctacaaaataaacagtggtgttcatttgtagtgggtgataataacagccataaaatcttccaggaaagtctgtctcgccaggataataaatctgcagtctcacgaggctcctaaagttaataatttgtcatcatggttgtgaagtatgtgaccttttatgtgattttatacagatgaccgcatatggaagctagggacacttttcctatgttttagagaattatttcttaagagcaacagccattttctcctcactatgcaatagttctattgaagaagaacttttatcctttaattgaattgtatagtacatcaattcatctctaggaaaaggtggtggctacttttgtattcatattgctttcctctagtgcatagtgagcctagaaagagattttgcagtggagccttaggtattcatttagtaaatcatatttattgatataggatgtttaattaaactgccatgtggcttcttcattttgacttaaataaactctgttctagaagaagccatgctgaaacctgcaccctcaaagagcctttctttcagctggcaactggattataagagtatgtgtattaaatattttagaaagataggttctttaaataaaaattatcacacaggctgtcttaaactatttttaaaaagagatctgattttagatttggttaaaatactagcatacattagtattctttttaggaaataaatattcatataaattgtttttccagaaattgaccctgaatacagatttcagatcattgaaaacggaaccatttgaaatgtgcatttcctttccttttcctaatttatttcagtcgctcaataggattttctcatggaattaacttttccctctcagcgtagttacataagcttgctgttgtaatcatgaaaaataattacccatttcagcacttattaacatggactttacttgaagggtctctggttttaaagtcagagcacatgactagaggcagatgaagagtacctcatcattcatagccactgagtctctataatttttaaatgcctttggaaagctagatcttatgctcaaaagcatgcttttgtgttagaaatcttttagtgagctacttactcaggtcataatgcttttaaagccctgcttttctttcctcagaataaactgaattgtatgttaccaataacaatgccacatcatttcaaagaaaacggaattaagtaatccaa

SEQ ID NO: 60789 - DNA, 1071 bp, Homo sapiens
acaattctctccaatatcagagtgtcagccccgaagaccatattttttagccttttaaaattggagaatgttttactctcttaagatgagaagaattctagaattcagctggttagttcctaatgtaaattttaattaaacttaaaaactagacatttcagtgcatttattgtgtgtttagcagatgaaagtatagcagatgacttgaatataagctgctcttagactgtcataattcttgggttatatttttatgaccttcaaacattaaaatattgatgataatttgttattatatatggttaccctctactatcaacactaagaaaggggcagcaaagaatgaaaaataatgttatctaagaaaatttctttaaaatcctagtgttagcaaacaggatagttttttttttttatatataatatgctccttggttacataaatattagttgcaaggggcatatttttaatctatttttcaagtttgtacagtaggtaagtttgtttttagatactggtatttagtcaatgtttagttcaaatgtacaatgagcaactgcaatattccccacagtgtattaagtgccataaggttacagagaaaggagaagccagtttctgagttcttactgttatgtagtattgtctcattttcaaacctcacgtcacagatgcccttctcttttccacatggcttttattcctcctccagtactcagttcacgtatcagtttttctggtgtctcagattctgctaggataggtttgctactctaggttcctatgctagcctgtgtgtacctctggagaggtgcacagcaccatgacgttttattaaagaaagatataatttaataaaggaaactttcctcaaggaaataacttttcttgctgttgttgttttgagactgggtctcattatgttgcccaggctggtctcaaattcctgggctcaagagatcctcccacctcagtctctaaagtaactaggactacaggtacatgtcaccatgcccagcgcaacttttgaattaagtacaaaagggtgaataagagttttgccaaggaga

SEQ ID NO: 60790 - DNA, 1049 bp, Homo sapiens
ggcaggggaaatatattttaaaacatatcttcttgtttctgttggaagttatttgcttgatcatattccatgtttgttctttttcctttctctccttacttagtaaattctctccctacctcctaggtatgcctgtctgttacttcccctgtgaagccttccctgcctcccaggcaaggttcatccctcttgaagcactcaaatcattgttttgtaattcttgtcattatatatctcttgccactggattatagtctccttaaagggagatcctctttgtgtccctggtttgcatggtgcttaattatatgctttttgaattcaatatgtagttcataatcaataataggtagtaggtagcctttgggtgtgggccatttaatcctcttcccctcgtgcatatgagagtttccatattttatttaatgagaaatttttgttcaaaggtatctaactttgtaagctataacaagtcccttggaaccaaaatcagacccctgagtcctcagctttttgtcctggcttctcccagtgactttcttctccattagcatatcaacggggagagcatggaaattctgtgctttgccccctattgaaaagtcaatctctgctgtgaaagttaagatttttatttgagatcaaaatacgtcttgtggcaagttaaattgtatatgttggtgtttaataatttatcacattgaagtactctaggccaaatctaaagggtaaattttagatttatcaaaataaaattaaaggaaacaaatttggtcaggaactttttgaaatatcttggttcacagtaaccagcctcttattttgttgagccgattgcttgacagtaagatttacatctcctgatttctccaaataatgagtttttaggcatttctcctcaccaagagaggagaaatcattaactctatttaaaattatactatttgtttatttgggagacaggaaatgtttgtgtttgaagtccattaatcctgaaatctttactattaatttttaaaatcatttttctgaataacttggtaaatggt

SEQ ID NO: 60791 - DNA, 1407 bp, Homo sapiens
tctgatttggttttaattgacctcaatgtaggatgatcaggtaacctccttggcctcagttttctctgtaatagtgacaagctcagaccagattataactgaggcctcttctagttaaaatgtgatttcaagtagataaagtatttacttcagtcctgactgtatatgtagtatctctaaattaagagtgttgtcatttccagtacttttaaagaaataccctgatgtttagaaagacattagattaaaaggtgttatagagaggggaaattttataaaagacaaaaatggaccatgcatggcatctttgttgtgcttcaaatttttatatgggaattgtggttttcacttcccaagggtgtctggaaaagagaaattctaagaccatcagaaacctcattgtttattacccaacagattagatttgacccatagagtatgctctgaagtcattaatgtggcttttatggagatttcttcaattgtagaccattgaaactagatgggtccttgggggcttctcagaaagtccttggtgtctagcagtttctagttgatacaaccaagggcagaatgtactgttttccatttgcaagtgtttttactttattgtgaatgttgtgtgagggatatttgatatttgggatacttacattttttttcagagggcattaaggtgaattgccttaatgccaaatatacatttggaaatgaatttggaagtttatttgtatacacctgttgatgcatttgtacatgtgtttggtgatgctgatagggtgccactttatggggttccatgaaaagcagatatgtaatttaatttcataacaaacatattcattagttattatatttactggttattgttattcacataacttattttattggttttcaggtacttgaagaagcagaagctcaacatttatatcagtccatcttgcctgatatggtgaaaattgcactctgtctgccaaatatttgcacccaggttagtggatgtagcttcctcagtagcttccctgagactgccaattgaatttcccttaaactcgaatggccagggtcacacagagagagagagagagacagagagacagagagagagagagagagagagagaggaagagaagagaagaaatgggaaacagtttttgccaaagagtatagtaattttgctgtattaaggaaaaggttagagggtagagagtactacaaaaggacattaaaaatgcagcattccattcctcagcttctgtttacactgttgaagcttgtttactttgacttttttctctctttgtttaaataacctctaacttaaaaaagtattcattatttcaaaacatactagtggatttggaatagcgtattttcaaaatggcttaatacgacccactcctt

SEQ ID NO: 60792 - DNA, 1050 bp, Homo sapiens
gcacagtcttatttaggtccatgaactaaataagttagctgctaattggtgaaatatgccttcttaaatatgaccatgttaacctggctatttcctgaaaaccggttggagtttattaaaaatggagaccatttttattgaagccataattgtcatgggcgatacacatgagagatcaccctgtggctggcctgtcagactttcatgagccttcagaaattaaggggaatgagtgagtttgttttcttgtaagctgtcacattctgctcttcaaagtgtcagcctgagttgtgcacagataaatgttagaaattttcaccttctccagttgatttttttacccttacgtaatttagtagtatgattgtttttcctctaacatttaatgtttttgtacttttaatttttgaaatgtgagcttgtgctttagacttgggaaaacttagaggtagttccagtatggaaagcttagcctatagacagtttaatcaacttacacaaaagaaaactatgatatttttgctgagtaatagagattctgaaaggcaatggagaggaggaggatgagctttgtaaaatcagctaatccagatagaaagtgtcagttaatttaacatatttttattgacggttttacatatgaacaccactgttgtaggaatggtgaatcaatcataaatcttgtcttaaaggagcttctagtaagggctagaatgcacgttcataaataacaacagaaagcagaaagtcttaagtgtcttgtgaaaaaaagttcaaataaattacaagagggagaattactttttagctggagagtaaatttggatagacttgaagcaaactattgtttgagcaagatcaaaaggttggataagttttggagttaagaaggaaagatattccaggatcgtatctgtagcagcacaaacagatgctatagaaaaatgaatttctgagtttctagtatgtaggctgcacagaaggtagagtttgtgtgtgtgtgtatgttatatatatgtgctgaatgagactagataagaatctagggta

SEQ ID NO: 60793 - DNA, 1069 bp, Homo sapiens
atcaaatgaaagcagccttaaatgtttcataagactacagctaatgtctttatctctctagctttcgaacctctgatttggagttcagtggaaatttaacctttttggacctcttcccttggtgactcacagtctctggaatcataaggtctgcattactttacagctcaatttaattcatgagaactataggagccaaaagggaactaatcagaatcactaaaatattgaaacagatcaattgtgacttttatatttgtatggaatatgtggaatttctctccctggtttggttaatgagtgcttttgaattgggacatatgttgatggtctcatatttatgatttatgatttctaaatagtgcatatcccaaaggacagattactccaattggaactaggcactttgcttttataaacttgatgagttaccatggaatatcagtcttagttgagccctctatgcactagatcactgatgaagttagagttgttattttgtgtttgcaaaacactatctggattgtatttatttatgtggtggacaaagaggttagaagttatagatactgaaaagtgaaaattcattcagtagactttctcttatattctaataatgaaattaagctagtacttagtttgtcctataactctaacccttcatttgggtcaaatagcagtagaagttattccttttaaatgttgctgtggtgttgatttcattatccaaaaatctactgttagaggagtgaagataattctgtgttttaatcttgcccatgatttatatctctatcagctagctctgaagtgttttgggttttgttttgttttgtttgtattttattaacacagttaaacatgatgccttgatttataatttctgttaatttgcatttattcttcttatgttcctactcataaaaataaattctatagtccttttgagtatgctttgaacacttatctacatgtaacatttcatatttaaccctggaaggactattgtagtatttttatctgaaggtaaaaataatgagtaaataaaaacagaacgttagatctgttt

SEQ ID NO: 60794 - DNA, 1067 bp, Homo sapiens
ctcagaaagccaggatgtccacagtataccacatatgcatgaatgcattgatgctcaagtgatgcataaacatacaactattgtgttttacgttattgaatcatagctgatttgtgctgtgatttttgcctaataatttcaacatatattttaactttttattatataataaaggcataaatcaaaacttaatttcttccagccattactttgtgtatgtgaaataactttttgtaatctattttaatacaagtttatgttcttttttctgagtttctactgatgctctgtcaatacattatcatttttaaagttttccataatcacaagttcaaaaactgttattttagctaaacacaggtataataatacatgcctcaattttggagacaatgaattatgttgtacctgtttttaaaattttaaatggcctttctctttctgccaacttggagcctgtggaggcctgctgggaacaggaatactaaaaggaagtatgtctggaaggctgtggtccaaggccatttttgctgagcataagtggggtctccagaaccaaagacagcacacagctctttttaaaatagaaggtgcttatgctcaaaatgaaacagaattctgttcgggcataagatgtacttatatatacaaaacaaagaacaacaaagtgactcctggtggcaaaccaaacaaaaccagagtaatctagggaaaggtaacttggtcccagggaaatagtggcatggttcatgccaaattctgaagcaatcttcctgctaaggccactggacacagaatctgtgtgacgctgtacccctcaagcatttaaattaatgaaaagtaaataaataaaagtggatttgtgctcttggaaaaaaaaaaagtaaaaaaaaatttaaatgacagaaacagttctgaagaaaaagacagatataataacatgatcaacttaatttgcatcattcaaaactcaatatgatgtcccatttaccttttaaattaagtagcacataaataaaaatgcaagttcaatactaatagaattacacactcttatttacagtgat

SEQ ID NO: 60795 - DNA, 1035 bp, Homo sapiens
aacttcttaagaaaatggattaattgttgaaaggaagcctaaggattttagtgactatttcatcttcctttccatgttgagttttatgtctggaattgaaaagatagaaatgtataagcctttcgtttcatccttccattggtttttccatgaaggctgtcataaataacaaaatgaagtggttttggttttgcttttgttttttgcatctgtggctggtaaaggtagagagtgagagataggagtacaggaaggagaggacatttaaaagtaaaaaatgaaaaacctagactttagaatgattttgttgctgtgatgaggctagtaatatgtttctctttgtaaaccacaatttaaatatagatatatagcataaagtctttacttcaaatcatacatacaaaatagattattgcaacttagaaattgtgcatcttttgtcttcgctgtagttattaaaatatcgactacgcattctcctatcatctcttgtcctatgacttgtcagagaaagactgtttaaagcctctatcactgtaaataagagtgtgtaattctattagtattgaacttgcatttttatttatgtgctacttaatttaaaaggtaaatgggacatcatattgagttttgaatgatgcaaattaagttgatcatgttattatatctgtctttttcttcagaactgtttctgtcatttaaatttttttttactttttttttttccaagagcacaaatccacttttatttatttacttttcattaatttaaatgcttgaggggtacagcgtcacacagattctgtgtccagtggccttagcaggaagattgcttcagaatttggcatgaaccatgccactatttccctgggaccaagttacctttccctagattactctggttttgtttggtttgccaccaggagtcactttgttgttctttgttttgtatatataagtacatcttatgcccgaacagaattctgtttcattttgagcataagcaccttctattttaaaaagagctgtgtgctg

SEQ ID NO: 60796 - DNA, 1320 bp, Homo sapiens
taatttatgtgaactgctggaggaagataataatttatatatagtataaaaatactttatagtaaaggaaaaaagacagtttttaaatactttttttctaatctcctcatccccatgaaatttttattttttattttttacaaaaaaatttatgcctcaaccctattaactgacccatgaaattttcatactacaaatctgctgtgtatgtctgtgtatatataatctgacgctttcaaggaccaccaacaattgtgataactaagtttattttttacccctcaagatccagtttttgtctatttggagtatatcaccttatttagaatgcatgctttagggtgtaattgtgttttttcacctattacttgacctttctaatctcatttttttaagtgagtaataaattagtattcattctgtttgtctgtagctactgatgtccatatcagtagcagggggaggtagtaggaagcttgtctaacattatgaaatgtactggaggtaattcataagagacaggctcttcataggtcattcacttggccataccatgacgtttttttgtttctgcattttccacaggatgctattctgaaatacaatgtggcatattctaagaaatgggactttacagctttgatcgatttctgggataaggtaaaagtatccttatttctttatgaaaatattattgacaactcaataagaaggtttgagaagaatacccataattctgccacactaagataattatcttttagttttataaatttgctgttattttatatgtatgttttaggtaaatacaattaggagttaatattgaattttgttttcatctcttagaatacacattttctgttatattttcataccattatcagcattatcaaggaatgtataatagtccatgattagattttgagaatataatggttcttatattctcaaacatacaggttgcatccagttttaccttcagttacattgtggcaacatcattatatatgtatatatattttcccatatttgatattgtttctttaggtgatttccagaaattagatgactaagtcaaagggcacaaaacatttgtttaaaaatcttttaaaaacttttgtcataaaatcatttttccacagattaattgtagcaatttactatgctgccagtagtggataagaatatcactttcatagtaccattagcagagagagtcttttcatttgtctattggccatttctatatcttctttggagaaatacctattcaaattttttgtctttattattgaattttaggcattctttgtatat

SEQ ID NO: 60797 - DNA, 1162 bp, Homo sapiens
gaatggtgttttgataagaacgtatatgaaaatcaggatgacacttagaatcagagtataggcgttatagcattagaagcctgggagttctttagaaagggttttatgggggctagatgtgtctagcaacagctggagttagggagaaggataggaaacacttagtaaaagctgaggcaaggaaggattcctaggggatatggagctagaatatatactatatctggtgacttggacctggttgaatggaggtgaggaatgggaagaactgaagggttctttggtgatttcttgcctgggagctggtctctattttatagcatttgctttggttacttaggattattttatagaagatacattttgtttttatgcactgacaattttgtttaccctcaatttcaggtagatcttttgcgagcaggagaagttcctaaaccttttccaacacattataaagatttgtgggataacaagcatgttaaaatgccttgttcagaacaaaatttgtacccagtggaagatgaggtaagaacaaaaccgagattcttttagtctctgaaaaatggtttggtacttgcttgtttgacctttgattctgtgatgcaaaacaacttagaatagcttcctcatatgtttttcttttttccaaaagaatggtgagcgaactgcggggagccggtgggagctcattcagactgcacttctcaacaaatttacacgaccccaaaacttgaaggtatgttgtttttaccatgcttgcctgtttatgggccctgtgtctcctctttcaaagactttttggtcttaatagactcaggtagcaacattgtttagatgcaaaatgcttgcttcctggcactaaggaaggccccttagagacattctactaggaaatgagaagaactgagagttgcaaatgccttgcctggagccacacagaataatttggagaaccaggaataatacctctgtttcttgattccccatccaatttccttcagtgcaagcttctctttcttttttttgttttaaaattatcatgtttctgaaatatctttaaaagtaaatcaggaaagaattatgacttcagcaatatttgcccaaagggaagctgagtttcccaatgattaaagtatatgttaagcattctggtttttat

SEQ ID NO: 60798 - DNA, 2963 bp, Homo sapiens
tctcgatctcctgacctcgtgatctgcctgcctcgacctcccaaagtgctgggattacaggtgtgagccactgcgcccggccagtctgtgtctttaagatacttacagtgtagcagtggccacagacacaaaaacacataattactgcctggtgtgatagatgcaatagtaaaggtatgagcaaggcacagtggtggttagtgtgtagaagaaacaaatgttcaactttacctttggtccctaaaggaagactgcacagagaggtgagtgacatttatgacttgaaggaaaggcgggtgtttgccagacacacagctgcagggagggcattagggatcacatacaaagacatggagtcatggaagacatgctgtgtgctcagctgaccacagggagtttaattactgctgtgacactggaggtatgattggataagtgacttgtttgtattataagttgtttttagttccttctgttctcttgtagtttggatagtaaagaaaacaacaatacaataatagaatccatgatgagttctgtacaagaagataacttttaccaacataatgtagaaaaattagaaaatgtttctcagctaagtcttgataagtcactcactgaaaaaagtacacagtatttgaaccagcatcagactgcagcaatgtgtaagtggcaaaatgaagggaaacacacggagcagcttttggaaagtgaacctcaaacagtaaccctggtaccagagcagtttagtaatgctaacattgatcggtcacctcaaaatgatgatcacagtgacacagatagtgaagagaatagagacaatcaacagtttctcacaactgtaaagcttgcaaatgcaaagcagactacggaagatgaacacgccagagaagccaaaagccaccagaagtgcagcaagtcttgccatcctggggaagactgtgcaagttgtcagcaagatgagatagacgtggtgccaaagagtccattgtcagatgttggctctgaggatgttggtactgggtcaaaaaatgacaacaaattgattagacaagaaagttgcctaggaaattctcctccatttgagaaggaaagtgaacccgaatcaccgatggatgtggataattctaaaaatagttgtcaagactcagaagcagatgaggagacaagtccaggttttgatgaacaagaagatggtagttcctcccaaacagcaaataaaccttcaaggttccaagcaagagacgctgacattgaattcaggaaacggtactctactaagggcggtgaagttagattacatttccaatttgaaggaggagagagtcacactggaatgaatgatttaaatgctaaactacctggaaatatttctagcctgaatgtagaatgcagaaattctaagcaacatggaaaaaaggattctaaaatcacagatcatttcatgagactgcccaaagcagaggacagaaggtaattttctgtcaggagtatctctccaatagcataatatgctttatagttttgtaagggagtttaacgaagctatgatttctagtaaagcaaagaaatggttttgtttcttgttaactacttatgctaaatttaaacctaggctccaaagtttaaactctaaaaaggctagaaacagaaaacaagaaataaaataaatattagaaatcagatttttagtttcatgagtttccttttggtatttatgggaattactagaacatgaaaatactaggttgatagtagctactgtttcttcagccagacattcttctagaccattgtatattacacttttttttttttaacactttgtttaatgccgtgacaggcagacagatggtattatactcactaaatgagataactgagatttgggtaagagaattcactggaatcatgtaccttctgagtggtaatgctgggatttaaatccaggtgtgtcctattacaaagcttatattttgccgttaccccatatggaatcttaaatcccatccatgatttctgtgatttgagtttcctgagatagtgcaatcagcatgcaatagtgagttcacttcattgaaaattactgtgtagatgatactgtgaaccatgactcatttctgttttgagaaggtgatttacatgtgtttggaactttcttccacagactgttgaaaataagctcttgagttttataagctttataggtttttcttttgattgtaaatataaaacataacgaagtgagtgaccaagtatggcatactttaaacaataacgtctgggtaagttttgtgcttgtgtatctaagggaattaaaacagtaaataatttgtgactaaatacatttgtcttgaccttagaaaagaacaatgggaaaccaaacatcaaagaacagaaaggaagatccctaaatacgttccgcctcacctttctccagataagaagtggcttggaactcccattgaggagatgagaagaatgcctcagtgtgggatccggctgcctctcttgagaccatctgccaatcacacagtaactgtttgggtaggtagcacctcttatctatgatgagagaagactggaagtccttatttattgtgatatttattaagtgagaaacagaccaaggcttagaaagttcttctgttttctgcatatataaaatactgagaattctacagaatggagcaatataatgataacttacttagtatagaacttaacaaattagcaatcattagcaatcattatcagctgatggtgaagataatttttttttttccagtatttttaagaaacctcattggattctttttttttctttttactcagttgatagtattgtgtactgactgcagaatcctgcattcgtccctaaatttcaaaattacgtatggtttagtgtccttaaatcattatccagttgtgccttttttttgtttttgttttttttttttttt

SEQ ID NO: 60799 - DNA, 1034 bp, Homo sapiens
taatggatgttctgatagatgaaagacagattgttttacctaactgaatttatggaatcgaaaatagtcctccagaagatgagatgcttattctgaggactgtagaatgagtaggagttagatgaagaggaagtaagaagtgtttcaggagtgcaatggaggccgggcgcggtggttttgcctgtaatccctgcgctttggaaggccggggcgggtggatcacctgaggtcaggagctcaagaccagccttaccaatatggtgaaaccccgtctctgctaaaaacacaaaaaattagcctagcgtggtggcgggcaactgtaatcccagctactccggaggctgaggcaggtgaggcaggagaatcactggcatccgggaggcggaggttgcagtgagccgagagggcaccattgcactccagcctgggcaacaagagcgaaactccgcctcaaacaaaacaaaacaaaacaaaacaaaaacaggagtgcaattgatatatagagtgaacgcaagagagtgtgagagatgaggctgcagggtggtacagaaaagtcagatcaaattggatatgtagacattgctaaggattttgaactctaagggcattgataagctactcaagggtttttagtaggggagtgacttgattagacttatttatttgttgaaaagtctgtgtggctggtgtgtggaaaataaagaatggattgaaaaggaactcaagtggagcatcaagactcagttaaggagttaatctaggttggaaataattgtagcttaggcctggatgctggcaatagggaaggggatggattcatgaaagaatgggatacttgagaagaaatatttctgtgctggagaagtagattggggagttcatggcataaacattataatggatgctatgggcatagataacataaacatgtagagaaagtaaaggtgacctagggcagaagccttaggaacaccaaagtttaagagtagactgaagagaagcggctgtagaggtgggaggaaagcctggctcgt

SEQ ID NO: 60800 - DNA, 1035 bp, Homo sapiens
tacagtacaaatgcttgggaggcaagtatccaggaaaatagctagtgcaaatgtcctgaaacaaaacaaatttggcaggtttaaggaacagctcttaggccagtctgtcttcgtagttacaagggagttggatccattgaagtttgtgaaatcagagaggtagggaatgacagctaatgtaggattttgtaagttatggtaaggagtttcgattttcttaagacaaatcactgtagttgctatgtagacagtgaattgaaggggtaagagaaagcaaggagttaggaaattgttgctgtgagatatgatggttggactaggatggtagcaatagagaagataagtaacacaattcaaaatagatattaaaaatagaacaagcaggactcctaattgatgaaaagatagaggcatgggtgatgcataggtttgtaaataactgctgagatacagaaggatccaaagatgataggttttactgttttcaatgttagtgaattcaggtctggccctctcaaagtttgtgttttcttttgcacagacccacatacctgtggtaatgacccaaggattctcaaccttgccacagtaaatcaatcgttaatagtaatatgtgaaggaactgccttgaaatagttagatacaacatgtacacagtcagaaaacccaacccaaccactgtttttcccatggaattgattagtcttttttcagtcttattttgtaatttacatagtcaccaagcattcttggagtaaagtgaaagaaattagctttgtaaatggcctggactacacttcctgtaagttcaaaaatcagatctatgacactgcaattatcttattggtgtaaaagcctgagccaccagtggaagacctggtttgggattgagggtctcaggatgagtcagcccccaaactgacagatagggaggataaaatgggaaaaaattttccgccttcagtgagcctataaaaattgcaaacacatgtaacagtcaggagctggattaactctaactggattaacttaaag

SEQ ID NO: 60801 - DNA, 1084 bp, Homo sapiens
tgaaaaagaatcagaagtgtagttatgcagatttgagtttgtttttttaatataaagctgtctttatctgggtgaattgttatgatttaccaggggctgcgtttggtgcaatgaatggtcttcggctaggattgaaggaaacccagaacatggcctggtccaaaccaagaaatgtacagtaagtctcttgtaaccatctgatgtagtgatacttgaatattaagctctgttgtattggtttgatgagtacaaccttgagattacagatggttagcatagttatgtgcttttttgtctttgttttttaatcttaatcaaaataaaagcaactaaggaatcagattactgactctaagcttttaaaaaggagtgatttttttaatcagtgtccctcagtcagctagtgctatgccagcctgacttctcagctgcacctgttacattctccaaccctatgtgacttgcttttcaaattgttgagttgctaatgggaattttggattgtttgggggcatgcagatccataggaaatggtaatgaagaataagcagctcatgagagtgatggctcaagctgccatcatttaacttgaagttcttactgtcttgactttatgtttccgaaatgatgagccagatacattttaaataaaatttttagaattagagttaattccaaaaggataagacacagttttctgttagaacttgaagttacagagaagggaaagtacagttaaaaggatcggaaagtatgttttcacccaacttaagaagtaaacatggccagtccctcttgatattccttaaacaatatgtttagttttgcccatttttatgcttcatgtaagtggaatcatgagtatgtattcttcgatggctactgttttgttttaggacactttaaactccatcttcctttcatattgttcagccagcagatggcaccagatgtgctagaattagaccatgggaaactggaaggcctgttaaattgtgtggttttttgagagacagggccttgctgtgttgcctgagctggagtgcaatggcgccatcacagctcactgtagccttgacctcct

SEQ ID NO: 60802 - DNA, 3466 bp, Homo sapiens
atttttaagtttttgtattatggggaattttgaatatataaaagtagacaaaatacatagcatagtgaacacatgaaccataacgcatcctcaacaaccatcaaccatggccagttctatcccatttccttctcctctcccatcttattttgagacaaaaaccccaatatcatattaaatacaaatttggaagtagatctcctagaaaagacaacttgcttcctttcttaaaacaagttattaaaatgcttgttaaaaatgaaaaaatgatggctgaacttaaaatatgttagtaaatatgtaacataattagaaacaatatacttctgtttgtaaacattactgattttttaaaacaatcttttagaaaatacaaatttttgtttctgtagaacattaattgagtcgtttaataattaaactgaatgagttccttcactctttgttactgtatttccataatttccagcagtagtcagctgtctggacagaaccattcctgggatcatgttacactgctgggagaagaatgtcttctcttcatccagttgcgtccatcactgttctggtggtgtctggcactggtgcaaggcagaactgtgcttccttgagagtgtgctgagcattcaccttggctgcttggttctagtctaggagcagacacagggtgctttccccatgtattctagttagatggctgattccttctctttaattctactttatattctgtactttgatattctttactttatattctgtactttgatattctttactttgattatctttaacattctaagcatatgttcccctcccaaaaagaaccttttagaagctagctcgccatagttaacagtggcattttttacatagattagtttctgtaaacctctgtaagatacattccaggctgtcattcaaagccttatatatatttaatgtgtattcattatattatacatttaataataagagttttccttattattattattaaggacttatataaaagtccttaagacttttgcctaaagttttgaaagttttaacctaattttcacttatgtagagtaaaaaccatccttattgaaatcggagatattaagatgtattttagaatttaaaaaactttgcgccctgggtctagacatgttaaatagccattattgtttttaaaggttactagagaaataatgattctaaatacagattctttctctttctgccctgataggattttgaatatggtgactaggcaaggggcactttgggctaatactctaggttctctgggtaagtagagatctcatttgataataaattgttaaagaaagaatgcacaaatatcatgaacaatttgatcaacccatattctggtcctaggatatgagacaattatgtttaaacccattccaatgcataatgtagatactacttagggaaagaccatgaactaacttatgaaataatctcaggtgctaataccgttctgaataccattgctgaatttttaaaatcttttggacactgcacactctcctttccaagcacaacacccaataaaatcatgtttaaatgaaatccaggtaatttaggtccaaagtaaagagctttgtatgttaggcaaggttcaaggtcctgtagtgatacatgataaattaatccagccctcttgctatgttttcttaatagccggttcattagtctgtttacctgagtagatttcaggcacctaattgccacaattggaataggttccttgtagataatgaaaacgtttgcagttctaggcaaaaggtaacttagtagtgcttagtcagagccttatgctttcataccatattgtttatgaatgattgatcacttacaatagatctcttatggcttatgtcctgacatccaaaattttcctactgtatgaacttagttgaaaatctcaatttaaattgtggcagattaaggaggggaagacatagaaaactcattgaaaacatagaaaaagcgtttgttatggcagggtaaggtcctgccttgtcacagaatttggaagcagtacatcttcacactgtaaagctagttttcacactttggatcctaagagatggctgctttcatatgttgctgatgtctgcattcctcccaccctcctacagagtcaccccgctctgtttcttttaattgcttgtatacctagagtagtcagctgtccttgtctgcgtaggactgtcagagaaaagtccaagaaactatgttccaataatcaccccccgcccaccccgccccacagtcctggacaaactagaatggctggtcaccctctgtgtacccattgtggtatgatcaagaagggtgttctgctcgtgatcagtttcagttaaataagttgaagaggaagatgagctttcatagaagtataaaaatactgcagtagaggagttgtaaggctgagcgcggtgtattgttgcaaggggcaagtgtagctataattttgagaaagagtttaaaagtttaacattcgttccagataggaatctgcaagagcatagaaggatggcttgggggaagatactttaaaatgaaatggtgctagtgttataatacgtgagaatcaaacctcactttttttttaatctattttttcttatactagaaatacgtgtgtgtgtgtgtgtgtgtatgtgtgtgtctttaatctgaagtatagcaattatgggtagcatataaatgaaaattttaaatattcttcctgagacttcctagcggtactttctagaaatagctactattgatgtttcttctgaattcttccaggcgtttctctgcatagccagtcagtcgtgtaccatgtgcacatgtccctgatttacttattagtgaaaatgattcttctggtttttaagtgactgtatagtattccattatatgaaaagtccctctctggatcaattcagatggtacaaatgctcttgatgggcattttatttgttgccaggtgtttgctattagaaactgttctagtgatcattccatgtatatctttggataaatttttctaaatataattgccatactgacttttgtgttgaaaaaaaaaaaacagtttttcctctgctctcacactacaacagtcaacataggatagttctgtgaccagttatgtgggaatatttccccacataccaagtaatctctcttgcagtggacaccagttgggtgtccacctgtttcacttctgcctggagatagcattagatcagcaggttgagcactctgtcccacaaaactgagccccactttggatacttctgatgctgatagcaagctccaggttattttacctgtgcttctgaccaaccagctttgtcagggtttcccacaacccactctttgggtttgattaatttattggattggctcacagaactcgagggaacacatacttaacatttgcgtatttattata

SEQ ID NO: 60803 - DNA, 1040 bp, Homo sapiens
tcttgacttttcagtcttacatattgtctgttgacttccaagaggaaagctgtgttaactccgctaagaattgtacaaaatacgcttaaagtagaaaggaggtcacatcctttatataggtcagctcatttaccattctctgaaggtagtagactggtactcccttgttttatagacaaactaaaattcagacaagttaaattacctccacatgctcacacagctctgtcacggtctagtgcatcaaactctagtctgagtccaaagcccgttgtctttctcaccaaaccaaattacctccaggatagagaaatcaggaaaatttctagaaaagggaaagaagtaataaataacagttgagccagaccttaagaatggactgaattttctgatgtatctgtttgattatacgatacatataaggaaggtgtgggagaaaagtctgggaagatagtttaggcttatggcatggaaagctaaagtaagaagcttaaaattacatagaaaggcagcatgtcatcaaaggttttttggacagaggattagaattatctctgaggaagattaagctagaagtggtgggtagataaaatagattggaggtagaagcctgaagtcaaaatggtccaggaaaagtattagttgaagagatggtgaggaaaaggttgaaatgaaagatgattgggtcagctgggcacggtggctcatgcctgtaatcccagcactttgggaggctgaggcgggtggatcccctgaggtcaggagttcaagaccagcctgaccaacatagagaaatccggtttccactaaaaatacaaaattagccaggtgtggtggcgcatgcctgaaatcccagctactcgggaggctgaggcaggagaattgcttgaacctgggaggtggaggttgcggtgaggcgagatcacgccactgcactctagcctgggcaataagagtgaaactctgtctcaaaaaaaaaaagaaaagaaaaaagaaaaaaatgatgattggattactagaagactgtttgctgtttggtg

SEQ ID NO: 60804 - DNA, 1712 bp, Homo sapiens
tacttgtctcttccaggcaagactaaactcactaaaatgtttcctttgttttttttttttgagttggggtcttgctctgtcacccaggctaaagtgcaatggtgccatcatggctcactacagccttgaactcctgggctcaagggatcctctcacctcagcctgcccagtggttcagactacaggtgcatgccaccacacccagctaatttttttcattgtttctttttttgtttagcaatggggtcttgctatgttacccaggctggcctcaagcaatcctcccacctcagcctcctgagttgctggattacaggcgtgagccactgtgcccagctgcctgaattgtttttgactccccatagtactgtgtccttttaggagagtttttttgccactgattctcagttgtttgggtgattgcttttctgtgggtgggaggaattgtcctagatctctttgagggtcttatgaaagtttttgacagtttctaaaccctgcattaacatctcaatatgcgtagactctccttaggagaattgtgaaacttaactctttagaagttttataaacacttggaggcttatgagtaaatgattagaaggtagcaatcaaaatccaattaagcttttttttcctttttttttttttttaaacggagttttgctctgtcgccaggctgcagtgcagtggcacaatcttggctcattacaacctccacctcccgggttcaagcgattctcctgcctcagcttcccaagtagctgggattacagatgcccgccaccacgcccagctaatttttgtatttttagtagagtcagggtttcaccatgttggccaggatgttctcgatcccctgacctcatgatccgcccacctcagcctcccaaagtgctgggattacaggcatgaaccaccacgccgggccaagccagattctttaaagtggctctatcttctctgtaatttgctcccttgccactttgatgactccagattctactcctattcccattgtcttttaactcccacttcagggcctttgttcttgccgttaccatttcctagaacaatccttccagatacctacctcaaatgctgcatcatctgtccatctttgttcagataccaccttttctttgaggccttaaacactgtagtacatacagttttgcacatacattttagttgtaggataaattgctaaaaattaagttacttgagcaaattatctgcatgcttaaaacgtgaatgactactgccaaatgacccttctagtacttgctaacgtttgccagtgtgagcatctaccatcactttttttttttttttttggagactgagtttcactctcgttggccagactggagtgcaatggcatgatctcggctcacagcaccctctgcctcctgcctcctgagttcgagcgattctcctgcctcatcctcccgagtagctggaattacacgcatgcaccacgatgcctggctaattttgtgtatttttagtagagacggggtttctccatgttggtcaggctgatctcgaactcccgacctcaggttgcagtgagcagagatcgcgccactgaattccagcctgggcgatagagcgagtctgtctcagaatgaaatgatgtgacatgacatgacatgatgaaatgaataatgaaatgccgggtgtggtggcacactccagcctgggcgata

SEQ ID NO: 60805 - DNA, 1047 bp, Homo sapiens
tctctacaaaaaatttagcccggtatggtggtgcatgattgtagtcctacctacttaggaggttgttgtgggaggatcacttgagctcagaaggtcgaggctgcagtgagcctttaccaaaccactgcactccagcctgggcgacagagcaagaccctgtctcagaagaaaaaataaaggaaaagtagatgttggtaatagcacagccgtgtgaatgtacttaatgcctctgaaatgtacacttaaaaatggttaaggtggtaaaatttatgttacatgtattgtaccataattcttaaaagaataaagtttttttaaaattttaagacagctgctgacagtcctcaacaatggcatttagtagtcatgttagtatgtaggtaaggctgttcctatagaacaggagccaccaactcctgctggccagctgcctgtttatttgctgtgagaaggctaagaatgtgttttacgttttttagttacgttttaaatggttatataagtacctacataacaatagcctttgaccctcaaagcccaaaatgtttactatctggcccttttaaaaaagatacatgttaatctgtgctttaaagtcattgtcatttgaatgcattagttctgccactaatcaaccctatatcccacaaacaaggcacttaaatattctgggcctcattttctcatgtatagaagaggtggtgcttgcctatcgctttggaagaactacataaggatcccaaaatacaggaggtaaaactgaaacacaagtcatatttgctttgctttatagagattgaccattggccttatttggttactctgttcaaagcaagtacctttgcttatcaacttcctgtgcttagttgtgtagagttgtttgagtaaagaaaccctagagacccttaaacttgcaaacacatcaaccaattgggaaaccctggaattaacggaaacagttacaattagaacatggctggtatgtggtaaaaggccacccttgagtaaagatgctatgtgataagtacaaacaccaatgtttagtgt

SEQ ID NO: 60806 - DNA, 1050 bp, Homo sapiens
acctaatgccaaatagaaatttagatgtcttgtcggggctgattaacagaaaaagtaattatcaatcagttcacaggaaattatcattagctgtcttactgatactggttctctgtgagcgatcctctttataatttgtagagatgatttatttctaaaggaatggcaatgtgaataaaggtttctatatgttttagttgagaagagccctagagatcagctgtgtgtctcttgttttataattgtgaaaattgaggctcttggaaggcacatgatttgcccagggtcagtggcaagccaagattagagagtggctcttctctttttctggtgaactttctactgcatttgacattccttgttttgtgattaacagaagtcagcatccggtattgtagctgtccctttcagcgaatggctccttggaagcaaacctgccagtggttatcaagctccttacatacccagcaccgacccccaggactggcttacccaaaagcagaccttggagaacagtcaggtctgttgctgcttttattgtttctacagtagacacagcagtaggtggagttagttactaatcagtagtactatgtgtcattgttaactttttggttgcagtctggaaacatatttattaatagtctcttcatcatagaaagtttagaaaataaggaactctttatcatagaaaattttaaaaataaagaattttatattaaaaaagcccacaaacccataatctcaacacaaagagaaaaacactgtaacaataaaagtgaagtatttatatacttcagttttctatacatacatattttaaaagaaccattctgtaagtcctgtttcggtaggtagattttttttttcaccaggataacattaacatatttctctgtcatttaatttcttctgtaaagtatttagtagtatataattgattggctgtaatttaaattcaagtttttctggatataaaaaaggattccctaaacatccaggagccaattatttgtgtgcattcttgattagttccttaggagtacattt

SEQ ID NO: 60807 - DNA, 1030 bp, Homo sapiens
ggtgtggtggatcacgcctgtaatcccagcagtttaggagaccaagacgggcagatcgcttaagctcaggagttcagagaccagcccaggccaaaaccccatctctaccaaaaatacaaaaaattagccaggcatggtggtgcacacctatggtcccagctactcaggaggctgtagtgcgggcagggggatggctggagcctcggaaggggaggttgcaatgagctgagatcgcaccactgcactccagcctgagtgacagagaccccatctcaaaataaatgaataaataaataaaactcaaaccagtgctattttgatgtttatgctcacctgggccttctttcgaagcagccacttgtcttctccagaagataactggctgaggttgcccatcttctttcctggcaggacccagtcagctgtgttaaaggaacaccaggaagtattcatggggcttttaaacttctgtttgccagctctgtcttcagtaccaggcacttccttgggacttccttctttgtatgggggcctgataagccactccgacaaggggctgttctttatgacttggaaggaatcagcaattctagaaggagtcattgcctttggtgctttagtttgttctattacttcttttctaggacagagccacatattcagggaatctttatgcttctcaggctcaggtttgggttccacaggcatcccatttttatcctttccttctttcttcagaagccacttatacagagcctccttctcacaattctcatcacacacacactctgcaaagcttgtgcagggctcattggctctgcacacctcctctaccttacatgggtcctgatggttctggacaagccaatcctctgtaaccatgctgggggtggacaatggtttcttggcctccaagtggtcattcaggcacttcagattgcccaggttttcaatctccacacctttgggctggtttccctgacagttggtacaggagtcagtcttgacaagccaatcattcacattatag

SEQ ID NO: 60808 - DNA, 1058 bp, Homo sapiens
ttcatctgttcactggagtagcacctctagtttttttcaagaacttttcagccagagaatgagaagctgaaaaacaacaaaaaactttgcttttgtgctcacagcttggctggtccaaaaggcctgcccagctttcagcctctcgtggccttcaacatgactttctcgctaagtttaatcatttctggcttttgatttaaagaagagtgagagatggggactattccttttagttgaacacttagatgcaattgtagggttaataattggcctaatttcaatcttgttttgtctcagggaacagggaggcctgaggagagagaagagaaatagggaaaggctgtttggtgggcattcaggacatttattgatgaaaagtttaccatctttaatgggcatagttcatgacacaaatgcttaatttgtaaaaaatacaatgtaacaagggtatacctgtattgggaaatgagtcggagctttaaggcagggaaaatttgcttttattcttcattgaagtaacttatcatctgtgggtgtctctttacagatgtgaaggaatggacaagagttgagcagcctttctgctgattatcacacatcatgagctgagtgactgcagcttgccaaatctttgtgtttctgggtctgaccaattagcttagttcttctcctgcctaattttgaactagtaaagcaaagtgagtcatcagattatgagttactgtttaaaagaaaaatgctgtttattcatgctgaggtgattcagttccctccttcttacagaagtattttaattcaccccacactagaaatgcagcatctttgtggacgtctttttcacaagcctccaaggctccttagattgggtcgttactaaaagtacattaaaacactcttgtttatcgaagtatattgatgtattctaaagctagtaaacttccctaacgtttaattgccctacagatgcttctcttgctgtgggttttcttttgttagtggtctgaaataattattttcctgttctattaatacatagtgtattttgcacaaaaaaatta

SEQ ID NO: 60809 - DNA, 1123 bp, Homo sapiens
taataactgagcgatagcaatgctgttgcagatacctttagcatttattctcctgtgcctcatggcttattttttccacattaggaatttggtctagttcactttcagctctgcagctttttactgatttactaggcagagacatgaggtcgatccttattaaactgaacagattattttgagtatacactattttccaattagtacaatttttcaaccacattgaatacagttggaagtttaattgctgtgcctacagtctgaatatggcaagttcacaaagagatgatgtgaacttcaaggagatacctcatgttatacttttagtggggtttttttgggtttcttaaaaatgtttttggtccccctacatgacagctgtttatagataatgtctgcagtttctgtttgagagagataattatgacacttagcattggaaaactaagaagaacgtaagcaggtcagctatcagaagtcttcagactggagagattcctggagggggagtggccctttaatccatcagctgaagccatctggtaggacgctcgttgcagaaatggttagttctgaaatgttgtaactcagcaacatcactgaatgtcacagaattgacaggcacggagctaaaagggcctctagccacccccacaactccgctctacctctgtctccctaacacatgacttggaacaaatacactctaggtacaaagatggctacctgaagtttatgatccctactcatggagctgcttgaggacttcacattttttaaaaagctgctttgggcacccccattcctgaggagttttgtagcttggtttctctttgccacattacgtttgtaagactaacattttataaccataagcagttaggcctttttattttgagaaatttatctgtagcttccttttatttacacttggggactatttttaagtaaccgattgaaatatttttgtttctccattgcaagtgaaatccttgttgctaatcttttgccacatgtaaaattgttcacttgttatcaagcaggtagttcaatatctgtaattcttgagttcttttcaactagcatgatgctaggtgtcactcactgttttttaattgtggga

SEQ ID NO: 60810 - DNA, 1037 bp, Homo sapiens
cttttattttgattaagattaaaaaacaaagacaaaaaagcacataactatgctaaccatctgtaatctcaaggttgtactcatcaaaccaatacaacagagcttaatattcaagtatcactacatcagatggttacaagagacttactgtacatttcttggtttggaccaggccatgttctgggtttccttcaatcctagccgaagaccattcattgcaccaaacgcagcccctggtaaatcataacaattcacccagataaagacagctttatattaaaaaaacaaactcaaatctgcataactacacttctgattctttttcatttttatttaatagaaaaagacaaatgtaaatattaaaaaaaaaaccctgaaaccaacattctaattgcttttgattttacgcaccctcaactacttgaactgagcactcttgagaaaaaagtatgtaacactcacctgtcatgcaacatcctccaatcgtaaagaaggccagctcaaatctgccccgggttttattagctccggtaggtaaaataaactcatctgtatcctaaaaggataataatgaaaaccaagctgagtgtccctcaagacacaaatcttgtaaagttgcctttttaacatttcaaagtagtttttcacagaaaataaaccttaaattaactcaaacctatacttaaacaaaaataaaactttctgcagcagtaacacctaaatcaaagtgaaatgaaatacgaaacatagttcttagaagggagtctcattaaagactttgtttccttcaaaacgtaaatctgatagatttgtgcaaaagtgtttagaaaggacagctctagagaaaggaacactgaaagctatgagaagaacagaacagacaatcagtctggaagaaacaaataactttcattctgtagcagctatttattgtgcatttttctatgtataaagccaaatgttcacaaacatgagcaaaaactaataaagtacaacagtttggatcaattatgcaagggcaaatgaccccctttaat

SEQ ID NO: 60811 - DNA, 1047 bp, Homo sapiens
tcactgccactcttttgatgagctttcttagtgttttccaatgtcacttggttttagtacttgtcaaaccagcattccagccgggcacagtggctcacacctgtaatcctagcactttgggaggccgaggtgggcgaatcacgaggtcaggagttcgagaccagcctggccaacatggtgaaaccccgtctctactaaaaatacacaaaattagttgggcgttgtggcgggcacctgtaattccagctactcgggaggctgaggcaggagaatcgcttgaacgcgggaggtgcagtgagccgagatggcgccattgtactccagcccaggcaacagagtgaaactctctcaaaaaaaaaaaaagcatttctttcacattctaacactcaaaggtgaaaggaaatgggttcttttttgatgtgacatgcagaatagttacatgtaacattgatactactgtatgtttattttttaaaatagctactacagtttctacaggaattctcacagcaaactatctctaggacccatgaaatcaagaaacaagtggacggactaattcgggaaaccaaagccacagattgtcgcctgcataatgtcttcaatgacttccttatgctctctaatacccagttcattgagaatgtgagttatttagttatattatcattccttttttgggagtaggagatattgtaattttaaataacttactgttaggttccctcctaaattttggtggaagtgtggttcttggtaattgtagcttttttctctgggattaatacctcttttttatttgtaaagttttaagtccttttttccaagcctctaaaaaagtctaatgataacattttcttatacttcggtgcttccatcttttgtcgttttgagagtagtcagcaattgtgctgaattttgtggcactcacactgcctttgttgtggcgtgatctgtaaggacagctgtttacctggttagaccctctggacaccagcatatggtttcacttgttgattggggtcattctgttctgataaattatat

SEQ ID NO: 60812 - DNA, 1013 bp, Homo sapiens
ccagcactttgggaggccaagacgggtggatcacctgaggttgggagttcgagaccagcctgaccaacatggagaaaccccgtctctactaaaaaaatacaaaattagccgggcatggtggcgcatgcctgtaatcccagctacttgggaaggctgaggcaggagaatcgcttgaacctgggaggcggaggttgcggtgagccgagatcctgccattgtactccagcctgggcaataagagcgaaactccgtctcaaaaaaaaaaaaaaagtattcaagtaaaatcagtagttttctgattgtttacacagaatgtccatgcttggtcctgactatctcactggaaaagtcagggactctagactcaacttctctggtgtgcacagccccataatgttttcatcaagattaatttggtgtccttttaagcactcctgttcttttcattctgtacttttcttgctggatcaggtagtcagcacttctctgcagtcagtgctgcagcaccagagtcccaaaggatttgggaagtttctttttttttttgagatggagtctcactctgtcacccaggctggagtgcagtggtgcgatctccgctcactgcaagctccgcctcccgggttcacgccattctcctgcctcagccttccaagtagctgggactacaggcgcgtgccaccacgcctggctaattttttgtatttttagaagagacggggtttcaccgagttagccaggatgatctcgatctcctgacctcgtgatccgcccacctcggcctcccaaagtgctgggattacaggcctgagccacggcgcccggcaagggaagtttactttgtacccagtgtgcttgtaccagattggtactagattggtaccagatcaatacttcagtgggaagaaatggggaacatcatacaatttttctcaatcacagtcttaggtcttatcttttctccagctcttttctagccaagttttcgtagattctgagttttccatgttgta

SEQ ID NO: 60813 - DNA, 1352 bp, Homo sapiens
atctcggctcactgcaacatccgcctcccgtgttcaagcaattctcctgcccacacctcccatgtagttgggattacaggctcccgccaccaggcctggctaattttttttctatttttagtagagatggggtttcaccatgttggtgagtctgcttttgaacttctgacctcaagcgatctgcccattgcaacctccgcctcccgggttcaagcagttatcctacttcagcctcccaaagtgctaggattacaggcgcgagccactgcgctcggcccttagtgttaagtcttgatgccccttcgccttccagtctgcagccagaactcttctccggatgtgctggttgccgctgccaaatcttaattacttcccagaccttctataaggccacatgctataggtttttttaatttgtggcaaagcatgataatactgagaaaacagctaatgcttaataaaactctgaaaaaatatagttgctgatatatatttgtaagtgatctggctttttttttttttttttttttttgagacggagtctcactctgtcgcccagactggagtgcagtggtgcaatctcagcccactgcaagctctacctcccgggttcacgccattctcctgactcagcctcctgagtagctgggatgacaggcacccgccaccacacctggctaattttttttgcatttttagtagagatggggtttcaccgtgttagccaggatggtctcgatctcctgacctcatgatccacccgccttggcctcccaagtgctgggattacaggtgtgagccaccatacccggcaatctggctttttaatgttttattttcaatccctgacatcagtacttaggtgttacaattccagcttgaattatggtgccatttggtttcatggtaatttatcagaaacattcaaagtcagataggtttctgggtcttattaattagcctcaggggcagccacaaagttgcaaactatattataaagttagtgaaacaatccagactttctagggcgagaacagtcaggactttttagggcaagagaaattaataccattagtaaaggctcaagaggggacttggagggagaagaaatactaattaacattggccagtgttctagtgtctaattagaaggcaacacaattctaaagccttaattatctgttaatttaggaattggatcctgaaatagcaagtgccatagttaatgactttagtttgttaaatgaactggtgagggaggattttttctttttaaagtcaattgtttccaaatcttagctttgtaaaattaaaaaaaaaattccagaatgaaacaaattaacctgtttatg

SEQ ID NO: 60814 - DNA, 1097 bp, Homo sapiens
aatggcacacttgtgtctgcggggactgccattgagaactgctgttgcaggaagaagacacctgagggagattctcagcctgttggtgatatgaacaaaccttttttcttgagtggggcattgttgtagggtatacacagaatagaccggagatgaaaatgacccccttttgatgtagaacagatttataaaataattgtaattgtccagtattttttttttgtctctttaaactgtaattgaaaaatgagacctctgtgaccttccttctaagtcttaacacctaaaattacccaagggataaccagggctcgtgggatagtcatggtgagtctgagagtctaggccctccagcagtggggaaacagcatgtattcattgttgggatacttctccacacactagttgtacctctgcttttgtagacgatgacccttgagctctggaaccttaggtagtttgatgcatgtccagaaaggggcaaacttgggatttaaaacttgcagtcttactccaaagtctgtgtcaaggcattcagcagaatttgacttttttaacatttttaataagtttttttggagcttgaggctaggctttagagaacattcacagtattcttttggggcagtatcagtatattggagacccatactgcatggtatttattttgtaggagaagacacgagagcagaaagaagtagatctcattcctaaagtccaggaggctgtgaactatggcttacaagtattggacagtgcctttgagcaacttgatatcaaagcaggaaactcagactccgaggaagatgatgctaatgggcgggtggaactgatccttgaaccaaaggtgaagacattcaacttaaatatttattgcacaactattatgtttgggctactttaattgggcacacgattagtaagtcatggacttaacctctgggaagtgagtatgtcacttagtagtctcacattgactccaccagaaagactcgctttacctgagcactgatggagtacttgtgaggcgcaaggcaacatgtcaagttggggtgcaaagatgcagagcatggcctctactctcgaggtgtgtgttg

SEQ ID NO: 60815 - DNA, 1049 bp, Homo sapiens
gagtgcagtagtgcaatctcagctcactgcaacactgtttcctgggttcaagtgattctcctgcctcagccgcccgagtagctaggatgacagttacccgccaccatgtcccgctaatttttttggatttttagtagagacggggtttcaccacgttggtcaggctggtctcaaactcctgacctcaagtgatccacccgccttggcttcccaaagtgctaggattacaggcgtgagccatggtgcccggccttaccttgacatctttacctaggatttgacttttaaaaaaatcagtgaaaaaaagaattttttttttaacttttagtcctgctgtgtttcttattctccactttcgttatgtagcttgtttgggatagtcagatggaacagggtatcaggtggcacatgtaagtttgttttcaactgaaatgtttgacagcctattcctttcatgatgtacaggatctatacattgatcgtcctttaccatatctcattgggtcaaagctgttcatggaacaagaagatgtaggtcttggagagctgtccagtgaaggtacttttcttcaccaaataattttgttccttaacatttcttttttattttaaaataatttcaaattttacattaaagtttcaagaatagttcaaagaactctcatatacccttcacctgggtttaccagttaacatttcaccacatttgttagattgttctctacatatacgtaatattttgtcttgagcctatttgggagacatcatgctcatgccctgttacttctaaatgtttctctgtgtgttttctttttttcttttctttgtctttttctttttttgagacagagtctcgctctgtggcccaggctggagtgcagtggtgcgatctcagctcactgcaacctccgcctcccggatttaagcgatttttctgcctcagcctcctgagtagctgggaccacaggcgtgcaccaccacacctggccaatttttgtatttttagtagagacggggtttcaccatattgtccaggctggtctcgaatt

SEQ ID NO: 60816 - DNA, 1026 bp, Homo sapiens
ttacaggtgcccaccaccacacctggctaatttttgtatttttagtagagatggggttttaccatgttgggcaggttggtctcgaacgcctgacctcaggtgatcctctgtgtgtgttttctaagaacaaggacatctcttgtataatcacagtagaattacaaagccaggatattttcctggacataagggtattatccaatctgctgctatgttcacattttgccgtttgtcccagtgacaccctttacagtctctctcttttgttctgtggtccgggactcaatccaggaccagccaccacatttggttgtcaaatcttcagttatcttttaatctgatgccatttctcagcctttctttgctttttatgaccctgacatctttaaagagtacaagcaattttttttttatttgtaatgaataatttttggggggagagatacttcaagactacataaatatgtaattcctcaccataatgacactttcaattccagtaagtgggtatagatggttttatcaagatctctgtgatgctgttgtatggtggtttgtgattttgagctaaggacattttcttgtgaatattggtgtggtgacccttatctctcttctcaacagaaggctctgtaggcagtgatcgtggcagtattgtggacactgaggaagagaaagaagaggaggtaagggctgtttggtatgaccaggtcacggtgggcagcaagcttaatttaagatgggcctagcaggctaagtaaatagcataactgtgaattcgtaatctgcttccataaagcttttaacagtgatagaagccacattctgagttttttttcccaagggttagatttcctttttgccttatgtacaataatagggaaagctgctttcatctcttccactattatcctctctcccaccttgccaccaaatatctctttcacccaatatatttttgagaagggcagcttagatgttttggtggaatctctgcctgggatatagtctttgagtatattctgt

SEQ ID NO: 60817 - DNA, 1060 bp, Homo sapiens
tcaattcccacctatgagtgagaatatgcggtgtttggttttttgttcttgcgatagtttactgagaatgatggtttccagtttcatccatgtccctacaaaggacatgaactcatcattttttatggctgcatagtattccatggtgtatatgtgccacattttcttaatccagtctattattgttggacatttgggttggttccaagtctttgctattgtgaataatgcaaggaaatagagacagtatagtccaaaatgtaaaataacacaaactgactttcagtaatttagttagttaaatgtgcaactctttaaatccaaaggcaagagttgaaagtgcaggtgatgtgaacaaattgttagaggcatttaagtgaaccacaaaaattacatgttaactggaacaacccttcacaatattgccagctatccagcttatctgcaccttgatacttaaggtgaccagtagtcagtacaaagagactgagtgtcagagctttttctccacttgacatagaatcagcctgccccagagacttagacctgcaatcatttctgtgcttctaagtaaagcccatttaacaacaaagccttttcttccccacaaaggagtcagatgaagattttgcccatcatagtgacaatgaacaaaaccgggtaaggctcatatattgaaatgactttgtttttacattttaattgaagcatagtatatatactaatattactttggaatgatttatgaccaagtgaggattttttcttgtatacaatttattttcctttaagcatttcatgtatttaggctaactacctcctttgtatatattttttccaattttgctttatagtttatttttcttagaaaagaagtttcaaagaagtgaaaaacacaattggaaaacagagcctctaaaagaagactcagttacccaaactgaactactttgcatgagtccctcttctgttttaaaattggagacaatctagcagtaacattattgagtattcacaagatgaaaacttcttaccctactgtcttagcacggttatctta

SEQ ID NO: 60818 - DNA, 1031 bp, Homo sapiens
cccatgttttataatctaaattgccattggacttttttttctttttttgagacagagtctcgctctgtcccccaggctggagtgcagtggcacgatctccgttcactgcaagctctgcctcctgggttcactccattctcctgcctcagcctcccgagtagctgggactacaggctcccgccaccacgcccggctaattttcttgtatttttagtagagacggggtttcaccatgttagcaaggatggtcttgatctgctgatctcgtgattcacccgcctcggcctcccaaagtgctgggattataggtatgagccactgcgcctggcctggagttttaatatatattttatgttttaaggaccagtggaatattcctgcttcacagacccacttagcatctgacagcaggtctaaaggagaacccagggattctgggaccctccagagccaggaggccaaggctgtgaaaaagaccagtctctttgaggaagacgaagaagatgatctttttgccattgccaaggacaggtgagatagtcattggaaggagtccctcactccgttaccgtggtaacaagaaaaggaatctgatgcacaatctagttcatcgggtgattgctaatcatggatcacatagtgattgtgccagtgagaatgtctttgcttttcaatggcaccatcttttccctcagtacccggaaatgtttgtctttgtggatccttatctgatttcttccccaatcattattttttaaccatattctttttctttgtttgtcagggatttgagtatcttttgtttgtgatttttctctgggctactctaaagtatgtcaggtttggtcaggattacttaaaagttactttaggccaggcacgttggctcatgcctgtaatcccagcactttgggaggccgaggtgggcggatcacgatgtcaggagttcaagaccagcctggccaatatggtgaaaccctgtctctactaaaaaaatataaaaattagccgggtgtggtggcacgcgcctg

SEQ ID NO: 60819 - DNA, 1016 bp, Homo sapiens
ggtgaattttatggaatgtaaattatgtctcaataacgctactaaaaaaaagaaatagaagccaggcacagggtcatttcccagtgctgatcctggccctgtgatctctcttggcaaccgtcttcatgacaattctggaaataggcctgtccgctttgattctttttgtgctataggaagtgggagagaatgttctgcttgggaaggctcaggcatcgtgtgccttgcagcggtaacagctgatgaacctgcactggatagtaacaggaaaggggcaacctgaggcaggagggacagaggctggtgatttgttggagtcagatttcatctatttcaaaggtctttcctgtttgctttcaactgtgtaaggtcaactaatggcttgggtgtttgggtggtaggtggattcctgtaggtgcagtctagaagaaatattgttgttatggtttttgtttttttcatcacacttttccttaatttgaccttttgtttgtttgtgtagccaaaagaagacccagagagtgtcactcctctttgaagacgatgttgatagcggaggctctctgtttggctctcctcccacatctgttcctcctgcaacaaaggtattcttcatctcttagtcccaggaaatgtccttgagtttatgctgcatcagtagtggtacttccccgaatcagctcttcatacctaaccttggaggctgagtcttatggaagaccttatttgcctggtttcagaaagagatcttctgattaatagtattctagagaagaagcacacgtgcaaaaccatcattcagtgtcaggtgtaggaacaaggaactgggtctcagaagaggcttgggccccattgtcatggaattctgctaacattagactaggccagttaaggcaaaatcattccttttatgagtgtgtgtcgagtactaacactggtcctggtttatattagccagtcagtaaaaaggaaggaaattctcacatgtgctacaaaatgcatgaaccttgaggccg

SEQ ID NO: 60820 - DNA, 1602 bp, Homo sapiens
aattctcttcctagtggctgtgtgtggaccccagtcctatcccagtcctggtccacacttgactctgactggttgctgtactgccctctccctgagtgtaagccccttgcggactaggcccagtttgttttgctcaccatcatatctgtagtactggcatattaccttgcacacagtaggcactatgttataaactttgtatttctttaaagaagcatttttttaatagtttgagtactctgaaatcgggatgtacctcataatcaatggtatcttacctgaaatgtgccatttgttgaatgaataaatactgcattttagaattatttcagagattcttcttcaattgcctatacagtgtaagccttttacaatttgagggtctgattttcctgattagatttcccccttggggcttatgtattagttaaatgctacgaattcatggtccactcccaatgattggcacttgtattggttatctttgacacttagaagttcttcctagttcatgagcaaccagtgtgcatcaggattatagccatcctatcacttgataggagagagggacccatggtcttaatgcttggaaaagttatctttggctacggatgattgtacaagactgtctcttggagcagccaatcaagaattgacctcagtgttttgttacttgggcacagatgtgattcactgtgccctgagtcatgcaaatgtggcagttactgaattaacgagaagcttggcaggctccatgataggatttgtatttccaggtgttacttattttttccccctattattttcattttcaggaaggacttttgactagatctgctcaggaaacagtcaagcattctgatttattttcttcatcatccccatgggacaaaggaaccaagcctagaaccaaaactgttcttagcttgtttgatgaggaagaggataaaatggaagatcaaaacattatccaggctccacagaaagaagtaggaaaggtaagcaaaaagcaatagtggttcaagtctctggatgagataaaagactctcatctcatggttgtcattctgtcatgtgagtttctgaaggaatcttaaccttcaatgtagtgtgttaatgattctgtgcagtcatttagatatttgggaatcttaatcaggaactcttacctcaagtagcagtgttaggataggggattagaatttcaccccccctcttctgggatttacagaccttgttgttccttctagcaaaactttgccccttggccagttgtgggatgtaaacagcaggaaagggaagttaggctggagttgtacagttaagtatttctaacattcagtttaagaaaaagtgttgtagatgaacctttcatactgatcaggtgtcagcaaactatttctataaaggaccatataatgactattctagcttttgcagcctatttgggctctgtcataactgcctagctctgccattggcagcatgaaaacagccctaggaaacatgaagatggatgggcatgactgtgttccagtaagttttattaataaaaataggtgatggtcagctgggcatggtggctcacacctgtaatcccag

SEQ ID NO: 60821 - DNA, 2398 bp, Homo sapiens
gtcgtgctgcttcctactaaatgaatggcaaataacatgctgaggggagcgtgtgtggaggatgcaatgcttagtttctgttgttcctcattttatgttccctatactaacattaaaacattaataatccaggctctctgactgtactgcacatctgtgtgatgtttaaatggttgattgaaagaccattgcatacactggggtgactaaatattcgtgcctttcaggtgcaaagttttgagtctgagttttagcctttctatgtcattttctcccccagccccagtaggtttttgtaagtactctgttttctttttatcatagagaggactcctgtgacagccacagtcttcagaatgctatttctgaaatgctacctttgagttggttcagccctcatttgagaaagtatttttaagactcagaagccaggattgttttttgcattatgatttttccttaaaatttctaagatatttgatggctttttggtattttttttcttttgaaggtacaagagaaaaagagagtagtgaaaaaagaccactctgttgactctttcaaaaaccagaaacatcctgaatccattcaaggtagtaaagaaaaaggcatatggaagccggaaacacctcaggttagaaatcctctttaaggattttcagctcttgtttgcatcccagtacagagaaattccattatgcagacccacagttattcagacttgtctgcattaaggaggaaacagcaaccagggctaccgctttgtcttcactgcactccccccaagtcatctcccctctcctcgctccacacgccagagtttcatgaatctatactttaatagttagtgttttttgatgccatgccagatttaactctgaagtggagttaaggtaggatgaagaatcttcttcccactaaagaatttatttctccctctggatttccttggaatagaattaaaatagaaataaatataaattacatctgatttcctgcctgctctcagtgttgcctctcccaaggtcattgctgttgggccgtactctgcagcagtcttcccagaacgctgtggagctcctcctgggaacagcccaggactggagagcgagtgccagttccacgtgcaggtgtcccagggtgtctcactgaagccttagtgtcctgagccgtaaacctgaggcacttggacgaacacatcaccactgacccttcctggggctcagatcttttgcttttagagccagtgcattaggctatggttgaatttttgtgtgctccttgaaatttctatttgataaccaacatggtaattttgcctgctggtcagttttaggtgctctgataaactgtgactcttgggaatcttactcatcttgtattccttgactccatatctgatctggcagctttccacttacgtgacagaggaggaggcatacgtgaagtagtgctagtgaaacatcaggccccaggagagatttgaatgcctttcccattaaagagctacagaaagtgacagttttgctccatcacagatttatttacaggcataagaaacacttgtctttctgtttcccaaatggatttttaactggatgtaattttacacaggactcatcaggtctcgctccatttaaaaccaaagaaccatccactcggatcgggaagatacaagtaattaaaacactggaatcttcattgcctgccctgtggcatctataaacttttttgggtttcctacttttgtcagctgctgccaagcatcttctcatctcttcccccgcctcccctcccctgcacctagttgttgtctcctgtgtgctgcgtctttaacatctattttttgagcccagtggtgggcataggtgtaagacgctctgttttaattctgagactagatcgggcgattttcctacgtttctctactcctctcgtattatacattatgtgcaccgaatcttgtcatgtgtcacaataaagataatagactgctgtgttgaagaacaaatacagagtttcatttttcttctttaggcaaatttagcgatcaacccagcggccttgctgcccacagcggcttcccagatctctgaagtaaagcctgttttgccagaattggcttttccttcatctgaacacagaaggagccacggtctggaaagtgtgcctgtccttcccgggagtggggaggccggtgtgagttttgatcttccagctcaggcagacaccttacacagtgcaaacaaggtgatgaaaccatctttgcttccttgctctcttcttttaaccagaacatgcatatgcttctttctagtttatcagttgcatacacagcagtctttgactctccttttgaaggaggtgcctcatccttccttcagccactccccactcc

SEQ ID NO: 60822 - DNA, 2502 bp, Homo sapiens
gtaccagaattccccgattctttcttgttttgaaagatacccacgtttctattgagggtagagtaggggccaagggaggggttgtgagacagagagccaacatacctactttccaggtttccagcaacagataaaactttttgtgtgaaactgaactgaaactgccctgagaagattaaaaaatggagaactctaaaggattaagaatgacttagtcttggagtactaggagctattaaactccttccttggaaatcattaagaaataacctcttctatgttcttagataatatcttcattgaagtagaccagataaccttacaatattttgagtcactgattctttgccatggtagctttgaacactttattttatcgtcagatcaatgtgtgtttttttgccattgcagagccgtgtcaagatgagagggaagcgtagaccgcagacccgtgcagctaggcggctggctgctcaggagtccagcgagactgaggacatgagcgtccccagaggacccattgcacagtgggctgatggcgccatttccccaaatggccatcggccacagctcagagcagccagtggagaagacagcactgaggaggccctggcagctgccgctgcaccttgggaaggtggtcctgtgcctggagtggacagaagcccctttgcaaagtctctgggtcattccagaggggaggctgacctttttgattctggggacatcttttccacgggcactggatctcagtctgtggagagaacaaaacccaaggcaaagatagcagagaatcctgccaacccaccagtgggtggtaaagcaaagagccccatgtttcctgctctaggtgaggccagcagtgatgatgatctctttcagtctgctaaaccaaaaccagcaaagaaaacaaatccctttcctctcctggaagatgaggatgacctctttacagatcagaaagtcaagaagaatgagacaaaatccaatagtcagcaggatgtcatattaacaacacaagatatttttgaggtaataggacttaacacgtttttgtgtctgttctaagttaaggaaggtatctgattggcttatttgagccatagattatgtctagcttgttgcgtgcataccccatagccacttgcttagtaattataattaggctcttttattaataagtttaacattgattcagaagtggttttttgttttgttgcatgtagattgtatttcttggctggccatgatcattgatactggtcttggtttctctagtttttacagtttttttatttttatagaatattgtaatcagcttcctgggcatgccactcggtgacatggcatacagctccactggtccagcttgggagtttaacctctggttctggggacattggccctggctggagctgacaatgtagtgcatgcaggcaataagactttcagtggcatttgctcagcagatgtttattgagcacctggggactgcaggcacgaggtgaactcagagaagtgctaggctcctcagagctctctgggaagataatcaaatacaaacagggcaatggataattaagatgttttcaaatagtactaagtgtcatgaagaaaataacctggggcagagtggtgggtagggctgggaggtgctcctttaggcaggactggtagagaaggtgtcactgcagtgccggcatttgagccggggtgagatgggcgggccaagctgtgcagagatctggggtagtgcatcccaggcagagtgggcagtctcgaggctgttccacacaccctggccaattgtatttccatagctcgttgttgtgtttgagcttaaaaagaaaaattgatttaacattattttgtatgtatttttggcttaacaaggatgatatatttgctacggaagcaattaaaccctctcagaaaaccagagagaaggagaaaacattggaatctaatttatttgatgataacattgatatctttgctgacttaactgtaaaaccaaaagaaaagtccaaaaagaaagtggaagccaagtctatatttgatgatgatatgggtaagtttggttttctacatctgacctagagaattcttacctttctgtcacttggtatttttcttgctaccttttcttggcccttttctggaaaatgcaccccagcgggttcacttcagtgtaatcctgagttaggctgaagataggtaagagatggactaattattttagtgaagtaactctttcctatgatagtcatcaaagaatttgaaggcacccagagtttgacgtttaagtataatttaactttgatctcagtgcacctcaccaatcatctgtgacacaccccggtgttatgaaaggaggtttgatcagaaatgacctcacgtgctaaagtaggctgaggggactgccttgggtgtgatgtggttggttgagtcagagctccagatagacagggagtgtccatggttctgtgcgagaagagagca

SEQ ID NO: 60823 - DNA, 1104 bp, Homo sapiens
gttccagagagacagcttatcagagtgtctatgccatactcaaggtaaacattgctaacaattgctttgggtttgacacttttgctggatttttttttctttgattaatgtttgtgtgtacatggtacatatagttatggggtacatgagatgttttgatacaggcatgcaatgcctaatagttacatcatggaaaatggggtacccatcccttcaagcatttatcctttgtgttacatactgctgggtcattttttaattatctttcacaaaaaagacacaatgataccaaactttagattgcagcttattaaagcataatcagcaacaaatactcagcaacatcaccagtattctgtctggtgttttcttgatgtgtatgcaccatatgaagacattagtcatgcatttggatgttcattgatcaactcattcactaaacatttactgagtctctttgtattagttgtctattgctgtacaacaaatcgcctaaaaatttagtggcttaaaacaacaataataaatgttgttcaaggcttctgtgtgtcaggattcccagagtggcttggttagacgattctgacttgttttagaacaagtcatatgtaatcacttctgtgtcatgatgtggcactcagatgctggctagggccgcagttttctgatggcttgaccaaggtggaagaaattacttctaaggttgctcactcagatggctagcaagttagtgctgacaggatgcttcctatccacttaggcttctccacaggattattagggtgtccttgcatcacagtggatggcatcctctagaccaacaagtctaagagttcgtttcaaggcacactgaattcttcatttgggaaatgaggtactagagtagcttaaaacctttgcagtttctgctcactatgcctgagttgcttttcccccagatattgcacagccgacttgctttcttcatctcagcctctgctaaaagagagcccctcattagaagatctttcctcactaacacccactactttctttttccttatgcaacaatgtttttcttcatagcatctatcactctatgatataatatttaatatttatttg

SEQ ID NO: 60824 - DNA, 1583 bp, Homo sapiens
gggaaaacatacttttcatatctcttgccccaaagattgggctgtaagccattttctagcaaatgtctctatgaaggtttctaagtacctgaatggggtttgattctgaaatctttctacctgttgcaccgatattcaaataaaaatgatagacacagaaaggtttggtaactttgggttttgtaaaatcagcaaaggcagtgtttcaaaaagtgcaaaaaaaaagattctgttataaagtgattttctaagtatttcctaactttatttttcaaaatgatgttatgaacaccaaatttaaagatttttaacatgtcagagagaagagagttaaaatttaaaaatgcatcttgggagagaaatttgtctatgtttctagtgcctttcttgtcttgattgtatggtcagtaggcaatcttaaatgtttttatttaaaataaagtattccttgaaaatataaatatatgtatacactactaaattttgcatttatagctaaattgaatcagaagactgcttatggttttaaaattgcaatgacttaaataatgaggttgttaattagagtcagagcctgttcacatattgtgatcaggtagcaatgacatgtaccacttaaattattttatcgtcgatttggtagttcaattttaactactcaatgaaaacagccatgaatatcttttcttaaagagagttttgaaaatgatcacttacctaaaacttgaaagctatgaattagttatccatactctcatgacaattttgttggtgaacaacaaaaaagagatctatttctttaaaagatatttgtgcagaaactgcatgtaactctaagttttactcctaacatacatatgtttggggaagtattctattctatacttgccaatgtggagaacaaaatagttttttaagaatgaagaagtatatatatccattctgtattttacgtgcagcagaattatcttccgtaggatttttttgtgtattcacaaggtgatatttgtattgtaaaacaataatggtgaaggaaataaaaaggcttttaaaattttgtttgttttaaatctttgtaaagttattattccagagagtatactggtatcttacagcttacctagatcataaattaatcaaaatgcactttttaataaaaactgatacttaaaataaatggctgttatttctactgtgttcacattcttcacagaagtcataaatggagccattaaagcaagatagaaaatcagtttcagaatttcttcatggagtgtttctgcttgacatgggacttttaataattatctggatttttttccttgggattccttaaaatatattctaatctttagtaaattctagagagttttttaatatataaaaagagtcacatgtaagttaaattcaaactttagaacaatgtttactaacattttgaattctctaattctcaaccaaattgttttttttcctatatctggcagtaatatagcttctccagtgtagatggaaaggaaaagtaaatccaaagtgagaaatagagtaatagtactatgataaaccagtggtaatggaaaata

SEQ ID NO: 60825 - DNA, 1703 bp, Homo sapiens
cagtacagttaaatcagttatgactgcttagtccttgtattaggctctgtgggccaaaaggtattgatttttgtgtagagcatcaaccccaaattagctagaggtaaatttaaatgtcaatggacagtttttaaaaacgaaacatgatgcattaacctgtccttatttgattagcctcatcttttaaactctatttatgattgtatgaatcaagtaagaaccaaatatgaattactatcactagtataatcacatcataaaaagctgtttctgttctaaccttggttacagataaatgacagcccttagattcactagatctgttttcagaagggaagactcaaggtaattggattcagaagcattagtagaggcatagttgggtgcccttaatgtcatttgaataatgggactattgcaaatctctccccctttcagattcccctcggcgactctggtggtatcactggatttgctggcttctcagcgtagttggaatcttctgtattctcttagcgcatgaccactacactgtggacgtggtggtggcatattacatcaccacgagactcttctggtggtatcacactatggccaatcagcaagtgagtttccccgcttttgattttagcttctgttgtttctggcttgatgttgctggcttggacagggtgcaaagaacctgtggatgtctgaagtttctctttcttaagtagtaatcaactaagattgtattgtttttttgtgacattgattctcttcagaattaagaataaaaagtttattaatataatgatgtgaggaattacttccttctagaataaggaacgcactttcattgtccttgaaaaatgaaaaatattttctaagcttgtgtccctccttgcttgatttgctttcctatcctcttctccctacccggggcacatcacaagcttaatatttaacatttaattaagtgttaacatttttagcatagaagaggaatacctaaaaagctaactgaggtgtttatttataagcaagagatgagtgagccataagttctccttgccctcccagaattggcgttgtttttctactgggatgtggctcagtttgtagatgaatgtggagtgtagaatggtgatgagagagagaagctgggatatgtgggtggacacgcagggcaggtatggagtcctttgggaattttagcgtggcaagtatttgaacttaaagtgaaagattgtaagaaatgtgtttatgtttctttgttatcctaggtgctaaaggaagcttcccagatgaacctcctggccagggtgtggtggtacaggccatttcagtactttgaaaagaatgtccaaggaattgtacctcgatcttaccattggcctttcccctggccagtagtccacctcagtaggcaagttaaatacagccggctggtgaatgacacataacagctgtacaaagtggggaaaagacaaattgtccgaagtgctaagaactccatgagagaagatgccataaaataaacacctccctaatcctattatctttcaatggttaccttgacttaacctattgagttacctggtcagcactgtgatctttttttctctccaaaggacctgcgttggacaacaataaagaaaaatttaacctatcatgcactgtacacatttcctgttcataagtttgggatttacataacccgc

SEQ ID NO: 60826 - DNA, 1053 bp, Homo sapiens
atttaattcagataacccttttagaaaggaaatgaaatgttaatatatgattaaaaccttttcattcctttcctatatcatttccatccatttttttggacttgtgtattattgttttgtggttttttaaatttatatacataaatggcatactgccatttatattcttctgccactatttaccctcaaattatgtttttgagatatgagattttggtccattcactttaattgctattaatattacagtgctagaaatgaactacacatatttattcatttctctacttatggaaaattttattatgctcaatatcacattgttagaaacagtctgataagcattatacaggggggtttccatgaagagcaatgagtagaaccaggctgctgtggtatcacagaggagggagatgctttgccttctggaggtgtcttgggagcatgtggtactctctggaagtttaagtgggtggaattcagagtaggggtaataataagaatggacaggtaagtgggaaccagatcacagggggtgcttaagccacaagaagagggtctgaactctcagctgatgtagatcgggtgcccattgaggggttgtaaccagtggggcagtgtcatttgtctttgaagagagaaaaatcactcttgcagcagcttgcaggatggactggatgggggaccaaactggagaccgggagaaaagttaggagattgctgcagtaacaaaggaaactagcctgatggcatcagggatggagagaagtgacagacactttaagacattaataaagagagtcagcagataacaggatggattatggggtagagaaaacaggtagtggactgggtcgaaacctagttttgttcttgaaaaactaagataaggaaatacaggaagggaagagagatgcacttcagggcactgagatagaaaagggagaatagatgttccagtgcttatacttagtacgtgagcagatatagtgagttctagcaagatctgttcagaattgtcagggcataatctagcctttggactggaatgta

SEQ ID NO: 60827 - DNA, 2012 bp, Homo sapiens
aatgggcaattggtttgtgaaagaattccacagaaatgatttttataggccgggcaagttggctcacgcctgtaatcctagcactttgggaggcccaaggcggtggacattgcctgagctcaggagtttgagaccagcctgggcaacacagtgaaaccctgtctctactaaaatacaaaaaattagccgggtgtggcggcatgcacctataatcccagctacttgggaggctgaggcaggagaattgcttgaacccaggaggtggaggttgcagtgagccgagattgtgccattgcactccagccggggctctcaagagagtgagactgtctaaaaaaaaaaaaaaaaaagaaagaaataacttttatagagacaggggagcttgatttaaataaaaactaagcttacgaaaaatagttagtgaatagtgaataaatgttgttttagctattcaatcgtgtattaataaatgacatatttaaaattggttaaatttcattagaacaacaacaagaacaacaaaaagtaaacctggagaaattgtccagccttgggtattgtccttgttatttggaaaggtgtttgcaacaatagcaggtgttttccagggacctaaaggcaagattgtttagctcagaggtaagacatttgggctctgaacccaactgagtcactctgtgtgacctcatgtactggtcggtaagccactcttttaaatgggcatagtaacaactacgctcaccaactgacaagcttgtgaagatacagtgagataactgatgggaaaacactgctaaaatgttggaatctgtgtacaaacaaaagatattgttttattttgtaaaactaccctgtaagtcatgtttttactgaccaacagtaaaataaggccggagaaattgtaagaggcagctttgagcctcttcattgctgctttgaaatctaaagcattcatcacactttcaaacacattaccttcctggtggggactacaaagtcaggctaaaggacatttcataacttacaataattctgctgcttgattcctttatcagatctggtctttgatttgagtgtttaagagcagcatttttggcatttcatggatgaaatgaattttctgttcatgagcacatggtgttagcattgaaaaatacttggggaaacctcttttttcatagccaaaagctcactagttctaagtgtcacggttaggagggctgttacatgccagttgaaattggggaagtggcatagttttgctgttttgggccacttgggaagttgatgttgagggacaccacagtgtgtaaggtgtgtttctcagttgcaggctgctgaagatgcagattgatgaggattctaccattcctcctcctgatcctgttacttgattcgtgtattggatttggtctttggtctgagtgttttaacagcagcctttttagcattttgtggatgataatgaattttctattctggaggaagactgctctttgggaacagaacaaaataatttaccttaataggagggagagagggactttgagaaaatgtctggctgttcatggtagttggaatagtataatattacttctgcaaggtacctaggctgctgaaggaaaagttcctttgtatgtatcaagttcctggtttatccaagcttgtgagggccaagctgtgcacaaggcagcatatagttttgtaaatagcacatttaaatagtcagaggacttggattctaggctcggctccaacactggagacctacagcagatagggtctgccttgctgactttcctgggctgctctaggctgcagcattagcgattgtcaatgcttattttaaatcgcatttctgctccttagtactcactttcagctcttcaacaaagctataccaaagctgtcaaagctatgaaagccattaatttgtgcagcattatttgatgggttttagttctaggttacccccttcctcctaatggggctgaagtacagtcagtgcccct

SEQ ID NO: 60828 - DNA, 1007 bp, Homo sapiens
cactcttcacctcctaacctttaccttggaagaatttttaactagggtgatcgttggaactctgtgaaataattagcagattttattgttaaaatatttatgtacattaaagctctttaatgaatttttaaaagaggctaatttctctccttgatttttggtgggagaaaatatagtatactctgatgtatttgagatcatttctttgcattatacctgtgtgggtgaaacagccaaacactttcagtctcattgctttgtacttttgttcctccagaagagatgttctctttgatagaatctttggaaagagagctgaaaaattcactctggatttttaatttgatcatatgaaattttggatctctttaatttgtatgtctcctgtggctcttttctttgctaaacttacatatgtgcctacagagatagctcatttcttacttaactttttgctttttttaattttttaatttttttaattttttttattttttgctacacactacttccttacctctggaagagctgtcatacaaaagcaatgttctcaacattccactcttctctatcagccatcctgcctccctgcactctccttcttgcagtttctttcgcccttccaaagaagccagcttcacatcgtttttattgtctgtaaaagctctcaagcactcacctgtagctcctgggttatagggaatatcttgttgtcattgaaaatccaaggatatggactcttgctgggagcctggcttgataagcagcatgttctcagcagtaaactgacagtttaggatattcacctaagtttaattcagctccttaaaaaagtctgtgcattgggaaattttgctaccaaggggtaggtagatgtaggttctggccaagcacatgttgaagatggatccagtattgaggggccgtaccatgtagcctttctccctactctggttctaaacttgtttcttcttgaggactactgtagctccgccagttgctggcaa

SEQ ID NO: 60829 - DNA, 1068 bp, Homo sapiens
gcatattttgggcactgaaggctcttcattatacatccagtctataaatttcctggtattataggcatctgtcctttggagatgtatttttttttaacagatttagtgttgtagatgccacgtgcataggacagaataaaaacaaatgagttcagttttttaattatatattttatgtgttgggttccatctgggagacgtgcatgtgtttcaggatggatctgccaactttgatagccgtccatttttgcagttccccatagactgtagaaaatgcccttagctctgtcctagctctggaaccttctaagtgtggaatgggccctactcactactaatctgataaagcttcctttgctaccaacttcagtcacgtttctgcacttaagaccactgactaggcatgcccaaccttattcttttactttctgtttctagtacgttttctctcttcccttgattctgacctattatctatctaggctcagagcctgagctgagatcccattttctttcctttcctggggaccttctctgacccttctcttcccagatcatctggatctcctagcctcttgcaggcctcgctgtgcctcctctgtcttctttttgtttaccgagggcagtttttttggagtggggaaggacactctaaaggctagatgatggattcagtcccagattgtgcctcacctttcattctcatgttggtgaactggtggtcttctttgcttctaccttttctaatttacaattttaggtctcatgacctaaataatggactgagccataggaattatagggaaattgtagatttttctctaaagttagtaatcccagcaatttgacttgtaggcagattagaagataaggataaacaaaaagacaaaccaaattatcatctcaccagagataaatgatgctcatatttgggttcatataacttttgatatttttctgcatgtgctcataaatgagtactctgtgtacatgtgtatttctaaatggtatcattttggccttctcttttacagcatgcccagggattgtctatttccctcctctcaa

SEQ ID NO: 60830 - DNA, 1495 bp, Homo sapiens
gagcctctggagcatttcacaggccaggacttgatcaacctaacccaagaggatttcaaaaaaccccccttgtgccgagtctcctctgacaatgggcagcggctcctggacatgatagaaaccctgaaaatggagcaccatttggaagcacacaagaacggccatgccaatgggcacctcaacattggcgtagacatccccacccccgacggcagcttcagcatcaagattaaacccaacgggatgccaaatgggtataggaaagagatgataaagatccccatgccagaactggagcgctctcagtaccccatggagtggggcaagacttttctggcctttctttatgcactttcctgtttcgttctcaccacagtgatgatctcggtcgtccacgaacgagtacctcctaaggaggtgcagcctccactaccggacacattttttgaccattttaaccgggtgcagtgggccttttctatttgtgaaattaatggcatgatccttgtaggactctggttaattcagtggctgctcttaaaatacaagtaagtcaagtaaaagctctaagattcaatgattatgggatttgcactccaaacatctacttattatttataaatgaaatttatcaacttgttgggatcaaaacatactatttttttttcttttttaaacacataccctgttggactaacttactgtctggaagctttaaaagaaaatgttgtttgttgcctgttttatgcaagattcatacaggatgatgaataagatggttagagatgatgctctgttttcacttaataagaaagaaaactctcagacatcttcagacagtacaggctattgaacaacagatcaaccacctagtcttggttggtgttactaacccattaaataaatcgacagttggcctaagcactataaattggctgcatagcttttcccacacagagtcagacatctagagccttagcaatatgtatttaaagatgtttcacacagaattcagaacacctgttccagagtggcttgggttgttgggaaaacaataccaaagggtatgcctttgggtaggtgggaagtggatggacctgaatggattcccaccttctactactactacttaaaacaatatgtgactgttgcattcaaatttctcagagttttaagtaggcaactcccacttagttccaggtgtatccaaggtggctttcatatctgaagctctaaactcaacatggaccccctcagactggctgtttactggggttgcctacattgtcccttcactgatgtttgattttctccttagttaaaggaacgccttatggtttccatgaatgagggttggaaattggtttgttaaagagctgagtttctctccagtggagtgtgtttcatgatccaccatgtggttaaatattaaggaattcatcttacagcaagaaaacaaaatgcacactgagagttcatgctgaatgttctttga

SEQ ID NO: 60831 - DNA, 1334 bp, Homo sapiens
aacctgtttatgtgacaaagctataaatatgtattactatagatatggaaatacagtacagtctgtggcagaggcttggtattctgttgtacaatatatttaatcaatttctactctagagcttttagattctttttctagtttttttttttttgccataatgaatgattgtttagatttcttgatcactaaatatttacatatattctgtcacaaaatgactcaattggaggcttggggaaggggaggcagaattagctgatgttgctggtgccaggactctccatgaaatgtataaaacagtattatatttcatatcctcagtgaacaactataaacatgtccatggtatacagtggacatggctgatttattgtcattgtgtcatatctgttttgtctccccaaattctctcttttcttctacaacactgaggctactacgatggaatgggtcattttgggagaggtggggaaaaggggggaaactatcaattgcataagttatagggcagctactgagagaaatatatttcagatgttgtgaaatctaagtattaaacattattgaataaacacagtgtggaggagaccaaaagatgtcattaagtaaggctcttctaacagcctaaagtctaccagccaaagtggacaaaaaggcaaaatacatacactccagcaagcccttcttcttgtatcttagcaaagtaggtcagcacacacttacttagttcaaggggccatttcataggggatgattttatttgctaaccagagttggactgtggaattctgagcacagcatgtaatagcaatttaaaataagggacaatttaaaggttaaggcatcaaaagtaatcttctaaaattttctcaacagtagactgaaataaatgtgtaggtccttcagctgaaactatgtggctgttactttaaccatttttgttcttcaaatctataccattttatgaactcttctatttaactcttcaaatgctaaataacaaatctataccttattagatttgtttggagtaaagctatccaaattgaattagagaataattgaacacctatctcatgagtatttcagtgggctacattgccttaaaagatctgttaggttattatttactttttttgagacaaagtcttgctctgttgctcaggctggaggctggagtgcagtgacaggatctcggcttactgcagcctctgcctcccaggttctagcaattctcatgcctcagcttcctgagtatctgggattgcaggcatgagctaccacgcccagttaagttttgtatttttagtagacacaggttttgcccaggc

SEQ ID NO: 60832 - DNA, 1049 bp, Homo sapiens
tgatcaagaatttgtaactactactgggtagcagaaacatgctaagagagaagtcatttagaaactgaaatattgcatcctctaggacattttgatggtgtatgagagaagggaaaaatatgtttgaaatctgaattgccttagaaaagctggagggaacgattattttacataacatgtatgtaaagtttatggtgttattgttctcatcacttctttagtgttaaggaggcactattgcccattacaaggttgtgattggaagtacaatcaaaactctacttttggatatcaggaacattgtccttgtgctttaggtcctcagtagctcttctggttagggacaaaagtcctaataaggaaggtcaaggatggagactagcccttctggttggggtgagatggagggaagtacaaccagaaagtgaaaagcaggatggggctggagcattcttcaagatcttcttatcctttttaaaaaaattaattagtgtggaatggtaataacagaaagtgtactttcagccattgtttttggacatttgatgaactttcagtctgccaactcatgtctcctttagttctgataatttttttaaattttctctttttagatttaaaatatttctaaatctttgtttgtttttttcttggattttcttgaactcctgctattcagatcttgggcttctagattgcttttttattattctcttctctcaattttccatctttcattttgtttcacatctgaaattttttttcaactttttctattgttcctattgaattgttcatattgactaggaatttacaggagctctctttttaaaattctctctcctttttgtggtaccatcttgttcttttttgataccttatgtctttgaaaatgttagtaatagtttttcatagtctgttttccaagttcttttagtttgtttgttttttatcttcatctctggcttttatatttattagagagtttcttcagatacctggtgattttttttcatattttaaagtaggcacaaataaaactgtttgga

SEQ ID NO: 60833 - DNA, 1078 bp, Homo sapiens
agggagccaaactttggtgcttttaaccagcagttagttaatagagaagctcagtgaaagtgggacctggaagtttgggaaattagcacatcttagttagaagcaagaagtcacagtcagcggtgagtggaaaggatgtaatgaattgattgatggatatttgttttcaaagaattaacgtaattgctgtcaggaaaagaaaaccttaatgcattaagggtagggactggtgtggagatctaggtagagatctacatgtgcttttcttaaaatcttttgattctttttttacctccaggagaccagcagaaggagacagggagaaccatatatgggagcaaagaacatggtgggcacgcaagtggtgctgtcatggcgaggaatgctcaaaggatatacatttaagcgccatgaatttagaatttatccctttgcatgttctctagtctgaaaatagtttgatcttttgtagctatctaaataagtattagaaatttattttgggaggtagacttgaacttgatttctcctatctgggcctgtgagttgttgctaattttgaaacttgatgttagtccctagggttgtgttccttaaattaggctttttacctcagtcactccaatttatttttataagcatactttggtagactttttctcagtgaaatggaaaaccattggttacccagctaatgagaatttataatcctcagtggactgcaaaacttaacttcattctgactggcatgagatggtatctcattatggttttggtttgcatttctccaatgatcagtgatgttgagctttttttcatatgtttattggctgcatagatatcttcttttgagaagtgtctgttcatatcctttgcccacttttttaaaaattatacttcaagatctgggttacatgtgcagaacgtgcagttttgttacataggtatgtatacacatgtcatggtggtttgctgcacccatcaacccatcacctacattagatatttctcctaatgttatccctcccctagccccccaccctccaacaggctccggtgtgtgatgttcccctccctg

SEQ ID NO: 60834 - DNA, 1074 bp, Homo sapiens
gattgacctatttgtaatttttatttttattttactttttcagacagagtctcactctgtcacccagaatagagtgcagtggcacaaacatggctcactgcagcctcaacttcccaggctcaagggatcctcctgcctcagcctaccaagtagctgggaccataagcatgtgccatcacactgggccaatttttaaattttttgtagagacagggtcttgccatgttgcccaggctggtcttgaactcgtaggctcaaacaatactcctgctttggccacccaaagtgttgagattacagatgtgagccactgcacctgacctgtaatctttgtgtaaagtctttttcttatcagatttttaagaaaatatctgctcttcatatttacagtgtatgatggattttttaaatattctgtcccctgttgtcatttatcttttaggcttgtttatggagtattttgtctacaggtttttaatcataatttattgaaagctatggttcatatgtttgatgttatatatacgttaatgttggagacttcataaatgcttgtgaacttgtgaacacttttatgtataacttattttgaaccttggttctttaagtgtaacattccacagtaatatataatcaaggctttctaagagtaaagtatttatttgacctaatgcaaaatagccttggccgtgtttgttcaaatcttttatctattttacaaattgttttataatgcctttggttaactaatttgaaaacttacataatttatataatttctttacagttcagtggtcattgattaattgcaaggctctagttttgttatgttgaattatagttatggaagtgagagaagaaagctcattaaaatttagtattggctgggtgcagtggctcacgcctgtaatcccaacactttgggaggccaaggagggcagatcacctgaggtcaggagttcaagaccagcctggccagcatggtgaaaccctgtctctacaaaaatacaaaaattagctgggcatgatggcaggtgccagtaatcccagctactcgggaggctgagtcaggag

SEQ ID NO: 60835 - DNA, 1042 bp, Homo sapiens
cagctgggagtctttgccagagcaaatgacagaatggaattgcaatttactaagctgaagaaggcatgcaggaggagttggcttggaggagaagagcaggaatttggttttggacgttttaacctagttaggcagcaaccatggtgtatgtttctttgtggttcactgaatgcccaggacaatgctttgtgcatagtaggtgcttagtaaatgtttgattttattttgattcagtgatttggcttttgtaaatatatattaatataatcagtcattagctgcttagtgctggcctgctttgtgccaaagagaaaagctcattaggtttataaatagaagataaatttcagctgtgtcttcagtgcaattgatgtggctatgcctttgccagagtgctttcataatctgttctctgaatgctgatcaaattcttataatgaacaggatgtctatataatgtgtacttagcttcttaatattatgtggatagtttgactcctctaccataggagtagcacatggtcaagatgtggaatagatacctatgggactgctaatggttattttatggtaagaaagtagtttccagaaataattttagaagccattgttgggtatttctaggtgctagatttttacctcttgtactgacagaatctttttctcccaatgtggtattaatacataattgccgctcttagtcatttttccagtttttatctttatgactgacgttttgttcttttacaaattaaatccgtatttttccttgttccttatttgtcttttatactgaagtaacctgtgacatttgaaagttaaattgtttgatcttacagtttacatctttagatcatttgacaaaatcttgaaaagcttttaatgagccatgccactgtctcaggttatgatcacataatgctctcatcatatatgaaactgacttttcatcaaatggtttgggtattaatgcatccagaattttgaaaaattgaacattccatgatcagggcgttaagacaacttaggacagtgatgcctg

SEQ ID NO: 60836 - DNA, 1653 bp, Homo sapiens
agggaggatttttaaaagtctatatttcagcctgtcccattttttgattcagatcttagatagaaaaaggaagttttattttggtgaccgagatataggtcctggttgggtgagtctttctgaataatgctcagtctgctggtaattttgtcacttactcaagcttcaggccttgagatgggcaaaagagctctgttctcttctgtttttctttcctgttgctcttgccagaactgccgttgccaggaagtttggggcaggtcccaagcaacatgggttcccaaagaggggtgggagtagaaatctctagaaaatatgactgcaagagaaggtgaattccatgactgcctggccttggtggctgtgtcacaattgctgcatatattttaaaatgtatatgtaagtcctggacttgagaattcttaggaaacccttcttcttttctctctttttggtctttcctcctactctctctgtaatctttagttttttgaaagcatagaatgatatgtaattattatttataaatcatgtataaacaattgaaattccctgaccctctccaattctctatccctgtccctccgtagcctctgtatgtatatgtttctagatgttttatgcttacatacacgtgcacatatatatatatatatataaatgtatatgcccacatatatgtgaatgataaatacatttttcaattaatatgtatttctacgtcacagatatgttggtatgtacagatataccacattctttgaaatgaccacatggtattctgttgtgaggaggcatcaaatttatttatccaaaccacagtgaaggatatttaggtgcttttggaaattgtgttacataaatagggctgcacttttgaacacacatcttgactcatttttaatatatctgtaagtaagagatggaattcctggggcttaaagtatattatacattttggtaaataatgtcacattgccctatgactgtcataaaggttatgacagtcttaactaatttttgctcttatttaatctgagcatatgttatttgtacttgtctactatttcatacttttggcatattttattccatatattctgccttagcctgtgctcctttttcccctacactatcaggaatacatagtgctttaatagtagatgttcaatacgatatgggttttaggaagaaaaaacctccctactcatttgagaataatgtagtaaccccaagctcagtgcattgtcctgtcatttttgtggacactgttttgatattccttaaaaatggatagtaaacatcaggtaggtactaagatatcaattaagagaaagtactcctattcactagacactagtagtgattaatcccacttaaaaaatccacttattcattcagcaaatattttttcaaagcctattctgtgctaagtgctatactaatccaccgaaggttttatatcttactatatatatatgagtttggggtacttgaatagaagttacaaattagtgtatgaataatgcctttgagtggttctgaaaacattttaaattttactgctgtagttggctgtgaatgaagaaactttgcctaggacagactttaggactcatttgtctcagtctctgtttatgatctgctgaagaa

SEQ ID NO: 60837 - DNA, 1053 bp, Homo sapiens
ctgtcttctcactgtactctcatgtggcagaagggttgaagaagtcctctagggtctcctttataagggcactgatcccattcatgatggctctgctatcatgatctaattatccccaaaaggtctatattcagtgtatagcaccacattaactgctatgctttatagctacctcgttttaaatattactaaacatagccctagccctgagccaaagcccctttctattacatagtctttattttatactgaaaaaatggcatctttgtgcctattgaagaaaagcaatggatatatcttaataatataggatatatagattatatgtgtgtgtgtaaatagagcaatatttatagagaattaaggcaatttaaaacaacacatgagaaagtatacaaatcaaagttttttgtttaaccaaggaaaatgaaactagtcattattaagtgttgtaattaaaaaaaaatttctacatcctgggtctccagattataaaggtcatgtttatctctttttctgctgcccaccttttccaaactttcctgtacaagcgatgcttatactgtttaattcaaaagataagaaagccatctttttgttttatattattaaaagattgatagtttgaaaagatatgtagattgttttcagactttaaacccaaaagaagaatacacgtttaaaagaaaatcctgcagtatttttaaatactgataaaatataattacaatggaaatctttttaaacttgaagaaacggatctttcggctctattcatctgtaaacaatttaatgataaattctgcataattcttctatgtgatatcattagaaatgtagtacaaagatctaatttaaaatcacttactttctgagcctccatgtcttcatctgtaaaataggtacaatacactaacccaaaatttttgccgagataatttgataatcttataaagtcttttcaattaaaagacttcagtatacgtttcttcctttaaaaaaacttttttacttcttcttaagactctattgtagagtttatgactcctgaag

SEQ ID NO: 60838 - DNA, 1178 bp, Homo sapiens
gtggccccagtaaatgttggtgtatgtgtgagacttggtgggaagagctgcttgctgtaaatagtggctcctctgctcagcagttttgtgaagtcagttgacttattctttaatttcatcccaccacccaacataaattttttggttcattaaaaaaaaaaaactttctggatgctttatgtttgtattattttttaaccaaattgggttcataccagattaaatttcaagttaaagataatttattatggcagtttaaaaaaacacagaatgtaaagtgaatagtagaatgaactccatatccgtatctcccagcattaacaatcaactttctggattcttgttctctctctccctttcccctacttagttctggggaaagaggggcagtattttaagacaaatcccagacatcataccatttcactcccatactttgttgtcatgttcgtttttcaattatttaccttttgtctgttgacttttctttctcttgtttctgaaataacacttggactgtgccctggtgatgttatgaaggtacactttctggtagtgttgtcctttgcatggcgcttgctgggctggtcttcatggatcctgaggaagacagctctgctggtatgcagttcacgtctcagtagaacctagtcaccagtagaacccagaggtatcactgctacctcgcgaccttgtacagttaggtgaaagactgtgcacttgtatactatgtttagaagaaatggactcaaatctaagtcatgatgatgtttattattttttaaacccataaagaaaccatggctttgattaagactctctaaatggatatagctagattctattttgtttttctaattacatagacagaaaacttttgacattacaaattaatcatttataagtttgccatcttttgagtacagtaataatttatttgtgcaacatttcagtttttttttttttaacttttactttaggttcagagtacatgtgcaggtttgttatataggtaaattgcgtgtcatggggatttggcgtacagaccatttcatcaaccaggtaataagtatagtactcgacaggtagtttttcaagcctgaccttcctcccaccctccaccctcaagtaggccctggtgtctgttgttcccttctttctgtccgtgtgtactcagt

SEQ ID NO: 60839 - DNA, 1539 bp, Homo sapiens
tggaaataacagctcactttctttccagactccagtttcattgattactcaatatttatttaaattatgtaataatggaaacaagcaggtttggagacaaatacagtgagtcttggtaagcattgcatattgactaatgggagcagagttgccaagcttaggttggctaatactaatgacagcgggcagttgcttaatcatccacatgcatcagtatgtctgagtgaggggtaactaatccagtgtgagagtcaagtagaattgtttaagagcactttaactgtagtcaaatgctacacctgctccttaatagcttgaaggagctatttattacagggatcccaacaactcgtgtgatttgatttttactatgagttgcacctagaattgtaaacattcaatatactaatcataacagcgaccatgaaggtgttttttttcttggggaggtgtctaatcacacacacacaaaatcagtatgatcagagagggcaggaaattgatttatcaccctcaggggcttgatgttgctcttgttaaagggacaagcttgttagatgtgagctcacgcaaagtattgccagagatctcctgccaagctcttcctgttatgtaaaagcaaaaaggagtgggcagattatgaaattattctgtatatgatgattagttcgtgatggtatagtgatttgttaatctggttcattactttaaaaagcttaatcatagtcatcaacttccatatttttactttttagataggcagaaagaattcagaccagttattagttgctaaacaatttgttgttgaatgaaaagcaaaatcctggaaaaaaacaacttagagtattagggtctaacagcctgaaagtcattgtaaacttgacttgtttttctgcccctgaaattaagttagatgaattaaaacaaaaggcaaaggcagttatttaaaaaacttgtttttgctattgcatatttatttcatataacctcagatttattttgatttccatttcttggtgcctggcaccagaatttgtgcagatctatttcaaaaccacacattgtaaaatcaacactattgacagttatgggtaattgaatggcaaatggggtttccaactgggtgctccaactgggactcttaaacaaggcttgacaaattctgctttgtcaggtgtcataaaatatggttcagaacgcatctgtagtgtcaagggaaaatcacttatgccattccctgtattaccacttctgactcttgtccgtcctgaagtaggaattcacatggcttatgatggagtctttgttttaggaaacacgacacaaacgctaagactcttcagatatcatcactgaatctttaagttcaatccagttgctagatttggcctgtaacatttggctcagggattcctggtggccaaaggaaaacatcacaagagtcacattatctgtaagataggaacagactagttgttttaaagaaaacttctcttaaaactcaaagcagaaagatgtcagaatgggatttaagtaatt

SEQ ID NO: 60840 - DNA, 1097 bp, Homo sapiens
ccatctggctccagaatcttttgacaactgtactaaccttcctctccattagaaagtatagacagttatactgaatatatatgaaaagaacatgaacaaccatgtaaaacccatctaaccagtgaaaaccattcctagcacctcacgcacgtacttccagattccttccttgaactctttttttttttttttgagaaggagtctcactgtgtcgcccaggctggagtgcagtggcgcgatcccggctcactgcaagctctgcctcctaggttcatgccattttcctgcctcagcctcccgagtggctgggactacaggcgcccaccaccatgcctggctaatttttttatatttttagtagagacagggtttcaccgtgttagccagaatggtctcgatctcctgacctcgtgatccgcctgcctcggcctcccaaagtgctgggattacaggtgtgagccgccgtgcctggcctccttccttgaactctgatgggaagttctctccccctgacccttttctacttccaagagctaagcataatgaacaatctggtatatatcttcccaaatatagatgcagttattcacattgtacatatataggtaattcatacacattctcatatatcctcctgtgtgcattgttctgctaagcactttttctcactcagtatgtcctggaaatatttctgtatgtgtcattgtatataatttaacacattcttaaactgactgcttatatggactgcaccacttctgtaggatgggtgtactataatttcagtgcaccactttcattgatggacatttacattgttgtcatattttttctatattattttcaatagttgcatattctatattattttcaatagttgcataccttttattgtatgaaagtactataatctcctgttttgaaattcagattattagaaggtacagggatgaatattctcaaaacttggaatttgagcacatccttccttagttacctcccagtcccaattaaaatgctaagtccaaatgatcaccttgtcatttaaaaaaccaacttactgcggtatattttctatataattcagtgattttcag

SEQ ID NO: 60841 - DNA, 1062 bp, Homo sapiens
aaatcctagaaaaatagttgactagttctttgtttaattaaacatctccagagaaggtttttaaagatttcctcacaattcaaataatctatatacttattcatacatatggaaagtcttttaatgatatcctatgaagggcaatactgtgcagtattttcttggcttggcatgtaatgttataccctgaaaatgtcaataaatcttaatttccagtaggatcgtggcccctttttcttgccatttgacctgagatgtctaatggttttgtttattcttcatagttttatggaggcaattgactccattaatttgaatttactgaaataaaagccaacaataggaagatagattaatttttgaaaaagctaatgctaagctttgacttctgttactgttcagtggcattcaatgcaaaaataattgaacctcagaacattagagaaatagtcattgttgttttgagtgatcatgatgcttattacgcatccatttcaatgcggactgatgcagtaattgatggatgatgccattaattaggcttttgaccagacaaatttattgtagtttggtaattttttaggcagaatattgaaatgaaaggtaaatggagatttttttaacaaaatgaagatgtttaaaatgtcaacagaaagctcacaaataatttcttgggtacaacagttttgtaccactttggtccatcttttgcatctttagcttaatcttaaaaaatcaaggtgactaagtaaggtgacagaaattcatttgtgaatttgtctttgacattttgtgcaggagcataaatgaatacgacaagggaatctactttgaaaaatgagtgtttgaaagtaggtgtttcttggatttttttagcctcagtgaggacagatctgtgggtgagaccttggtgctttgttgaaaaccagttggcattgaagaaggcaaatgaaaaatagaagcctaatgttgattgtgacaaatgtaaaacatgtatcccttaagaaaatttcaggagcttttggtggggggtatttctggttggttggtgtaaagttttgg

SEQ ID NO: 60842 - DNA, 1428 bp, Homo sapiens
aatggggaaatggtaaattcgaaaactttagattcataacttacgttggtgtctagcagaattgtagatcacattttttaaaagattggtcagaatcacttacaaaaataaaagtgatgatcagtatgtagcgtatgtttgctaagaattattcatgtccaattaacctcatttgttttttaataatgttactggacaagtatatcagggcattgccatagatatgcaatgtctgcttcatcagaacatttcgttttgttatgttttgagacggagtctcgctctgtcacccaggctggagtgcagtggcgcgatctcagctcactgcaagctccgcctcccgggttgacgccattctcctgcctcagcctcctgaatagctgggactacaggcgccggcatcagagcatttaataacgtgctacgtgtgttctttactcaagatggaaaaatatggattggatagcggtatagatgaatgagtttaggtcttttacccaaagagggatgatcagtggcgtaatgtcagacttgagcaaggtgtcgatagtgtcgcttgagaaaggcatatggtacagctggtgggaaaaacttcacacagtacaagagatagggtatttggaaccaaggagatgataattgcgtcgttctttgaagcactgtagatagtggttacgaatagagactccaaagccagactctgggcaagttatttgagttctttatgcctctatttcttcattcataaaatacaaataatagtaataatacctaccttagagggctgttgaagatgttgaaggattaaattatataatccatgtaaagtgcttaaagcagaatcggatagtaaattgtatatattagatcctagtcttctgttgttgctgctgttaactactgtcactactactacttcaggcaatattatgcacatttctgggtttgtgtttaaacacatatccagaatgtggtaaataggttagttgttgttttttcaggcagagtcttgctctgttgcccaggctggagtgcagcatcatgatctcgactcactgcaacctcaagcagtcttcccacctcagcctgctgagtagctgagactacaggtgtgccaccatgcctggctaattttttaatattttgcagagacaaggtctcactgtgttgcctaggttggtctcgaactcaaacttgtggactcaagcaatgcttctacctcagcctctcaaagtgctgggatgacaggtgtgaaccactgtgcctggctgtaattaggttttggagagtgtctagtaactgttatttgaacagtggtccaaaaacaataggcgtcttcaccttagtgtaaaagctgagagactttcaatcagatgaggtccacagaaaaaaaattaaaaaattaaaaacttttaagctgagaaatga

SEQ ID NO: 60843 - DNA, 1050 bp, Homo sapiens
gatcaaataggcactagctatttacacctgagaaggttcagtgcagttgctgaagcagtgggtcaggatatgggtaggatcagtcaacaaatgctctttatattgcgtgatgctaactgccgtggcatgagaaccaagggtagggggtggtttctgtttggggttatcaagtcttcctaatggcagtttttgagagaacgggattgtgtctacagattggttattaagttttggggaagtactcactttctcaaactccagtccctgtacgaaacagcccttttggcaactcctttggttggttggaagctggcttgtgaatgagcttggtactaagtgccacaaggatgcacgtgcccctgtgttttggactgagtgtgtttactccataactgtgctttctatttagtgtggccaggtaatcgctcttgtggaatttgtcaataaatacatggagaagaatgcatgacatttattttattttattttattttattttattttatttttgtgtttgttttgtgtagttataccaaaataggaaatctggagacctaaattctgttaccctgaatgctacaaatatttatcataacatttttatccaattgagttaccgcttttaaatttatgtagaaataagtccagtgagccacttaaaaaacccgcttttctacataagaaattagtgcagttgtatgatgccaagtaacttattttcttgcaagagtttggggaagtaggggacagggaaagtggaatcctgtgacgactgaggatatacacaatgcaacagggaagttatcatgatcagaaacactgactgcgtacaggaaagacaggttaaagacgtcccagtaacataaaggatggtgggaagacttgtaaactgaattatgaagttatgaatatgaatgagcaagtcacgaatagcatcattacacatgcatttatgaagatagagactgtgatgaggttaaaagatagactgtcatggagagaggaagaaaattctttgcagctggctttttttagcgagagaaagaaaat

SEQ ID NO: 60844 - DNA, 1674 bp, Homo sapiens
aattggtaggtttaaagcaagcaggtgctagttccaggaggtcctgttgtgactgagaggtggtcagtttaaatttgcaagcaaatgtctgaacggtctgtttaaggaagtggtgggaaagtgaggagcccagcctgctaggcaggacttgggtctcttcagttttatttcctgccaccagtgggagccattcaggtggggaatggaatttgaaactgtcaagggtgactgagccctgattctgagaaagttaaacctatatttaaagtggatgtcaaggcaacataaaatggtaagcactcactatccctaggtatggtggtagtaatgtgccctcagctttaggggaacaaggagtggaccagcgggttatttggcagagggtttttaagatcggggttgcagaggtagaggcaaggctttgagtgcctataaatgtcatggcactggacccgtagtttcaccgtcacttttttttgataactatatgttgagaatccgtgtactttaaattttaattttagacaacaaaggcatcctagaaccagttatcctgttctcttgtgggaatgttctaaccacattggtcattgtgttgttcttatttctgaagcataaggattattggaaacatctttcaagtgctttgagttatgattgcagccaaacatatttatgaagccttccttcttcctggagagaacacctactctgaatgttaagcttggctggatcctaaacaatactaacaaactagatcatctctctttcctgtctgtgctgcctttccctttctccatcatagatctcaaagtatctctctgtgtccacacacacacaaacacaattgtattttttagactgcagtgttaagtttatggagttgttcatatacacttaagctttatgtagtcttctcatgtaaaagagctgctgtccttgatataatagccaacatattatcagttcagccagtatagctcattgtaacaattacataaatataaaatatcagtgctcttaaaaatacacattaatttacatgaatgtttgaggaaagctgcccgtaaagcaaattgtgttccttttgatctctactataaaattatttaattgactgagaggaaaaggtttatgacatgatggcatgctcgactttgacatttgtcatgtgatgatgatgatgatgtgttgagaggcatagagggaggggcccgcctgctggaacagcggctagaagacactcaacctcagtgactcaggcagaggggacgaatgcctgaaccaggaatggaaaaaatggtccagatatgaaagaagccttcatgttacgcctattggtagtgaaccattaagagagaaaagagggagctcagatgattccagaatttaacttgaagtgtctaggagagtaacattacctttatgaggaatatgagagtcaagagagatttgacagcttcatcatctaggagacaggcccaacttaagtacctgttgctaaggataaatgtgaggctataggccgatcttgcttctgctcttttgaccatagtttggtttccaactggaaacactcttagagatcctcagagagagatgaagcagtcagttcaccctgtcacttactggcagagctgagactaggaagggagctcttggctttttgtgcag

SEQ ID NO: 60845 - DNA, 1029 bp, Homo sapiens
ttaacaaccagcttgctaaaaattttgagaatttaacaattggttctagtggcctggtataagttggctctaatacaccactaattgtaggtttcctgttgtgaagacatttctaagccacaattctttaattatctgcctcagccgtggtggtaagagtttcatttgatgaataaaaacaaggtttggttttgagtcagtgcttgctgtaactcaagttgtcatgctcatattgtttctggaattgaaaatagatgccaaaaccaatttagaatttagaacagtttcttgagttgttgactcagcttcataactgacccctggcatcgcttgcctattctggctgttaaactgatctccaagtgctagtattggcgatcagtcattctgctcactgcctattgaacttccttctctcccttccccatattccttcaaatcttaaattccttcaggtagtggtgctacagagacaagtagtcaggattcctcccaactaagcattccatgcagctttgcttttgattcaaaattaagttttaatggaaacccaattgcctctagggagagagtaaaaacaaaacaaaacctgggcagtttaaggttcatcttggcttgattaaaatcttagggagtgaaatggaggaaaaaaacgaaaccagatcagacatctcaatgtttcttctagaagcaacttcttcagttttctaacttgccctttagaaggaagcaatcgaaccctgaaattgctaagtaacagctaagattgtgtttgttgtttttactttaaatctcacccacctagttctcaaaacacattttttattgaaccttacaaaaatgccttggatatttcaaaacatttgcttgtgtcagttctttgaatcagacttacataattgtaaaacattcatttccccgatttcctcttaaaacaaaaggtatttatagttcccgctgagtcagggatggacttggattactgcaaaagtaatctgtgttcatttcaagaggaagctcgtggttaaa

SEQ ID NO: 60846 - DNA, 1022 bp, Homo sapiens
gtccatagttctggtataatgcctttgttggatcaaagcgtgtgtgactggagggaggcctttgttgcctggctcagagcagggccaagaaatcatttggtgtctcgtttagtccttccaggcaaattaatccttcacttttgaggagaggtaagaaggggttagggaggagagatggagagagaaggtgggttactctaatactgttgccgcctgggaaacagactaggtatctcttcctgaaaacataatggagggcaaaattttaagggttcaccaccccaatccttcatagtggaaatactgctcttaaaattttttttctcttaaggtaattttctgtgttgctattttctctttcctttttgtttttggtaaaaaagagaagagatgactggacttttctatgtcttgtgtgtgaagaagagactaactagtggaaatcaagaaatggcctttctgagacatgtaactaattagattctttctgcttatgacaggtgatggaactgtactggaacaatgggagaagctggtagcttataggaagccaagatgaccagaatgtttttaaataatccgtaagttaatgttcttggccttttggaattcttttaactactgggtaaattttctttaaggaaccatggtaaaaggatagcacaatcaactaacttgagtgcaaaagagaaactattttataaagtaaatatccaaacacgtcaaacaattgatgctaactttgataaatcttattttgcgtacttctttcttgatagggtgtgtcattttaagttgagtgtgtcaatttggtggacagagcataagtatttgaagaattaagagaattccctgcacatggtcagcatttaaattaagcttggaataacccttaggatatgcagatatttttggtcctagtggtttccttgggctccatttctcactcacgtatttttttctgtgggcatattttgaagtaaatatgaacaaatttggtgaatatgattaaaattgagttc

SEQ ID NO: 60847 - DNA, 1045 bp, Homo sapiens
tctccaacatgtctcttggaacatgttttattcagtgtttaagtccaatctatcacattttaaatattcctttgtttaaattattgtatgccatatagggtcttaatatagctcatataatggtcacagttctcttactgttctaaacgtgtcatgtttcgcatgttgagtagcttttgcaggccagccagggaacctgatcgccatttatacgattgctatttccttggctaatatgtttcattatatcctccaaatgacaagaataggatggagtgttaagggaggaaactgagtctgagttggagagaactgaattggagggtgtgtgctaatgtagaggcagaattgctcaccctggctcttggggcttcctctttctcccctctcctctctcagaaggacatgtggtgacatcagggacatgaacttcacctcccttttgtagtagttatctatagctacataacaatctagcacaaacttagcagcttaatcaatcacaaaattatctcacagtttctgtgggtcgggagtctgggaatgacttagcaaggtacttagcaaggccacagtcaagcatcagctatggctgctgtcttacctgaggctggatgggaggaggatttgttcccaagcccgtgtgattggcaggattcagtttctcatgggctctctaactagagccttggtttcttgctgtcagctggaggttgtcctcatggggctctctcagtaggcagcccacaaaatggcagcctgcactttcaaaaccaagagagaaacttgtagcagagtagatgttacaatcttatgtaatgtacccacatacatcctgtcatttttgccttattctattggctacaagcaagtcacagaacctgtcctgaaagggcgagggaattaggcaaggcctagataggaagagacagagatcaagggggccactttagagtctgacacatctgagactggccaagaatatggcttctctttatccttactctcctctctgtccattctcctacttaatagcagcgtgttt

SEQ ID NO: 60848 - DNA, 1026 bp, Homo sapiens
gatggggagtgtaagtctaattggggcatgtgtgtacacacacacacacacacacacacgtgcacacactatttgtagagaagccaggaagccctcattgagaaggcaacatctaagtaaggacatgaagaaagtggaggggtgagcctgctgtatcggggcaagaccatcctaggaaagagtagttcagggttaagtacagagcccttgatactttttttattttgcaggaaagtggagctcagccttgtctaagactacatagttcataagcactggacctcttgttcagactcagatctgtcataatcaaagccctgcactccctccaccaccccaggttactctaaaaggaaatcattgttcatcttaggaagctttccaattcctagcagaatgtgttatacattgtgaacactgaggatttaaccatatctgttctcaagcaaaaataatacataggcaggtaggtagatggattagttttctgtgctcaactaacggaacctcaaaattattacctggttttccagagctcttaagtttaagaaataaattttaagagctacactttctgctttttattttctttctctttttaaaacatattgcttgctttaaaaattcctctgttctcattttatatgtgagatttaaagacctaaaaaaatttcaataggtatgtagtggtatgtcatgttgtcttaatttgcgtttccctgatgatatattatgtggagcccttttcatatgcttatttttatccataagtcttctttggtgatttctccattaaggtcttcagcccatttttaaatcaagttaattgttttcttattgttaagttttaagagttctttgaatattttggataacaagtctttatcagtatgtcttttgcaaatattttctcctagtgtgtatatgtcttttcattctttttttttttttttttttggcggagtttcactcttgttgctcaggctggagtacaatggcaccatgttggctcaccacaacctccgc

SEQ ID NO: 60849 - DNA, 1342 bp, Homo sapiens
actttgacctgcttgtctctttgacccctattaaatgtttacctcattttcttgtttttttagcctttaatttttatctcctcaacaatgtatcatcaagatcaggggcacccattatttcatatcctgtgacctttggtggatgtctggctttggatgcactggctctctttgtaaggcacagcctgtgttattgtcatatgtcaccgtgatcctttaggatttttgtagtctttttttttttccatctaccaatgaagaacactacaaatgtaccttgtgctgagtaatttatgtgtctttgtcacaccatcatgaaagcattaagcaagtcccattttgcagatgaggaaataaggttccaagtggttaaacaacttgcctgctattcccagagagtaagtggcaggaatgggattcagcactgagtctgtcttgaattgtgtaccatagaaatagtatgccctgctgtattccctttttgaagcagagttttaaaaatattcttattcagctgggcgtggtggctcacgcctgtaatcccagcactttgggagaccaaggcgggcagatcacctgaggtcaggagtttgagaccagcctggccaacatggtgaaaccccctctctactaaaaatacaaaaattagccgggcatggtggcgggtgcctgtagtcccagctacttgggaggctgaggcaggagaatcacttgaacccgggaggcggaggttgcagtgagctgagatcttgccactgcactccagcctgggcaacaagagtgaaactccgtctaaaaaaaaaattcttattcttgtggaattttagtcttctctacttttttcagcttttgctactttccccccattttgtggcattttatttggtttataattataacacttaatttgaaccattaaaaataagtattttcaacttttattatttttataatatcactgagaatatattattggtatgagacattattaaaatatgccctctttctcacataggctctgatgtcttcactgattctgttttctgagttgattatgagtctagcatgggagacgggagtggacttttatatttctaatatggtcctactagtacagagttattgaagatgacatagaagaatgataagattttgccagaaatattcttccatagttcacaaagttgttttagaacctgaattctttaaaatatagaacatctattcaagtacttagttttggctcagtgaccactttcaatgtgtatagccaggaagttgcactatatagaaggatataggttttaagtttaagtaagtttaagagtatatgttatctgat

SEQ ID NO: 60850 - DNA, 1019 bp, Homo sapiens
atacacttatgtatgtggtctgtggttgttccacttaacttgctattgattgcattttggtaaaaatgaaaatttatcccagggtggtaattattatggtttgaaaaatacgctttcttgcttctttatcttttttatattgtcagttagcagttatttacctaaattgagaggagataatttataaaggtccatggttttaaaactcatgttataccatcagatgcatttggtgtgcagtttttttattggcattggatttgcatgcttgtttctgcttggcgttgtctaatagaagtgtactctgaataccatgacagccagaaattagttgggaattggtgaaataatgctttttttttcctatgtatacgtaacaagaagtgaataatagttaacttggattttagttttttttcttataagcagctcattgcacaaagaatgcactttaatttacttattacttcttctagattggaaagaagactgatgaagaaaaataacagcatgattcaggtaaactgatttttaaattatttaccttttatgcttaatttgtattttctgtgttctcccaatgagaggatctaaacaaacaatttttgtgggcaattggaatatataaggaatatcttggggatatagatgaaatagtcaaatacatattaccatttaattaatttagttatgtacatattttgaacaagtatgtatttatacaaaatgggatattataactaatgcttttttcctaccccagaataattttcttccaactctttacatacatatctgacatcagtgtcttcattatttgagtcacattttttaagcattcaatattattttccacagcctgttatcattttaggtgtttgcagtacagcacttttggagtctatgtatggcactctatttggaaattttatcccaagccacaagtaatcatttgcataatgttaggacagttgctgttttcattctttctgtgtagatgaacattgaagatctctact

SEQ ID NO: 60851 - DNA, 1029 bp, Homo sapiens
tgccataaaaccagttaacgtgtcagaaaattatcccttatgaaatttagtttcttttgaaacttctttgatgtacaaaaagataacgtgggcttactttacaagtgacaaaactatttcactttctggtaattcagaagacttctcaggtcctgaataacttgattcttttcctttaaatgatttatgggcagggacaaaacagcatattctgtatctaattataaggcttcattttcatgaatctctctctttttgttgatggcaaatctagccctgcattcaagctgtaaagaggaatagctttatttcacccactaactgtttacatcagacaccatattggtgatttgagactcagtattggtatctgtcaactggggatagcaaaacaggcttcataggaattggaagattaagcgagatcatgcattagtaatttcatctagcttctagcacagactagcttgtttactatctttataggtatttctgtacctatagaaagaaggccaccgtccctccccactcccttctctcccctctgctcctgccttctcccatcttattcccagaagtccattcctcctggacaacaggaaggcccttccccttctgtttctatcataaactgcttctctgtcctttggtctctggagaactggcagattgacctcatacaatcaactaatcagccaaaactttttcctcagacatgttaacatctttctgaaataataccactttgcagtcagccactacttgctcccctttccttaaagcattttatttttgtccagatacagggattcttagactcccagacagatccctaaataattatacctagcccaacaggcaaaactaatgtgtgctatttgaaggcagggcagtgttgactttttgggagagtggtgttcactttaagaaaatttattaagccacccaagatttctgggcttactaattttttaaaaaataggctttttcccctttctgcatgtaccctaattcatgtgtatattttac

SEQ ID NO: 60852 - DNA, 1044 bp, Homo sapiens
aggcaaatttgagaaactgaaaccacccccaggaatgctgaaataaatgtatcaatatgtaacaaaattggttaatatccatagagcaataaaatgtaatgtttggggttatcttttcttccaggtagatatcaatcatatctctaccggacaacatttatttacattgctatggacaagaattatttgtaattactgacagtgaaatggaaagttagtcaaaagtgcatagccttattgacttggatattctggaaacatacccaggaatctctttttcccatttctcagtcttggacagtttttctgatatttaaaaaaatgcttttggagcagttttattcattgaatactcacagtttcagactctgagataaatgctcttttaatttatgttaaagcctgaataataagaatatttatatatccaatatcttattttgttatcatgccccctgctccccaaagtgcagtattgaaaatgtatggttaaggttgtagcatcatttctgatctaagtatttcctctaatgactaaatggatagcactctctctgcttcttagtttttgttttgttttgttttgttttgttctgttttgtttttaagggagaggcagggcattgagtataagtaaatattttaaatgaaaaatagaacaatcaacagtatgaaaaattctaatattctgtgtacctatgcctaaaatgagatagcctatgaactgactcatcttaagaatttttatagaaaaatttgttagttctaattatgaatttaatagaatgagaattcatcatgtgacagccaaggtaatgaagaatgttttccaccactgtccaaacactgcccacagagaggcttcctttgtctcagggtgcctgtactgagattataaaccatgcaagagaacttagagagagggtctaataaacagacctcaccttataggtgaagaaccagaattccagaggagacaagttgaaaataataaaactcctttaaaaacaaaacaaacaaaaaacctgacttcagatttcttac

SEQ ID NO: 60853 - DNA, 1049 bp, Homo sapiens
tatatataaaaaatatatatacatcagtgaatcaaagattttcccttggtggtgtgctaaaagagaccagtaagaaatgtttcaaaatgtaagtgcttttgaccaagggcaaattacaaattatttgtaatttttgttgcctgtgtgtgtctttattttctaaatatttgtcaatgaaatctattacttttgcaaacatgggaaaagtaagaaaaaaatataatgcggttcagaaagattttcacttactaaaggagaatataaaaaatttagctcagaaagtcacttttctgttaactcgacagttaatctccaatatattgttcaatatccaagagttttgctagatttctgttttgccttgggactcctaagggacacaatgcttggtagcccatagttgttactactttaatcatgcaaatctaggacattagggcagtgagttagtgcatgaatgattcttgggcaccttagatcatacttgctagtaaggtcctctttgtctctgcatattgctggcctggatggacacttatcttttggctgaagaatacatccaatggagagaacccaagagccaagctaagtgaatcagtttcactaggacattaatttctaagatgtagtccttggagttctggagagcaaaagatggtgcattactggaaattcactatactcattaacatatttaaggctggagaaattctggagcaaagaaccaaaggtaactgcagacaaagaagggtttttaatggaatgtgactggcatctaggaactggttggggggtggatggcccctgaaaagaaaggttggaaactgaatgggagaaagaggggactgatcttactgatcaaggtggttcctgtaccttgtatgggagtaacatgaaatctttaattccccaaatctaagtacactatgtggttacaacaggggcaattttacatttgtgtgaagcttgaaatggtttcctaattgaatcgattgttgtagctttgaaaaattgtgtttaaatgacatttttgtaaaatacaaaaataa

SEQ ID NO: 60854 - DNA, 1062 bp, Homo sapiens
aaggatatgtatatttcaatgctaaagagacctttttgtgacttaacttttagtggtataccagcaataatgagactttcctcctccttatcatcatctgtctttctttaagtgcttcttaggagccagagagcatgctaagtgctttgtacaatttcgtaagtgaattctcccaagaactttaagaaatggatattcatagctccatttcaccaatgagaaaaccaaggcttagggaaggtactttgcttcagaagtagctgtttcatatttgaatacaggatggttttgtgtccaaagctttatttttaaaatttaatctcagctgctattattaaaattacctctcagaaagtgaatagtagcatactcatgaaaatcaggttttctaatattcttagccaattgcatagatgggacaaaagtttaattctattagccagtttaaaaataaaaatacttaaagaattaccagtaggatggctactattaaaaaacccagaaaataacaaatgttggccaggatatgaagaaattggaacactcgtgcactattggtgggaatgtaaaatggtacagatgctatggaaaacaatatgacagttcctgaaaaaaattaaaaatagaactaccatataatccagcaattccacttctgggtttagacctgaaagtgttgaaagcaggttcttgaagatatgtttgtacaccccggtttatagcagcattattcataataaccaaggagaggaaacaacctaaatacccattgatggatgaatgggtaaacaaaataggatgtttgcatacaatggaatattattcagccctaaaaaggaaggaaattctgacacttgctacaacatggatgaaccttgaggacattatagtaagtgaaatcagctagtcacaaaaggaaaaatactatatgcttctacatatatgaggtacctagtgtattcataaagacagaaagtagaatggtggtttccaggggctgagaggggagttactgtttaataggtacagaatttctctttgggatgttgaaaacactctgga

SEQ ID NO: 60855 - DNA, 1011 bp, Homo sapiens
gctgacttccatagcagctgttgcaaatacttgcttctttttgagctcctggtctcccatagccctgctcttggcaaatgtccatataaacaaagtcatgaagacagagagagagccctttctctctctcctttctgcttcagggtatgtctggttttttttctctgacaggtgctagcttggttctgagtgctatcatgtatggagaagtcttgtttcctactccctcacaccatctccttctgtcctgcgtctgccctctctcaggtgcccaagtaccctgttgccatattcagctactctgtggtatgcttcttgaaccggatagccttccccatgcctttgattggtatctttcctattatgacccatctgtttcacaatccactccctcaaagccctactatggacattgtaatctgaaatcataccttgtatgtgaacattcactgaatgtttattgacatctactgtgtgcgtgggagctgagggtacagatgccaggagatacggagatgagtcagacttctgagattattagtatagaatggagagagagacatgggacaaatagcattagagattaatgacaaaattatgtacaggttagaagggaagaggggcagtttaccttgaagaattttataagtgtggatccctcagacaagaggagagggtcatgccagagccaaaagccagtgatggattactgtgtccccactttctgataagatttcattgtgactcatctagagcagagggagacctctgtaactacaagatctctagtagtagcgtttggctcactgtggcaggtggttgcaaagaaccttttaaggcagaaataggcctatgggtgtcctaaggtaacatcacatggataattgccaactctgtatatcttttgggctggactctgacttaaggagaagttaagaagtcttcagtgaatttcttaagccctgagcatctttgtattctgctttaagaacttgttggtttctgtgtttc

SEQ ID NO: 60856 - DNA, 1042 bp, Homo sapiens
gcacatgaaaaaagtatttcaaagtggatgtcaagtgaggttgctgatttaacagtttttttttaattattattccttctgcagcagaataattaccaatagacaaccatatgtttttagaggctacacagatctgacaagtgtgtgtgtggattttgtgatgaaagtaatacattaggcatgtctctaatttgcagtctctttgctttgtagattacaggtaggatatttgtaatactagtctaattataggaaagacaggcactgaaaacatttctaggaaatgccgagctctgcgatgagagattctttgaggaattgcctggtattggctctatactttcatttgaaaaataaaaatatcagaaaattgtgtagcttttccttgctttgatagcaaattctaatgggtagtaacttccaactgtgtccttgtattcttgggtttttcttggcggtcagttcagtcactgctgctagtttttgctttccaaatggttggaaagctgagcactccagaagcttcacctggggagctggggaggtgatggagtagtactggagatgcttgtcagggatggccagtgcttcctgagtgagctttgcctagccttctgtgccagtggagccatcaggctctatggcacactgctcaggcaaagggaaagacatctcattgccactgctccagttctgttgtcctgggccggggacttgatttggcaaagcagtaactggccctttgaacttgtcagttctctgtaaatgggtccctttgaaggttatgagttgcatgattagcatgatttttaacagaattcacctgagtgctgtttcttttccacagtgaagttggattctggtcgtatcaaaacaatgcagagacacagcccaagagtgctgtctttcataggtttatgtcagttagggtgctaaaaggtgaggcttgacagtcattgtcaagacaagtgaccaggctctgatgtatgacccagagcagtgttcctgtgtctccagtactttagtcacaatcgtgttcctc

SEQ ID NO: 60857 - DNA, 1105 bp, Homo sapiens
gagggggactcacatttgccctggtttcctgcttgaacactttccccgctgtgatatagggaggtgaaccctagcagagcatggtggtctcatagcattgagaaagcagagactggagtttaaggctgctgaagtggctgagatttgtatggcagggtactggagaggagggagctacttgaggggtgaggccctgcagagagcagctgctactaggctaagaacagaatggcggtaccagaggtcatgtattactgagaaagattgggtttctggcctagccaaggtgaagagaccttgctgaataccttagccattctaccgagacatcacatagccattctgttgagacatcacatcctaggaataaagaccatccataccttacagtaagggccataagcttggactaaggacataagtgaaatagactcatcttaaccaagtgtaaaatgaagcttggcaggatcaagaggacccaccagtaatttagctgccaccagagccaaactgaacaccctccaattgtttaccttataatggaaagaagcatgcaaagtaacaggggattgtgactcatattcaaaataataatcaataggtatgaacaatgactataaaagtgggtaataccagattttggtctctaacagcattctccttggaaaggaaccagtgctttttggagaattgacaggatccaggttagagacagggtagatacaagatgagcccataacattttttttttaatatcagaaagtaagggaataaaagtaagaaaatatttttaaaagatggagtatgtcacagggataaaggagccagcttgaagggcttcccactggctaagtctgagacagctggagcaccaaaatacttaagtacaaggataaattataagtcactgaaaaaataggacttcatgtatctcaggtgatcataaatagatatattggtaaacaatgtataatgctgagtaatgaatggtaatatggagggattgctggagttggaaaagtcagcatgttgcagccatcacagtataaagtttttatcaggcagacatcactaatggatactaaatctagggggaaattttgat

SEQ ID NO: 60858 - DNA, 1039 bp, Homo sapiens
gggaatagctacaagtttttcactagtgatggagcataaagtgttaggagacgaaatggtaagggggactgggagcagttcatggaggtcttgttttatcaagcccagaggctcagactgcatttctgggaaatgggttgcacagaagaatttgtacctcattagggtgctggacacatgcagacttgaggaaacagaattcaacaagatctacaggagacattgtgatctgtgaaaagactgttctaagagccccaagaatattaggaatgcctggacagtgaggggtacaaaaggacaataaagcattttgtttacatcagatgctcacttttaagatctaggggacctgaagtagaaccaaagaaaggtataacttgtcatgcattgattccttttgagaaaatgaattagatgagctgaaatgtggatttctaatatgaagaaattctgcccaagaagtagcaagagggtgtcccacatttcagtctgcaaactgtgtttggaatgctgcgtgtgtgtgtgcgcatgtgcacacgtgtgccttgagcacaaatctactggcttgtgcagggaaagacttgttctccattttcctgtgattacaaaatcatcttttctcacagtatttgataaaatattattcttctttgctaatattgattagctttgtatctggggttgcaagttttatttttgactgtttattttctaattattttctcaacagtggttataagtagacatggaaatacaccagaaaatgatttatatgaaaaggattcttttctccatccctaagaatatgcacataaacaagagaaattaagaagagcaactaactttcattacttagggtaggctctactgttttgttatgccagtaggaggaagagttatggaaataaatgtaaatgcatgttagggtgatagccagctggctatctgaagtgagctttttggaagaaacagggacatttccttgtcatttgtttgcaattgccccactaatagagaacatttttcttgctacagtgtt

SEQ ID NO: 60859 - DNA, 1084 bp, Homo sapiens
acaaatgtggtgacttaatcaaggcattggcagggctgtgctccctctgcaggttctaggagagaatctgatctttgcctctaccagtttatggtgcctgtcagcctcccttgatttgtggctgccctactcccatctttgctctggtgttcacactgccttcttctcttctctttggtgtcaggtcactgtctacctccctcttacaaggaaggatacctttgattgcatttagagcccaccaggataatccccccatctcaaggtcattaacctaatcacacctgtaaagtcctttttgccatgtaagataacattcacagattccagggattaggacatggatatcttttggcgggggacggggcactatttagcctactacagtggcaaatattaatagaactttcagtccgccttgtaggagtatgcttaacgtcaacaatttcctaactgttttgcaggacacagatgttaaaaatgtgaaagaattctgttgtcaaacagacttgagagtcattgtgtaatatatccctctttaaggagattcccaatgcacaatgaaggctttgagaattcctgtggcaatgaaagctgcttaaccttgtcaaacccaggattcctcagacttagttgattacaaaacacttctttttaaagggtatgtctacttacatatcaaaaaatacttgaagatgccttaggaagcatgagttgagttacttgttgcctgttagtcttttgaaggcatagagtgtgttttaactgactttttgttacttaatatcttaaacatgcttggaattgattggacagaataaaaccaagataaatatacaaaattaaatgattcagggataatgtgggttatgccttgcgtgcctgtctgaggagtttggacttgattctctagaccaaggattggcacactgtaacttgtgggccaaatccagccttctgcctgtttttataaataaagttttattggaacacagccacatcaatttgtttgcatattgcgtgtgactgttttggtgctataatagcagagtaggggataggcttgcagggcttaaaaaatctg

SEQ ID NO: 60860 - DNA, 1034 bp, Homo sapiens
ctgatttttctagggattctgcaaaacctataaatttccaactaaattctggaaaggagttactacacagaaacactgttctcatttcactccagacaaacttctcagttgttgctgcgtctgtgcgggcctacggggtctctctgatcttacctctgatgattgttcccttggctcattgtgctccattcactctggcctccttgctctcctgagatacacctggcacatgttcctgtggtacacctgtttccgctttccctggaatgtgcttcccctgacatgtttgctcactccccttcctctaggacatgctcacatgtcccctttggaatgaggcctttggtgaccactctagacaaaataacccagcccccaagcactctctggccctctgcctgctttctgtttcctccatggcacttagcacttgtctgacactactgtggggtggtcctgagggcagtggttgtgtatactgctttatcttcagtgctgcaacactgcctgttgcatagtagaggctctgtagttatttgttaaatgaatgaatgaggttactcttacagttttgtatggaacagctaggagacaggtaagattggtgaccgagagttgtattaggaggctgttgtcatggaccccctgggatttggtaagaatccaaaccaaagggttggagaagtgaaacagtcaagagacagggtgggtaggtgtggtggtgatgcatctcctttgggaatggaggagaggggaaaatgagagcattctggaatattccctgtttttagcctggcaattagatggtctttccgttgagctaagataaagaatactggaaaaagactaagcatttcttttacaaagcaaattgtgtgtattagtagagaacaacatatttctgaaattggtgtttttatgaaatatagtttctcaaaggctctaagtaacccttgctgaaatgctgattttagtttgaggtcaagtttcctaaaatgttttaaaagctagccatgcaggaaggctttggcctc

SEQ ID NO: 60861 - DNA, 1032 bp, Homo sapiens
gaagtgtcctagaaaatttcatatgggaggtaagacttttgtgttgttatatatctgagactgtcacattcacgtttaatttacagtgtggctggggatagaattctagattagaaatcactgagcttcagaatggtgaaggcattgctcattatcttttagtatctagtgttgattgtgagaaggctaagactgtctcccagtcctttgtaggtgacttcatttttcttacttttttctctcgggtttttcattcttttctttattttcagtgttctgaaatttcataatattccttggtggggtctattttcatttcttggaaacttgcatccttcatttttagaaattttcttgaagtgtatcattgttgaattcccccctctgttttctctgttctctctgttctttctggaattctgttagatattgacttactgtcttatgacagccttaccttttcttctgctttccgcatctgctttttagctgtattcttaggatatttcctacgtttaccttctaacccttctattcaatttttcatgtttgttataatgtttttttaaaattttttgacagtttttttattctctgattgcttttattgtatagaatcctactatttcatgacagcattttcctttagttctctgaggaggttaatgataactttttaagctttttttgcatagtttttatttccttcaagttgcttttttcctctgtttctgtctttcatgttagatattttctttatgatctttgaatgtccattcatgattaagaatggggctttacaaactggaagatttggcttattgggcctaagttagttgctgtcatctatcagatttccagctttaaaaagcttaacattttaatctttgtcctattatctttgtccttgtagatttatgcatttaaaaagaaataattttgtggtgttggggttttaggagggagagaagctgaatatgtgtgttcatccactgtctttaactggaaatcaatatagaagtcttaaaaaaa

SEQ ID NO: 60862 - DNA, 1020 bp, Homo sapiens
tggatcatggctttgtctttttctcaatttcttttgacaagaaattgtttaccatgtagatgtcttcaagaacttcacctgtgagtcctgcattacttctgtctggacacatcacattgtttttgttgtttctttagatggaggatgtggtgtctgagtattgatccccacacctggctttacaatggtgtttttattccaaagaacaacacctattcagagagtaaagggattagctacttattctagaaaaatgaccctaagtttgccaaatatttgtgggaattataataggttcttagatgtaatcccatttattttgttcttagctccttaggagtcttttgccttgctgcatagtcagggattgaatattaatagttccttcgttgcctttaacctgaccccattttacatctgagaaaacaaggtcaaccttatttcctgtaatgtcagcaacaaaagcaacaacattattattcattatgtgataggcaccactctgagttattttgttggttatcctatttcatattctccacaactctgtgatcattattctctagatgaggaaattgaggcataacctgcagcctcaggatatggctgagtggcacaagtctgctcttagcatcacagacgctgtactgccgactggtgtggccagtgtccagtccagggtctctaccactggctgcacattagaatcaccctgagggattttaaaagcactgaatgtgcagttccataactccccgctccttacatacttatttacttggtctggggtctcattggaggttgctgtgcattcaaaactgagaatatttttgaactagagcaatagttcttaaaatttggtccctgggatggcagtatcaggtaacttgttagaagaggaaattctcaggcctcacccagacctactgaattgaaactctgggggtggggtgtggtgatcagtgttttaacaagtcttccaggtgattcttttttataaaacatattgtagtaaaaaca

SEQ ID NO: 60863 - DNA, 1043 bp, Homo sapiens
aactcatttcaaactgtctcaagtgaaaaagtctatggccttaagtaattgcaaatctaaggactggatctgccttcaggaggggctagactaaggatcaaaatgatgtcatgaggattcatcttggctacatgtttttgggctctgaatggagacttctagcagcttcaggtttgcttagttacaaacaaacttcctggtcatgatgagtcatgtgcctcatgctggaccagtggctgtggccaggtatattggcctattcctattggatagccagatcatgtgcttcactccagggcctgaggtcagcacatcttctgcagaaggtgaagcatgaactgatgatagctgggaatggttccctccaagggtgaatcagggcagttaccaagaggattgggggtgctgggaggtacactaattattataatgattattattaatgtatcttttaatggtttgaaaagcattttcagatgtattcttgtttgacctttaggagatattggggaggcaggataaagaagtgattaaaaacatggattctggggctagactaggttcagttattagcttgcatgagcttttgaccaattacttaacctctttgtatctcagttttctcaaatgtgcaatggggataaaggtatttacctaaaagagttctgagaaggatcgaattaatggacatttgcagggcacttagaatagtgcctcatgcacgctagcctctctatccctggttattactgtcaacctttaaagctgtcctgctggcaggggagcaagtgtcctcttcatttgacagataaggaagttcagactcacatgacctgtaagggtcaacactggtttggacctgacttcttccctgtccccacacttgcctctgtgttatgattgtggggcatttgggttagtaataaatcaaggaagcagagagggaaaaagcactagaaagtaggcctggattaaagtacctgtgtggtacaagaaaggcagtgtttctgtatattccacttgaacgttggtctttagcttcc

SEQ ID NO: 60864 - DNA, 1059 bp, Homo sapiens
ataaaagtttgtttcttcttaatagaaaatatagaagtatttttttacattaaggaatttgaaacttgtttttaacatcttttacacctgtgtagcattttcatatgtgcttgtatatatattatgggtggacactggggctgtgagtgactgcccattcaccacccctacactgtcctcagaccaatgtaaaggaagcaagtcaaaccatatcagtgaaccatcttcagccatgatgtctgcatcattgccttctttcagcctgagaggtctttcaggaagtgggaatttgtttggatgttatagttgcagttatttagctatgtgcagtaattcaaagatgtgaaaatgcaggaagccctggtcatacttacacatggatttgggagccatcagacatcaaatgggatgctatttgtcaccttttgaggcagtgatctgggtgacccatagtgctttcctctgaaatcttaggcttctgaagaaaccacagggaaggaatgtgaactggtacaataaatagcttaatgaatgtgatgaaaactccaaactggtttgttttgttgccaaaattaataaagttaaggtgtagttgatcttttttttttttttttttttttgagatggagtctcgcactgtcacccaggctggagtgcagtggcacgatctccgcttactacaacctctgcctcccgggttcaagtgattctcctgcttcagcctcccaagtagctggaattacaggcacccgccaccatgcctggctaattttttgtatttttagtagagacagcgtttcactatgttggccaggctggtcttgaactcctgacctcgtgatcctcccccattggcctcccaaagtgctgggattacaggtgtgagccactgcgcccagccaatcttctttaggaggaagaaatgatctatagccattcatgtcttctactttttgtgtttaaaatgttttaaagaattcagtcatattctttttagtgattctatatggatagttgtttagaggaaaaacaagaattgagaaggctgagaaaataaat

SEQ ID NO: 60865 - DNA, 1012 bp, Homo sapiens
ttctaggagcataaattagttctgcatttgtcttttctttgtgtgtgtgtgtaatatataatgcagattgtactcttttgtgtctggcttctctcattcaacaacatattagattcctgcatattattgcatatagtttagttattgattgctcattttcatttctttagagcattccattgtgggagaatataacaatttatttattttactagatgtgggtaattgtttgggtttacccatctggggcaccctccagaggaaatgagaattaaacaaggttttctcctcatcatggttatagtggaaatagtaccaggttgtgctcagcttctgctgtgatatgagggaggaatctagacagcagcgagaagattgagacacacttgggagaattgggtgtggtttcatcagtcctgtgctgattcctgctgctcttcctgtgactcaccatgtcccttctcacgtcgttccctactggcacatgttttctacgtcctcttctctgccattattactttctctacagcccctccaaggagactgtgcagaacatgtcaaacaacaggcaattgatgaatatttaaagttcattaggtgttgatattaagtgttaggtgaggggcaaagagttgaacgtttgggcttgcccttgaggagcctgtagtatagttatcaattcacaggtatggcagtgggccacatccccggaagccagttgttctgtagagttcagggatgtaaattcagaggcttacatgggccaggctggtaacgtgactgaaatgaatggggttgctcataaggattgatgggcatggtggagagtgagtgtatatcctctgcccaaatatcaacccaacaaactctgtccagctcaatttagcaagtccaccattttccaaactttagagagtagagtcatcattatataataagaaagtgttcctcagaggatttgggtgtttttatggaaaaattctgtttttatacataaagttttattcaaaaa

SEQ ID NO: 60866 - DNA, 1049 bp, Homo sapiens
gaataaacaatggcatgtatttcaagtttaatgttattctacatttttgaaaatttagtaaataataaaatcttaacctgtttatgtatgctctagcttgtcctgcccctctgtctacatgtggaagataaattttgtacactcttcacagtcacaagtgtttaaagatacataacattagaaagtgattttaccaattctttttcttttcacaggtttgttgctgactacaacattaaggtcccttcagaggttaaggctgttcaatttaaaacaatcatgcagtgtttctttgatgactgcagtgtgttgtgcaatttagttttttacccctcaatttttttgttgccttgagttaccatttggaggtacggtttttgatactgtatctcaagactgtgatttcttggattttgtgtgtgtgtgttttttaaatttactgaatttactactagagactgctttctctgtgtaagatccactcctttgtgggagcccagaagtttacgataagtaagagaaggagtatcagatagtgagaggtgtgcatcatggttaaatgaaaacaaaaccaaggtgtttgactctcggcagagagagatttggaagctagctctgttacccacggttcagccctggtggtgcgcagcctgggctccggcctctcaccagcaatggaaccaatggatgttgaggaaattacttaagttgtttgaatcttaacttcctcatctgtaaaaagctcatcctacaggtttattaggggatcatgtttgtaagaccccagcacactgtagatgtagaataaaatggtagtggttattattagggcttcctcttcagaggcaaaaggttttagaatgtggttatgtttttctggtattttattttatcatttaacattgcagaggataaggagttggaaatgaagacagcctagactggctgagaacctcattgtgttgctgaattgaattccattgtctaaactcgttcattttcaccttttctcctgattgttttgtctgctgtggagcatgatgttaaaa

SEQ ID NO: 60867 - DNA, 1050 bp, Homo sapiens
ggtttcacaatacttcagagcagtctcaccagcaaacttggcagcaaccttgagcaagtcctgtcagggttgttggaaaacagccggtgttttcatatcttttgctctgatagctcttacttgtcagtaccttaggagggaaaatctggcagtagtgtttggttccttagttcactctgagctggttaaatgctcactggatatgcagatatgatttatttcagtggtatgcttctctgtgagcctgtctcactgtggcagctctggaatttctgtttatggatgacattctgtttggaagtggggctgaggttctgagctacaggctgtgtttgcacagcaagctcccttgattttaatttgtattttttcccaaatctgggtggtaggggaggcccaatggagaatatagagcagtatgctccccactgactccatgcagtggtccggggttttgtggtgcctgggcatcttgcagtgacatgtctgtaggtgcttttttgtggagatgtaggaaattgaaattagcttccagctttgtagtaacagaagtgaaatgttttgtaccgttataggcctgataaaaatcaaatgtgactaactggtggttttaaacaatgccagtcaaatctgtttgtttacattgctcacattttctaaaggcacatgatctatctgaagatggaggcttatcggtgagtttactgacagcattgtgtattgtgttatatttatatttcttgtatgatctttttagtcatttttttggagtctgtcttggtctttttactgatgggtgtatgtgtagatttatagggataaataatctttcttcttttttgtggagttgatcaatcgaggactttttaagtccttgatttaaataggtgacctctggaacaaagtaaacacacatgtttaatacttagtcatataatttatacatttggcaatcagtcaaatactccattccaaagaataaccttgaaactgtttgaataaattttttatttcagcatgcaagatgtaatcaaagaaatgtgtctctgg

SEQ ID NO: 60868 - DNA, 1079 bp, Homo sapiens
gcatatgataatacagttatgaaggatgtgaaaatgaccttggttgcctcctttgaataccctttgctatttgtcacttgtgtcattcatgctaatcccttcatccctacctttcccaccatcaacatggattgattactggctgataatatgccaagatattaacctgttacctctttctgatgaacgtggtgatgtgctaacaggagcttttgggagaggatatttatttaatttactcagctgagtaatatttctgacaagattttaaggggaggaaggctgaggaagggaaaggaaaatttttaggcagcacggcttgtaaacatccttgtatcttgccagatgtgatttgaagaggacagggcttgagcataagcacttcatacatgctttcagtcaaggctgtacaggaggtggtagtgtcttgattttagtgatgagaaaactgagcaaatcctcgtggaagtgtcctttaaaggatctcggaaataagacctgaaagaaaatttgggttgtttgtttttttattttgcatcggtaccagagttggtgaattgaggtcttcaacttatctgtttaacttgttatttaagacacattgattttgctttggggttagttcaagttccagagtcttgtgcattttccaaatgtatttctaatacaccaggagttcttgttccatttgaattaccaatatatgcacaggttgaaagtttacatttaatcatgtattcactggaaatttgaccctcatgaaactatttctaacagacctgaaaaaacaaaagatgtcgtatctttttcctctttcctgactacggtcctgtttcctagtgccctctcaccataacatgtaagagatgctgagagtgcgttaaaaccttttcttttgataagattttcaggtgatttcatagttgctcagggtatgaataattattttcatttgccattgagaatctgcttatcagagttcaggacccttgttatctaggtttcttgtagctcttggaagttactgtgagctctgagataaaccagggatagcatatcctgtttcacaaaaatgaaag

SEQ ID NO: 60869 - DNA, 1023 bp, Homo sapiens
tataaggatttatagggaaacaaaattgggcttaaaatgtgagacaacttctgtagactgtagttttcttacctgtaattttagaaggaaaaaaaacccttctatgctataatttcaatgccttaattccctataattttggtaacttgtttctttagggttacaaagaacaaatggaataaaccacaaatagatatattaggataaagatagattttctttggtgtatttatctaactaatttagaaaagctttaaatgccaattaaattatacattttgaaacacagttatatttagggataaactatttttaagttaacattattctctgcatttaaaagtagaatttaaatagttctcccacctccacctcaatctaaggtgcacacacatacttttagctttactagagggtttttgttaatgtagtctataacagaaattgaggatttctgttatggtatttctattttactatcataccactgaaaagttaagctttctcttaagaatataagaaaaatttaagagacagcatgagctagttgaatagtcttattagtgaattagttttatataaaataaattatacaatggacattccagttatcatctgaaaatataatttagaaatttatgataatatatttctttctgggtctatttaattcagaaacattctcatacaaggtggttcaaagaatccagatttctgggaatggttttggacttcttgaagatataaaatatttgacaatgcattgttcaatatggaatcgtacttttggaaagaaaatctgccagaacattcatgctacccagagagaagtatcattctccattctcctcaaaattgtatcttctttgctttgattctcatacgcctgctatcagagattttggaaagtttctcttctctttattgtaaaagatctcaggtataattcaaatggttatttcattttatagaaactttactggaaatgtccaagtgccttcagcagtggaaggaggggtcagg

SEQ ID NO: 60870 - DNA, 1030 bp, Homo sapiens
ttcctctctccccctttctccctccctccctttcttccttgtgcttgtatagtattttaacaccattgttcaattactcttccatttaaatttgtatctattctacaaagagtataacaataataaagtaacccaaatcccactagcactgttttccatgttgtgggctagtttctctgattaattctttatcagtgtctcaagagtctgcaaaaaatcttcgtttatatgatttgagcttcaaatcaatggtgcaactacacccacttcccaaatggtattaagcttcatgtggatctttctgtgggaaaagttgctttccttacattagctgggaactactagtctttggttcaagagactaaaagcattagtattcaattagacataagtcaacgcttgcaaatcactactttccaaaagagagtaataatttccactagacaagtggccaacagtgatggttaatttacttcagtagtatgtgtacaccttccagggaatgactgaactgagaaaataagtccaaactaagaagagggagtatagtgacttttttttttttctaaacaagtctgtaatgctgttaccatgcaccgcatgtcagtcaataacgctaagcttgggtgtggtaacagacagtcctaaattctcagtggcctagaactgagtaaagatttatttcttcctcacctgcccattgtgggtttgctggggcgttgctcatgaaccaagctgacagaggctctgtgtagatgcatgctgccatgactgacagggccgggaaaggaagagctcccgcgtcccacaccggcaattaactgcctctgcccagaaacatcacaagtcatggctgctcatttttaacagccaaatagaatcctgtggctgtgctgagtttgagcaggtagggaaatgctattttaccatgtgcctaggaagagagagacttgatatatttgtgaatatctttaataactatctaatacctaaaccacacttaggaatgtgcacaaattaatactctcat

SEQ ID NO: 60871 - DNA, 1832 bp, Homo sapiens
attgaacaactatttaacatagcattgtgactttataattattgctaattcccaaaggttagcactttcatattcaattgattgtgatgttaagcttatgattttatatctagggcctactctgacattctatggagaaagcaaagcaagaacaagggaggggagatgggaaataatatatgtatgttaagaattaagttagtgaaggaattttgcagatggaggtaaatttgcttcttgaactttgtttaaatcttaactttcaaattataaatgatcaggtaggacacaagcattggttaataatcacagaagttattaagtatattaattgaaagcatctgctttcgaaataatgtcaaatggtatgaatagttttctacaagatgtatgtattaagaagcactagtaaagaaggccaactccaaataaagcagtcagcttttggaagagtagctggaactgtggaagaaacaaaaaagaaattgcaaaactgttgatcctgtagacattgccagtgttacataaaagagcactgtaccttgaagacaacatattataagcctaagagtaagaaagaaggtgagattatggtgatttaaaagtgcattgagagagttgaaaaaagtagttggatatcaagacacattatttcctagaaaaaaaaatcagagtgacaggaagaaaacatagttaccatgggccttaaacaggcaaatatgttgttcaaatagggatgtattttttttccataaaagaaaacccattttaaagttaagcctctgatatatttgatttgttacatacagaaaggcttaaactaagcctctgatatgtttgatttattaaatattacacaacaccatcaataaacagaaaagttttcccttttgattcttttccatcagagaggtgtgttttgcattttaaataaataattgttgactgtatttactcctacctttatttattcaacgcaattagccagtatagtgagcgccttcctgttctaggtgttgatgaacaaaatagacataattctttgctttcatagtttacagtctaatgggagatgtatctatctaacaaatatttatgcaaatattagggttagtgttagggttagaatgcgtaatatataattatgcattgtgataaagtgcttttagaagggaaaacattatggggatgattctgaaggattatcagagagagtttttttagggaagaactgaagatttattgaataaatgactcaagagatgagaggcggtaatggggaagtgatagggctaggatttgaaggcagtgaaaggggttgagaataggtcttcacgggcaaaaagagaattcccattggaagctatgaaatgttaagacgtaattgcttaatgcttggagaacttaaagaactaaaggatcactgtaacactttggtaattaattactcatcaaatgctctaccttattttgatcccattgtagtccttccttgaacattttcacaacctaagcaataatcctgtgacccagtctaattttaaagggaggaaattgattatggatcaaatggcaaggctaatccttcctgtaggcaccaaatttgttatatgttcatggttttctgtcatgtcattggctgtggccacaggctgggcaaattgtggtttgaaaggggagatgtgagtagttgacagtactgtttgtgggacgagaactgtgtgttcttgtctcagatattgctgtgtatgtagatagcaataggggatttcacaaatggagaaaatgcttgtactttctattaaattgtctaactgacttttaaagtatta

SEQ ID NO: 60872 - DNA, 1090 bp, Homo sapiens
tattcatttaattgatatacaatagttgtaagtagtcatgtagacatggtggtgttttgatacatagaatgtatagtgaacatatcagggtaattggcatatccatcatctcaaacatttttcattttctttgtgttgggaacattcaatatcctccttgtagctctttggaagtacataatatattatcattgtctgtactcatcctacaatcctacagaatactagaacttaccaatttttttcatgaggtgtttgttaatgataataacttttgttagttaattatatgccatgtactgtttagtcactttctaggtcttaaatttttaattctcataatgacattaagaggtaggcattctgttatctacatgttaataaatggtaaactgatgcctggagaagttaataacttggtcaagactatgcaatcagtatgttgaaatacacgtcttagccttggagtccccatgcctaaggaatgtgcggtgctaacttttgaagtacagattagaagtactgttgttacaagtttattatgtatattcaaacttgaggagcccataaaagatgcatagctttaaaccatgagattaaaaaatgatctgactatttgcaagaaataaaacttgaacagcaatagttcaaaaagaaaaaaaattcaagatatttcctataagtacttcttaggcctctctgcatcctttgaatattaaacttcatactgacctctctgtagatcatctggcatccattcctcttctcttattagttccttttttcttattgaaagaatggctatgatttggcttaattcttggtccacctctgtgtccttatggtttagaattaaattccaccatgtaccttggaggccttattttctatctgcaatcaatagcattgattttgtttttctcacaggtttcatttttatttttattttttaagaaggaacaattctttcaagttattacacaaatgactcttttaatggagcatttgtatactaactctaagtgttatgtgattattcacatctactctcaaaagactagactcatttctgttgttattgaactgagac

SEQ ID NO: 60873 - DNA, 1054 bp, Homo sapiens
aaaacacctgattataagaggttatcacaaataaggagagtcttgaagcactaaatgtgaatattaaaatatgttttagttattgaggcaatggcaaaggaagggatgtgaaatatttagatgccatgtggggtatcgtgttcattttggggtgccatgcttcagaaaggactttaatatacttgagcaagttcaggaggcataaaatgtatttaaaataattgataatatttcatggacagatttaggaagaaaggatgactgtttttaagtgtgaaaacatggtcacatggaggaaaaaagggaagcattctgcataaatctagatggccaaagaagaaatgcaggttatagtgaagtctaaattgaatcaacttgagaatcaacattttgctaattaaaaatggaccaaaagtgaaatgggcagcctgatggtgatggcaagaaccttatctcctgaggcattctagcagtgactacatcgcatctgcttagagaaagtttgtgtgggttgaggagggattccttgtggctgaaccataacatatctcttgtatcttctgcaaactccaagactctgagtctgtgaatctgtgaactaatactctacaagttagcttataagagcctagccctcaaaagatttcttcttggaaatcctttcccttatgtaatgtatgtgtttagttttgaatattcttttacttatataaatctaataattttgcacgtattcttctaccacttgtttttgctcaatattatgttccattgtataacccaatttattgatactttctgctattgatggtatcctgaataattttctgttattttgctctctcaaattgtgcttgtttaaacagtgttaacggtgaatccttataaacatgttcagtaatttctctagtgtatatagatagaagtagaattcctgggtcttaatgtatgtgaaacttcaaatttgttaaataatatcaaattactttccaaagtggttttatctgattatacctgattgcaacttatgcctaagttttctgattgtctctca

SEQ ID NO: 60874 - DNA, 1036 bp, Homo sapiens
tagccctgagctgacacatggatggtgttttattcacttaacaaataattagcatttgaatcttacttgaatgccaaatatacttcttgacactacaactccacaaatgatttgcagtttatttcagggactacatctgctcgtttttaaaaacatatcacatacacaaaactttatttaattcttttcacatctagaattatcttcttataattataataaacaatacagcttttgaaaacatttaagcaggatgttattaagcatctggcttattttgaatattatctacctgttttccctctatgaaatttttattcatttaattgtaaaaactcacacatttagtttgttaaggtttctaaaacttctgttgaagtataataagccagagctttaaaaaattatttgtttgacctaacataatatcacttggaccatgtaaattttcaattaagatcattagagttgggcagtgtgtgtgtgtgtgtatttgtgtgtgtgtgtggtgtgtgtaaattctcaactttttaaagatagtgaggagattcacaaaactatgtgtaaaactgtcatcaatgtggaagtatatgtcattatgctcaagagataatttattgagctaatcttcatcctaaggaaataaaagaaaattagaaaaaactttgaatagaaatgtttagctttcgatgtcttctaatcacttgcctgtaactaaaatgaaacttaaacttttatcatgcatgacaagtgtattccttcaattcctcataccaaatgtatttctttctaaaaaatacccatccatatcataaaattactagatttaaaaggagctaaaaaaataatcaaatttttcttgaggtttgtatttaaaatcaggctgtatgtcataaaaaatttgaaagaactggatttcataaaaccttttactattgagagtgtttttccttatgcttaaactaatacaacctaaaactctatttttaaattaaattatttttattgttaaaaaatagagaactggttacgactt

SEQ ID NO: 60875 - DNA, 1024 bp, Homo sapiens
attccaagggcaaagacctgggccaaattcaggcaaattcaaggctcagaatctccaaaagaactgaaatgaaaaagagcaaaaagaaaatgcaataggatgccaaatcatttatgaaggaagcagagtgtctgcagtttagcttattaagtatctcccttttgtgggagagggttgggctgcactaatgtatcactggaaagtattactctggacccagcccattaagaaagtcataacctattgagggtctcagaataacagtgctatcatgaggtgacaaggccctttaggaaagggaaatttggcatctcaagctcttctttgaggagcatgccgagatccaggaaaaaaactctctttaggaaaagaggatgctcatcttttccaggcccgtatattctttatggtactcatagcaaactgaatttccaggttttaaaaaatatttccttagtcaaaataacttcttgctcttgaaagttttgagttttctgacttctataaaacaaacagaaacatatgttcttattaggaacaaagtaggtatataggtaagaaagacacagggaaccgaattaaagaaacagtaaggtttgtaggcagacatgcaggtattttagccattttgctttatggtactacaaaattcctatgagcaaataaggtggtggagaataaaactagttccctgtggcccatggagctcacccatattttgtttttaatattaaggctctaaaacccatatttataaacacaaaatgcagaagttgcataataaactcctgtgtcccagttgtttgtttattcattcaacaaatatttattgaatgcctattaaacacatggccccatttgaggacatagcctgaatcagatatcatttctgcatagttactaatatatctggaattaaattaaaatattatgaatgtagaattataattaaaaagagaacaagactaattatataaacaataaatgaatatgcatttagagcctaggtgttgaacactgtgct

SEQ ID NO: 60876 - DNA, 1049 bp, Homo sapiens
tggcacttgagttacctccttaattcagttcaaacgtcagttttcaattttttaattcttttgctgtttaaaataatcaaacaaattaaagatgaataattactggctccattcctatagtaacaagtgtcacattctgacaacttcagaaacaaggttggttattttcagctttcattgtttacactcttcaaaaataaggatgagaaatttattttattttctttttattagtcaataagttctacttaggaggcataaagttctctgaacgataagttagggctcagataagattgttttaatactgacttcaatgctaacttaaggaaaacagatgatatcttagctctccatttctttaagacttaagactatggttgttcgggtatacaatttattttatgtctcttagaaaattgtcataagtcttattttacttgaagaagataaatatgatgatagtaacagaacaatcagaagtggttattcttttatactaaatttcaactaatatctattaagtacttatggcatgccagaccctgtgatatgagctggagattccagttttatagagagatacagtgtttgtggatgactttatgtttaagtctgggttgggtagaacacattttccacttgagctgcagcaggattccaactgaaaacatacttcaatcttgtaaattctaagttctagtgtatacttgatgattgaagggaaaagaaagagaagggaggatccttgctataattatggtcaagaagtagaaaggagcaggagggatagtaggaaggagaggctatagattggtctttagtaggacaaggttggtgtttagcattattgcctttgcaggaggttaaaacctttctgtatcccagatgggagttagttttatcaactatgttgaaaactagtatatatgtgtatgtatgtgtgggggagagggaagaattgcatgtatttgaaggcttatatgaattagatttatttttatatacttttacaagtaatatgcacatatacattcaattctactata

SEQ ID NO: 60877 - DNA, 1101 bp, Homo sapiens
cctcactattttcactaatctttatcttaaatctctaagagtgacaaactgttcaatttttccatgggtatgaattaatttaaaactaagtgtattggctcagacttgctaataagtataaaaaatattttaggacaggcatggtggctcatgcctgtaatcccagcactttgggaggccgaggtgggtggatcacctgagatcaggagttctagaccagcctggccaaactccatctcaactacaaatacataagttagccgggcgtggtggcagttgcctgtaatcccagctactcagggggccgaggcaggagaatcacttgaacctgggtggcggaggttgcagtgagccgagattgtgccgtcacactccagcctaggggacaagagtgagactttgactcaaaaaaataaaataaaaattaaagcaggaaaatgtaatatatcaaagccatgtatttttatttgtgtttgttcatttattaacctgtcattagtaaatgctatggaataaatgcctgtgtctctccaaaatttacatgctgaaatctaatctccaatatgatagtgcatagaggtggggtctttgagagctaattgggtcatgggagtggagcccttgtgaatggatttagtgaccttataagaagaggcaggggagccagcttgctctatttctgccatgtgaggatacaacagaagctgtgggtctgcaacctgcaagagtcctcaccagaacccaaccttgctggcaccctgatatcagacttccagcctccacaactgtgagaaataaatgtctgttgtgtataagctatccagtctacagtactttgttataataccccaaactgacagacagcaagtgaacaagtttctatttgtaagaatatactaatgtacttcaaagttatttccttatgtaggcaggtcttttttaacagctactgactgaacatctactgttttctgtgagctattagaggtgttatgagggattctgtagcagatgctattggtgccctccctggaccttctctactaggtgggtacacctgcctcccagctgttgtgggtgttgattgttaaaggttcacac

SEQ ID NO: 60878 - DNA, 1048 bp, Homo sapiens
gattgtggaaactagaggccagcatagagctagcatctgtgcccactttttcttgggaaatagagatattgattcatctttgccttgatcactcttgtgtgactttttcaactcagatcattgttgcttaaattgagagcagctttttcagaaactgaaactcaactgcagttatagctttttggcaggactttactaattgggacagggaggcgatcacttgttacaacataaatagaatcagaaatcaagtgatagtagtgatagtatatcattcatatgatacattcagcctatatatatgtacatgccaggaaagtgtgaaatttcagttttcttattggaaaatgaatcgtatttgttagttttttttaaattgtagtttgcagtttttgagtaatatttttgactggctatttcttggtacattttatgaagaacttactattatatattctctttttggtaagtgaaacaatttctgatttcaattgccagagagcctgaagttgacaagtcaggctgggaattagccagggcatgataactggaagaagggattatgttctacatcattaatatctgcttccaggctttataatattatccaggctgccagttttcttaaaaggaaaaaaattatcttgattaactttcagctgtttcacccttccttacgttcaagactttggtttctctgagaagaagatttcaaaggaccactcttattcactaaatctcttattatgtacctgggtgaatagaatgaaaagacgagagtgtctaagtccttcaccagcatcccatcctgcactggctctgactgtctctcaagacatgcttcagcaaataacatttgtggttacctcgctggtgcctgccttattattatttttttttaattctctcgggcttgtggagttggttttcttatagccattccagagatctactggaatgcattcaactccactcaggcaccaggattcagctctgaaaagtgtacagcttcccattctcacaatatactgcccccatttcctctact

SEQ ID NO: 60879 - DNA, 1111 bp, Homo sapiens
tgcacactgagtagttccatttcaaactagacgttctgttgagctcagaccattctggaattatttggcaacatctgaaacattttttttttttttttacctacaacacttctagatgtgacgttttctggagaattgataaactgatctggtagctgttagtggctaccaagccaagttttacattgcaatctaaatatattgttccttgtcatgtaatgacatttattagagaatctggcaaaagcccaaataaaaatacaggttttcacactgtttaacaatctgaggttttatgtctttttggtgaggtcattgaataccagtctcatttttactgcctctatttttgaaaacagtaaacagtcatatttttattgtcctacgtggttgcacaaactgacacattgccaagtggttctgactgaatgcttttcacttggcaaactaaaggtactaaaaagaggttcacagtggagacttatgcatgtaggggagcaatttctgtgggcatgtgtatgtacaaaataaatctgtgaattccagtagagccagtatccaggactctaaaagtagaacagactgatttatttgtgacaatgtacttcagctgaacctctgtgctagtttgttggcaaaacctaacatatggccttttaatgagagacagattaataattgcagatatgaataataaagcagaaagattggctgtgccatcttttattctaataaggaattagatttggttactgaaggagcagctgtttgccaggtatggtatgctactgtttgagatagacactttgatgcaaaatgggacgcttgatggtgatggacttgaaaaaatggatatgcgatgtgtgtttaaatttctcaagccctataacaataaacattttacaccccaatgattattattctataccgtcattcaaaaacctacaaaaaagacacagtgacaatgttttctgtcttgttgttctttgagagaaaagacctatgatggtacctcagtgcaatggaaaaaaaaattcttgacaaaaggatcaaatagaagtggtggcacagtttctggaatatatgacattatgtttaaaattgagtgcaa

SEQ ID NO: 60880 - DNA, 1046 bp, Homo sapiens
ctcatgatccacccacctcagcctcccaaagtgctgggattacaggtatgagccaccacgctcagccatgaaccaggttctttccagttttgtgagatgccagtataacccatttgaattaattaacctacataaagaagcaacagaggcagtcataaagggtagttagacagtctttatcccagtagagttctggtcacaaggctcttcctgatgtgaagacagatgtggaaggttttggctaaggtaatcagacttcctgttttgctcaggactgttctggttcatgcctgttggggcagaactattaacagtgcccttcttattttcaggactgcacctgctcagataacaaagttcatacactttctaactctaggcagtggacattgaatatttccattcttatgggcaagtcatccctgtaattcaactgtctttgcctgatgacattaaataatgttttaccttaccaaagtatcttgttctgatttcatttttaccaaatgatattctgatctccacattcatattttggtattctcagggcgttggtagctactggcgccaaagagttgctctaaaatgtgtgtagaatgaaagcgcagggctctagggacacatgctccgggaacacacagagatttgctgggaatatccatgggccccagggcacatttgcatatccagtgggatctgtcatttaggaaagattaaaaattttagttatcccttaatgttggaacagatagaccaacttcagtggtctgagagagtatggagctcactcccaaaggaatccttactatgtgtcccagatgacatacacagcattgactggcacccacgctcagagcagtcttctccaaaagataaaggacacatccaaattgaagtccttcgatctttgagaataattaaataactaactaaaggaaaatgttttgataaaatgcttgccacagtacctccctaaatatctataaagacagaagattctgattataaaacacttctgacaaagtgatagtaaatattctcatgta

SEQ ID NO: 60881 - DNA, 1068 bp, Homo sapiens
accttatgtttttccctgctgtggtgtatgtgcaggtgcctacctagttccccatgttcttcctcctccctggactcatcgtctgtacagagacctaaagaaattgttttcccttttctggacatcagccatttttctgtgttgatttgttgcttctgaagaccttcattagatagatctttcctgatgtaatccatcatggcatgggcagtttcattccccatagtgctggtgagcatttggcaaggtctcttttcatatacctgtgaacaaggactatgggcctgatgccaagacttaaatgcacctggaaatgctaattaattggtagatatcagtagatatactcctagagaagcagggctggaaacggaacaattacatttgcaggagagtattacttgacttcttatattgccttctgccattttcctggttaatttctaaagactcttcttactgctttggtaaataaattattcttagaccaatgatgctcagagtgtgcagtaattatccctaacaaatgtaacaaacgagttttgaattttgttctattgtgttgatgttgtcatgttttgtttcttttgcaagcaatagaatctttcttggcccaatgttcaaataacctttttcttatttgagcacatataaacacacaatcaataaaatttcccaagaaggaacaacataaatattttaaaaatatatcatagatactttacataaaatgtaatacctatgggactatttaaaacttattagttatttgattagattttcatttatttatgtggcaaattgaaattaaggaaactaagcatttgaattgagtgtaggaatattccctttcttcctttttttttttttttttaccatttatattgtcaaggtgaatccaagataatgatttgttgcaggtagcctgaaatctcaatatcatttctgaggtcaccctcatgtctagggggatatgtagagtagatcatatttatttatagaacattcagtggttctttctcacacacacacactctgcctcctcctcccaattccccctgctgtgga

SEQ ID NO: 60882 - DNA, 1169 bp, Homo sapiens
agagatttttacagtccctctacaccagttgagtatatttcacttgcaaattctgccctttttaggttttcaattcatcggagagctacagttgtcaatattagtatggcaaagcagggaaactatagaaatcatgaaagtattctcatttagatttgtgcaggaaacagcattatattgctaatgaagataaaaaggcaaatcaatcatttcagaaataattcacctaatcagtccaccattttttggaaaggaagaactacttcaccaaatgttaccagaggttagaaaactacaaatcaagatcagtgttattccttgtaaaccttctgtgctgatgaagttcaaatgtagctgttttataaggttgattttataagattacaagtttcccttccctggcttaatttggggaaaagaactcatctttccccccaatagacatccccttctaccacaaggtatccagtctgattttgagattaaagagttttatttaaactctgagttggatgttacatatttcattcatctccaagccagttatgttcaaattctactttctgaatccgatcagcaagtctcagagaagtcagggttggcaagagaaggggaagaattttgactttcctctgctgtattgtacttcatgttcactttgaaggcttcagaaccattgcttcgacttagtattttatcagcgaggtgcagaggaggccagaacatagaagtgcccatcaggatggaaagactttagaacttttcatccctttaatctttgtaaatgcaaaatgtgttgtgtcaaaggaacgtagatcttatactattatcatcaaaagatttgaagttatttttcttctcaaaaggaatctgtgatatcaacagttgcatattgtttttctgttgtaaatcaaacagcttggaagaaaaatgttgccatgttttttgaaagggcagcacaaactatgatcattatggataaatttgagagttcatcctcatgaacttttaatgtttcaactgagtggcagttgcaaataaaagcgatgtaagatcaaagtgtttaatattatacacacatacacacacactatattcaagattttaccatttgtattggaatagattgtttaaagaaattttatagttgaagcattgattgatttttc

SEQ ID NO: 60883 - DNA, 1015 bp, Homo sapiens
ccatcaaccaacgaatggataaagaaaatatattatgtatacaacatggaatactactcagccataaaatggaatgaaataatggcatttgcagcaacttggatggagttggagaccattattctaagtgaagtaactcagggatggaaagccaaatatcatatattctcacttacaagtggaagctaaactatgagggtacaaaggcataagaatgatataagggactttagggactcaggcggaagtgttggagggggatgaggactaaaagactacgtgttgggtacagtacacactgctagagtgacaggtccaccaaaatctcagaaatcaccactaatgaacttatccatgtaaacagaaaccaactcttccccaaaaactattgaaataaaaaaggaatcaaatgctatctttaaaaagataaatgaataatttattgttagatacaacattttaatgcagtttggatcagggctttccaacatgtttcacttcagtgcacatagaaaaccacagagattgctcacagcttgaggtgaaggaggtcagtattttgactgtctgtaaccaataactacatactcaggctgaggccagattatcaaggttttttattctgtccttggcattcttgtttgttgatagcttatgcttgtagaaggggagactaatttcacagtattaattattaatatatcattacatctagatttgtaaaatgtattcatgccttactttgtatcaaatggacataggttatgattgaaatatttagggtggctaaaatattgatttgttagcctatttaatggcaaaattaatgcactgatttttaaaaggtagattatctttgtgacagcaagctctgatcattcattttggattttttaagagtaatttggtggaggatcatctaaattacttagatttttggacatcttatgccttcaaatacctttccatagttaaataccccctttgaagttattatgcttataaaatttccaag

SEQ ID NO: 60884 - DNA, 1010 bp, Homo sapiens
cctttgaatcttgttcaatattaagtcatgtttatttttaaagtgagagtcattattctaagtggaataggatttggtttttctgcattggccaatagctcaaaatgctattttataattatattggttccttccaactgaccttgtctatagatttgcaaacacatatagacattttacgttttatgtttttcagctatagcaaaatattttccttttctaggtctgcctatgggtgtctacgcaccttatatcaacatttatatctataaacatacacgttttagcacctatactattctatatttttaaattttgtaccaaactcctctgagacttattatggtttacacccaatcccattttatctacttaatgattggagccacttttttattcttatttatttctctaatgaactttggaggattgcaatttgctaagttctagggtacaactgtgctcaagacagacccaatctctgccctcacagtatcttggttggttacatatttgctcttacttctttcttccccccagctttattgaggtatgattgaaaaacgaaaaaattatatatttaaattatacaacttgaagttttgatatacatatacattgtgaaataatcaccacaatcagactaattaacatatccctgtcacctgacagagttaccattttttctttcttttttgtatcaagaacactttaattctacactcttaacatatatcaagtacacaatacattattgttaattaaagcacattataactaactataattacattagctatccatatcatatgcatcttgcataactaaaattttgtatgccctggccaataacacttcatttccccctgttaaccagctcctggcaaccaccattctactctcatctctatgagttcatctatttaagatttcattctattcaaggtgagatcatgcaatagttgtctttctatgtttggcttatttcacttaacttaatgtcctccagg

SEQ ID NO: 60885 - DNA, 1028 bp, Homo sapiens
tgaggcttgagatattgtacaaaaatgagtggatagttaaactttttttgagctgggtgcataaaatgaactcttgactttttatgatagccaagaaatcttcccacacacaatctgcaggccagttgcaagtagctggtgatctccatggtcaggtaagttggtaggtatctgcctacaagatgtaatttaatgggtatgaaaggtcttttattttttccccttcacacctgtcctgcaggtatcacagggactgaaattctgctagccaactgcactttagattcagattcaatttatactttttctaagcaccaactatacacccaactattgctgaattttttatatacatggtttacgtgtttagtttttatgagtgttttcccctcttacaacctacatactatagatattttacaagtcaatcaagagtcacatgtgggcaaaactaatttagtattcaagtgagaaaaatataaagtagtcacaaatatttgattttaagattaaaattagtaacccccaattttactgaaataacaggagctatgtcttattcatcttagttcattgtattcttcctaacacgcacacaaacacccttggctctccttatgtgtaaatgacattaaatacacataatgaatcctaaacagaataaactggtgacatctcaaagtagttgaaagggaaagaagcaactaacataaagaataaaagtgtaaagagcccagagtaatagggaggccaggacaggccagacttcaaggacaaggaagatgaataatgggaaactcatagagaaagtcaaggataacctggggtttattctgaacattgcaactcctgtcaccatgctctcaacagcagttccctgttacttaacaatccatcagtgccttctatttcctatagaataaagtctggattatttagccaggttatgccagggtctccaaaacctgtcccatctgttcctctagcatagctgatttagcctctctaaccacagtctttcctgtaat

SEQ ID NO: 60886 - DNA, 1031 bp, Homo sapiens
tctaagggctgtctttaacctcttgaaattaatggaagataataatgctgctttgggtcaagtcctttgggcaccattatcagagtaaacatatcgtcaactttacacttattatgtgatctgtactctgtattgtaagatgcatacttctttataagcatctcattttaaaaacaacctcaaacaatgctgtggggtaagtattaatatttgtgtcagttaagatgctttaggtagaaagtgtcaaagtgcctatttaaagtgccttgaacagtaaggaaatgaattatactacacatttaaaactccattgttagtgtgggctgctggtgagaggagaacaaagctctggctccattttctcagctccatttccaactgtgtccttctccatgtgtcaactttgcttttccgtttaaccaaaagttagctgccagtgggtctagggtgccatgattcattgttcttatccagtgggagaaaggagaatccaaacatagagtataaatccttccctttagtaggcttaggtaaatttgtgtcatatgcccacacctagaccaaacaccctctctagggaaatgccttgtgctgcttgtcttagttctatgttccttgaccaattcactagcaaagcagatgggcttataatgattggctcaccaataagatctacccctggagctagtgatttgggtttacttcccctgtttcccacagttgtgtgaggatagagaagatccctgaacaacaccaaagtcttgttaggaagaatgaagtcggtgctgaatagacaatagacaaccaaatatcgctactgtcttattatcctgagtttacaggtgtggaagccaagaggttcatcaacttgtccaagatcaggcaagtagaatgaggaggagtagaagaaagagaaggagggaaaacaaaggaaaaaaagatgagggaagaggacaattagaaggcagcaaacacttatattgtactttactgtgtcaggcagtactctaagccctttatatagcaataga

SEQ ID NO: 60887 - DNA, 1038 bp, Homo sapiens
gtgagttttaaaaatttgtttaaaacaacaaaagaattcacatattgtgtaactttggatttagggtaccattgaaattgatttccttagaggtgtgctagaggcaaagtttgctaatctggttggtggaagagtactggtggaatctttctttaggtttctctctatgtttaagttcctgcttgcacctgtgctagtcaatgtatttgttgaggaagatttatggttctattcttttaggagagaatattcacactttggctttgccttttgaggcttacacatattatcactaaagtacattatcatttttcatctggtggtagggaggattttaccaccttctgagttaggtggaatgctctaggcagagaaaggattagggctcatcagagccaatagggccaactttgttccgttgttttcctgccaaaaagaaataggggataatagaaactcatcagttgctatttgcaaaactgtttaatttccctgaatattttgttctcttgttgacatgagcattgactgcttttttgccatagtgggataatttattttatacgaggtggtgttttcaacaaccactatagaatgttctgaatcactgtgaactctatctggataaaaataaatgctcttattttctccaatggatatttttccttgcccatgaaagttatgactggttctgcttattcctcaaaccgattatatgaacttctgataaatgtttgaataaaatgtaagaaatattgtaaataagcaaaaatcccacagaaatcagaggaagtatgttctacctctgctcttctaagtctgaccaacagttaaataaattcttgggttctatgaacagaatttttacatgatgaattttttttttttttaattgatcattcttgggtgtttctcgcagagggggatttggcagggtcataggacaataatggagggagggtcagcagataaacaagtgaacaaaggtctctggttttcctaggcagaggaccctgcggccttccgcagtgtttgtgt

SEQ ID NO: 60888 - DNA, 1002 bp, Homo sapiens
tttcttgtgggggcactatcttctgcattataactgcagccctagcctcaacccactaaatgccagaggaccccctggttgtgacaaccaggaatgtttccagatattaccaaatgtacccttaggggtaaaattgcccccagttgagatctgttacattatattacatactcacccaagcttaatattaaaacataacaaaaataaaaatcacattaagactgcccacaattctgatagtgattgtagtactcttgccattttcctgcctctaagcaattacggaaatagccattcattctttaggctaattgaaggtgctcatgtattatagaaaaaacaatagagcaagaatgtattatacattgctggaattaagcttaatacacttgacttaattaggacaattaaattatatgttcagctctcgtttatttaggggatgattagtctattttcctttcttttttgtgggtgcacactggatctatggcctgtctttagctttcctcattactggaaattgaaatcagtccacaaacacttatctagtgcttgacatgtattttaagtgctaacatttcaaaagataatgcacagaaagcttatggaatcatgatgctggggaaggatgttgtgaagtcctttcagaatcctgttcattgtcagataaatggttgacccatctacaataggtttagtatgttctcttttccttaattatcttcaaggacagaattgctgcaatataagtttctcattccagactttcattctgatggttcagatgattctctatatctaaatattaaaattgcttaaatttcagtctgtttcctcatataagttttctttgtgaatatgtatgtatgcctcatgacttcagaatcagaaacaattctgaagttgagataccttgataagtatattgactctttttttgcataaatgagatttttagttttggatagcttatttatgtttttgattcacaaccaagaa

SEQ ID NO: 60889 - DNA, 1048 bp, Homo sapiens
cccacaaaaatctgcaccataagaagctcccacacatgtaaagcttgagtcagtttttggtgtaatgaatcttcattcattcatttaacaatttgcttagaggcatttttagtatttattcaactgatttgaggaataaaaagtaaactagtaacataggccaatactgtattttctgtaatcatttttcttaaaggaaaccttcctgcctataggtcagggtcaggatgaattcctaatgaatgtttccacagtaacaataagtaataaaagcagataacatttgaagactgtgaacaacacatgaggctcagagctttagggatgggtgttgttgttacccccattttattgcaaaagcaactaagacctaaagcagttaaacaattaggcccatgttcataactagtgagaaggaggaccataagtctgacactactttgctatattgctctactatcacaagcttttaaattttgcctgcaatgtttcattttgcttttaagcaccagtgtatctgtaagactacttctattggtctgaggactccgctttcacaaaaacttatacagcatgttatggtttcgaaaatttttaaatattagcacttggacccatgttaagtacatctgttgtaaaaagatgaattctgtaacataatgatgagaaggtcataagtttaatgccttagagacatacaatgggcaatcagaacctattgcaggatctactttttgtaatgcattgaaacccttatggatgtttcatgagatgaaacttcatggttcagtgtttgagacattactaagtagctacatttttttacataaaatatgttagttaataaatttcttcaaaggaggaattaggaaaatttaaacagcagctaaagacaatgaatgaagactgggaaaaaattattatgttttgttatataacaaaataaaaggataagctgagtcatgacaagtgtgtttgccttcattttccccttcaatttcctctgactactgaggaaatgtaaccttagcacttcgttggtgaatct

SEQ ID NO: 60890 - DNA, 1035 bp, Homo sapiens
ggacatttttaagaaaacaactgagttgataatgtcttcatacattacaacatcaaaatacatttctcactaatgtattaagttcaaccttttgtactcatagtggaaaggtctttggtactttccataggtggccattgacttaattcatagtgtgatccaggtagtcttaggtgggttgcataactctttgctttcaatagttagaagatgaaaagacatccatatatcacagtcattgagaaggaaatgggaagttccttggaattgagacctgtagagatcggaggcctacagtattgaaggatacaggcaaggacgtgagccagtcaatatttgcaggagtcctgaagaattgagttttcactgtgaaggtgacaatagatcctagagaataaatattgacttctcagaaggcaggtaaaaaaagattcaagaagcaatctggggtagctgaacattttcctttaaagctaagtattctttactgcttgttttctctaaaggagaaacagtctgcctcattgataaatactcatgttataccctcataattccttccacttccagaagagcaatactttattgacctgaaagtatggttgtctataaccttctgagtgggatcaaacagcattgtttaaattatcttcctaagtggattatttgttgttgttgttgttgttgctttatttctaaagtaaaatttcatagagtacttctgtttatgaagcttataagaacagacttttctggttacagaataggggaacagcctccaggagctccatccagttgccctaaattcccttgctattcattcgctctcattcctccccctggattaagttcttctctggaatttttgagttcaggtcaggtaaaatagtttgaagaccacttttctagttgaatccagggttactctgagtacctaagtaatgataattctttatcagctgtatactatgtacatgccgcttggctatgtgtagaatctctaacctttacaatagtcctgcactttagggatcg

SEQ ID NO: 60891 - DNA, 1048 bp, Homo sapiens
cataggagaaaggatgctgaactttggagtatttgtcttcattaaatacatgagtgacaggttaggtgatctgcttctgtgccaggttaaataatgaactataatattatagtagtaataataatatctgccttttgtaaaatgctttgtgtactaagcactcggatgagtactttatatactttatcttctttaatctaaattaccatgcatgagacagctgctgttatttacagagaagaaaacccacaacaggaaagttgtggcagaaacttgccagggtcactaagctaggaaatggaggagccaggtttcatacagagcagtttgagcatcagaaaccaaccagaactacagttacctggcattgggtaaaccatgtcattctctgcatttgtttctttaactattaatttatttaaaacgtatgcctccctgatgaggctgttgtattaagtgaaataatgcatataaatgcggacagttctgccaggtgcatggtaggccggttttaccagctagtatggtgtatttctactacaactcattttactggcagcagctcatctgaagctctgattgttttagagcattttgatgttcctttgaatagattaatttagatctgacgataagatgttataactaagactctaattctgatacaatcacccaaactagtatatatatatatatatatgtgtgtgtgtgtttatatatgtatatatatgatataaggatatgtgatatacagagaatatgatggtatgtatgtatatacatacagttgacccttgaatgacacaggagttggatctgtccccccgcacagcccgcacagctgaacatccacgtataactttcaattacactcaaattgaactactagtagcctactgatgaggggaaaccttacctatgacaggaaaattcaatgaacacatattttgtatgctctatgtattatatactgtattcttacaataaattaagctagagaaaaaaattgttattaagaaaataaggaagacgaagtatatttactgtt

SEQ ID NO: 60892 - DNA, 1344 bp, Homo sapiens
gcactagaatgttggatctagtttgtgaaagacttagtaggctctactagcgagttcggcttttaacctatggaactcaggcaactaccaaatgtttcggagcaaaggagtggtatgattagaattaggttttaaataatgaattttagcaggtaaaatttacagtagaaactgtaacggtgtccagtgatgaaaacagaaccagaaaaccgcaatgagaaagggaaagagaagataaatataaaagagattatggggccagattgggcaacactggccagattttgatatgaaaagtgaagatgtagaaagagtcaaaaacaaggcagatgtttttagcttgagcaacgatgtggatgccatggctgtgtgagaaactctaaaagaactcaccaaggccagtttcctgttctatacagtttcacatatgattttcatcttatagcttattccttctattcaatttcacatcaaccttaaagctgtttagaaaacaattttctggctggatgtggtgactcatgactataatcccagcactttgcagattcaaagtaggagtcttgcttcaggtcagtagtttaagagccgcttggacaacatagcaagaccccatctctacaaaaaaagaaaaaaaaaactaaaaaattagctgagtgttgtggcacatgcctgtagtcctacctactctggaggctgaggtgacaggatcacttgagcgcagaagtttgaggttgcagtgagctatgatcaagccactgggaaacagtgagaccctgtctcaaaaaaaaaaaaaaaaaaaaaacacacctgactttttgatattgtctctctcttcttagatatagcaatggaataaactgcagaaacttagagagaattattagatctctaattaggaatcattttttctacttttcaaggaaacattgaaaatatttccagggatgaaaattaaatttttaatttgtaaattttaataatggtttcaaaatttaacatttatgattctttgaataaaataaacaaaagatagaaactgaattttattaatttctactttaaaaattattttgttgagttttgtttttctttagttttatctccctaaaattttgtaaattgaaatagagataagtgttattattaatatttttgagataagctacccagtgggttcattttgctggaatacaatttatattttcttgagtgaagaaatttatctttaagtgaattatgaaattaaaccagaataatttcaggaccactaagaagttcattttattcaatttgacaaacataatttgacagaatatcatcagtattgtggcaaaacctaaa

SEQ ID NO: 60893 - DNA, 1050 bp, Homo sapiens
tatctggactgctaagatggtaatgattatacaaaactcacagggttggactagcaactcaacacaacagccatgaaaatgctttaagcccagtgtttgacaatagactagatgcaaaatgagagtgcatttatttctaagagacttatgttcttgagtatttcaagtgggtagtaagtgataagctgtccatgttaggacagtgtcataagaaaagagattcctgtggaagaacacagatccttattactttttctgaagaaatgtatttttgttttggaaatttggctatgaaaattaattcatgaattgatgggccaaacaacagaaagaaaaatgattattcttcttaagagttgtattattttaggttttgccacaatactgatgatattctgtcaaattatgtttgtcaaattgaataaaatgaacttcttagtggtcctgaaattattctggtttaatttcataattcacttaaagataaatttcttcactcaagaaaatataaattgtattccagcaaaatgaacccactgggtagcttatctcaaaaatattaataataacacttatctctatttcaatttacaaaattttagggagataaaactaaagaaaaacaaaactcaacaaaataatttttaaagtagaaattaataaaattcagtttctatcttttgtttattttattcaaagaatcataaatgttaaattttgaaaccattattaaaatttacaaattaaaaatttaattttcatccctggaaatattttcaatgtttccttgaaaagtagaaaaaatgattcctaattagagatctaataattctctctaagtttctgcagtttattccattgctatatctaagaagagagagacaatatcaaaaagtcaggtgtgttttttttttttttttttttttgagacagggtctcactgtttcccagtggcttgatcatagctcactgcaacctcaaacttctgcgctcaagtgatcctgtcacctcagcctccagagtaggtaggactacaggcatgtgccacaa

SEQ ID NO: 60894 - DNA, 1029 bp, Homo sapiens
aaccacgtctctactaaaaatacaaaaaaaattagccaggcttagtggtaggcacctgtaatcccagctactcaggaggctgaggcgggaaaatcacttgaaccttgaatgtggaggatgcagtgagctgagattgaaccactgcactccagcctgggtgacaaagagagactccatctcaaaaaaataaaaaagaataaataaataaataaataaacttttacaagagttctactgaacacatttaacaattgcttttaaagatttagccaaggaaccatgaaccttgtgcctgatgaaataattaagcaacagctgcatctaccatgtgggtggatttatgatatgaagtattgttctggcaaagctcagaactagcagatatttcacttcaagggtaagtagcatttatggtatattattatactgctgtacttctttgaggggaatagaaggtggtctgtcccaaaagatgctatggagtaaattaagcataatggaataaggaaaaggccacttgtttacatcaaacttgtgtcacaaggattcactcacttttagttctcaaaccactagagaatcttacaaaggaatcattccaatttaattcccagccagtgtcatctgctccttatgtaagtttgcttatattctttcatgtgtcaaaaaccatcaaggggccaacttagtgtcgggcttgtggttggagaggcagccaaagatatacttgatttctattgacatctacattttagcagcagagattgtgccctagcaatgcttgtcagaataaaggggagctagggctggagtcacaggacacataatacggatgtcaccacatttcttccatgtagaatgaaatcttcctgttatatggtacatacaaacataaggtttcatttgtcaacaccttgatttccattaatttctctaaggctattgatcatttaaagctcatttacatttcttttttaataataaatgtgttgctaaaatcacagtttcccaggacattgctttcccttg

SEQ ID NO: 60895 - DNA, 1063 bp, Homo sapiens
gaaatagattctcctcacttctgaatcattgaacattccaatattgatgtagaaagcatagagccttatttcatttgatagtaaagaataaagcaagcaatattgccacaatcagaatcttttatgtgtttttctacacaatcatcgtttataacccctcacatcctgaattttccctaggatgtgtagactaaaataaaatcaccaattcattcatcataatagttgaagatgacagggtgaaacagtgatttgctaatgcttctttaaggcttatcctcttgggcagtacatgttttttgggattatgaaatgatcaactttaatcagtgcctgcccattagtccttgccctaatattactgatgattaataccaaaaatatgttttaatatctgctgacttcctaggatttgggagtatttgataagatataagccaatgtgaatcccagtcaaaagtaggcttatctaagtaagattatgtttggcttttcaactacacttttcagaattttaatggtagaaaaacatttaagaaagaaaaccgttaacgtaatcacggcttgcagagcttcttgtttttccatgctgtgatgggacattagctaagcacacagaacataatttcctatggtgtgtcaggcctttctcttaggtctgatgaggtctaaggataattatgtgcaacaacctactgtggcagagaaactgaattatcagttacatctgagagtcttctcacaaaagaatgtcagtctctcactgctttatattagctaatctctagacggactttcctggttgaagcttacttttttcatcagtctcttatcaagaatgctctggttaagaactaattcatattacggacatcattaatatattgtaagtatccataaatataaattttaatattaaatgttaatagggatattacatgatattggcatactatataatgtgcttatatatatttatttcaaatgttaactgaatcagatctttaaatattttcgtttgtttttatgcaccctgaaacaaaagtttactcctttggttgaa

SEQ ID NO: 60896 - DNA, 1007 bp, Homo sapiens
gatggtgtccatttgctcaaccagacaggagttaacttgtattagaattgttttttctaaagttatgttacctgagaaattaaggactgcacctggtttaatgttgcttcacttatcccaccctacagagaccagcaaggttctgccaggcctcgagcatccaagcatgattttgctgtgacaaatctaaaatcaaccaggctacttaagtctgctctgatgaaacccaataatctctcaataccttcctatttctcaatagtctttaaaccctaaatctgagtcagtaattctcttacatccttcccaaaaatcagtgtctagggactagttgatctggatgagttatacatgatatttgacttttcataagtagtggaaggtttcactaagtaaaactctcagtttcttggtatctggctttcttatacagatggtgtccatttgctccaccagacaggagttaaaaacctttaaagagcatttaacatgccttttagttttcttatttcataatctacttttctatcattaatcatcttaccaggaataatcaaggcccaggtaggtagaagtttttatatagcctgaatactcacttgacttactgctcattttactttttgcatggaatacagccatttagtcctaatatacataccaatgagacaattaaaaattggttggaagatggagcttatcacattgtgctactacgactttattttttcttgaaaataaagccttgaggatgtgaacataaatgttggtatcataaaacaagtagtaataaaagcataaattatcaaatatcaggtgatcttactatggagaagaaaaaccaatatctagttacagatgaaaaaatgtttaatacaaagagctgaaaatgtagaaattgagttatcttccctttgcaaaatttttacactttaaattagtaattctttgtttgcaaggttttcatccctatgctgttgttttctactacctgttttactcttgtt

SEQ ID NO: 60897 - DNA, 1090 bp, Homo sapiens
tgagaatcatggatccagagattgctctgaaaattctgcatcggaagatacatgtcacaccactgatcccaggcaaatctcagtctgtgtctgtctctggccctggccctggccctggccctgggctctgcccaggacctaatgttctgctgaaccagcagaatcctccagctcctcagcctcagcatttggctagaagacctgtgaaggacattcctcctctgatgcagactcctatccagggtggaattccagctccagggccaataccagctgcagttcccggagctggtcctggttccttaactcctggaggagcaatgcagccccaacttggaatgccaggggttggcccagtgcctttagagcggggacaagtgcagatgtcagatcctagagctcctatacctcgcggacccgtgactcctggtggtctgcctcctcgaggactgttaggagatgctccaaatgacccacgtggagggactttgctttcagtcactggagaagtggagcccagaggttatctgggtccaccccatcagggtccccccatgcatcatgcctctggtcatgacactcgtggcccttcctcacatgagatgaggggagggccattaggagatcccagactgctaattggagagcccagaggccccatgatagatcaaaggggtctacctatggatggtagaggtggtagagattctcgagcgatggagactcgtgccatggaaactgaggtcttagagacacgtgtaatggagaggagaggaatggagacctgtgcgatggaaaccagagggatggaagcaaggggcatggatgcaagaggattggagatgaggggccctgtccccagttcaagaggccctatgactggtggaattcagggtcctggtcccattaatataggggcaggtggccctcctcagggacccagacaggtcccaggcatttcaggggtggggaatcctggagctggtatgcagggtacaggcatacaaggaacaggcatgcagggagcaggcatacaaggaggagggatgcagggggcaggcatacaaggagtcagtatacaaggaggagg

SEQ ID NO: 60898 - DNA, 1051 bp, Homo sapiens
atttgcattatgataacatacccctgaggaatgacaaatcgtgaaaatccagaagaatctttcagaatgtcaggtgccattgggggagagaagagggaaagtagaggggagatttggggacagcaaacccttgcaggcaccactctaagatcaccaactaggtcagtctcaggaaggaacatgcacccaatggtgatttgcccaccgaggtcacctgtattcttcttcttatatagcttgtcactctgtgtccacatgataggactgtatgaactccacatgtcacatcgcccgttgtcacattgcttaactaataggatgatacacttaaaatatttcacagcctcagcctttcctacagcctaagtggattttattttggttcattttccagaataaaatctagggtgatgtgaggatattggcaggatggtcacaggaaaacaaatgtgcctttttagaatggtgtcagctgcaattatttgaacttgtctttttttacagagctgttattgactggtgtgcttctcaaaaaatgtgtattaagcaggaaagataaaatctagaggtttagaagaaagagtaacattatattcattcaatttaatgatgtgggttgaattatagcatgccctgaacaagcatgatctaactacaaaataagtacattctcattcgaaaaggagtataccctgagacaacatttgtggtttaaagtcatggaaagagacagttgagacaactcctcatgtttgcctggctttgaaatggtaatagacattcatcctatttcaagtccttatagcaatgatatacagcatgactgactgggatgcccagactgttggttcatccacccaaccagagcttactggttacctgccatatgtgaaccatccagacatctagtatttgggggtttaaaggcaaatatttaaatattatatgcttatttccatctctgttatatggatagtttccagcaataatctgttaagccacaaacttacaaaggttctctttagtaaccttttgactctgctcaaagtaa

SEQ ID NO: 60899 - DNA, 1070 bp, Homo sapiens
ataaacatttataatactattatatactcttcatgaaaatcattttaatagtagctgacaacccaatgaatagaaacttagacttctagactgatttgagttgtagccttgttgattcaatgtattttgcttttaaaggtgagatctcaattaccttttaaggaaaaaaaaaaaagcaccaaacaacaaaaacacctttgaatacattccatctagcgatgcttttcaaactactttgtgtcgtgacattcatagaaaatgagtacagtgttttgcaccaattagttcagctgccctaggctccatccttcagtattgaaggctaaagggattcatacctaagcccttcaatgggaagttctgacaactatatgactatagatatgtaaatgcacttagtttttatctagattgataataaccaatattgctctttattaacttcttctcttgtcaaaatctatgtgaagcctccaaatgagcatggacagatagattttcatctgtaatatcccttggtatacataaagatttaaagactccttgcaatgcctctgtagtccctcatgcaccagcatcacccatattcattcacctcttcatatgctttcatctattcaacagttattttctatgtgcctacaaaatgctgcatataaaacaatgaataaaatagataagtttcttgccttaatggagcttatggtccagtgggggactgaggcatatgttaatctttctgggaagtcttcttaggggaagtgacattttaactagatgtggcctgaattctgaagaattagctggtgctggctaggcaagaattagttggtattagttaagcaaggaggtatggagagcattctagctggcggaacaaatggaaagcattctacatagaggaacagcatggaaaaagccctcaaagtgggaagcaacattatatagtcaaggaattaaagtagcaatatgcctgagacctagaacaaaagagagaaggagatcagaaaggagagaatgacagataccaaatctcacaagactttgtaagccacattaagaaatcagga

SEQ ID NO: 60900 - DNA, 1044 bp, Homo sapiens
tgtttttcccacattttttttttctttctgtggtctcatgttttctaattatttaaagagaagcactcattctttacttggacaaaatattattaatatccccaccatttgggatgatatttttatagggtattataataggtttttatgtatgaatttgactattaaattgaaataatttacactaaatacagatagaaagaataacttatttaatcagaccagatgatatgattaaagccattgttcctgtagacagacagtaggttatgtacttatccagataatttgattactgtaaacagtcaactttgcctgaattatctggataattgcctcacttctccattttacatagcctaaggttctaggtttatttttgcttcccacggaccactttctgcagtgatcagcaatcagagaaaatcagattatcactctgtttaaccttcctgtgccttgggtaattaagtcaacaaattagctaaaggctccaatgcggaaggggattggtagactgtggttaagacacatatttacgaattttcccttaagctgctttttttttttttttaaggaagctttgataagaagcatatgatctcaattatcattaactctttgtggtttcgtgtttgggagcttgaactagactttagaaggcctaggacccccttccatgtgtgcctgagcagtatattggcagaccattcacattttccatctcattatctcacatcgagaaagcagacttaaatcactcttcacacactcattacagactgagggactatacttacttgagcaggctgctttgggattttctttagtgacttttggttatatgcttttgtaatcaactgagcgtctttctttaaggctatttttcaatacgaaattctttaaaatgaaatctcttaaaatctgagggaaaggtatagacataaaaacaattcctatcatatacagataaataagaacttaataaaaatttattgctattgtttcaaaatctaacctttattttttaatgttgttttgtta

SEQ ID NO: 60901 - DNA, 1045 bp, Homo sapiens
tcaaatcatacttttattagtgttgttaattttattttatttctctctgtgtgttttcctctctcatcaatttatctattacctatctcttaatccatccattcatccttccattcaatcttctattacttttaatatttttaaataaactgccttgttgctttgatttgtattaatgtagactggcagaacatgaaatgacagaaagacttttatttgcacggaatcttctgaaatcagctaataattcactatggattctatttactcagattaataactgtgcagaaatgtcattatctgaagagcacaaatctggggatagacagaattttaatcacggactctgtcattgactgactgtgtgattttggttgcttaaataatccagattctagtctcctcaattataaaacaggaataataatggacttaactttattataggttaagcaacataaattgctttgggtattcaaagaagataattaattgccgtggattaggaatctgaaatagaagcttgaattcccaggagtgaaacaaatttaggaatacttgcatgactattggagaaccaggccacttaacaggtatacatatgcccctctgaccacctcctagatgttttctgccatgtcagtagcaggcagaggaccagctggcttagtgtctatattggttacatgtggcagctcaaacaatgtgatgtgaactatggagggagacacttcacacttaacatctgttcttcagattccccaacaggatgcctccaaatatgaaatgaaactcatcaatagcaagctggggaatgagtctaaatggatgacattttggaataacatatttgacacttgtgaggtccaccagttgtggcttaatcaagaaagccagcagatatctacagtattcatctcttaggcaaacacatctaaaaataaacacatccatttgtcttattttaaatccatattttaactttcaaaatatttcaatggatattttgcaacacaattatgctagtttttacaattttctcccc

SEQ ID NO: 60902 - DNA, 1156 bp, Homo sapiens
gcaggaaaataatttaacttattgtattattatattaaaagacattggtggggtagaatataaagattattgcatagtaagttagtgaaggatgactagggcaggaaattaggaaaataatagaaactatgtatcttaatgtctgcaaattcccagtggcctactgagttactgataatagcaagaggagacttggcatctagaagaggtactaaagatatactagaatagggcatatctcaggtggtgtgtattccaaaacaaattacttccattatattttcttcgggtccagtatttacggcattttcatatgttattttaaattcagggattagttatcttgagtcaatagctcataaaggctgttatatgaccttataacatatctggtagaaatgtgactttttttctttttttacatttaaaaagagaggaaaaagtgaaaatattctagtattttgtttgtgctgatgcctagctggggtttagtgaggtggcctttttataggctgtagtaaactttccatgctgtccaagtggattcatgtttctctcaattacaaagggcaattataatatacttatatgtgtgttgaaatctgatgctccataaatataaaatctcgttctttcatgagactgattgaaatctcagtgctgactgagcaagtaacacctagattgccctctcattgcttggatcatatggacaaggcaagccatccatcaacacagactggcacagaggaaaggatattgtttctgatgtgaaggctaccactgcatgccagcgttggcttatgaaattagctaagaataggagtctacaatgaaatacagcagttttttcccctataagacattacagacatttgtttaacgtctgctaaatgatgtttaccccagtctactaaggctcatcattagctcttcacgatgacctagtcaccttccttataaggggaaaatgagaggtaaaatgtacagtgaacatttaaccaccagaagctaggagaggggtatgaaacagattttcctcacacctttcagaaggaaccaaccctgccaattcctcaatcttagaattctaaccttcagaaatgtgagaataaatttctgttgtttaagctacccagtttgtggacttccgtac

SEQ ID NO: 60903 - DNA, 1334 bp, Homo sapiens
tggattctgtacacattaaaggccagttctaaaaatgatagctggtctcttactctgttttttttttaaattttttaattttaattttttattttttatttatttatttttttgagacagagtcttgctctttcacccaggctggaggcacactgcaacatccacctcccaggttcacatgtttcttctgcctcaacctcctgagtagctgagattataggtgtgtgccaccacacctggttaatttttttatttttaatagagacaggtttcactcgttggtcaggctggtctcaaattcttggtcacaagtggtccacctgctttggcctcccaaagtactaggattacagaagtgagccaccaagccccctattctttgatcattcaaaacacatccttatgttgtacttctaattgttggccagtgaggatggatcaaaagttgattgtcgctcaaattttatggaatagtgatatcttgcattaatgttcactttgaaaattgattagcatcactagcttccacagggagttaggataaagcattataaacaggaaagactgtagggaaatcatataccccctactctttttcatttttttgaagcctctcttaatatgtctttggtctcaggaaaaaaaagctcttaacagattacaaatagcaaactagtagaccaacaaagatgaagattaggccattctcgtcatgcagaaaggtagatgctaaattttaattatttcattccatatgtttcctaaacatgataaattatatcttgtacatatattttaccttcatcagactataagattttcaagattagaatccttttctagtacttttaaatatttttctcataaattagcataattttgtacacatacacaattttgttaacagattttagaatgttgaaggttttgataatgcaccaggcaccctttaaagactttcaaattttgaaaatacaattatattcctgcttttacatgaggaaactgagaatcagaaaaattatgtagcattttcaatgttatacagcaagtgaatattgaattcaaaatgtaaagttatgtccatttgactctaaaagtcattctattaatcaatttgatgaagctttgataagcctatttaataaatatttattaattgttacttgatgcattaccaagcacattttaaacttatttttggctcccatgaaagactcaaagatatgattttagaaaattataatttaagtaatacacatgcctgtcagatcaccttacactgaatttcttttcagcatgctgtatcctttaggaatgtatttcgaatgcta

SEQ ID NO: 60904 - DNA, 2254 bp, Homo sapiens
tttaaaaattatggtatttcaggataatcttgacaatacacagagaatactttgtgtcttagctatagtgatgccacctatgtgacagtgtaaacacaatttacaatttacttcagttggccaaattttcttgaaattctgggatttgtgatcatggggatgagggccaagtatataacagttttgtattggatcatttttttcttaaaaatccatatcatgttctatcacaataacataatttgattggcataaaatactgcactgtcagctggagcattctgaatgggtttgtacagagcctgacttgtaggtaatatccattgggtcaataggatttaaagctgttgcattttaatattatatttctaagtaatgctttgttgtaattcatattatcttgattagtaatatataagaattactttttatatcaaattaacttgatacaaaaagtatttattaactcagctatgaaaaaagaactaaagatgtacattagacttttgctttcattactttaaatacctttgtatttaaatattattattgtttcattttttatttgcaatcataggctgataacctaattagaatgtcaaaaatattgtcacaaaactgtaccctctaggtggaatagaactcttctctggtatttaattccaaattcttctttgtcagtactgcatgaattcaggaaaacagctgacaccagataatcaatacttttgatcaagcattctggcaaagagaaatattaaaaggattaatgaaagtactttgttacctcaaaatctgggcctttgtaggacaaatgctaaaatatttcagatactttatgataaactgaatcagtgaactacagatatttagggtattacttctctacattttcttggagtgagatttctcttagaactccagggattgaattcagtcagctaaaaaagagtagaaaagaatacatggagatgaatatattagaagttgtgggtggaatattccaagtctttcatataatttaaacttaagagaaaattgatttgcaagttagactctaaggtatcatttacggttaaattatttttaatacattcagattcttctagggtgggacaaaatctcactgagctggggcatctctattgtatcatcaaaattatacagcaatctcaaatatgcaaagcacattgctttactaagataaattagagtataagatattctgtaagttctgcaaatatgtaggaataagtaggagaaagaagtaaaccaagtggaataagggcctaaggaaacttatggaaatgtggggttaacttttatgacggtagctacaacatctaaagttcaaggaaaaaatggatgtatggggtatgaaattgatttagaaatattacaatatttatttatgtataagaataaagtaattataactaccatattttgaatactcagtatgtgtcagacactgtgagaaatatttggtggatagatctttaacttaaaacaacttactgagttgacagcattatttccagtgcaaagatgaggaacataggacatcatatattgaataacttggcataactgagaagcttcaatttaacatgatggtagaagttgttcaggaagcagagaacagtcaagtcatccattattcctagtaagaagttcatatatagcatgaagccataaggttgcagggcataagggagccagaatccagcaacccacagaattaacctgaaaagaaataggaagaagatgaggatttccactaattatattgaagctataagcatgaattctgtcctaataccgagttagagtgttagacacaaaaacaggggtcatttagtagttaaaaataataatgccagttacattttatgaattactatataagcagaactatgctacacaatttgcattcatgcttgtatacacttagcaaattacttttctaagttacacacacagtgactgtctcaactgggatacagacccaagtttacctgctttcaaagactatttgatttccattatattttatttatttacttctaacagtgaggtataaggccactcatggtccctaaaggttgaggttggttgaaaggaatggcatgagtgacttcaactggcaatgtgattactttatggaatataaggagtattctacacttcaaaaggtgagggaaaatgcttctattcttttgagaagtaaacttttatttttaattattttaat

SEQ ID NO: 60905 - DNA, 1066 bp, Homo sapiens
gacttccaaggctcagaaaagctgctctggggaggaaggggtatggtgtgtctgtgccttacttgcaccacagctgaaggactcctgaaagcagcctgtcctgagttttgtgccctggggtaacatgaaacattaggctaaagtgattaaggatagcttctttctaatgaggactggaacagagtgcaggttattccagccagttcctccctatctcaggattttgcattatttgcacattcagcagttattcttgggaaatacaagtgagaaagagcggggaactaggttgatcaaaatccacccagaaaattatcctgcactatggccgaccctatttgacagaatttatctagtctgtgttttgacattcctccaatacttcacgtggcatcaggtggcatattgaaagtaacaaatatgataggataaaagagctgacaggaagaaacagaatagaatctgttcttaaattaagtcccttgcgactggaggaggtggatgcagttgctctaccctagacaatctcagactgtggctgtcaagcttgtctttcatccttctctagtgatacccttgccttggttgctggcagtggaaatggatgggtcaagtgtatcttttcttgaccttgatgttcaagggttgctaagggaggctagtgagaaatgcacacaaacagctatttagaaagggctctgttgggaagacgacctgctgaacttccagatggaggtcatctctccacatctgcactcatcactgtggaggcagctgctctcactgacatatcacactcctaaagagatgtttgttgttgatagtgaatgttccaattctcaggttcagaaggtcctagaatttaagtactggagtatcttacagacattttatctgatggataaacaaactaagacataaatgtcaaagataataaccttctatcaccacacagttgaatagagacagagctgggaccagtttataccttcagtggcatagatggcctattccttcaagagtcaatctgaatttgtaaagatttacttaagcaagagttgcaaat

SEQ ID NO: 60906 - DNA, 1069 bp, Homo sapiens
tgatatgaaagagtagaagtagtaaaagaaatgttatcacaacaaaaaggaagggctaataaaaattcagataattctaacaatcatcattacgtactgtatatatttgtataggacagactgaaaccatggggttccatgcccctccaggcataccttttgttttatatttaaataatgaaatgatttgggcctttgcattgcattttatgtatctctagaaaacttagtttccaataagaaaggtattaagaaaaacatctttattaaagtactttacgataaaataatactttctgttaaaaatattaatttttatcttgtaaacgtagtataaagctgatgacctggtttggtttatctagctaggcatcttgaagtgtcaaatgcattaaaaatatatatgcatttacacatattctaaactgttgtcaggcatccttctcttcataatttaatttattttgcttttttttaaggagtcatttatttcaattataaagacacctggaagctacaggaaactcatctaacttagttgcagttctgattgctatcagccgtttgctatttttttacctgagtttcctgtttatttgtaaagaatctaaatgacagccttgttcatttttaaattttgtattaggagcagcattcacatttcgtgctgtctttgaattcaagagatgtttgtctcttgggtgtttgtcttagttgaataatattaaagttttgtgaggagaacagtgtccttgttttatttgatctcagttgaagtctatataacatttgttatgtggttatatgaaattatatgaaggtcactgtaataatcgaaatgtgttatcttggaagatagtaccactgagcttttagttcttaaaatttgatgtgcaatagagccacttggaagtggttttttaaacgcaggtttcagtcatctctaggagattgcaattctcaattcctggtttagattttcaaaagttaacaaatacctcaggtgattctgatgtagtggatttagggaccattttctgagaaactttatactatttctcattaaggc

SEQ ID NO: 60907 - DNA, 1053 bp, Homo sapiens
gagtcaggaaagaaaaaaaattatgaaaaataattctattaaaacaatgtttattatattattttcaaagactaagaagcaggatgttttgacagcaccaaggataatctgtaatactaagcaggggaaacataagtgaaataaaggaagtgagagactgatagaatcaggaatgcaagtggccaagcagtttggagcagaggatagaaaggaggaaatgggaatagtgagttcacaagggctttttatctttaccctgatggctatagggattcaaagtcttcaccctgaagccatggaaacctgttgaagttttccttcctactttgtcaaataatcttcaggtgcaatttagtatattgaaatagagctatcaaagaagtcacaccatcgatgagcacatttatgagttctgggcagaattcacatttagaaagcagtgcaaatgcttccatcctctcgaagtaaacacatttccctgagtaaccattgcttattattgggacttgctataatgacagcagctaaagagctgaaatccatttaggcaattagatacactaaagcaacattggagtggcaccagaatggagcttctatttctaaatgcttaaatgcctctacttaaaaataagtcactacttaaaaatacaattaccataattatgaatagctgtacattctagccaccaaaataattcccaaagtagttaaatggcactagtattcctggatggtcacagttagcaatcaaaataaaaacacacctactggaaagtgatgaaccacccatcccacagctcagtgtttttcggtatattaatcactaaagactcatgacttcctaagaacattgggaagcattttcagcaatgcagaatcacttgtgcctgagtaacagcttccttatcaacgtttcagagaccaagaatttaaaatatggagaaaaaaaactcatccatagtgaatttgtattaaatgtttgtattaataaagaataatacaaaatatttgtattaaagaatagtaatctatttcacattaattagcaaa

SEQ ID NO: 60908 - DNA, 1019 bp, Homo sapiens
agttgctaggatcagtttctaaaaaacagcatgagagagaaaacttgttcaaagtaccctcctaaaattattaaggtcttctaaatttatgtgacttattctatcaggtaaatattcttattatcccagatagtgttggcaaagctaatactgcacattctgtctgtacagtttcgaaatttataaaactaaggtttcatttctaatactctcccctgccataacaagatgggcattttccgctgctctttaactcttatagtgctaaacttgtactttttgcagcagtggtgatcagtgagggttttgaatatctctaaaaataaatggctttcttccctgtgctaccagtacatcatacaatactaggcgtatatattttattgaagtattgtttttatgagcttgtttttccaaaagggaataaaatatctacaaagcgttagtgataacatctgagaagtttctgctaactctgaaaatgccgtaactatttacacacaatgttaattttctcctattttagagcctgaggttaatacacctcattcttgtcttacagaatttctataacttgaatgtttatgtctcttctttgagcctctttctctcttttatgtataagttctgagatatgaatagaatgtgaaattaaataattttatttcattatgattcccagtccagtttttcaatgaccctttttatagatagaacattgggctctgaggaacttcctgtttgggtttgtaattcattaattaacaaacatgccccactgataaaatttgctcttgaaaccctgactatcctagattgttttgaggccaatttaaaactgtcataaattcgttatgtcctcaaatttataacttaacaaaattatgaaaaagcaaaaaaccttaatcttcatagacctctgtaatatacagagactggattttggatgccatgtttgtatgcatttctaaattttaaattgtcagacggactttaggaaacacactacccaaggtgtg

SEQ ID NO: 60909 - DNA, 1033 bp, Homo sapiens
aatagtacctggcacatagcaagttaaataagtgttatcacctttgtgccccttccccgcaagaatgcctcaccctagaacagctcattctgatctttccttttctctaggcccctactccaccctgaagtgaatagagtccctcttttcatcattgagcctgagccctgagctgggtgtaggctggaggggttggagggagtttctaagacttcaacatctgatgcataatgtctgcatgctcactcctggcaggagaagcatctgcagcatctggcggaggtttctgcagaggtgagggagcgtaagacagggactcagcaggagcttgacagggtgtttcagaaacttggaaacctgaagcagcaggcagaacaggagcgggacaagctgcagaggtaagttcgggagcatgggctgcagattcaaaatggtccagctgagattcctttccttcacacttacctcctctttgtaggtatcagaccttcctccagcttctgtataccctgcagggtaagctgttgttccctgaggctgaggctgaggcagagaatcttccagatgataaaccccagcagccgactcgaccccaggagcagagtacaggagacaccatggggagagaccctggtgtgtccttcaaggtaaatgagagatggaacaggtgggcatgggctggcaggtggagacagaagctgggagattggccttacccactgtctatactgtatttctccaaggctgttggtctacaacctgctggagatgtaaatttgccatgacttcctggaggacagcagcatggagaaagatcctagaaaaggtcagacccaactcaggccttggtgtccctggactgcaagtgtggaaggagggaaagcctggtttacctctctctgcatctgagctctgctacccatggagcagatggatggtgggaacaggaaagagcttatgttacacctcattcccatgcttagcccacccagagctaacccctgtcttcttccccaggcctctgacttccctc

SEQ ID NO: 60910 - DNA, 1559 bp, Homo sapiens
gaggttcgaccctgccgtgaagtgatcctcaccgcagtcccgtcttaggttcctgaggtgtctgttgcctgctccaggagtacagcctttgggggaccgttcgccgctccccacatccacataatccacaggatgtgctctaggagacggtttcacttctgtcttcttgtcccaacacgacacattcccagtcacttctcatccccatccctgccccttcgtagattgctccagtccctaataatgaaaaaccctagagtagaccgaggcatccagccctctgccctgagtcctttctcagctattccaagactctgccccaaggctggtgctcagcgccaggagggatcccaaggcccagcattcttccccttccttgcatatctccctggcttccttcacatcttgactcaaatgatttctcttcagtgagacactccctatttaaaatttcagctcttttctcaaactccttatccactagccctgctgattttccttttggcacgtattaccaccgtgtgccctccatgcacgccattcctggttgcaggctgtggacccttcaggcccttgtgtaaactctggtcaaggcaagactctcaatactatatatactgatatacacatccacatttgtttgtgtacacacacgaactgtagaactagcaccacaagaaactgcaatttcctgtgtttccttgcccctccagggtcctggctgaggtggcaggcatcttggaacctgtaggcctgcaggaggaggcagaactgccagccaagatcctggttgagtttgtggtggtatgtacaagatgagagcgagcctttcagaagccagggtctggtcctggctcctcttactgagatacagggcagcactggcagagagcagacttaaggaaacctgtaaggaggtaaggatgttccctgtctctgccctccctctgagcaggactctcagaagaaagacaagctgctctgcagccagcttcaggtagcggatttcctgcagaacatcctggctcaggaggacactgctaagggtctcgaccccttggcttctgaagacacgagccgtgagtaggcaggggattgtagtagcagctgacctgagtggggaaggaaggaggatttcagttaggtctcccatttggctgatgggaaggaggcccagtgttgcagggaggcaggctagcaggccaccctcactcatgtactcattcctggtggctcatctcaggacagaaggcaattgcagctaaggaacaatggaaagagctgaaggccacctacagggagcacgtagaggccatcaaaattggcctcaccaaggccctgactcagatggaggaagcccagaggaaacggacacaactccgggaagcctttgagcagctccaggccaaggtacacccaggggtcttgagtacagggagggaagggcagttagaaaggaagagggaaagagtgagcaagctgagttgtgccagcttgcaatctcccaaaattctagccagaaaaaatagacttctcttggtctttctcccttgcttatc

SEQ ID NO: 60911 - DNA, 1010 bp, Homo sapiens
aaaaacttggctagaacaaagtgagctagctacgaggagaaacgcacagtcaagttgctatgtcacctttggtgagctgtttggcctttttgggtctccatttctccaggaaaatgaaagtgttgggtgagatgaacagttcctagccctgatagtgggttgcttgagtatattgtgattggttgggaagtgttttggaagcaatttgttacagattacatttaatataagtttgggaaatggttttgtattttaagagtgaattcaaagttgttcctataatatcgtctctcttatttgcttgcattaagtatacttaatgcaaggtatactttcatgagtgaaacaggagagaggtgaattactttcctaggcctgcaataacaaagcactatgaaccatatggcttaaaacacagacatttaatctctcacagttatgaagactataagttcagaatcaagatattggcagagtcatgctccctctgaagtctctaggctgtggtttggtgaatcacaaatcctaaataatagcagtaacatcagtagtgagtgaggaactctctagacacttgagagcgattagtcactgcattggcttttatggagacatagatgtctcttgaaaaatcggtaaagccatccaagtagttgaggacattatctcctctgacttccagactgttttttggggagttcttcatttggcctttggggcttaaatctcctagagctgtttagatagtcattacttaaaggattccaggcaactggggtgtaccccatcttacagttttccagacagggcatttccattaagatgccctccaatgctaaaagctcccatttccagtagttttgttctgaatttaatatctaatatggcagacgaaatggattttcttctatttgtgcttagaggagatagtgaactgcattttaaactccgtaagaaataggaggagattaccaagttttcttttaaatgctcaacaaaattaaatgcag

SEQ ID NO: 60912 - DNA, 1047 bp, Homo sapiens
gagttaatacttaaattctcattacttatattaatagcctgtactaagtgaaaatattatttatgcaagtaaacaagtcactataggcttttaagacttttctttaattttagattttgtcatcaaagtttaaattttttacctactgtccacttaaatataatttaacagtttgtaaagtgaaatagttttaagtatgatgtatgatgcacctgcatataaatgaaaatggcgtgcacaaagacactttactatgggaactgtactggaagatttatgaaagcatgtgaaattgcacctaaaattgtgttattagtgactataagcagcaatgctaaatttattgtacttgatgaatgaatgtatttagtcacagttactttggtttaaatgtataaatgtctttagggtttttttttaaatgtgtttgtaatttgtactattgtgggggtatacttggactgcaggggttattgtcaatgtgtgatttgtgtttttattttatagaatcatctaatgtgatataccaatttttataagtgatatttacataattctaataactgtatatttgacaacctattaaaatgttttgcattggaacttttttcattaattgtaacatgctaacgtggtttaaaaataactcattcattcaacagatattgaatgttgtgtatcagaaactataggaatcactggggaatcaaagatgacaaagtgcatcagtggaaagatccatgctttcagacaaattggggaagggattttttttttaagtgtacacattggaaatgataaagtatgtaaaccattttccatggatatttattttttctgtcacataaacaaatctttggaatcaacctagaagggagaagtgggccataggagaaacaaattgatatggctatgaaaatgcagtaacttaagcttaagtaggtaaggtttttttttttttttttttttttttttgcatgtattcgaaatttcagaaattagtgaccaagttattattttcattattagttaaaaaggattcagtac

SEQ ID NO: 60913 - DNA, 1761 bp, Homo sapiens
tcaaaaaagtaaataattgaagttttatttctcctctaaataacttgaatttttttctttaaaaatttatgtatttatatgtccccatttagttaagtggtagtgtaaatgtatgttgttaaaaacagtttctcagaattatagtaagcaatgaaagacaatatctaattaggttgttatcaaaaatactgtgtgtaaattagtccgtaatatagggtttggtgcgtatctatattcatgcttctatttcactcttcctcaaaacagttttatattatgttgaccagtgaaattgtaacttaatttcatggggacaggggcagtgctacagttcctggaaaaattagatttgtattatctttgtttcacacccaccaccttaaaaaaaaatcaactagttatttgtcatttaaaacatttaaaactttgagtcttcaaatacatttgatgttaatgctgccattacttgcacttccattcactaataacatttctaggtagttatcagttttgtcatattcctggaaaatattttggggttgtaaattctttctcctctttttcttctggagttacaaattgaatttttaaatccgagcacctttattgtggtgtggagaaaattatcacaattttatgtttattttaccttctcagccttctctgagggcactttgcaaatacctgagtccaaacagaagtaccaactaaatgctctatgaactctatccttagtaaatctattaaacctgaataatttaaaagatcatgttcattttgtaatagcaaaatttgattttaattttttatttagaattggtgtatttatcatagggacttccaatttttcttcactttttgaatggatattggctatagttttatgttttaacgggaatgaatttcaagtcataataatcagaatttttagttttacttttttcttttacaatatggattttgttgttatttggatagtggttcaataaatcttaagctcagataattaaacactattttgaatcttaacaagatactgaggctttttttgtatgggatgatatcaacctatgtacaatgaatttaataaacttaagtattgtcagattttttgcacattttagctcaataaaatcttaatgttcaagatttttttatctgcatttggaaatacaattttgtaaaatcaatgtcttacctttttgatacaatagatcatgttttgtttttaataaagcaagaagcccttttatctgttgtttttcagggaagggattaacatttaattctgtttgtttacatttgttatcattgttatccaatgctcattttatgttgctttataagtaggcttaggtataacagaataagtatctgtttatctaatctacatgtgactatcttagtctctctcggtcacttaatattatgctgaaatttaccactgtggggatgaatgatcgctattcaccaagtatatttgaacatgtaaatgcttaagaaataagcataatgcggatatagtttgggttaataggattctcatagttttttttcccctatgaaacataagtaatgattttagtgtatttcttatggaatacactcatttaaaaaggactttaagaaattgtggatgtgaataatacctttctctaataaaaatttaaattgtataatagttttataatatttacattaattgatattttaatatggatagacattgcatagattcaaataaattaaaatcaatgataa

SEQ ID NO: 60914 - DNA, 1344 bp, Homo sapiens
aataccctcactttatcattacacattctatgcctgtaaaaaaatatcacatgtgccccataaatatgtacaaatattatctaccaaaaagaaccaactgacatttctgagttttagttggaaatgctgtccctagttattatcagttactcaaggattcctgtatgttttcggggaccgttttatcatttcaatctttgatacatttggaatttatcctgacataagatatcaggtatgaatacaagttacttttttcctgatcactgtttaatcagactaacacaatttaataaataatcttttcccattgatttaaaatcccattatcatatactaaattctcacatatgtttgattctaaaatgtgttttaatatctggtaggatggcaaggttagttctaccttattaatcttattttaacttttcttggctcttatttatttatttatttttaaatatgtgaacttcagagttggcttatggttaaaaaaaattattgaggccgggcgtggtggcttacacctgtaatcccagcactttgagaggctgaggcgggtggatcgtttgacgccaggagtttgagaccagcctggccaacatggtgaaacctcacctctactaaaaatacaaaaattacctggctgtattgtcacgcacctgtaatcccaggtactcgggaggctgaggctcaagaatcacttgaatcccggaggcaggggttgcagtgagctgagatcacgccactgcactccagcctgggcaacagagagagactccgtccctcccccaaccaaaaaaaagttggtatttttattataatctcactttagttgtagattaatttaagtaaaattgatatagtttattatgctgaatcttttttgagaacataggtgtgtgttttaggaatgttttaaagatatcttcttttacatcttttacttatctagcttattttcatgttctttgggggttacattttataaatggggtctttcattacattttctaatgagttatttgtgtttagaaagcttattttctgtttactaatttgtattcaaatgccgtgtcatatattttattatttgtatttgtctttaattttattttccagtgtacaactattatcttcagagtattaactttatctccacctttccaaattattatacctctaatttctttctctctaattgcatttactaggaactccagaatattagatgataataatataaaagacatcatgataaaatatttttgtgaaggcttcttgtattttaaaagaagtgctttttcagttctctcctttaaacttgagactaactcctcgtag

SEQ ID NO: 60915 - DNA, 1336 bp, Homo sapiens
ctgtacttctgttatattactctgtgggaaggatttattcctattactaattttaaatgaatcaatttttaaaaattattaaaatactaagagttctgctgaaacatatggcataaattgtattcacaaggggaatgcattctggaaaagcttttgaaatgatcccattgcctttttaatattgttggaaacctcgtatctgctgtcttttgcttgtggttgaatttatttaattcacctcctgcaagagcttctctgtgatgtttatacttgttataaatttgttgtttaggttttttttttaggtagagttaagaataattattgactttacatttattttaacttttttctctgttttaggattttctcatcttgtttttccctggcaagtacttgagtagtaatatgtttgcctattactaattaatatttttctttaataacagatttatacctaaaactggaagatgtgacccataaatttaataagccctgtataatggatgtaaagatagggcaaaaaagctatgatccttttgcctcatctgagaagattcagcaacaggtcagcaagtacccattaatggaagagattgggttcttggtgcttggcatgagggtaagagtgcttattagtataatatgcacatttctctgtacatgttcttcccttgaaaattatggatgtcattgtagtactaatatatcagaaaataatgtattttggaattgagttgtctgtaactccccaatgtgaaaagtgagggcaaggattaaaaaattttttttttttgttcactgatatatggtcagtttctctggttcgggaacatagtagggtgattgataaataaatggatggatggctgaatctcaggactataattctggtaattttgttttaaagaagtcttaaatttaggtgcaagcaaatattaaatgtaaatgtgatattgtttatgattttcccatgagaaaagtgctaaatatatatattcagtcatttttctgcattttcaaaatataaaagaaatttaaaatgtggtaattgtgtggccgggcacagtggctcatgcctataatcctagcatttcaggaggctgaggtgggtggattgcttgagctcaggagtttgagaccagcttgggcaacatggcaaaaccccatctctacaaaaatgcaaaaaccagctgggtgagaggtagcgtgtgcctatagtccgagctactcgggaggctgaggtgggaggatcacttgagcccaggaggtcaaggctgaagtgagccatgatcatgccactgcactccagcctgggtgacaaagtgagaccctg

SEQ ID NO: 60916 - DNA, 1011 bp, Homo sapiens
aagtatgatggtgttggcaaagggaccacttctgtaggactgaggatagttcttgagctgggcagacatgctaatgacagagtgacattctatctagtcaagtgtttttaaaacttctttgtctaaaaggaaaaaaacaagaaaacactgggcctttagggcatggggggaataaacttctttgtctatgatacgtaataaatacatttttacattgcaactcaatgtttataagacagaccaacccagacaacaatacttagtcttactatctgtgagatagtctcatatattctcttttctctttcatttaggaaacttagttacaacctattaagttgaattcataatccaatgatgggttgtggcctagaaatggaaaaatactgctccactctatacccagaggggcctagccgaaaaggtgtcctttgttaatccagaatttggcattgctttgtaagtgaggctgcctgtagtaaaatgtctttggtcatttaagtaactgagtctcaggattgatctaccttgaattaaactctcttctagggaaagaatttgctaatagcatttttcagggtgaattaataatcagatttatttctattaatgacagcctgtaaatcagtaaaaatctcaatgctcagatcatgccctgtttttctatttacctttttcaaaagcacttgcagtcaagttgtgaaagacatggtatcgcattctttcataagaattctgcatctctaaagcaggttttgatgtttattttttaactcagagggaaagatagaaatgagaatctcaaattcttattttcacttaaaaaaatgtaagattagagaacagaaagaaaacaccaaaccactcttcactaggcttaacttatggttttatttctgaaggcgaataagaaataatttagcagttatttggtaattccaaccatatgaaacataagaaggacctgaaagtaaagtaaagaaaaacacatttggatagtctaacaaaata

SEQ ID NO: 60917 - DNA, 1555 bp, Homo sapiens
ggcacctgtagtcccagctactcaggaggctgaggcagcagaattgcttgaacccaggaggtggaggttgcagtgagccaagatcacaccactgcactccagcctgggcgacagagagagaccctgtttcaaaaataaaataaagagaaaagaaaagaaaaaaaataaaaattagctgggtgtggtgacatgcacctgtagtcccagctactcaggaggctgcagcgagaggatcactttagcccaggagtttgaggttgcagtgagccatgattgtactgctatactccatcctgggtgacagagtaagaccctgtctcaaacaacaataacaacagaaatctatcttatttttagttcattatatttttttggatcagtcttagaacaaatttcttatttgctgtcatcttttttatgttattattgcatcaaagaaaacctagctgtagtaatctttactgtagtaatctttactatctataaccttgactaatctgtagctttttcttcagaatttaaaaaaaaaaaaataggcaagctgagcttatggatgatgggggaaggaaggatgaaatagtagtctcagaggatggaaaagtgaggagatttgggaaacagatcatgatagttgagcaactttaagggcatacttgaggttagtggtcagattgagtgtgttttgcagtcatgacacatgcaaaagagagttactttaacttgaggtgaaatcaatatgtaataagtaggtttattacatataagtattctttttaatataactaaaggctaaggcttgatattagcctgagggttggagaatatccattatcaagtgcataattgagttatgaatacatcttttaattttgtgtgtattatgcttgtctcatctggaagggtaagaatagactccagggaatcatcttctatttttatttatactgaatatcaaagttagacctgtactcattggtgacctaacatggttagcaggttttaatacttatcagtgacttacttgtttaatatttatatatacttagaggtaaaatgaataaatattcagtgagtaccaaatacgtagcagcaattatgctaagtgtaatgcgatttcaactcttcaaaagcagctctatgaaggcaggtttttatctgttttcttcacctgtgtgccttgacagtaattatatatggaatgtatgaaattttattttggaggggatatgggaatgtgtaacctgcatttatgggatgaggactgacactatgctaagtgctttactgtatattatctcatttagtcttcttaatatccctgtggtagagtctgtaattatctgcattttacatataattgaggttttgagaagtgctcctgaggtcacaggctagcaaattatagagttgagatttgagcctcctttttcttcttctaaagcagttgctttaaactttatcatctcagttaagattctttgggcacaagttatggaaatgaacttgaacatgattaagcaacaaggaaaagttcttataaggatatgagggtgtc

SEQ ID NO: 60918 - DNA, 1015 bp, Homo sapiens
aatttcaagcctacagaaaagttgcaagaacaatagaaaagtaacattttgcaaaatttgttttattatctctcaatgcaaataatttttcttaactatttgcaagtaggttgcatacattatgccactttacatgttaatactaaagtgtgtcttccttaagaacaaggatattctcttctgtagccacagcacattgatcaactatgggaaatttaacagggatataatactttaatctatagtccatagtctcactttgtcaactgttccaatactgtaatgtcttttatcacatttgtttttctcagtacaggatctggtccagaatcatttattgcaattagttgttatgtcttttagtgtcctttcatttgtaacatatcctcagcctttccctgtcctttatgacattgtcattttgaagagtacaggccagttattttatgaaatgttctttaatttgggtttctgatagttccttacgatgggattcagatgatacttttccagctggaacattgtgtaagtggaggccaacaatagctgccctttggtagtggattatttctggttgtctgattcaagtgtagtctggcttcttcagtatatcgttttgtttgtttgttttttgagacaggctcttgctgtgtcacctaggctggagtgcagtggcgtgatgtagttcactgcagcctcaaacttcagggctcaagcaatcctcctgcctcagcctcctgagtagccgggagtataggtgcacaccactaggccaggctaattttttttttttttaacggagtcttgctctgttgcccaggctggagaacagtggcgcggtcttgactcactgcaacctccgcctcccaggttcaagtgattctcgtgcctcagcctcttaagtagctaggattacaggagtgcaccaccatgcctggctaatttttgtatttttagtagagacggggttttgccatgttggccaggctggtcttgagctcctggcctcaggtga

SEQ ID NO: 60919 - DNA, 1143 bp, Homo sapiens
ttgtatttttagtagagacagggtttcaccatgttggccaggctggtcttgaactcttgacctcaaatgatccacccacctcaacctcccaaagtgttgagattacaggcatgagccatcgcgcctggccgcaaattgattttaaataaatgaacttaaactcttagaagtaaataggcaatggacatgttcactagaaaggaatgtaactaatatataaacataagaaaggccttcaacactcatcacaatcacactgaaattcaataaatgatgtgtgtattatgcacaagtcaatttcttcatcttactaagtagcatatgtagtttacatatgctgtttaagaaagcctatataagatagccaagaaaatctttatgttatatgaattaagcatcaccttccactctgccgagcataatactgattttgagattagatgtttcacattcattctttctcttcctagttcccattctgtgatggggctcacacaaaacataacgaagagactggagacaatgtgggccctctgatcatcaagaaaaaagaaacttaaatggacacttttgatgctgcaaatcagcttgtcgtgaagttacctgattgtttaattagaatgactaccacctctgtctgattcaccttcgctggattctaaatgtggtatattgcaaactgcagctttcacatttatggcatttgtcttgttgaaacatcgtggtgcacatttgtttaaacaaaaaaaaaaaaaaaaaggaaaaaccaacctgcatggcctgtgggttattttggtcttgtaaggatccatttctttaaaatactgacatatagagttgtaccttatatagaatatagttgtatcttgaagtcaacatattaaattattctcaaaattatgtatttgcagattgtacttgtaagtttcaaagaaaaattaccatcttttcatattgacctggaaactaaataggatgtgattcagctacattaatttcttaatacaatctaggaaagacctgttgtagccttgattttcttgacattggtaatgacactgagaaaatatggcttctgtttttcaccgttttcaatcaaaatgattgataaatgttattctgtttaatttcataagtcaggtc

SEQ ID NO: 60920 - DNA, 1659 bp, Homo sapiens
aggaaagatacctaaaacatgtctgaaaagaggaggacagtttttcacctaggtatctattttctagaagtaatttctaagttgtttcttctatcaatactattttcattacttgaaacactttttttggggaggattattttttaaattacaggtgttaatatcccaataccaaatgttttgaaaactaaagggcaaaaaaaaggaaatcctaaaacagtcattgtcatcatcatagattttatttgataaagaatttgaggtaatgaacatcatactagcattatgtgatgtgatgtgatgtgatgtgataagtttatttacatttttgtcttttgaaaagtgaggcaatagagttccgttttacaaacatagcaactcagagaactattccttagtgtgtaattctggcccccaaatggaacattagttgtttttgttttttaataatcaatgtaatctgaaacatatatagagagacatagattaaaatcaaatttgataaatgtttgagctgctgaatttttttgatttgtagaattttatgttaaactgtttatgtcagtctagaaaactttaggatacttaacccagccctctatggacggagcatcaaatggaagaaggaggtctgagttttttttgtttttagacagggtctcactttgtcacccaggctggaatgcggtggcacaatctcggttttctgtgacctctgcctctgaggctcaagtgaccctcccacctcagcctcctgagtagctgggactacaggcctgcatcaccacacctggctaatttttgtattttcagtagagatgggttttcaccatgttggccaggctagtctcgaactcctgacctcaggtgatccacccgcctcagcctcccaaagtgctgggattacaggcgtgaaccacctcacgcagccaaaggtctggtttttattcctggctgtgtggcttactagcttcgtacaatgaggctagtacatattttccatacatttccatacaatggatatgtatggatatccatacatatgaggctgctgatctcaaaaaccagggtgtttgtaatcgttactctgccttctaagtacttgacatatattaattgacttaattcttagtatacccaagaggtagaaacagtgttatttccattttacagatgatgatactaaggcagggaaatattgagtagtttactcatgatcacattatctagtaagtgacaatgctacgattccaaaacaaacagttggcttcaattccacattcctttttttttttttcagtcttagaatcttttatttaataccttctcatgcccagttaacacaaaaatagttgcagttacatatcgctactgaaagctaccaaactgcctatctgaagagagagtcaaggatccttctcttccacttcttaggagagaatgatagtttttggatgttgaagagagcattcactgagattactgaactcaccagatatactataaagctttctgtctaatgtagccagtagccacatggaaacaaattgggtatgaaaatttagttttcaaccttgagctttatgaaatctaaatatagatcaaatattgctgacgaaaatttagtatccaaattgagatgtgctgaagtgtaaaata

SEQ ID NO: 60921 - DNA, 1051 bp, Homo sapiens
atttattacctccattctctcagagtgggatattttatcttttaaaatgcttaagaacctgaataaaaatctttatttttctttaaaaagttacaaaagtattataaaaaattaaatggtgtagaaaacataaagaagtagcaacccagtagtatctcccagagataactaccattaacaatttgttgtgtatccttttatttatttatttttgcctagaatttatatgtatattatgagatcataatgggcatactgtcctgtaacttgtgtttttcattcaattgtatattacgttcacttaacatttttcaatgtcaatatatatagatctgtttcactgttttaaatagctactcagtatttcataatatggctgtattatttcatgaagccattctcttattgatggacctttaggttatttcagttttcatacttatacaagatgctgcagtaaatatccttatatatgtatctttagctaccagggcagtaatttctatgaggtgaaattgctgggtcagagaccatatccattttctacttttgcagttattaccaaatttccctccaaaagactgtatcaacttatcctccctccaacagtgagtgacatgcttatttcccaacaaagctgtggatggaagtattgtaattgacaatggtttggtccaggtatggtcttgtgggtgcttaactatacattgctcgctctcttttttcctacaaatcattgctttgcttttgtaacacacatatgtagataaaatacttaatgaaaatattgaatgcttttaaatcctttgtctttgagatcttttaatgcagcatgtgataaagacaaaagcatggccatgaagagttcttggcaggaagcctggggggcttatgaaatcgttattgggaggctatttatagggtgcatcttagatttctaggtagtggtggaataggaagaaatattcaagaagtgggaatctggggtatataaattgttctcaagagggacttctattagagtgaggaatgtggagttaagtcctggctc

SEQ ID NO: 60922 - DNA, 1156 bp, Homo sapiens
gtatactggaaaataacattgagcttagaaggagacctgagtttgtacctggctcagtcacccagctcatttatcactttcttaggaaggcctttccctgtcacaccctccttcttgtttgtctctattagagcactgaactcattgccataattaccttattgcagtgattctaaggtggacatctttcacattttaacttttctaaagtgtggatgcattttacaattgatggtgttttaaaataaattggcagcattttttcttaattattggtacttaaaataaggatgtgctgtacagttgatgacatcttagatttgattaagtgcatatttatttttgtgtgttcccacaaaaatgtttacatcattctcatggttttaaatatcagatatatgcaatgattttccaatttctatccttttttaaggtccacccctgtatgttgaaccacattgtttcttcatatcacaaggattacagattcaacatatctactctccaaatcagtttgtcttctattgttctctatctcagtgaatggcatccacattcgtacatttgtggaactaaaacatgagatgatcgcccacctgggtttgaatcccagttccgccctatagtagttactcaagcatgcagtgaagtatgtcaccttaactattcacttgtaaaatggggaacataataacacctatctctgaggattgttagaatgactaagacattgaataaatgttagctgtccctaatcttcatcatacatatctatgacttctctccttcctctgcacatgtaattcatcaactcctgtgatagataggcccttcagagtatctcacatctaccacttctatcttgttgccacttctccaatctaagcccccatttttcttgcctatgcagcaactaatattgtagcttctcctctttcccatgtctaatccagtcacaaccatccattaaatcagaacatgccacttcttaagacctccctcaccccctacctaatgcatttggtataaaacaccacatcattaatgtggtctgtatggttgtctgtttcctgcctggcttctgcccacatttccagcctcatcctctgccactctgcctcccagtatcactcttttcctccaaaagtaactccta

SEQ ID NO: 60923 - DNA, 1052 bp, Homo sapiens
ttacaagatctacaatgcagctgaaaagcaaccaaattattttttgctgaaactagatgtttttacatgagaaatactgtatgtgttgtctaagatgtcagttttataaatctgtattcagatttcattctttgttagctcactttataatttgtatttttttactgtatagactaaatatattctatttacatgtatgtcaactcattacttttttcctgtgaacagtattgaaaaaccccaacggctgataattaagtgaattaactgtgtctcccttgtcttaggatattctgtagattgattgcagatttcttaaatctgaaatgatctttacactgtaattctcagcatactgattatggagaaacacttgttttgattttgttatacttgacttaactttattgcaatgtgaattaattgcactgctaagtaggaagatgtgtaacttttatttgttgctattcacatttgaattttttcctgtataggcaatattatattgacaccttttacagatcttactgtagctttttccatataaataaaatgctttttctactatttgtcttgattacttaaaaaaataaaaatataagtaaggatcaaaactctaaaattttgcatgaaaattacatccaaattgtgaaaatcagatctattttgtttgccattagtcaccattagttatataaattttattgttttaggttagtatctctttactaaattgtcagtctataagataatatatgttgatcccttgctgtagaggagaatttagagtaatttggggtttgtcttggattatatctaaatggattatttgttaaaagtactgaaatgagtataaggcagtatcacccatccaaaagaaaggtctttatagacctgcacagtcactagattaattcattaaaatgcccccaccctgatgtaattgacattacatttcttaacattttaaaatctagaatttctaaaatggaatttaatgccatcacaatttgaaaaactttttttttttttttactatagaagttacaaag

SEQ ID NO: 60924 - DNA, 1062 bp, Homo sapiens
tagtatacagctaacatcttgagattgccttcattatccttgtggtgctgcttttgcttctgttgtttacttttttggtttactctgattcttgtatagcatctttcccagtaaaggtgcatgggagattaaatttttgagttttgcatgtctgaaaatgtctgtatcctcacattcacttgttagactgggcatagaattctagtttggaaaacatatttcttcaaaatgtaaaaattccttttcttctaccttattgtactgcttttgagaaatctaaaactgttttgattattggtcctttaaatgtgatctggtgctttttttttcctcccctttagaactcctgctacatgtatatgcatcttctgagctggtccttattttcttatttttttccgtactgttttcctttagtcttctttcctttttttttgttttgttttgttttgtttttcctgaactgctggatacattttaacttaatctctctgcttttagtatggtaccatttccctcaactgtacctgtacctggttttcacagagtgacactattttactctctagagaggataaatgtcctaaaatttgccatggtagaaatttaacctcttttttttttttgagacaggcagcctgttatacaggctggagtgcggtggcactatctcagctcactgcagcctctgccttccgggctcaagcaattttcccacctcaacctcttgagtagccaggtctacagtcatgtgccaccaagcctggctaattttttgggtattttgtagagacggggtctcatcatattaccccaggctggtcttgaactcctgagctcaggtgatccacccacctcagcctctcaaagtgctgggattacagatgtgagccactgtgcctgacccaacctctctttattttttttgagtcggagtctcactctgtggcccaggctggagtgcagtggcgtgatctcggctcactgcaacctgcgcctcccgggttcaagcgatcctcctgcctcagcctgcctagtagctgggaccacaggcacgtgcca

SEQ ID NO: 60925 - DNA, 1362 bp, Homo sapiens
agggcaaggcttgattcatgtgaagacaaccttgtattactaataatacaagtattctaaaattattttcatattctcagaaccagtttggcatttttctcttggtagtttttgtctgcaaataaaattggtatttgaaaccacagcactcataagcctgagtgtccacttattcagtggcagtgataccctgctgctgcccccttcctgcacctcaagatctgaacttgtaacaatttcattcaaagagataacagtctatctcttacattttcatcatctaacttttatctcatgaaaatatttcttctccagtctgcctttatacatgtagaatggtaatgtaatttctaaagtatatacagaagcattccagaaattaattgctattttaaataatcattttatctcaaaaaataagtaaatcattttaacagttatgctttttctcagttatatattcagcatgctaaagaggacgaaactcgttatcataatgaaatgaagtcttgggaagaacaaatgattgaagttggacgaaaggatcttctacgtcgcacaataaagaaacaacgaaaatatggtgctgaggagtgttaaaagtagaagattgagatgtgttcacaatggataggcacaggaaaccagttaggtctcaatacctgaagctatcgtaaaattaagaaaggataaagttggtaaaccttttatatttagtatctttttattcagctcatggacttctgccagcataatacttgctttggaaaacccagataaaggttcatgcaaactttattttgtgtttaggaactactgaggatcagagtaatccaagcaaatgtgaatcattttacctttgacaaaggtaaatcagactatgaagttttttttatacaggatgatgactatggaaagagtactcttgtttccttatattatggaggcaggagtttcgttttcaaaattgttacaaattgtagaagccacggtgttctgtgatataagtgtgtgtttttcataaagcaggcagaactcatctaggtaaattacagttcctaggtataattcacattgtattcagagttgatggttgtacatataagtgattgctggttttagttgcaactttgtataaaagggactgagaaatttataaacttttttcttactgtcttttttctaaagtaaaaacaaagaaattatgtgccagatttatgcatattattttatgttgcatagaataaaatttttaatctttaattttacatttcctaaatatattttaagacgaaacatttgttctatagcttttccctttttttaagtaaggaattttatttttttctgaattattttctc

SEQ ID NO: 60926 - DNA, 1069 bp, Homo sapiens
ttcttaaattattaacctccaatggtaatataaaaatatactgggtttttttggttttgttttgtttttttttgttttttggtgggtgttattgttgttttacatatcgggacatagggagcttgtatctttttaaaggctgcattgtattccattgtatgactataccataactttttttttttttttttttttttgagacggagtctcgctctgtcgcccaggcggagtgcagtggcgggatctcggctcactgcaagctccgcctcccgggttcacgccattctcctgactcagcctcccaagtagctgggactacaggcgcccgccactatgcccggctaatttttttgtatttttagtagagacggggtttcaccgttttagccgggatggtctcgatctcctgacctcgtgatccgcccgcctcggcctcccaaagtgctgggattacaggcatgagccaccgcgcccggccaaccataactttttaaaaacaggtttccaaacttttggtattatagataatggtgcaacaaataatctttttttaatttttttccttttttaattttttatttttattatactttaagttctaggatatatgtgcagaacgtgcaggtttgttatataggtatacatgtgccatggtggtttgctgcacccatcaacccgtcatctaggttttaagccccgcatgcttaggtatttgccctaatgctctcccttccgttgacccctaccccaccgacaggccccagtttgtgatgttcccctccttgtgcccatgtgttctcattgttcaactcccatttatgagtgagaacatgtggtgtttggttttctgttcctgtactagtttgctgagaatgatggtttctagcttcatccatgtccctgcaaaggacatgacctcattcttttttgtggctgcacagtattccatggagtatatgtgccacattttcttaatccagtctatcattgatcggcatttgggttggttccaagtctttgctattgtgaagagtgtcacaacaaacatacgtctgcatgtgtcctatag

SEQ ID NO: 60927 - DNA, 1109 bp, Homo sapiens
tttttcttcatagctattgttatggtttgtaattgtaactgttttgttgagtagttaagtatctctactctgaatgtaaacatgaaacacacacacacacacacacacacacacacacacacacacacacagtttttcagtattttttctcacctgcgctatgttgacattcccatttctgtgaggtagaatgtagcatatttcttaatgatatctcaaccagattttatagctttcctttatcgtttcagcatttaagactcaatcctctttattttacaccttctgtcttcaaattggggaagggaagaaatgacctctcccatgaattctgttgtcctccaaaggtaaccataccctgtgttctgagccccctttttggactgactgaggtttgggtgaaatgatggttggtggaattagggccggttctggtgcctcctactaaactctgggaggaggtgacttcggcaatatctggtgcgctcctctgactgctctgtgaatgtatattgtgatgtgcttaggtctgggcctttgctataatttcaggatatgaggatcatggctgggatgctattacataatttgtttttgtgattgtcagagaattttccttttcctcattacacagaaaggttcgtgagtacaataatgtatatctatcttttcccttcatttgtttctcagtggagtgtgactagctgttccagtttgtccaacactgaaggggtttccaaagacatgggacttttaatgctgaaactaggaaacacctgggtaaattgggatgagttcattagtgtattgcagtgccttttttttttttcttagcacaatgacagtgactgacaaaatggttatacaacattttttgaaaaaacatgagtgcggaagagttttacaaagactaaccagtcaagttataaatgattataaccaatattaatgattgtgtatttttgttttacttcattaataaaaatttagcataaataaaattagtcattgtgcagcctcagctgtttagtgattaatttccttcactttaggtttctaatttacaattatacctggcaagtggtagggagttgtacaggtagagtatg

SEQ ID NO: 60928 - DNA, 1028 bp, Homo sapiens
tcagtgagtgccccaaattaagttatatctttaaaggagcagtgctctttatataaaaggtatttctgtcaaatctgtcatttaaaatatgtatactgcagcaatactacggtaaaatattagaccatactataccagtgtatggtgaactctctccatatattacatatatactataaagtatatatgtttctttttgctagtcagttaccagcattattcaagaaataatggggttattgacgttaatatgttaggtgaaaaaagtgagtgctgtccttttatgttactgagcttttatcctgcatatcagaatttcctttctctttgtcattggcattaatattgttttcatccctcttacacttctgtgggaagtttgtagacagccaacatgcagaaaggttagcatggcagataaatattttctatttttcttattgatagttacggagaatgctttgttactctatgcctctctaagtaacatgatccttgaatagatgtattaaatatcctagtgttactctctcattttatatgtttaacagttgcggcttgtcccaaactggctctttggcaggtttttttctttctttttttttaaattcattggatgtaaatttcttcctaaaaggagttgtcttttggcattttaagtagtggaaaaataaatttcattatctttcttctttctttttttttgtgaaatcaaaattatcaagaaatgtgtacatatggcttttcttcttagcatttgctacttttgttacttttgtcaccctggattatccagttattcaaattttctgcttctcaatgggcaaagtaccgataagtagggaaggagggaatttagccaaagttgtaactgacaataagcaaaatatagaggcctctgtgtttcctgcttggttctctttcttgagttcatcactaattttatgaaagaagaaaacaaaacagaaaaataaccagcttcaatttccacgtgcctgtttattctggagttaccaggaaaccttaat

SEQ ID NO: 60929 - DNA, 1061 bp, Homo sapiens
gcaggatccctgagctccttcacctggaagtcatccaggtggtttaagattctcaggctattggcaactatgatgtggctcctgccaggttaaggagcattgatgattgatcacaagggaaaggacccagccatatgattgtttctgtcagcttgtactctcctgaaagtcatggttaatgacttgagccaagttaggaaaaatatttccgttactaacaatatagttgttaagtatgctccatggggattctgaaatatttacttgacagtaatgagctttagaatttcattcttttcctatgattcttcatgatcacatttgcatccagatctttgaacactcagcacttgatggagtttaatagactaatggcaagaaaattgctcataagtaaaggaagcagtgaatccatccggtttccatgagcagtcatacctgagttcttcagcaattggaacagatgcgtcactgaaaagatgcctgcactggggtggtcctatccattacattctcttaggaaatgaagccctggctttccttagccctgtgatctattttgaaccttattctagcggagaaggaatagtgtttattgattttttttctcctgttgtctattatttagagattcttaattctactaaaataagttgggagaacacatattgtttgtttagtatttaataaattttggagaatccatataatcactttacagtattctcatcaatcacatgaattaagtaataaaataataaaacatttgaattcttaggaacatgtattttttaatcagaaaatattcacctccgtggttagcaaacctcatatacaggaaaataaaattaggccatgatcacgttagttatctctgagagagcacttttagaaataataatctagaggacaatgatcagaaaaggaagaagtagcaactaatacttaaggatacctacctatgaaagaagatggtaatagatagggtagtttcttggtgcatcagtgggttgaggtgaaataagtttattttatagttttgtttttgtttcctttaagaa

SEQ ID NO: 60930 - DNA, 1053 bp, Homo sapiens
ttttcatagaagaagctgcttttttcaagggaatttgctgccaagctgtctgcagtggcttcagacattacttgaccttttggcatatcaagaaattgtggttttttggtctaaatattaaatacctattttaggaaggctgggtactctatggtatatagtgcaagagcagcagaaagagtcagccttgtgcatttccacatctgcaagcaaatttggtttctgtactgtccatcaagcagatcttacagaatgaattttcatcccctcactagttgccatgcaaattctattaatagttctccaagaaataaatcacagtgacccttctgacaaaggtagacagtgaaaaatagtacaaggatatagtacatccacccttaaccagaagcaaattgtgttttccctttttatactacaaaaagagaaaacaatttacaaaaacagtttcttccacacatgtgttatctatgatgtgatagactgttcttttcatagcccttttctgttttggtgactgcaacggggtattatttggaacatgtagtcttctgtttggacaccatactcgggctgtttttcttctcgcagcctgtgctgctggaaatattcccccgtctcatagccatcataagtaaaggacaccttccactgcgacatgctgcatgctgttaaagcccttcgatgccagccaaatgttacaccgtgccttccaggatatctttaattaaacccttatatatgcatttataaccatctgatgaggggattaatattacttgtgcttaacaaatgtgttaattgagaaaggaaaaagaatacaaaataaacatttttaagtaccttccctatcgtagtcactgggctaagttcacagccaccttgccaggcagaagttaccatccccatttatgattgggaactgaaacttgaggcacttttgggaaactcttcaactgattattcgatcgtgtgaaactgaagcccatgtgcaacatcagctgcctccctgagtttcacagtgaaatgtgaaatatttaagatcctcagtga

SEQ ID NO: 60931 - DNA, 1074 bp, Homo sapiens
aaggaaattcaagtcttttcagagtgaagttaatagttttcttttctttttttttttttttaaagcagatgggttatacatgttttaaaaataaaaatggttactgcaggtttgatttccaaactgtaagtgaagccagactttaaggcagtgttttaatggtttggaaattctagttttcaaatggtttctcctagatggttcccgtgacaacacaacttaagcaggtatcgagtatcatctttgctgtgaaatattcatgccacaaaaattcctttcatttttaattccacgctaatgaactaaggcagaagaagttagcttattcaaggacaaatggacaaatatttcaaaatcattgttgagcttaataaaattgcaattctaagtgagcttttaaaaaattgaatgatgatatcatactttattatattcttaaattgatgttttgttcccttgaaacaagtattatttcaattgctacctggaaaaaatagtattgttttatgatagaaaaatttgaatttcatagttgtagcagaagattgctgttttaataatgcctgttttgtagtgtagttaaaaagctctctcagtgttttggcatatatctttccccactcaatttttcttccaaagaaaaattttattgttaagctaatacttgataaagccattcatttgttaaaagatatgattttttttaaaaaaatagctttcatgcatgcattttaaaactttgttaaaaaattagaatgaggtgccatttaaagaataagcttctaattcattaataaaaattcattaatattttttaattttaaaaagaataattttttcaaaagtgacaattattctttatttgttgtttaatattttattttattagccattgaagaggaagcataaaatcttacattccatgatgaaacttttatgatttgacatctttatccttatcttgagatttgctgatgagaccccctttatcaaattcagatgtctctctctgatattcagtacaatatctgcctctggaccagggttcaaggaaaaggatggatacaggaggtc

SEQ ID NO: 60932 - DNA, 1026 bp, Homo sapiens
gcatctattctacttcacaacacatagttggcatttaaatctttttgcaaatgaactattatccaccagtcagtaggcttctctcttattgtcatgataattatataagtaggtattacctgtattttacagatgaggaagttgaatctcagagaatcagttcacttgccaagtgcccatggttagaaagtggctggttcaagtgctgaatcctgttctaactctactatatcaatcccagctcttcttactacccttgttaattgagtagaacagagatttagacgttgaccaagatgctttaatagatgtggccaaagtgactttaaaatactggaaagaacttcagaagcattgaaggatggaaaaccacagagatacctaagagtttctgtatatatatgcagaagttacccactgactgtcacagaagtatagaatcttggtaggcttagggataggatggctgagtggatgaaaccttctcttcactcctcacaacatgtatttgttgttgttttaaggctaaaggtatttcataaagaaagatgtggtcacaggcccatttctacttgtagatcacaagtccttatgtaaatgactaatccaggggcatatgttgagccttttgagatttggaatatgttgtcactttatgattaataccaggtaatgtacaatagaacagggaaaggaggcattctcctcaagaagacttcatttgaaaattaaatatgctagtttgttcattcatctgctcatttttccattcactcagcaaacatttattcaatacctactatgtgcagaaaaggggaggtcatgacctataaatagtgcttccatgtaagaagttcaagatgtagtacaagaaacagaaagtggcctacaagatagttagagctgtgatagggtagttgcatctgttattcgagcactgaaagtcaatcacgccagtcttagggttgagacaggggactacaagaaagcttccttggcataattgaaatggaagcatagatatgc

SEQ ID NO: 60933 - DNA, 1027 bp, Homo sapiens
tgtggatatgctttttctgtatgccatggtcactactggagaaaataaaagcaacactgaccatcaagacacttacctatgaccctattgtttcttacataagaagaaaggaggctcatgtttgctgcagtgcagtactagcatgaaaactagtgtctctctgatggggaaaggaaggcttagggttggttcttatgagtggcctgaacagatgtcacttgagaggtcctcattcaccaacaaggaaatactttaatgtcaaagaaaccatctctccctcattctgttccacaattggagacccctcccttggatctttaataagttcttatcaaaatgcaattgagaaaaagtgaaaaaaaaagaaaaaagaaaaagaagaagaagaagaagaagaagaccataattcaaagctttccaaattttgttcctcagaaaaaaaaaggtgagatcaataatcaaataagtttggaaataatagttgtaatccattactagaaaatatcctagcagagatcaactgacagcaggtgagaacaagacagatagaagatgaagactctatgataggtccaggttggcccatgggaacagagctgtcccctggcaaagaagggcacccagaaaggaaggacagaggctgaggagaatccagacacctctgaccaatccgctcctatgtcaaaccccagggttcttacccggtatttcttttcttgttcaaatttttcttcaaatttccgaattttccgcttgaggctctggatgtgcttggtgagctgggtgatggtctgtggctccttgccatctccacagctgcagcgtgaagaactccgcggcctgcagtgattacaaggaggaaggagtatcaaaaacagtgggcttccagtaaacagttctgttgatctacaaaccaaaattcctggattgtcagagaagtccagagggaagttcattatttgatgaggccaccatggtagcatctgctcattaatggagactccctatcacaaaactctgttatggg

SEQ ID NO: 60934 - DNA, 1518 bp, Homo sapiens
gaacggaaaatggaatgaggattgtcttttccactgcttatgattttagagtgtggagaaggactgttcatgttccacatgactcagcatagtagcctttgttctgtctgaccaaggatgattgatggtttggagttttagcaaaaactgtcaccagaataactgcacacctattactaaaaataataattccatagcagtactttattatatttttctaaaatcttgatcttcaaattgaactttcaatttgggtaagacactaatgtagtatgtctatttagagtctacaattattctcatgcagaattctgcataatctataggtctcttccaaagttgaagttgacataggtcagagtcaaccagaacctgaccttttcgctcatatttccagacactgtccacttgaccagaagttttcaattaattggaaatgcttatcaaatttacagctgtctgagatccctaccttaaaattaaaaattaaaatataaagatgaggcctaagaatccctacatttgaaaaactcccttgatgattctgaagtgcaagaaggttcagtaatactttatagaacacggtgccactccaggggtgacatgaaatatgttcctgctgcaggtgcgatttagaaatagatttctagaataggaaagcatttcaggtatcctactaggagcatctggttatccataaaacttgatatttcagcctatgtgggggcaaccccagatagtctttgaaagtcagtaagaagagatcttcattcaacctcagaagtgcacagaatttccaaatatcttttagaaacttaattcattatggtgtgtgtgtgtgtgtgtgtgtgtgtatgtgtatgtgacatcgagacttctaaagccttctagagcctttatatatattcaggatgtaccatctaatgctttaactgaaaaatggctactattatggaaagtagtacttcatttatttgtcttaagttggttcctttaaaatagaggttttcaattggggtctattttttgccgccctcgaggacatttggcagtatctagagacacaactggttacaatgagggggtggacattcctggcatctggtgagtagaagccaggaattctgttaaacatcctgaaataaacaggaccacccttctccctcatcaaagaattatctggttcaatagtgctgaatggtcaatagtgctgaggttcagaaacctttgctgtaaaagctcttaagtgaataacatcaacattagctaacaatgacctctttatttgcatcaggcattagtgaatggattgggcattagtggatggattttcttattctgcacaagaactctatgatatagttttcattatcacccccagatgaaagatgaggaaataaacttggagatgtaactggtgatatggtttggctttgtccccacccagatctcatcttgaattcccatgtgttgtgggagggacctggtgggaggtaattgaatcatgggggcaggtct

SEQ ID NO: 60935 - DNA, 1025 bp, Homo sapiens
tttcataagaatacctggatataatatgctgtcacttaaccataaatagcaaacattcaaaggataaattcatgtgacctagtgggtttcaaattcactatagacttgattggctttaacttgggtttatgggttgccaagatcagttccacctagtaagagacttgacatgctcccctgtcctagacaaccagttgtaaactgcatatgcagcaagaacgcatttcatggtacccctggggacactgtattctagatactgttccagaaccttcttacagatcataattaccaggaagcttttccaatgtggagattctctggcatcctctctagacagtctaggatgaaagtcctggaatctgtgtgtttcataaaccctcctgaataatagaaccacactattcaagtggacagtgtcttgaattgggagataatgtcaagttctgtctgactctgctgtacctcaattttgccaacgggaagaggctcacagatcacatgggacttgtaactcagggtctgtggccagttggctccatctgcttacttatttcaggaggagaaagtccaagggttgggagtgagtgggatggggatataggcagatttgaggaatagagggcccttagggaaaaattgatggagaggaaattggctgcaaggcagcttggggccatacaaagggtaaccaactggattggtttgcacaggattgtcctatttttagcactaaatatcccacatgctaggaaatcttcactcccagatattccaggacagttggtcaccctacttgtaggttgcaaaccacaacctgtgagacagaagctgttatagactgagtctttgtgtttccccaacaacttattaaaatatatgttgaagtttggaggtgggaccttgggaaggtgattaagccatgggattagtgcccttataagagtacagaaagctagcttgccctcttccctccatgtgaggctgtaagaagtcagccctctgcaagctggaagagagccctt

SEQ ID NO: 60936 - DNA, 1135 bp, Homo sapiens
gcctgatttgttcattccataatatatcaaaacatcacattgtatcccataaatatatacaaatgtacaattattatttgtcatttaaaaatctaattaaacttaaaaaaaatctctgaaaggacacctagagttagcccaattcaaaacttcctacagagttagaaatgcggaagcaaggtgggaagaaaagattatcatccccttttgaccctcactgttgagtctaccaatttttttctcagtagttttagtttacaaaggaaactaaaagaagttgatgtggtgctctttcatatatagtctgggagttggaaacagtagtttgaggacccaatatggctttttttttttttcagggaaggagagatttattcgttttctttataaatatgttatttttcttaattgggactgaagcaaggaatgtgatctacaagcatacagagagtaaaaacaatcattgttcttcattttatctttcaagtacctttctgatctattgaatgcttatgattacatggactggcagactgactaagaccaaggattaaggtggatgagacactgacagatctcaagtctagaatattttccagtcaggattcaaaagatcctaacccccaaaatctgatgtcttaccgagacagagtcatacagctcaggtgaatgtcagtagggagatttaatcagtttttttctggaaaaaactcctatactctagtcccagagacaacaaaaaatgtggaataaaaaatgcaattcctatcaagagactcaaagtcaaaaactgggagctctaggctggcagaagaaaaatgagactggcaggtgtcaaatctatactcatgccaagtggaaacaagaagttagtgagctcttcggcccactaggaaagtatgagaaacacacacagagacaacatacatggatacgctacaccatgtatcactgtgccaggcagagaagacctcgggtcaagtgccagctctggaatcaagctgagccccatctgtcagtcacagagcaagtggacaaagaagtacaaatagtagaagtgaaataccagatgtaaaatttggggaatgtataaggtacgtaggtagcatcttgtaattattactacgtacaacat

SEQ ID NO: 60937 - DNA, 1075 bp, Homo sapiens
actaatacaagaaggggcttcctgaagttagagtgggctggctccttgctgctccaggggaactggcaggaactgatgggattctgttccaggaggatgtgaggcactaagtagactggcaaggcagagacatatgggcatagggcaatatgactgggatccagtgactacacaatggtatggagtggggacttctaccttggggaagctgaggcaggttgatgactagtcatttagatttagtagttgtatcgaagatggagaattagctacaacatggctggtaaccaggtagaacatatgatcttacggcctgactttctcaaaatcataaatgtagttgacgctttgtgcaggatgttagttttattatcaattttggcacagttagatggcaagatgcagagtttattgaccatcagtccaggttttgaactaatagaatgattcaggaccctctttcttcattcctttaacaaccgacattggagggtgactctgcttgagaggccatggacttctgtagttgtggatgcaaaaagagatgagccctggtgtttgggcttgggacaggcatgttatctgtcctggggaaacagtgagaggaacaggcagtggagtccttagcatgcactggcaagagcactgcctctgttgtcatttttttcattcctgcatcccagtgaagcatctaaggttaacaatctgaaaaatgagggataatatgacccacctattaggttatttgaaagattaaatgagataatccttttaaaatatctactgtaatacatagtacatagtaaaagctcaataaatgttagaatgttagctgttagtatggttattgtatcctaatacattatgacaacagtgagaatgaaaatgaaaagttcaggctgggcatggtgtctcacgcctgtaatcccagcattttgggaggctgaggtgggtggattacctgaggtcaggaattcgagaccaggcgggccaacatggtgaaactctgtctccactaaaaatacaaaaattagacaggcatggtggcaggtgcctgtaatcccagctactcggg

SEQ ID NO: 60938 - DNA, 1051 bp, Homo sapiens
acaaaagaactaagattatgttttcaattatggacgtactttatatgcatttttttcttgatgtattactgatccagtgagcaacttcaaacagtaaaagcaagaaaaccagtacagcttattgactttgaaagcactggaaagctaaaataaaccttgaatagaattccactcccttttcagtgagaggaagacttaggttctgattatggctttgagggctctattcttgcagtgtgtctaaagcatgaattcactgagatcctaaaaattggtcttagttagacaattgttttgacaccttagttcatgttgtattatttctcatgcatgatttagtagctccagtttacatgttttacttcagtttttgattaggtgtgggtttgctggaagatttgttcctggtcaggaagaaaagtggtcctctgggtttatcttccaagttctccttcactcttccaagataaaatggtgaagattcgggggacagggctctgagaaatgcagggtccttgaaagtgagattagctgagtcaaatgtttgggtttactggtttcctgtggtctatcagattctgatcctcctctttgaattaacaagtctattgttaaggcttaatgattaagccgatgaaaaatggtatttttaggagggaacctgggatgtctgtaaaatcactttatcactttgtttttggaaatatacaaatatattcagcttaaatactgacatgaaggaatcttaaaatgaagtgatgtacttagtttgcctgggcaatacatctcagaaatggaaaatcctagtactcagacagaatttgcattcaaaacaatgtaatttatttgagtcttttaagttaaccaatggagaatttgataatttggtattgtagcactcagggccgcattgcataactgatattccatctgtgatggaagttacagaagaatcctccttgaaataataaacacaagcgtatcgatggtgttggttgagtatagcaatggaggatggcaaggactgatctctgcttacatgctgcttgga

SEQ ID NO: 60939 - DNA, 1105 bp, Homo sapiens
cataggtataacacatcattgactaggactgtttaaaactagtcattgccacaataacattttcccctcacctcagtaatatgacccatatcccgtgcttctctgggcatgaccccatagccctcaggaccaaggtgctatatcctgagacacagacatagcaggttctcaggaaatgtttgggtgtggtcttggcctacacggaggagggacttttctcccctctatgttctggatacaagaagagctcctctgcctcctgtccccaccccattcctacatccttctactcacacccacttattttcttcgatgcctgaaatttcacctagagatgatttctttggatgaaggcctctggtagtgacccttattaaattggaaattaaaaagtttgtgcccttgggaagtggattcaaattgtcatgaatactttaatatgaattattttacctaacctattttctaacctgttatggttatggttatgcttggccagctgggagtcctagaagagtcaaggggaaagggaaattgggagggactcaaggacagattttattttcttcttggtttttcccagccctggcactatctatgcagctctagacaaattcaatttctttttccaccccaatgttttcatcacaatggccttggccttttcttccctatctgtggcaccttttcatctaatatttttccatggtcaatcgtgacattgccccagctaacttgctattttaaatgaagcctgcaataattctgattagttatcattcaaaccagtggttctcaaagctaactgatcatcaatatcaactggggaaggggactggagcttgtgaaaattgcagtctcccaggttttatctcaaagtgggaacccagaatgggtgattgtattggtgtcaggacagtgctgttttggggtttggaaacctttaggtcagtgttaaatgtttagaaacatagtagttctataggtaggcagtctgttttaaaaatccacattcctgggctctgccctcagagagttgatgtagtggggctggagacttctgttttgaccaggtacttcaggtagtgctaatgcaaggggccac

SEQ ID NO: 60940 - DNA, 1136 bp, Homo sapiens
tcttattagaaggacactaatcctattagatcaggagtgacctttatgacctcagctaaccttaattacttccttacagccctcatcgctgaatacagctacattggagattaaggcttcaacatatgaatttggtggctggggacatcaacagtcagtacataacagggtgggtcagtgattttctaaggaagacaactgctgctaccagaaaagggaagcagggcttgaatgacgaagcaataaatggcctaagtacttgctgtcaagccctggactatagtcactcaaaatttcttgttagatgtggaaatgtagatgttaacaactgacagagatgcagtggggctaatattctcttatgaaagacatggagactgacaagaatgcatcactcttgcctctgagctgaaagaagacctttgcaccagcaggtggcccctcaacaggttgtttgggttcttatttagtacacacatgaaaaagtaagttgagcctctgctccataccaccaattaatagcgaaaatagttttatactggaaaacctgtaaagcatcagatgtccaccagtgccattaaaattataactgtcaggaaagccagataatatttaaactgtgcactctgatctaccctccaaaatcgatccattgcaaaatatgatacgacgtaattggttaagttaaaacttgccgtatacaagtattggttacaacacaattaaatgttagggcaaatctcattcttccggaatagtatcttcgatattaaaatgttgtttgcatgtgtgtggcagggtcttgctctgtctccaaggctggagggcagtggcacaatcatagctcactgtaacctcaaactcctgggtataagagatcttcctgccccagctcccaagtagcgaggcctacaggcatgggccaccacacccagctaatttttaatttttttgtggagactgggtcccactctattgcccaggctggtctcaaactcctggcctcaagcaatcctcccacctcagcctcccaaagcactggcattatagtatgagccactgtgcccagccttgatattgaaatatttgatctgaatctcttcttttttggcagtaattacaggcctggtttggtt

SEQ ID NO: 60941 - DNA, 1053 bp, Homo sapiens
ggagtctggaaatggaaaacactgataaatattgataaatattggcatttatttaacatttagttcgtgttgtctgtgcaaagcataattgagctcactgtttagctaaatgtctgctttattatatctctgctgttttaaatgtttgggaattggattgaaatcacagtgaaggctctaaggcattttgcttatctagaaactgaatataaaaccacagagatgacaattttttatttcttttggcgttagctcccaagattgtcgtgttctatgcatatagatgacaagtaccttctcccaaggtaaaggataaacttggcaagtggccagtgggttgaaccaacaattcttcctgagttgagctgagatgaggccccaaacactggcataacctgaaatttgatttgagtgatgacttataaagagacagcattaaacaaccaactcaccaagtgagtcatctttgctgagctgtgcactttcattatcctcagaaatctattaagaaatcatcttattgtttgcctaatgcaaatggaaatgcctagcatattgattctactcccagtttatactctggataaagaccagtctacacccgggaagtgttccaggatcctgatggggcaaaattgtgaaataggcagaaattgtcttccagcagctcttctcaagcccccttctagtgtacatttacccctacctctcaaaagccaagcatctcctctcctcctctcctcttccttccttccttccttccttccttccttccttccttccttccttcctccctttctctctctctctttccccctctgtctctctgtctctctcatacacacacacacacacacacgggtcctatggacatggtggctctctcactgggtgacactttctgctcaaaaactttgctccacttccttgctcccttcctctgcacaaaactaatctattatctaagtttctcttccttgggccttggtaaatgtctgaagttattttgacaaagacggatttgagtattgggcagtgtagttaacaagagta

SEQ ID NO: 60942 - DNA, 1013 bp, Homo sapiens
tctggtgaatacccttggcagctacatcagcaaacaagtcatgaagtgattgagcttgagctttagttgtggcggccattaaaaaaacagagggcagtccgggcgcggtggctcacgcctgtaatcccagcactttgggaggccgaggcgggcggatcacgaggtcaggagatcgagaccatcctgactaacatggtgaaacctcgtctctactaaaaatacaaaaaattagccgggtgtggtggtgggcgcctgtagttccagctacttggaaggctgaggcaggagaatggtgtgaacttgggaggcggagcttgcagtgagccgagatcgtgccactgcactccagtctgggcaacagagcaagactccgcctcaaaaaaaaaaaaaaaaaaaaaaagagggcagaagcctgaaacagcaggaaaaaagaattgccagcacttaatcactgagtcactataagagggtgtatacctggaggttgatttgtgtttgtgttacaaggaatagaaattccaatacgattgaatgaaagctgtttattctctcccataacatggagactgaaggtaggtggctgtgaattcacataaagaaactcttcctatgatcttcagcaaaatccagatgggagtatcaggctgctgggagtcagattaatctttttgaaataaaaaagcagcaggtatgaatacaaaataagcaatgtttccctcacaaaaaggaaggggctggcagaatacttttttaaaggaagtttcaggggtttctcaacagtaagtaatacttggctaggtgttcatcatcctttgtatgacattgagagagggcatatcaggcaaggaccaacataaccctctcagcctcagaccactttaaattccttgttgtctattgattgtttctgccactggagttggaaagtgtgaggaataggaaatgtattttgtaatggctatttggtatttattaatatgatgattttgggcaattaccatatctcctttctc

SEQ ID NO: 60943 - DNA, 1029 bp, Homo sapiens
aggtagtcttcaataaatttaatagtttctgaagaaaatacctaaacagagcattctagtatgctggaagtggggaggggagaagcagctgtggagggaagaaagatacaagatttaaggaagcttctagtatagctaaggagattgggcagctaaaataatcaaggccttgtattacaagggtcaaatgcgtggtaaagacaataaatgtggtcacattgtatattaatttggaattgagcaattcaaaaaaatttttttttattatactttaagttttagggtacatgtgcacaacgtgcaggttagttacatatgtatacatgtgccatgttggtgtgctgcacccattaactcgtcatttaacattaggtatatctcctaatgctatacctctcccctcctcccaccccacataacacttatatttttccctccaaattaaaaaaatgtttacaaatttcacaattggctctctgggcaaactgtaaattgtgtttctgtcgagaggaaatgttggtatcactttagctggttatgtagaaataaccaatgttctttcttagaattgcttactactgtttatgtacatatgattttgatgactctcgagctattattttaacactctctattaaaataatctaaaatgtttttctgtaacaaagctaagtgttcattgcatggtagtgctggtgtaagtattaatgctcatgtttaaaaaaatgcttggaaaccaagaacttgggaatagaaaataaaaagatttaataaaacacatgaaagattgtaaaacaatccttattactcaagggtttttgctaaaaattagggataatgttgaaaaaacagattcctagctgcattactctaatttctgcttccattgccacatcatcgccttctcccacattgacccttctgcctcccttttataaagaacctcgtgctggccgggcatggtagctcacgcctgtaatcccagcactttgggaggccgaggcgagcagatcacgaggtcaggagatg

SEQ ID NO: 60944 - DNA, 1033 bp, Homo sapiens
taaaagaaaacaatttggatttttttaactatttggtaaaatacaaaaacaggagaaaaatctagtcaatgatagttttatataataagaccttttatccttctaatgagaataattttattatttttctttctgattatggaaataatacactcactggggaaaaatgcaaaaaaaaagaaaaaggttaaaaaatttaccatctggaaataacaaccattgacattttgctagatagtcttccattttttttcaatggctgttacatgtaaacacttttctgttttttcacaaagatggaatcactttaaaacatacagttttgtaactgccctttttgccctacctgtaattgggtttacataatgatagtgaggcaattatatgccactaattcaccaggaccaatggacatttatggtggcaccacagtgttgctactgcaccttattgctaacaattccttattgaaattgcttgctcttgataggctttccacaaggtgctttcaggcctctgaactgaggatgcccagtggattttagaaattcctgagtgattgtcatatatgttgggcctgggctgctacttatcctggttattaagaaatatctaaattctcaggctccccttctttaggaaggaacaggctgccccttggaaatggggcagtattttttgagaaactgaaattagttttttaggcaaattgaaaaagtgcatatcttgcttcccaccattttgcttcatatcctgcttagcccaaaggatttagaaatccttttacatttatccacatagctcagttacttttcagaaacatcccacttcccagaaataccagataaatatttattgaaacccatgtcacgatgaattttctttctgctaataataatattatcttatgtgccgtaggagtggggcactttaaatttagaaacaaggatttttctgcaggaagacttgccatgtgggttcagcttgtgggttgttcgtcaattatcttttttttttttttggaaataaatcc

SEQ ID NO: 60945 - DNA, 1054 bp, Homo sapiens
tcccttgctaaagatatgaggtgattttttcttggctctttattgtgggaacctggtgaggttcctggaggtaaaatctatctatgaaagttgggtaggcctccctaagacttgagtccccaggttttctcattctcatgctagcctacattcagcctagagcaatttatccaaataactatttaggtagttctactaatgtatgactccagtaacttctgctctgggctagctaatcttggctgtgtttcttcatattctcatctctccagatttcagagtggctgtttatcctgcgacttcaattttctgatggtccaagaaaagttattgattttcagtttgttcagcgtttttttttcttgttctaaagttcggagcgacaatttctaagctcttacttgtcagaactgaacatgaaagtctcttaacattcattttttttgtgtttgaaaacttcttcaaacaagaggcaatgacaaatggtcctctagaaatttaagctacagttattgttaaaattttgtgaatttgatagattgttatcatcttggaaaggatggaaggaatttcagcattttgaagtgtaaaagtagagactgcttctgctgtctgatgggctagctaaagatgtgtttccttctgatctgaggtgaagctaattggtgagatataatgtgtttatcataattaaattttcagtgtagcaacatgagttatttatccccctctggacacttgcagagatagaccattaaaaatcttctaccttttgcaaaatgtacaggaaataaaatagcatttcacctggtactttcctgatctgcaggtatcaaacaaagggatgtgaaaatgggaaatagcagcatatttgaactgtcaggagatacactcaagcttagtggctggaaaattaccacaagtgtgcacatgcagtcttacagaggacattaacaggtggtagggtcaaggcaatttatttcaaagtgtctgcagtcctcagaaagaaataaaatcacaacttgatgtgattagtgagtatctaactaggctg

SEQ ID NO: 60946 - DNA, 1035 bp, Homo sapiens
tcctggaaattgaaatcatttgaggtaaataaaaagcagatcatctttaatacaaaaaatgtggtgactctaatctgcttacgtaggcacagtgattggggggcacagcctcatgctttggagtaattgggctctaggcaatggagtgtgatgttgcacattaggtgaaatctaatcctgagcctgggaactcacactgttagaaaatgggctactctgttgtatgcaatgggtctaaacccttatttttggcacccggtggcagaaagccaagttgttgtctatggtcttctgttctagtcagtacccacttttatggatcctagcaaaatgctttcacactttttctccaggttctttttagctctttaaattaactctcagaaggtgtgagttagcagagatggaaaggatttggttaggtgttaattctttctgtcttgtttggttagagagtctcacatgtatcagaatgagtcagattcatcttaggtcttagaatctccagcagggttgcagagatggctagccatccatcagagatgcatattctgcctctacagtgtagactcgtggctggaaggtgctgccccagtgagggctaaattgtccagctgcccatgcctgcccccccaccaagcccttgtatctacctgtgaccatgtgactagttctcactaatggaatgtgagcagatgtgatttatcacttcgaggttgatgtgattatgaagcagatgtgccttactcatcctctccttcacatctggaccctggaagtgaaggattttgaggccctaaaggaaggtggagccacaagatcaaaaaagcctggttcgtaaatagcttccagcccagcacctgcactgaactgtctcatgagtgagaaatatgttcctattatgtgaggccactagattttggagtttatttgccgcagcatacagcattactttaacaaatatagccatccaagtttattcctggaataaaatagtaggtacccaatcaatatttttgaataaatgaatgattg

SEQ ID NO: 60947 - DNA, 1124 bp, Homo sapiens
gattatatttaccttaagattattaaccttatctgcatacccataaacactgataattagaaatttatgtatacaattaacttgtgggacattcacctgaaagtaaatagtccctcatgaatcaccactatcttcactatcttctatatcaaaacttattaccgataaagaaatcaacacatttgtttcttccaagcatctttaaaactcaacagctttgtccagctgatggtgtttttcttccatcagaacctgtagctcccacctctgcagggacttgaagtactgtttagattttattccacttggggtcagtattgtgctcctgattgctgctgtcttcttgtttttataacttacaaatattaatttgggaatctcagtggaaatatccatccagtgaaaacatgggaagatgcaaaggtgatccagctctggctgctgtcactcccacccctgtcttgatggctagctacattcactttgtagcaaactagggagccaattcattatcactcccttgtttccgtgtcttcttttaatgccatctgaatgttttcatcctcttaaatgctgttgagacatgacttgccatgacagcttagcatctacacaattgtgacaaaggcttagccaaaagggggcctggacgcaatattttagctccagctgtttctccttattgctattagcaaaaaattagtgtttttctttaaaggagaaaggttacaattaattacttgaggaagaaaaaaaaacacaaacagtggtctcattcttggctgcacactgaaattatctagggataataagtaaaatactgatgctccggccataacctagacccgagatgggaatttccgagaaggagagggtgaggggtggggtggtctcaggtataagcattttttaaagatccctagtaatgtggttaggttgagaaccaatgtcctaacaaaatttggagggctgaagctgactataaacacagaagaattccagagctaaggcaggccaaaaacaaaaagccagaaatcaaattggattctgttttcttctgttgattatcagtgtgactttggagaagtcatatcactaccttgggttcttctgtaaatggcata

SEQ ID NO: 60948 - DNA, 4713 bp, Homo sapiens
gccaagtcaggctgtgttaggtagaatgagatccacctgtacctagactgacttgctgttcctgtcccctctgcagaggccttcaccacggagaagcaacagtcctgacaaattcaaacggcccacgccgcctccatctcccaacacacagaccccagtccagccacctccgcctccacctccgccacccatgcagcccacggtcccctcagcagccacctcgcagcctactccttcgcaacattcggcgcacccctcctcccagccttaatgcatgagcttagtctgaatttcaagttgggactcatccaatggagccgtctactcaacgccaaaggcttccttctctggcatatttggatatgacttatttgcactgaggttatctaggcttcactatccattgtgttgtaaatgtttgtcagaaatgcagccagtgttgtgggtctacaacactaaccagacgactttttccatcagtgttttacttgaatcttcatgtacgtccattccctggctggaaccttcgctgtttggtatttggtatttcagcagcagtgtgcaatttttgcttggcccagagcttcattctcctggcttttaggtttgtaaaagaaaaagggatatcttttttatatttttttccatgaatctgcagaaaattactgagctgttgttaccctcctctcattataatagtgtttaccaaacataccaataattcagcactacaattcagacctttgaaaatctggctttcagtgtagaacagaaagttagatgaatcagtgcccaagacatattttctgtttaacagaactttctacagatacattttttacaggttattttcattgtgttattgacatccatgtctctcgtaaaacagatggcccaaagtaatgaatcatgtggctgtaccttctccacataaatgggatggataattatcgtatattaagatgtgattctcttttttatccttaatgttaatctacttaacctggccccctctaacatgagtcgataaatgttgtcctactcaccggtggtttcaatggctaattagaatgtgttatttgatttctgctgcagaaggcagtgtgattgtaacaaaaacaatgcggcttccccctttcgtacttcatttgtgttctcttaaaatagagtttgaacaaatattttaaaggtgcaaaataccattagaaaatactatttgaaatggacattatcgcattatcttggcataatggccagaaaatattgtattgcttggcagaaaagaaaataaggtctaaaggaaagtagcacattagcattgatggctgttcatttcacccagtataagcaagtgcagtgtacaaagaagtatattctgaatacattatttccattcatttagcacaaataaatcatttggtttcactttgcagtggaacactgagtcactcttttcttaacacgtgcaacatcttaatttttgtttttcagcagttgctgttttgtactttggtagtaaagtgatttttaccacctgtgtttgcatatttatatatgctgtggatgaaaataacttactagagaatgtatattttatgacaagaatgtgtatctgttggatataatcagagaactgaaaagtaatttatcagtaatttttaagagtccatgttttgtgacaaccatctctaatagccaactctttattaaacacactcctaaaaataaggaaccatgacattgtagatatttaatattgtacagtatagaaacctccatttttgccttcgaatgcatatttaagagttaacagaatgaaaaaaaaaagtcttgttggataatagtgtttgactagcgttttaagaacttgagagtaaaagcaacaataagattttttcacctcttcctgcttccacccccaaactgagaacatcactcaattgtttggaagaaactgtaggtctatataaattttatttataatgtatgtgtaatatacataatcataatacagttctcagatgcagggaagaagtttggcatttaatcattgaggctttaggtttttgatgtgatcagactgggccatgtcaaacccggaattttcaccaacagttcactcaccctcctggtacattgccattccaaggaattctgagagtaggcaaacaaattttgccttcatggtacagttctcagtttttcttataggagaaatatggtatatgtttataagaatcttttatgagattatagatttcaatgctgtggatagtgtcttgcacccaaacaagaaagtccataatggaatgatcttccctcagcttcctatcgatttagttacctcttgaaagcacaaaaattaaaacattgccatatgttgaatttttaaaaagcacttggagtgagcgaacatttcctgataaatgccttttagagataggttcttgatattcagacatctgcagaaatgttctggttcccaaagtcatttcacttcgaaataaaacacagctccttcaaacagcactttttccacataaatctagttgcctctccctgtggacattcagaactgatagaacaaacactactcttttgaatttgatggttcgtgtcctttaaagtgtttgaggacctatgcagagcctgtaacacttgggtagtacctgctaggacaatttcttggcaattgtcttactactagggatcagtaagatttagattctgagcccataatggcaacagccccctcacctatgggaagctgacttccctcagtcgggcacttctcatgggggctgaacatggttcctgccattctgttacccactctcccaggtgagccctggattggctcccagaaggcctttgtaaaatcagtagccgtcctgcaggcaggtgggagcaacaggggcttcagtagcttcattttcctgtcttgcagacagagacccttggctaccactgtgctgctaataggataagtactctgttgccagattaccatgccttttatacaaaaccaaattaacttacctaatacctgacacctctttgggctctgaactgctttctctcatcaagcatgctagcactctagacagaattctagaaatttggcagatagtggaagcctttaattgaacttactccttcgttgactgaaaggagttttaaattctgagctcctgagatactgactagcaaccatggaatgaatgtgtgaccagaaagtggctttgacaccaagtgctactgtccctttgtaattggcttctaacagaattcaaccagaaataattgataatgtgaatttttgttaattgttcacttgtaggaaaatagaacatgtatcaccctttgttaggtagacatgaacttttcctgcacaaagccttgcttttagagaatgcccaataaggcaagaaaaagcatagtaacttgtgctttgagagctcaatatttgtatcttatcagtacagaagaaatatttctgtgtaacttgatcttctgtctagtacttgtcttataggtaaccaacactgaaaactttgtagtgatgactaccaaagaaatacatagtaaaacaaccttttatttccaaattgttaaagagccagccattgatgctgctacatgagttccatgctcaagagccattgtaagagattaaggggtttctaggtttttggtgattttttgtttgtttttttctttgttttttagggtttttttttcttctttaattttttgattaaaacatacacacagctgttagcataaagtcgtggggggcattttctggaatgctcagcagttctgattaactgccaagcccaggttgcctctcatgaggcaactgaaaaaatcctgtgtcttgatagcatgggtgctgtgtgtgtgcatgtgtgtgtctgcattcatgccttaactcgggttactgcacaactttagttcttgacttagtctgcaccgtcatctagattgtattgtacatctcggtctgaacttcatcctggcaaaaacaaagttgcaggcacaacagtttaagaatgcattcctccagaagagtatctggtcaggttgacccctgagccttctttggacttgatttggaacttagcctggaaagcgaaagtggactgtccaacagaaagatgtcaacaaggaaaagaggagagccaagcgctagcatgccttttgcctctgcatatctgtgcacactgtatgttgttcatgatagcttgtctacaacttgactaggttggagttctggtaatagtggcaatcttgacattcttggtcagagtttagagagatgtaagactttcaattaatgtcttatttactcctttatgttgattagtctttgatacatgtgctgaatcagaaacctaaataaagataattttttaaaatgtacctcttgagccttaaaccctatcttttttcatttcggtttttgggaataaaacattgtttctctgttgcttctgacagacatctaacttaaattgtaaactctaaaggctgccttagaaagtaaatttaaacaactgggtgcagtgacacaagcctgtagtcccagctactcaggagtctggggtgggaggatcacttgagccttgagagttcgaggctgtagtgagctaggattgcgccattgcactccagcctgggtgtcaaaggaagatcccatctccaaaaaaa

SEQ ID NO: 60949 - DNA, 1049 bp, Homo sapiens
gcctatgtcatatccaagaaatcattgctaagatcaatgtcagggagcttttcccctattttccttctaagagttttatagtttaaggtcttatagttaagtctttaatccattttgagttgacttttgtatatagtgtaagagataaggtccagtgtcactcctctgcatgtgaatatccagttttcccaacaccatctgttgaagagactgttctctttccccgttgtgtattcttggtgccctttttgaagatcagttgaccatatacgtgtgagtttatttctgggctctctgttctatcctaggaattaacatttatttcccttgttatccacaccatttagtgagcccatcattcttttcatctgtttgtatttttgtgggtgatagagaactactgcgatttaaaacctcctagatagttgaagacaccagatagttgagcttaaaatgatacttaatttgttgttatattttaggtctatcatatgcaagtcacacggttggtttcacgccaccaacttcactgactagagctggaatgtcttattacaattccccgggtcttcacgtgcagcacatgggaacatcccatggtatcacagtaagtgtccgtggggtaggaagcagcactttactcctgaaagtggtaccgactggtgttctggagaacaggatcggtgcccttagacatttgcccttcttcctgcctcctccatccgttcaccttgaaactgtagagacttaaacagtttgataccaaattctggtattgaaactaaaatccttcccaggagacaaaactttaacttcacttcctatgaaaaattaccctttgtgaaatataatttgaactctggccagtgctttgattgaactctggccagctccttgcattattgttggttgccataatgtctaaagatatttattgtctgcaccttcacagttcactgaccttcagtattcttcctgaagttagccttgtttgtaatgttactcagaattttctctcctcgaattacaaggaagcttaagtgcatctg

SEQ ID NO: 60950 - DNA, 1040 bp, Homo sapiens
tcaccctccaagcttgactgcatctgaacttgaacctctctctcaacagttctcagcaatgtttgaacgttggcatcgcctggccagcttttaatagaccagtggctaggactcatccttggaattctgactgaattggcttggggtatagtctgggcactggtattttctaactgtgaacttggaagggaatgcaagccatgcagatctttggatcatttgggagccacctctttggaatctgtgtggaagtcatccgcagttcacaccatctttgactaaaatacagtaagtccttacttcacatcatccttgggttcttggaaactgagactttaagtgaaacaactttctgtataaccaaaccaattttaccgtaggctaactgatacaaacaagagttaagttcctatggcatacatatgttgtttcacttaaagtcacagtttccaaggatctgtggatgatgttaagtgagggcctactatattgggagatggctgtagacctggggaaatataagctgtggcccctaagtactagggagttctgtgtgcaagaggaaggaggaggactcataggaacaaatctggtcaggtgaggctgtgtgccagcagggggcagccaaggaatgctctggtgacagccttctgtgtgtgagtcagtgacacccagaggtgttggacctggtgccttctctgtgcctctgtcttctaggtcaattgctgaactgccaggaagtcttcccagccgatcactgcaggggacattcttatctatagatatattgtttaaggatccccctgctgagttccccgatgctaaaggattgccattttttctttgaaagacaatgttctctgaagttattgttcttggagcctcactaatgttaattctgcaaaggatttcatggtagtctccagcacccttcctgtaaaaggcattataagagtcctattatggaaaagaaagtcagcttgctctgacagtcacccttctagttctagaaacagcaaatactccaaggggtcaatctt

SEQ ID NO: 60951 - DNA, 1097 bp, Homo sapiens
agggctgactacaggacctgagtatgcacacatattggtatacttgggattcacaggttctgagggacagctgtagtaacacaatgagcacactcatttacacctttctcttttcgcttactatgcattgtagttttctcccctgctgatacatacaaagctgccttcatcccttatttaaaggctgcatagtatttgattgtatgaatatgccataattcaactagtcccataccagtggaccctttttggttgctatgctacaaccgcaatgaacatctctatacacgtgtttgatacctgtgcaggaacaccttcaggatagattccaggaagtggatttgttgggccacatggaatgtgcattttaaaaagttcagtggttcctacctttgttttcgtctctgaagttccttacaaattcttgtgccgtggagcatctgggatggtgtatcagtatcatccttggagcctttgagaaatatggtgtagtactttcctatttctgctattacaaattaccacaaacctagaggctcaaaacaatacaaacttaaccatcttacagttctaagatgggactcactaggctaaaatcagggtgtcatcagggcagccatccttctggaggttgttggggagcctctgtttcctcgccttttccagctctagaggctgcctggattccctggcttgtggccccttccttgcagtcgtaccaccccacctctgcctctgttgttacatcttcttttcactctgattcccctgcctccctttattaggatccttgtgattatgttgggcccactgtgataatctaggataatctacccatctcaagccccttaacttaatcacttctgcaaaggcccttctgtcaagtgaggttagtagcatttataggttttggggattagcatgtggacatctttagggaatcactattctagcaccatacaggtttctgggcttactccatggagtaaaaaaggagcatattaaaaaaatatatatataagtaatcctgatgtggacctcaggttgttaattactatgtgtgtttggtggaaatcaaatgagatatatcaaatagt

SEQ ID NO: 60952 - DNA, 1062 bp, Homo sapiens
ttccttaataggttcaaccagtcttttgttgaatgcccacattttgtgccacccagcatggaaatactgttttccatctggaagattcttggagtaattgataccaatagactttttcaactatgtaattattttaatatggctttctaggatgtttgcttctgcacaggaccttgctaaaaaaaagcctgctaagagaaatcatgctacaagtgtcactcacagacaaatgggtgcattgacctgttcactgtgaaagtgttcagcatttttcacccaaaggccactgagaggctatatacagatcaatttttgttttgtcagagtgctttggctgttatttctgatagtgattggacaatgcttttatgtgcatttcaaagggattttttgatcctgagaacaaaatgagacttgctatagaagagacgtgtcccttcctgtctgctatggccaagttgggtatccaatacctttaaaaaatagaatcaagtttgcttaagatacatgagagtaaatccctttgccctttaaaagatccagtttgggagatggcttaaacacctccatatgtgttcatcctcaccaacaggaaaacacacacaaaagggagcatgcagctcttctcccttgcttttgtgtctatccagtacagacacaaaattgtatctttatctcgtgagaactcttgactgagaagtctacatctttctgagcccaggccatgggattcactacctgattggtgagacattgttccaaaaagaactctcttacttttggtaagttcaacatgaacctacattagagctaaattctactcttgaatgccttgaagagaggttgtgctttaatcgttatttgtaattaaaacctataagaagtgtttgtgagcaaaattatcagaattttatatacaggctgagcgtggtggctcacgcctgtaatctcagcactttgggaggccgaggcaggtggatcactttgatgccaggagttcaagaccagcctggccaacatggcgagaccccatttctactaaaaatacaaaaaatgagttgg

SEQ ID NO: 60953 - DNA, 1021 bp, Homo sapiens
ttcatttctgtagactctgctgaattcctctgttttgcatttcttgggtgtgttggttcacagctaaaaatagagctctatttaaaatgggtaccctttctggaaataagaactatatttcaattagtaaatttcctgtttccttaacatgtgttttgttttgttctttccttttttttttttaaacagcaagccagggctgagcaggaagaagaattcattagtaacactttattcaagaaaattcaggctttgcagaaggagaaagaaacccttgctgtaaattatgagaaagaagaagaattcctcactaatgagctctccagaaaattgatgcaggtaaattatcttttctactccctcatcttccctgcctattttcctttctaggagaaaatgactttgatatagcactttgcttgtaacatttgctgatgaggttgtagcttaagttctttggagattcaaaataccaggtaagggtggcagcggtgtaatagtcaagactgtggttttctagcttatctgcatatgttaggtaagctattttgtaccccgagcatttccaaaaaattgctgatgagcacaagatcttggcatgagatgttgaatgtagcattttggaagtatggggactaatgccaaatgtgaaatttttctccttttatgttgagcctgtaataagtacgtaaactttttggcagtcataggtgggtcttttgcactaaaatatgaggatatgaagtgaaacatctttaggaagtagaaaggtatccatgatagttaaaactacccacaatcaaccgtgttcaaatgggtgagtaatatgttactgaacaaatatcagactgctattaaaactcaacgttgatcacgagtaatatatagaagatgccacacaaaacatataggaaggtttgatttctctacttcagaggctcattctctccccctccttttttttccccctttcaaagcttactggtaaagtacaaggtaaaatttgcttaggggcaatagt

SEQ ID NO: 60954 - DNA, 1054 bp, Homo sapiens
tttaagtctgtatctccttgctttctaaggtcatttaacatttttatatttcattgatatttctgatatatgaaaagcgtgcatgttatagagaatgcttttttaaaaaacagctttattgagatagaattttatataccataaaatttacacgtgtaaaatgtacagttcagtggtttttattatatttacagagttgaactataatctagttttagcactcactatccctctccccaccacccacccttccctgccccaaccctacacaaccacaaatctttctgtctttataaatatgcccattctgggcattttctataagtggggtcatataatatgtggtctttggcattaagcttctatcacgtagcataatatttttgagctttgtattgtaacatctatgaattctaagagggaaaatgatttatccaccaagttatatttataacgttgtttaacattttcattatgtaatattttattcaaacaaaagtggaccatataacacgtgtaagttataaagcatgacaaaatgagcacctggattcctaccactcaagaatggtactgataccattgcatctacctgtgaatttcattcctattctgttcctcccacctcctcatctcataagttatctctaagcaatatatcatttcttctgtttttttagtttattaaaaaatgtattttttttgcagcttctttcacaccatactgtgtttcttagctttattcatattgtatttaatgtatttcttttgatttcattgctttttaattttctgtgtgaatatactgtttttcttctgagtaggtattcggggtgtttccagtattttatttaaggatcaacaacacaatgaatatgttacaactgctttcttctatacatggaagagttttatgtagggcatatacctcgtagtagaattgctacatagtagagtacaaaaatatttagtttttcaaaatatttgtaccaatgtacactgccatatacgttatataagaattcccactgatcttgatacttgtcaacacttg

SEQ ID NO: 60955 - DNA, 1126 bp, Homo sapiens
cacagtctcttatcccatgaggccagatatgttttagaatttaggtttttttggtggtgggagttgggtctgtttgtttcccaaggctgttgtaacaatgtttcacagactgagtggcataaaacaatagaaattaattttctcacagttctggaggggccagaagtccaaaatcaaggtgttggtaagggttgttctcccttggaaacctctggccggggaagatccttctgtgattcttctagtttctagtatctccaggcgttccttggcttgcagctgcagcacttcagttcctgcctctgaagtcatgtggtcatcttctccttgtatgtttctgtctgtattttcccttcttataaggacagcagtcgtattggattggggcccactccagtgatctcatcttagcttgattacatctgcaaagaacctatttccaaataaggtcacattcacaagtatgtggggttaggaattgaacatatctttttcaaggacacagtccatcccataaaagggagtggagctatggaaaggtactgagcacctaccacgtatactgtagcaccgccagaggattgaaacagcagacacatcaaaccacctcagcaaaacatgtgaacaggcatgctaagtttgatgataaagctgcaaagagcctcatgtcaattcagatcaggcttgccaccaagtgaacgcagttgtttggttgcttgccaaatgtagctttcggttttcagtcttctgggttttggaattgtgtttaaaggatcgaggacctgtgctagattttcaccttaattcctaatgacagcttagcaatatttcttagaagttctagcagggaagagttactgcttatgcactttctaatgttgttaccttcccccacccccccatctggaaagttatcctctttgactggatgcagccccaggtatcaaggtggtgagatgtagtttgaccatgaaatccttgtgtccaactagaatagaaacttgatgctgaaagttaaccccttgctagaggttaaaccttccgtccctctttactcactgaaaactagaaaatgttcatacatcaataacctccaactcacaaagccagccttatagttaaagca

SEQ ID NO: 60956 - DNA, 1033 bp, Homo sapiens
gggctgggcagagcttttgtcttcgttagtttacctagttaacttgctttgtaggtcttaaacatcaaattgcatacagaggtctctgtcttaatgtgatgcatgtgttcctgaaaacctttgcattctccagaatcacacactaaaaatattagggttgatggaagaatagcatcggcgcagaccactaactcaaactttgccatgttgtaactagagaattaaacagtttttggttccttaggaggtacaacttggacttgtgatgtagttttcaacagatcagcaactttaagatgaactgctagtgcttgaggtgccaactgtatgcaggactcagcattcacagatagaaacataaaaaaggtctttgtccttgaagctcacctggacaagaacctttgaacttctgtgtccttcaaaccttctttttcctctggtgttcagaaagacttcacctctcccaaatctttcctggttcagtcactgagtaccctgtaacagccaccctagatgagcagatctctaccagactttaaatatattttagtgatgataaataactattttttggacaaaatttggaaaacaggttcattatatagataataggtcatcagtgccatccctcacaaccacctctattctggtttatgtgcttctagtcatttctaacatatctgagggttggtgtgaacctttaaagcaaaatttgggtcatgttgtggttcccaccatgttttttcccaactgaacacgtatcatgacaattttcacttgttcttaatcatggcaacatattatttcattgtcaggatacaccgtcatttattagtgcctatattggtttcctgttgctgctgtaacaaattattacaaatgtagtggcctgaagtaacatagatttatcatctcatagttgtataggttagaagtccaatatgggtctcactgggctaaaatcagagtgtgacagggctgcagtttttctggaagtcccagaggagagtccattttcttgcctctccaactt

SEQ ID NO: 60957 - DNA, 1025 bp, Homo sapiens
ggagtgattctggtgctttattaaatacgttatctgaggaaagctcttagtagatgcctagatggaggatgtttgttttgccatcgtgaatgagcagaattttgtcaaatgttttgcatctgctgagatgattatgcactgcgtaatggcatttaagtctgcgatggactgtgtgtaagacagtcgtcccttaagattaaaatattatatttttactgtaccttttctatgtttagatacataaatactaatcttatgttacaattgcctgcagtattcagtataataacgtgctgtacaggcctcggagcaataggccataccacatagcctaggtgtgtagtaggctataccatctgggtttatgtaagtatactttgatgttcacacaatgatgaaatcacctaacaatgcatgtctcataacataacctgtcattaaccaacacatgactgtattcaaaaaatctcaatgtaatgaaatacaattgtctaatgttgaattatccacttactgctgagataaactctgccagcttgtaattttttttaattttaatacattgctgtgctcatgctgctaatattttattcaagagttctgtatatgtgctgtgtaaaagtggcctttgggttttttgctaggacagtttggaagcagggctacttttggatagcttttttttttttttttttttcccccttaacaggtgtagtttatataacacggcagctatctttatcttaaaagtttggtggaccttgcctagttaagggaaaaaaaagtcacacctgggcctggtatcctttctgggtaagggagccttttcaaaaatgttagaaacttttacggtgacagaatggtgacggcaaataatctatttagtgaggcagctgggcatgtaatgcatcagtgatttttaaaaaaatgatatgtgaggctgggtgcggtggctcacacctgtgatcccagcactgtgggaggccaaggcgggtggatcgcctgaggtcaggagttcgagacta

SEQ ID NO: 60958 - DNA, 1101 bp, Homo sapiens
ctattatggtggaagatgtggatttagtcagaaggcacatggctgaggagactgttgggacctgctgggcggggctgaagggctttggttggggaaggaggagataaagggagtgcagcagggggtcgggcagacaacgctctgctctgccagattatagaaaggtagtcatctctgatcatgtcagaactgatcgttccttcctgagttgcacagaggtggcactgggcagagactggatagcaggacatcagtggtttgaaccaccatcctctgtgcaccaggctaaatacaagcagtaactcacataactctcaaaaggagcctgtgagtataagagttatcctcatttacagatggaagatgtgtctcagagaggttaaggaactggcctaaatagtggacatatgccactttcagagcctcagttaagtggaggctgctctgtgacatgctaccactttatcttttccttttaaaaactttttttggagtataacttatacacatatggtaagtgtacattttgattcattttcacagattgaaggcacatgtgtaacttgcacccagatcacgaaacagaatattactaatacctggactccactgtgcccccttccggccattatccctccaagggtagccactatgtggagtttgaactctgcttaactggaattagacagtgtgtactttttaagtgtttaatgtctttctcccagcattatgtctgtgggatttatctatattgttggtctcttcccgtctgagattgggtcttagaacctagagtgtccagaaaaaccatttgttactatagggcaaaaccatttgttactatagggctgtaaagtcccctgagtgtacagttggtattttcagaacttgtaaaattggaaaatgtggtcctctcggtgtcatcgtggtctgccatgctttgagcattagaagaaaaagctacctggttttcagagttcttggtatagaggattctctgtatattaagaaggaaatgtcttcggtattttttaaagaatggattaaaaatattgatgcactcagagcctctgccagagacattttctcttatagatgtag

SEQ ID NO: 60959 - DNA, 1360 bp, Homo sapiens
aatgacttgctcttgtttttcaattttgagttgcaaaaaaatttcccacctgtcaattgtcttttgacttggcttttggtgttttttggccacagtgaaaatttttatttttatggtttcttgatgtcatttataatctacaggaaatattgctaacattttatggtaaaacctttctgtatatttacttctttggaaaaaagtaggacagactgcttttgtgtttttgtttaaatgatagtgcatttaagacagattcagaagagtgtgtagaagtagcgatgccagatattcttttaaattgcataaacaattgaactcacaactgcacattagatacatctcctggtgtcttttttcctcattcttgtctgtataacactttatatttcatatgagatcttgaattaggataatttcctctgactagttgatcaattactgaattgtttattttggatactattattgtagcctccttcttcctccagaagctgctgcttaaatggattcaagtgtaattggcattatttttctatcctggtccgtttcgggctctgtttatctggtggttttattttactctgcagtattttccatttcccctgcttaaagatagatttaaagctgcagaccttaaatgtaatcttctttcatattggccggtcttctttgttcatctcacagatattacaaataacgtatatattacaaaactttgttcattctgctaatatttctgaggttattctgtatataaggctgttctatgcattgtgctaagaggttttgagacagttcctgcctctggcagctgatattctagttgggggggcggggggcggggttggaaatagacatcagacaactgatttcacagttatagaattgaagctgtgataaatccttcaaaagatgtgtttcttggaggatatgatggggggaaccagaccagtttaaggcagccaacggagcttccctgaagtgacatgtaggctgcaatcccctgtatatcttttttggagttaaccatgaagagaattggtaaaaaaatgttctgggcccagggaagaggctatgcaaaaaatcctgaaagcgacagaactgcagggcaggtttgaggaactgaaagacgagttgtggtcagagtgagatcgggatgtggcctgaagctggaagtaggtggggccaggtctgatagggctctcagtcctgaatcttgaattggacctgcattagaccactcttgaattagacttgaattattccttgaatttaattcaaggggtaatgttggcatatgtgcttttaaattaggagtaggtttttaaattcgggggaccatgccagtctagaactt

SEQ ID NO: 60960 - DNA, 2145 bp, Homo sapiens
gactggagtgcagtggtgcgatctcagttcactgcaacctctgccccccaggttcaagtgattctcatgcctcagcctccctactagctgggactacaggcatgcgccaccatgcccacctagttttgtatttttagtggaggtggtgtttaccatgttgtccaggctggtctcagaactcctggcctaaagtgatccacccacctctgcctcccaaagtgctaggattacaggtgtgagctaccatgcccagccaaaagctgaaattttaaaggtcatgacagtcttttacagtgcttcctatttgctagagatggggaatcattagagaattcacagtatctggtttgtggtgactcttgttcaggaccagagaggctggtctacagcaaaaattgaaggtagccattgcttgcttaaacatattgaatgactccccattgtccttggatccaggtgaaccttctggtggtttaccaggctctgcatgattggaatgccctgcttgcttcacagccacacctcttacatgcgtttagcccagtgtgcattctctaagctctcacatcactcctttactactagcacccagaacttcagtagatttcctctggctcctcaatggtgccgctcgtccccttaaatgttcttctgtattcctcccctcttttctaccttgtcagttgaaatagactgtactgccttctccacctgaaccccttcctggtatgccctgatacttcctctttgtcagccacacaccggggtatgcacctgctactggggtatgcacctacttccgtggttccatagacaccaccccccccaccccacgtcactgacactcgactatcgagatctttcccggttcatgtgtaaatttctttgggggcagaatttgccttgttcatcacattcctcagtgcttggcatgtgagaaacacccagaaatttgttgagctggctccagaggcacgggtatgtatgtacttgtttctttctgtgatgaaggtgccaacactctctctgggaccttgtcttcatagagccactcccctgccacaacagcaaacactttctttaccatagttgatgaaacagaccagatatgtgaatggatgcattgtatactttgggggaccattgcaatcagtgtgcccttgccttctagctttgggtgatgtgggctaccttgcagcatacacctgggtgttcctgataacattttatctgaaaggggacaaagtattttcaggttctcctttctaagtgtttctgagcagggcttggaggaaaaagtagccccattggaagtgttcagatttgctgccttggttttggtgatggtggcagatcattccaggtgtttcctatgactctttaatgttgaaatgcaccactgggaaacaactctggcccattgcagggggatgcagtaatgcaaataaatactggtgacctgtagcagtgatgggggaagcatctgaaaacagggtagggggattgttgaattcttacgtctgctgtgtcttgcagagacacaagtgtcaccacagtgtatttgtgtgtgtgtgttttccttaaatcatgccttgccgaaataattgtgtttacacttcaaaatgctaatccaaactactgaactgcagtcaggctgagtaaggaataatggtaatcttttctgtcctctctgcatactttttttccttagtgggtaggtgttgctttttgttttcaatcacattgtggttgttttcaggtatattgaattgtcaaagttggcagagtaaatgttcacaggttcaatatgttcctgcttggtgatggttgcaattttcttgacagaggaactaatcctctggaaaatatttttaattgtgaggatcttggggtggtgttaacttgcagattcttcctacttctccaaggctgtcaaattttcttatcttttatggctgtgaaatgcacagctgtgaagtctattccaaccctgataccagtaaattgcaaaggtcactttgtgtaggttctctctttagggataagtattcttttaaaaaaggcttaacaatatgattgatggtcatttagaattaaccctcccctttacttattggttcctggatcagacatatggagtgcaat

SEQ ID NO: 60961 - DNA, 1055 bp, Homo sapiens
cagtgttctagattttgaccattccaataggtgtatagtaatatctctgttatgccctttttaaagccaagtccaaaggctaatagaagctcttaaccaatggtctcttctggtatgtaagcggctattctggtcaaactacccatttaatgaacgactagtttcatgggcctgtgttctcagtatctgtataatagtggtaaacatcatctgtgggagacaatcaacagtaagcagtctttcagtcgtgtccacaagcgcccagtgcacctgtgagttatagcctgccctaggccattttatttggggcttaaaagtggaatagaatattttgagtgattattcaattttccccatgaagtcagcaggggaatcaggctactgattacagatcataatttcttttttttggagtaggggaaataaacaaatgcatagtcacctttttgagtagcttttgtatgttaggccagatctgttggtttgtcctatgagtgagaatgtgattgtggattatatgattcagtgtagtgagggttattgtggggtggtggtcttagagaaggtgaggaaatgcaattgtgggcagtaattggatggcttcaaagttctcagctagttgctggcattctccgtgtataagcagggcctcaggtggttctctagggtgtgtacctcttccaggcagtttcagacctttggtatgtgtttggtttggaaatcaaggcctataataaatcactgatatttaagtgtctctctgactgtaaaattaatcctttattgtagaagttaagggaaatacagaagtacaaggtgttttgaagttataatagaaaaatatgttggtctggcatgattagaaaacctggctattttaaacatcaacagtgtaatggtttcattaaccaataaaatctgccatatagttgatgttgtatattttggattatttactctggaagtctaatatgttattttcaatttttaagacttttgtcagactctgaagctacaaatcgatattgcctttataaatgtgacgatgagagtgt

SEQ ID NO: 60962 - DNA, 1047 bp, Homo sapiens
ttgaacaacacttaagtagtttatgtcaaggttaagctgtacaatccctgacatcgctgacttaagcattacccttgctagtggcaggctaggaagtttctgataattaagtgaaggccttgttagatttttcactattttagttaatttgaagggaagatggtaccataattctggtaattgccttcctggctctttttagttctaattatgatattaacgttcatgtccttgggcactaaaggtgattgtggccttctttttccttgagcaagttcaggaagacacattgcctttttgccacaccctggggaagagccgggctctttttttcccccgacttgttttgttttttaatagactttatttttttagagcacttttatcttcacgtaacactgaacataaagtacagagatttcccacgtaacccctgccttcacacgggcacagcctcctccaccatcaacatctttcatcatagtggtccatttgttatagtcagtgaacctacgttgatacatcattatcacccaaagtctagagtttacttggtcttgtatattctatgagtttagacaaatgtataatgacatgtgtccaccattatagtattacgcagagtttttctgccctggaagtcttccacgctctgttcatctttccctccctgcaaactcctggcaaccactgattttttttactctctccttagttttgccttttccagaatgtcatatagttggaatcatacagtatgcagacttttcacttagtaaatgcatttaagtttcttccatgttccccaactcctatatcttgttttctgttcagagttaaatagtatttcattgtttggatgtatcataatttatctcttcacctcctgtagggcatcttggttgtttccaccttttggcaattatgaataaagctgctggaaatattcatatgaagggttttgtctggaaagatatcagttcatttgggtaaattccaaagagcatgattgctgaattatatggtaagagtatgtttagttttata

SEQ ID NO: 60963 - DNA, 1867 bp, Homo sapiens
aaattcaccgagaagtgtgtgtgtgttcgctgcttccacacattaatggcatgattttttttatgcaaaaagaaaagaaaagaaaaccacccacattttaatttagcatgagccaatttacagagcatggaaatcactttcatttccggattggcgcgtgtgcaattagcaatgcagtgtatatacaagaagccatgctgttaacagtttatctcaagtaatttggtgtcatttacaaaaggaagaaattcctgccatcagaagggacagaaggagatggaatgatcaaatcacagagaaacactaaaattactaaatctacaacagctcgccttatttttcttggacccaaactgtcagggtataaacactatttgtttcttttttaaaacatcgatagttttgctgtaaataataacactgtataaattctaacagaaaaatagaataaaatgttgataaggcactgcctcttagaacacaaacagaatattgcaaatgcatttaacaaataggggtctcaagtgacttcaccctagaagaggagggagggattctgggtgggggtgactcttcactgattcttgtatattagcaattataatgtttgtatatgcaaaactgctagcttgattttaaaaaaaaacaaatctttaaaatctgctgcaaatttaaataattcccaaaatgaggaattctgtagttctgtgaaaaatttttttcttcagaatactaatattttgatgcatgtgtatcaccttattttgattaaatcttttccaattttgcaaacactacagtatactgcaacacaaaagattttatctgtaaacacaaagcccttcatctaatatttgttgctattgccaatttttcaatgaaatgacctaaaaacaacaaaaaaaaataacctatacggtagttgctttagggggtggggggatgctatctgttagtgcttaaaagggggtaaatgcttgccgctttagaggtggatggtgctcataaaaggccccagtcgggggtatttaaaaaggactgaacagaaatccttagctagtagaatggcagcacgctgtaaaattattactgtattgtgtactggctataagatgtagacacctttcagtaagccaatcatttgtaaccattctagcagtgtcatattaggttaataaggctgctgtgttttaaagggcatttttatttgggttttggtgaaattctttaatttgttgattatattcacataaaatcagcattcattgacacatagctctaatgacatatgtatgaaaaaccatacactggatgacctagtcgattatttaagcataaaataaattgtgttaaactcttcacctatctgtgctctacagtctccttgtgttttctggcaaaaggtagttgtctaatcccttgtcatatgagtcctggccaatccaccccattggtcctctttgtgcctctgtggtcactgaagagataatctctaacattcatatgtgccctgcaagctcccagcttataaattctgtgcatttcatgggggagccaagaattaaagattaattgacaagtaagctttgcccacatctgttcaggccttcttgaaaagtgaagaattggagatactatagccagcatgtcaaaaagttgactggcacttctaggaaccatcaacatgcagttgcttttagcccacagagcttgtttttgttttgttttattaatttacatttattgtccattcttacaagttgggacatttcacataattaagttgctaacatctcttaaaaagcaagatttggcaacaatggacctcattcccagaaggtaacaacctgctagagccaagttgtcc

SEQ ID NO: 60964 - DNA, 1111 bp, Homo sapiens
tgcaaaaaattagccaggcatggtggtgggcgcctttaatcccagctactcaggaagctgaggcaggggaatcactggagcccgggaggtggaggttgcagtgagccaagatcatgcctttgcattccagcatgggcgacagagcaagactctgtctcaaaaaaaaaaaaaaaaaaccaaaaaacaaaacaaaaaaaaaaacaaaaacagaatttcagacacactgacctactgaatcagaatctatactcaaagactcctgtgtaatgcagattaaactttgagaagcactgttccagaacatttgactggctctcaaattatcgagttttaaaaaatttttgatgctggccccatcccgaaaacttctatataaactggtatgggatgtggcctggatattgttgttgttttaatcttcccaggtaagtctaatgtgcaaccaagtttgagaaccactggagattgcaaaacagcttttcagtgagggacagtgggaattaagcctaaaaaaggttcattgggctggaccagagagcttcagatgccaaactaaagataggagaccctttttaaagctaggcattagggtctaaaatccacaggtatgtccatttgcctataaaaaacaagtcagttctgtaccagagcatgctgctgacttgaagatgtgatgtatgcagtacatatttaactgtaaagtatcagctgccatgaaaatccaatgaattgctgtttccaagtttttttttttttttttttttttttgagactgagtctcgctatgttgtccaggctggagtgtgatggcccgatttcagctcactgcaacctccgcctcctgggttcaagcaattctcctgcctcagcctcctgagtagttgggattataggtgcctgccacctcacccggccaatttttgtatttttagtagaggctgggtttcaccatgttgtccaggctggtcttgaactcctgatctcaggtgatccgcccccctcccctgcccccggcttggcctcccaaagtgctgggattacagacgtgagccaccgtgcgtggccctgttttcgtatattttaaaatgtttcttaaaaatacagtgaaatg

SEQ ID NO: 60965 - DNA, 1023 bp, Homo sapiens
cttacatgtatgtttctgctaactcaggcagttcaaacgtatggtaagttctatccgttcattccatttcccagaggtaaccactcttcacaagcttcagattgtttttacatacatatacaaatatgtgtgtaaaatatgtaggtttcgtactattcatattgcttagtatttgctttttgtaaaatatatcgcatcaatcctatttttggacaattcaagttttaacgtatccatcaaagcaaattggtacatttcatattgtcactcttccattttattcaaaaattctaagagaaataaaagttataaaatgcagtgcttctagcaggagtccagagggaagtacagttaattttcattaataccgtcaccagaggtgaaaatgtaacaccacatgtgctataattttcctttataatggttggggggaagggaagggaggttgccagaaatgatgttgtcaacaagaccacggggacaattttgtttacttaaaaatactaagtgttttcaagaactttaaaaacctcattgaggccgggcgcggtggctcaggcctgtaatcccagcactttgggagcccgaggcgggtggatcacgaggtcaggagatcaaaaccatcctggctaacacggtgaaaccccgtctctcctaaaaaatacaaaaaattagccaggcatggtggcgggcgcctgtagtcccagctactcaggaggctgaggcaggagaatggcatgaacccgggaggcggagcttgcagtgagccaagatcgcgccactgcactccagctggggcaacagagcgagactccatctcaaaaaaaaaaaaaaaattgagattactttctcccattgaagagaggccttagagctctctcttaggtaacatttggtctctaatatagttgacagaattaaagatggataaattttttaaaaatgtattttatgactccctgctgtctttcctatctatttaatcaactcctatctaatctattcctcctattcattttggct

SEQ ID NO: 60966 - DNA, 1030 bp, Homo sapiens
aaaaatcaggtcaaaagtccgggtgcggctcctacacggatgactgcctgctgttataaggtaaaattctgctattttccacctgtttccatgcagcaacccatggcaaagagtactgagaaaattccatttggtttccttgttttcccctttaccaattcctagataattcactaaaaggaatcctgagcctgagattcttcctccattttcactttaaggttagcagagattccagggaaaaagtggaaactgaaacaatgaccaaatggccactttttctttatgtaaggggttggcctcacatgatttttttgtaggattatgctataatcacctctaggtttgttgtttgtgtttgctttaacatagatgctcttctacttttgaattcacccaagtgaaaacctttcctcaacttatgattccatgtacagataattcagattcagttttcccttttgcctcatccaacccattaatcctggaatgctaataattcttttctttcgtcaacacagattccttttacctctttctgacttcttgagcctttgcaaagcttccttccacaatacttaaatcattctaagtctcctaaatttactgtcctttactgaaaaatttaaaataataatagcaaacttagttcaagttcttactccttgtaaggatagtggctatgattttcttttaaaaccatattattcagtggggtggtttgttgaggtgaaatttcctgtaaagtcaaggctgatagtactgtttaacattttaaaatacttgtcaagtttactgttgatgaaaaagatggcctagtttattatctatacaactaacatttcataaagcattttatctaacacctgtacctcctatagcagttttatttttttttttaaacaaatactggaattcatttttccagcggatgttaactaaattctgtctctgggactattagatttgaggtaatgaattaacttcaaagataaagtaccagaattattttcatagttccaccattaaa

SEQ ID NO: 60967 - DNA, 2620 bp, Homo sapiens
tagacgagagcatagctaggcaatttggcaactgagatatgggggatgtctagaagctgtgtagcacctcctgacaccgcacccatgagagccctttacattttatttatttattttgagacagagtctcactctgtcacccaggctgaaatacagtggcacaatctcagctcactgcaacctccacctcccgggttcaagcaatcctcctgcctcaggttcctgagtagctgggattacaggcacgtgccatcacgcctggctaattttagtatttttagtagagatggggttttgccacgttggccaggctggtctcgaactcctgacctcaggtgatctcccgcctcagcctcccaaggtgctgggattacaggcatgagccactgcgcccagctacattttaaatccagtggccacacttttcacacttttctattttatgccttcagaagtaggcaaaagacacagttcttaaaactttagagtttctgcaacctatattcagtcatagtttgccattgtgaatttgcaaattttctgttgcagccctgaccagtgtagagattccattacctcatatctcaaaggagaagctggcaaatttgaagcaaatggaagccatacagaaatcactccagaagcaaagacaaaatcttactttccagaatcccaaaatgatgtaggaaaacagagtaccaaggaaactctgaaaccaaaaatacatggatctggtcatgttgaagaaccagcatcaccactagcagcatatcagaaatctctagaagaaaccagcaagcttataatagaagagactaaaccctgtgtgcctgtcagtatgaaaaagatgagtaggacttctccagcagatggcaagccaaggcttagcctccatgaagaagaggggtccagtgggtctgagcaaaaggtacgtcatctggtcatccggtagcagtcattgaaatggaaagtatcggtgctttacttctttggattgatcttgcagccgggggcccaaggttttttacgatttctaaattataaatgtgtgaaattgtagcactaatggtggaggtaaagaaagtactgagttaaacacataggtaaaaaaaaaagttccaagtaaaatgtatgccatttcgttataccttcattcatggtgcaggaaaagggaataagtatctgtttagccatttttaggagggacaagaaccagagagacgttaagtaactagtttaagacccagtattttatctgggatttaggtttcctaactcccactccgtgttcttccttatgggaggaggataatcattctgatcctttctggctccttggcataaacagtctatagcatctgacccatctaagttctgttctgtatggtctgttgtctgaaagcgtgttttaaaaattaaagagatgaaattccaagcctaaaatgaggtgagttgacagcagttagttagaaatttaaaattagaagtataatttttataatttatataagttgatgatgattgtcttaacatgtatttctaatcactttaaaacctcactgtgatagatttgcttgttctttgtacttttgtggtacaatctaatagatttttttctttgaggtttactctatttttagatattaaaagtattttaaactgaaatgatgactcatacgtggatataagaaaataaaaagcagctctgtttcctacattttttactgctttttactctcccaatttttatgtcttttcatcaattctgcaatagacagagattaatagtagcacttgcagttttcgctgagacatatccagttcactgaagacccactttagtgttttgggaggaaaaaacaagtcttttctgaaataatgagttcaagattgatttgaggtttaggaagacttttagcaaactcaatcgctcaggagctgattctcagcttatcagtaatcacatcctttcctattcccttctgcagacaatatctgactattttcaggcttgttagaagggagagtaagaggaagtttagttctagatcatctatttttttttccctgtaagtaagttgctttgatataagatttggtggtggtaatcagttgcttaaatgatatcctaaaataatctccagctcatttaataactgccttcactaaatttttattaatggttttgttttagttttaagctcttttaagtctttttcaggccttctttaactccgtcctgacaagtgtggttttgaatactgatttctgtctttgacttgacttttagtatatttaagtggtgtgagttttggataagtttccttttaaaatgatcccacaaaatatagagagaagcaataacatagtggtatttttcctgtgaatatttattctgcaaaagcctgttaaagttctaaaggcaaatttctatacaaacacatataaacaccgctgtgtgtgtacatgtgcatatgtatgggccactggaaaatcatattggccattggcataaagacggttgaaaatttagttttaaaccttgagtggaaacttagctgagtttgtcagtaatggaaaataatttaccattagaaaacattttcaggatttcttgtaa

SEQ ID NO: 60968 - DNA, 1636 bp, Homo sapiens
tgttttttcaatccttttcttaacatcgtttaaaatttttttcccagtgccactgctctaaaatctaacaaacaatcatttctttccaaagattaaatccgtttttctgtgctataatttcatgtgaaagaagaactaggttgctttgctcatatgtacagttcttaaaataagttgtaggtaattaatataaaagttgtaggtaattaatgataaaaattggtttcttgtggcttgctgtattcagtccaccacagtatgaacttcgcatgctaaatatagaaagataataagtatctcatgtaatgacaactaactttatattggtctttatataaacttaaatatataaactttatatatttagtctgcatactttggattagtgtgcatatttacttattgtatcataatttccaaaacagaaacaattgatatcttaattagtattctattttattggagtttgcactaggctttttatttcattgtgttacatttaattgaactaaaccgataaatttattgacattaatctgtaattcatcatacatttttcatgcctgatataattttagtcattccatgtgtttttgtttgatgtattctaattcattccagtcagtccaaatgtactgtcttccataggttatccttcccttcaagtggaactggaaacccccacagggttgcactacacaccacctacccctttccagcaagatgattattttagtgatatctctagcatagaatctccccttagaacccctagtagactgagtgatgggctagtgccttcccaggggaacatagagcattccgcagatggacctccagtcgtaactgcagaagacgcttccttagaagacagcaaactggaagactcagtgcctttaacagaaatgcctgaagcagtggatgtagatgagagccagttggagaatgtatgtctgagtgagtatcctcaataccttggaaatttggctgggtccccaaaagatgttaaaccagcagagcctagaaaactaggagtaagctctgagcagcaggagaaaggaaaatctggtcctgatgaggagatgatggaagagaaactcaaatctctatttgaggacattcaacttgaagaaggagtagagtctgaggagatgacagaagaaaaagtacaggctattcttaagcgtgttcagcaagcagaactggaaatgtcttcaattacaggttggcagaatgagacatcaagtggaaacctagagtcctgcgctcaagctcgaagagtaactggtgggttactagatcgactggatgacaggtatggctgtttcaaaaaaaggaaagtgaacacaggttacttgttaatagtttatcttaaatacatgctttttagtggtgacttcttctaaattaccattctagttctgggataaaacctgctttaaagaccagttcattatgctaatctggaaaggaaagtgaatttaaatttaaatttaattctcaaaactgttgaaataaaatacaagaaaatttacatacatgcccaagatttatacgttgtctttactttagaatactattcttttctactttattacttgtatgattcttttcatatagccagtaattattgttc

SEQ ID NO: 60969 - DNA, 1031 bp, Homo sapiens
tgcaccccctgcctcctgggctcaagtgatccaactcagcctcctgagtagctgggaccacaggcatgtgccaccacacctggataatttttgtgttgttgttgttgttgttgttgttgttgttgttgttgctgtgtgtatggagaccggggttttgccatgttgcccaggctggtctcaaatcctgggtgcaagcaatccacctgcctcagcctcctgaagtgctgggattataggtatgggccactgtgcccagcctaagtctaaaaatctttataagatggtctctaaaaaaaatctgattgtaagtcattacctaaggagagttaagtcacagcctgtgtatggtcactactttgctatgaagccaagtatataaaaattaattcctgaggctgtacttgagcttgactataaaattcccttttctttttgtggcaattgagcattacttttatgaaacgtgtgataaaagtagaatatgcaatcttagtaactctctttcttttctacagaactggcaagggaactgaatttttcagtggatgaaatcaatcaaatacgtgtggaaaatccaaattctttaatttctcagagcttcatgttattaaaaaaatgggttaccagagacggaaaaaatgccacaagtatgccgaaattatattattttaactttcaaaactgcataaatgtaatattttagataagccaactgttaggttcatccaagtagtgttgtaattttctgtaatctttaatatagaaaactaagtgatcatgaggtaatagcaagtcttttgaagttatacttgtttaatttagtgttaacagtctaaacttctattcttcagaagctttttggaaagcaagtagcagggaatttttcgcatctggcctgacattctctctgtgaccataaaaactgaaaacataattttagttgttaaatcatgggacacagtcatcagaaacactccgaagttaccactatggctggaggtggatgtgcagagagggaagacaggatcata

SEQ ID NO: 60970 - DNA, 1046 bp, Homo sapiens
ggaaaggattatttgcattatctatgtaaacaagaaaacaatgacagtaagtttaaattttgaattaaaaatttttaaatgtgatttttaaaatatgataaacatgtaaataaatatatttaattcacaaaagttgaattctataaaattcatgcctgtaatcccagtactgtggggaggccaaggcaggtagatcacttaatgtcaggactagcctacccaacatggtgaaaccctgtctctactaaaaatacaaaaattagccaggtgtggtggtgcatgcctgtcgtcctggctacttgggaggctgagacaggagaatcgcttgaacccgggaggcagaggctgcagtgagctgagattgcaccactgcactccagtctgggtaatagcgtgagactccatctcaataaaacaaaataaaataaaagatgatgagatttcatatcaattggacaaattggacaattctgcattgtaattttgagcttaacaggacccttaaaatcctacctcacatgaatctgagaaattttaagttttataggttaagtgtattttttaatgcatggccaaataataaatattcattatcatcacatctaaattcatcctgcataccattagcaacatacattccatacagttatctctatttaatgggagaatatgaaactagataataggaagcagtttcatctaattttttttttcctttgaatgccctcagtccccgtccacccccaccaccactaccccatttcaaaccctcctctcttcatcaacctagtctctgctctcaggtatactgctaatggttgggagctgagtggagttctgaaaagatagataggtggtctgaataatgttttgtaggcagttgagagttaacagtaatttattatgtatacatatttactaatatcaactttatattttaacattggacattgtaatctgaaaatatactggagcaaatgtttgttttgcattattatatgcctagaactgttagattattttccttaagcaaatacagtcagagt

SEQ ID NO: 60971 - DNA, 1050 bp, Homo sapiens
gtgattgcctgtggagtgacttaaccgtagtttctcattatgtcattgtcatctgtatgtgctgtcgtatatactcttctttctgccttttgatcaaactacacggtagacagctagggaagcatgctgaagatattggtgtcattcaagatgaacaaccttcttttttcttttttaatgtgctaatggatatgattctgtcaaagtaaaagcacagatgttgaaatcccatcatggtgttttcaccaacacgacacttctgtaactgtttaaactagctagctcgtcagcatgttcaatcccattacattgagcatccatgtagtctgacatttggcctgatgcaggtgaaaaacaagtgagccatgtgcaaagaagtgttcatgtaggtgactaggacacatttcagtgtacagtgttagcattagtctctctgtaaaatctgcgtactgctaaaagcaattttccagtatcgtatctttcttgatgattattttaattaagaaattgtaaatcgtaggtccacagagtccatgtgaacggacagatatcaggatggcaatagtagccgatcacctgggacttagttggacaggtaagtgcatacactcctgaatggaacaaattagtttcttcatttctttgtcttactcacaagcagttcaatatatatattttaaaaatagaaacaagcagctagtaaaaaacatttttatcaccaataattttatctacccagagataaatactgattgtaccttgtatactgtgtttttccaaagccttttctatgcatatgcactaagaaatagaaatttaaatttattttaccttaaatttaagcattttcttcacaatgtcacttctgtaatataggttaaccttctactgaatagcaaatttatcttgtagcacaaaagaaaacacagctaaggcctatgacttaattaatcaaaattctttcacatggtttatgtccttagggcagttttctaggcaacagttcaattaacccacgcctaggctgcacaaattttagtcattcactgt

SEQ ID NO: 60972 - DNA, 1071 bp, Homo sapiens
ttacaatggcatcttctctctcatcacctgtgaagcagatgcctggacatgcagaggtagcattagtcaatggatctatttcccctctaaaatatccatcatcctcaactttaattaatggatgcaaagccactgccacgttacaggaaaaaatttcttctgctacaaactctgtgagctctgtggtcagtgcagccactgacacagttgagaaagtgttttctaccacgactgcaatgccattttccccactcaggtcatatgtttctgcagcaccatcagcttttcagtctctaagaactccttccgcaagtgcactctatacatcccttgggtcgtcaatatctgcaactacctcatctgtaacttcatcaattataacagtgccagtatactctgtagtcaatgttttgccagaaccagcattaaagaaacttccagactctaattcatttacaaaatcagcagcagccttgctgtcacccattaaaacattgactacggagacacatcctcagcctcacttcagtcgaacttcatctccagttaagtcatctttgttccttgcaccctctgcccttaagttgtctacaccatcttctttatcttccagtcaggagatactaaaagatgtagctgaaatgaaagaggacctaatgcggatgaccgcaatactacagacagatgtgcctgaggagaagccattccaacctgaactcccaaaggaagggagaatagatgatgaagaacctttcaaaattgtagagaaagtaaaggaagacttagtgaaagttagtgaaatccttaaaaaggatgtatgtgtagataataaaggatcacccaaatcaccaaagagtgacaaaggacactctcctgaagatgactggatagaatttagttcggaagaaatccgggaagccagacaacaagctgctgcgagccagtctccatctctgccagagagagtgcaagtaaaagcaaaagccgcctccgaaaaggattataacttgaccaaagttattgattacctaacaaatgatattgggagtagttcactgacaaacttaaaat

SEQ ID NO: 60973 - DNA, 1052 bp, Homo sapiens
gtttttgaatcccacacatcaatagtaataaatagaatcaagtagccttaggatgcagtaatagtacctctggccaggcgtggtggctcacgcctgtaatcctagcactttgggaggccgaggcggggatggggtgggggaatcacctgaggtcaggagttcgacaccagcctagccaacatggcaaaaccctgtctctactaaaaatacaaaaattagctggacgtggtgctgcatgcctgtaatcccatctactcaggaggctgaggcagaattgcttgatcccaggaggcagaggttgcagtgaggcgggatctcaccactgtactccagcctgggctacaagagcaagactccgtccctaccctcctctgcccgccccaccaaaaaaaaagtacttctaacaaaaccattcatctgttttcaatctcctcatctacactttatgcctgttaacatacagaatccccagcagtaattggaataataaactttgtgtgcctttctcccttgaatgtactcacatagagtgagtgtactttgtgatatatgtgctttcaatatgaacagttccaggaaaatttaatgctcagcatcagaagtctctgtaatgcttgtcttttacttgtacttccctgtagtctgctgtgttggtgctcttaaatttgccaaatgatgattttggttaagacatggggggtggggttacaaaatcccagtgggaaattaacatttcctaagaaggaaaataaacaagttatcaacatgccatcctacaaaatgtcttaaaactgaagatgtcacagggaagttggaaatagagttgtctttttttttttccttttcagattgagaaaacagatagacgacagagcttcgcatccttagctttacgtaagcgctacagctacttgactgagcctggaatgagtgagtttcctaacacatttactaatctacgtggattttcataagaagagacattttttctatacaaaccaaattttatcatttggaaactcaatggcaaaagaaaaattgcctgcaggaaa

SEQ ID NO: 60974 - DNA, 1091 bp, Homo sapiens
caaacaatttagagtaatacaatgtgttatttctggttaatgttcagtaatcaaataatggatgaaatgcaaatacagtattcaagtttcattttcatttctggtggagcccagggacgttctagagggatcaccttctctctccaagaacagaaggagagaggaaaattgttttgtcattattatttgctgttactgttgcaaaagctggagctttcagaaaaaaaaactgttagaaggaaaatgcacataactcagactgtactatgaattgtcaggattagatcatcagacacaacaatcctgcgtttaggaatcgggcatctaactcttgctgagttcagatgtgaccaccccggttgctgcataatcgtaatcatcatcttttccctttacctttcctgcctctcatagggcttgataaaacaaccatgcttaactcttatacagttaaaaatcctcagataagtctcattctataaccatcaactaccaaaattcttctagattagagacaccagccaagagccctgtggtcgtctgtcttttctgaaagaaccaaagacaacaaaaggactgcctcaaacagcggtttgcaacttaaatatcactctgccagcacataaaaaggtatcttttaatactgctttaaattgtctttccctggtcttgaagaagtgggcctttggtatgcaattaaggaatgctttgtaacatgaataaagctcttgaaactgaagttgtattagtctcctcgtgtagattgcctaagtcttgttaatgtggtgtcaaattcttatagtttgtatgatggagtcttctctgtttatcgcttttgcttctgctggtagcgcatagatttttatgcttttaaataacgtcatatgttaatttgccatggatgtacagttcttgatattttttgttggctttttttaaaatttgctttgctttctaaatcagcttgcatttgtgctccctactcagtccttttcatatcctgatattcttttccctgctgtccattataatattccttgtctctgcaatgcatcttggaaccaaaaggagacagagtcagatcaagatga

SEQ ID NO: 60975 - DNA, 1107 bp, Homo sapiens
acattttacttgtccatcacctcatctctggtttcccaaggatcatttcttgggaagatcctggtcaagatcctggtctcatgactcatttaaaatttagtgatagcatctttcctgctattaaggttagcattagtagaagtatcattgaatctactggagcatctaggtaatttctagattcaatctaggtaatttcttggtgacctagacagaggtaatggacttagcaacatactttaaactacaaggaaattgggtggactttgggaaaaatacatgtcccacagagcactagtaataggaaattgttcagtacatggttattctcacctactgtactcgccagtgtaatccgagagtttaaacattcagggctcagaagaacacattttgtgataagcacctggaatctagagctcaattcatcctttgattatcctagtccgatttttaactgcaattccaagattattaaagatagattttgtttttgatcttcttttgttctctgaggagtaattttaatggctgatgcccctttttaccctcggtaattaattgtacagaatgccatgtacagaatgagctgtttcttaactttggtagttcttacctttttaaagagtaagaggctgggcgcggtggctcacgcctgtaatcccagcactttgggaagccaaggcggtggatcacctgaggtcaggagttcgagaccagcctggccaacatgatgaaaccccgtctctactaaaaatacaaaacttagctgggcgtggtcgcaggcacctgtaatcccagctactggggaggctgaggcaggagaatcgcttgaacccaggaggcggaggttgcagtgagccgagatcgcaccattgcactccagtcttggcaacaagagcgagactccgtctcaaaaaaaaaaaaaaaaaaaaaagagtaagagacttaattatccatctgaaacaaccaatctttgcacttacaaattgcatttataaaatatacttataaattgtggctgccccaagtttaagccattcattagtacccagacaaaaaacaaggaatttttttttaatttaatatcatcttacaaggaaatca

SEQ ID NO: 60976 - DNA, 1792 bp, Homo sapiens
cttaatcttgaaattattaatactgctaagaacacttgattttgtttctacctattgaagaataaaggcattataaaaattattttttaatctttaatttgaatgaattatgattttgctaaaagcaaaatgaccatatttatcatccccgtttgaagcaaatgcttttctaataaatcgatattcatgtttttatttatattatttgatcattacaactactatccctttttctgctcttacttacttaagcctgtatcttctgttatcacatatacctaaacacataggttaagaaatggggttccatacaacctctgtaggagaataatgatactgtctacttaaatgtcataaaataaagctgcacaatccaactacataaactgtgtgtgattgtggtctgcttacttccattcatctcttttagtatttatcctattttaaaatttaacaaaattatttcccgtggcttgattggctatgttcaatttgcagccattcttttacattcctttgcaaaaggacactgtcaaaaattactgtgtcattatgtgacaatttcaaaccaacaagtacttttacagaaagtgtaagtattcctatgcaggttatattagagccaggaatggaagctacctactaccatttcacaaattgaaaaacacaggaattgtcttaactgtacaggccatgaaaagcatggaatctgcctgttggaggagtcgttaacatattgattgttttcttgctaaggagaaaatatagcaatcatctttcaaactaggaactttatagaatttttttttaaagaaatgactgtgtccttttaaatcattagcatttgtataatatacctattgtgtcttttaaaaatggaccaactttcttatggtctactttaataagtttccattctgattcaaaattcctatttatatgtactgaaaaatttcccccattaaatcctatgcctaacatatggtagtcctccaagaactgtttgtgaatgaatgaatgatggcatgttttcaggcttcgaaaatattctttaattagcaaatgattctgcagctttgaaatcattcccaaccttagtggcacctctgattttcaaatgaatactgttaacgaaacattttttaagtatgatactataaatatatttaatttgataccaaaataatgtggattttttttccagccctgtcatagtggaaatccctcactttgggtccatgagaggaaaagagagagaactcattgttcttcgaagtgaaaatggtgaaacttggaaggagcatcagtttgacagcaaaaatgaagatttaaccgagttacttaatggcatggatgaaggtaataatgatggctccttggttctgtaaatgtctgcaggcagaaattaaaggaatgactagattacatgaaacaggacctgaatttcacacatttgtattttaagctaggacccaagttcttcagcttttgttgctgttttctatatcataatgctgaagttccatttaatctaacaaactttattctccgtaatatagaagtataagtattttgatgattccatctttaatcacatacatcaatctttccaataccaaagaaagttttctaagtcaaaaatgagcaagaagagggtgaaataataatggaaagtatgcaaggcatgctgagcattttgaagaaaatatgttcacattttatttttggaattatttctggactctttcagctttttcaagtttctcccagataatttcagtatccttcataa

SEQ ID NO: 60977 - DNA, 1064 bp, Homo sapiens
tctgtgtattttcatacgtggaaactagaatacagggatatatttgtgttcccctgtctgaccttaactcttccacacattgaactcattgatttatgtttacttataactctgtgataacgataactgtgttataactctgtgatgatgatagtgggaccatgcatatgtgatagaagacagtgattccaatatgcttctacccaaaaataacagttaatttctttatagttctatacctattaatacatgcagacagttttttccttattagctttaataaaaggccaatgacagaattatgttatttagagccattttctaaaagtctaagttccacttttttaatcattgtataaaatattcaaatgtaggttatttcagacagcttttaagcccatatttatactgaaaacatttaatctctttccatcaaaatcaccgtagcaaatctagtcatctcctgcttttattcttatattctgcttcatcatagtaaaaattagtgttggtatgattaaaaatacatttattttatgagtcgtaaatatcaagacatactgtggagtttcatcttacttgtaagagaccatatggcagcatatggcaaaaaccacttatagttaaaatgacctttgaatataaagaccacagtttttttgttttaaatgcatgagaatcctgttactagaccgattttactccagttttgaaaccttccttattccttccatttgagcctggtaaagtagttggcttttctatgggggccatgttccaccaaaaacaagttgtgtttcagtttttgcaaagtgcacaagttaaatgcatgtttgatgtgactccactgtattgacttctgatttatctttagaggaaatgatagctacattgtctgtcgctttaaataaacttaaacatttaatttccaaacttgctgtgagcacagtttatttccgtccttgaattggcctctgatcttctcccctcaggtttctggttagctttatggtggacgcgagagggggctccatgagaggaagccgtcatcacgggatgagaat

SEQ ID NO: 60978 - DNA, 1029 bp, Homo sapiens
aaataatgtgcattttcagttgaataatccttgacatcacttccaaaatgaaaagtaatgtgcttattcatattatctttgacatgggaataaaaattattaaaaattccgtgtgaatttttctttaacatagtgttctattaaagccacccagtgctaggtgttgacttcgtattgcctagtttttgaagtctttctaaacctcattttcctcatctgtcaaatggctccattactctcagggctaataggttctgacaactcaaacaaaaaatgaatgtatgggcctaggtcagtccttaccattgaactgatgcacagtaagttgtggtagtgctgttaacaaaggaatgtaaatattttgagtcaataataagacctaggcattgataagatgcattcttgaatggcctccattggtttgataaaagcatcctatgtgtattactataatgccccagtgctgggactggaatatttttatttttgctgttttccaccataaatgatcagattgtgacaaatgagctaatataagtgaaagtcttttgaaaagtatagaaggctttacacatataaggagacattatgataattccatgccaacaccagcactgcattggtgccagactttgacgtatatgttttcttttatctccatatcaaccatccccagtttgaaaatgcagaaactaagactgaaaaaagttgagtaatctgctaatgatcacaaaaccagcaggtgatgctggggcatctctgaaggagctttcaataagtaaagataaggaaaggtcaatgacaaaatatctcctttattcctgatggaggccaggcgaggactggcttagtgtctgagccacgtgggcctgctaactgaatccctgagataggcacactcccctacccaatgactgtggtgctggcccaggccaggcacactctttgcagaagtaggctttggagagaagaggagactgctcactctctgtgcccatagattgaaaactggatctgagcagaaccttc

SEQ ID NO: 60979 - DNA, 1067 bp, Homo sapiens
tgattataggtgcatgtattagtctgttctcacactgctaataaagacatactagagactgggtaatttataaagaaaagaggtttaattgactcacagttccacatggctggggaggcctcacaattattgtggaagagaaagagacatcttacatggtggcaggcaagaagagaatttgtgcagggtaactcccccttataaaaccatcagatcttgtgagacttattcagtatcacgagaacagcacgggaaatacctgcccctatgattcaattacctcccaccaggtccctcccacaacaggtgagaattgtgggagctacaattcaagatgagatttggatggggacacagccaaaccatttcagtgcaatagcatgtcatgggttttaaatgggtattagcactagagaaagcacttgtctcaaataatgaaactaagtcttgggtataaggtgttgccaggaattggttgaaattttctgcttggttggctgtggtcattatttcagtctgtaatcctgctcttttcatattcccaattgaaatgagatggcagtggagatattgataccacttgtaagtataaaaatgcctgttattctctacactctaaggagaccccacaaaacgtaaaatcacaggtgaaaggagactccccaggtatcaatgacactttgctaatgtagaaagcatgtgccagggaatttctgatcaaacctaattgtggcttatatttctgcatattaacttgctatgggtcaagggcccgaaattggaaccaccaccaccatcaccatgaccttaccatcatcactgtcacctccaccactgctaccaccaccactattaccaccatagttactctaccacccaccttctgcacatcaacattgaagtaaaatgcaagtgtttgtggtgctataaaatggcttctgagggttctcacaccattgcctattaaccattaccaagacctacttactcaggtagactgtgggggcagcatttactcagaactaaggatttgtgaacagaaatagaagacaaagagaagttttgag

SEQ ID NO: 60980 - DNA, 1050 bp, Homo sapiens
ctgacagggaccataaataactgaggctcccagtgttcccagctgagaacaaagttgaaagtttgcctggagctccatgccactccccgcctgggccactgctttgttttcttctaatgtttttcctctacctgggttggctgtttcttcattcatatttgagaagaatcacctcctaattaaatgtagcacttcgctctctccctacatgaaggctgtcttggttacccgactaggcaacgcgcattggtatcaaattaccgaaagtctacaccggagcagtcctcatatttacatacaaataactcaggggcttgcatttatgtcaccattctgtcctgctagaggcttgccagaggagtttttaatccaatcagaaggagctttaaaaggatgtctgcgaagtggtcaaaaggatcttaacctcaattaagtggggttttttaaaaagatttttttgggggcctgaaattttgaaaatcttcgaactctgagtggggaaagatgtataattcctcaattgcctacgaggatatcaagatgctgagaggaattcagcggtggtgaagagagtggatacaaaccagggattggtttccttgagctgttttggaggttgattctaaatcactgcttaaggaattcctggaaacatcaggaaaacatttgatcatccaagcctagtggaaatggctttaccgcagagtaagatctttgagttgtacttggtgtgtgctgtttttgtttgagatgcagtgaatgtgcaaatagcccagccgtaaatagttacttaaaataatctcttggtactgggtagcagcagtagaaagttgatctgtttagtttttacatttgcaaaaacagtagttgacagtgtatttttagacttgattggtagtttaaaagctgagctcttgcggtttcctgagtttaaatgaatggaaaatgtaaacagtaccgaatgcaggaattggaaaatatatctgggggaatgaatcacttacctttgagaaaacacaacatgtacacttttgcaatctcttggccagt

SEQ ID NO: 60981 - DNA, 1047 bp, Homo sapiens
tgaggccttctctaatggcatttgccactgtgctcctgggctttgtgtatgcacatcatttaatgcactacagagctaactctaatttattagtgatacattaggcaaccagagtgtgacctctttggtttacctttggaccttgtcatttctcatttttgttttggttacctattacaaaattacagcctccccgaaactcagtgatttaaggtcttattatctaccttggttctgtgagttaatcggggctcagctgagtcttgggatcttttatgagattgcagtcagcagctgaggtggaggaacatgaccagatgtccaagatggtgtcttcattcaaaggtctgacacctcagctaggatggcagcgacagctgagcgttggctgggcatttctctttctctctctctctctctttgactctctttttgtctctctctttccctggttctaagcagcctctccatatggctaccttgagcttctttataacatggtgctatcatcatagtcagatctcttacattgggactggcttcccccaaaccactgtttcaagagacttgaggagtctgcaaggtttctttgaacacaaactcattcattcaaaatcactttgccaaattttactgttcaaaatttcagccaacccagattcaatttaggggtactatgcaagggcatgaatagaaggaaacatagttcattggaggtaagggtgaggcgggcattttaaagatgagctaccaaaatcctctttgcctaaaaatagtcaaattcctctataacacagctcttatttcactgcaccaaataactttagaaaacataaacctacacagctcctttttagtaagtgaaaatatgtgatcttggtaacatttttaagctaaatatatctgatataaaatgcatgtcatctgttaataaattaccttggttggcttatacacacgtgttagaagctgccactagccaaaatgtgtttggattatatagtggattagagaaagttaacaaatcacacaatacaattcatctca

SEQ ID NO: 60982 - DNA, 1137 bp, Homo sapiens
cggaggttgcagtgagccgagatcgtaccactgcacaccagcctgggcgacagagcgagacttcgtctcaaataacaacaaaacaaaataaggggtatgggaatccttggtgacctcagcagctgccatgccatatggaatatcctggatatagacagaagataagagttctagtgtaggtagggaaggtcacagcgagtatatttttttcctccaagaagctatgatagagtgagcagctagagcagcctgtgaaatatttaacagacgccaaggaattgtgtgcttgtttaactgcaaacaacaggctgttgtggttttttttatttgccccaaacaaattgtaattttgaatattttttccccctaaatcaggtctgtcccttccatctacctgaaaagtctgacctgcttcctgtggaaggttgtcctaatgtaaccaccctgtagccctctcattagctcagagaacacaacagtgagaatgaatgagcaaggggaagacaaggtggtgcacagggagctaggagcaagaggagtgagaggagcccaggaaagatgtcccaatggggaggggtgagtcagaaccccagtgagaatgagaactgaggacaggcctcatgtgtctttgccttgtgtgtacacatctctggggtataggttggaagtacaaaacaaaccaataaatggatgtttattgccaggcacaatgataggcaatttgggtgtaagggaaagaaaaggccaaaatcgctgtttatacacgagcctggtacttctttatacctgggaacagtgattaacgtgttcctgtattgtactcatggtccttgtgtgcctaggcaatgaagaggtgagaataatgcagtctggatttggggttgaggctagacaaatagctaaggaagaatgaataggacaaatcagctgtcatgatactgccaccttgaatttagctacctagtttctctgcaagtgagaaccaacatttttgtgcctgattttccagggctagtttgtggctagcaattagttcattgtctagtcttcttcacaagtggcttagattttagataatgagaacagtataagtaatcttttacttctttctacctgcattctgtctttagacttcag

SEQ ID NO: 60983 - DNA, 1335 bp, Homo sapiens
ccttctacacacacacatatggataaggaaggtttattagtaaaggggaaaacaaccttcaagttatttatcaattttttcaaagatctacattaaaagtatgaaataaattctttttcttttttaataggtatgacataagtctttcatagtaacagaatttgctttaggaaaacgatgattatatgtttatatatttaccatatagaatctgtaacataatggtgaatgtcctgatgtcttctaatccgatcattaaactgatttagatgggtggatggatgacaggcaggcaggctcacagacaaaccttttttatgctaagccaacaaaccaccattttcttcttttccccttagtcgggccttaccccaatccatgttgctgccttcatggggcatgtaaatattgtatcacaactaatgcatcatggagcctcaccaaacaccaccaatgtggtaagtattctttgaacaaaggaggtccattgtgagtatttaataaactggcaaaggtggtttttatctactttttttattttttatttttttaagagttggagtatcgctctgtctcccagactggaatacagtggtgcaatcatagctcactgcagccttgaatcctggactcaagtgctcctcccatctcagcctcccaactaactgggactacaggaatgtgctatcatgcctggctaatttttaaatgttttgtagagacgggggcctcactattttgcccaggctggtcttgaactcctggcttcaagcaatcctcctgcgctggcctcctaaattgttgggcttataggcatgagccaccatgcccggccttattgttattataattaattaatatgtaattaatatgactacttaaaagaagaaagttcaagaatacatttgtttcctttacttcaaaggcaagatacactcggtctctagttggccacaaattgttaggacttacgaactacgttcattaaccttacaggtgcattactactggatattatgttttaaaaaataaagtgtggccgggcacggtggctcacgcttgtaatcccagcactttgggaggctgaggcaggccggtcacatgaggttgggagttcgagaccagcctgaccaacatggagaatcccccgtctctactaaaaaatacaaaattagccaggcatggtggcgcatgcctgtaatcctagcaacttgggaggctgaggcaggagaattgcctgaacctgggaggcggaggttgcggtgagctgagattgagccattgcactccagcctggccaataagagtgaaactccatctcaaaaaaaataataa

SEQ ID NO: 60984 - DNA, 1082 bp, Homo sapiens
cccaaagtgctgggatttacaggcatgacccactgcacctagccctactgtagacttttaaacacagactgtgacttgctcattatttgatccccaaaacctggaatataatatgtattcaataaatatttgttaagattttaagcaaaacttcatctttgaagggtacagcctctcataatcatggccttctagttaccagttagtcctaacaagagactattttaaaatatttaaatatttttaaaaatgtttgaaaggaacatgctctaattaactttccattttagtgaccagaatcaggctgtcattttccatgtagaagtttcccagaacagaggatttgtatctgtagttgtgtttatgcaacaatgacaagttgtccttaaggaattctcatgctatctttttggcagcatcacttgcaatggaatttgttgcttatttgtcacatgtcatttctaaggaccttaagtggacatcctatggacagtgtcatccactggggaagtgtattagtgttcaagtatttcgactgtgtggacatagccacttggaaagactctaggagaactaaagcaaggtagcagaaaagcaatgaataggtactgattagagtgatcctgatctgtactttgcaaaaatagtagcactatatttatttagactttgcttcctgctcagtcttgccttttgcttaaatgttctcttcggaggtgttaggcctttgtatcatgaggtcaatcaagaacccctgggtgtccctgagacccttctagagtaccctgaagactggtatccttgacctacttcaaccaaaacaatacgtacattaaagagatttgcagactcgtaaaacaataccattcatctcatcttttttatttgttttggaaaataccgttatgtttcataagataaatattttaagttagcatgtaacaagattgccattgttaatttaaaataaattaatgattaatttttaaattgtcagctttattttctaatgtggtaaataacaatagttataatcctcataatcaaaagctctttggggttcctcaataatagttaggagt

SEQ ID NO: 60985 - DNA, 1052 bp, Homo sapiens
gataattgcattttcatgaatgatcattaatacttcctgctgcttctgttcggcttgtggtttttacagtattgtttagagattttctgtatggaagaactagaactagttttgacataaatgattgatgaaaagttaactttaaagtttaactcttcaataatgctcatgaaaaaaacctagactctaatattgaacaaagcccaaatgtaatccaattttagtgtgcattttagaggtagctaataataagatcattcaacagcaactgatgtgcattaattttaaatcctgtgaagttaccctataatgccaaatagaaaatctttgaatttggatgtttcctatgttatatatatatttttcaatgattgatccagtaataaatacatatttaactgttggaggaatccctcattttattgttgattttcacttaagaaaattgggggcaagtaggatattttatatagtcaaactcaaaaaaagaaatcacaaaacttgtcttttgctgctgagactattatagtgtttgttttgaaatggaaacttttagttatgtagtaaatataatatttacttaccaactaaatttgttctgtgtgacaatataaagatgctacctcaggtcggttataaatttggatgataatcaaatttaagttatctgtaagaccaaaaagaatttacaatataatgagatatcttttcgaagtcattctctttataatgttaagacatttttagtcgcaaagtaaatacgtttgccaattctatcctaatgcaaatgtttattttttaaatgttttatcatgatcctcagaatatattgcaaaacctagtaataaaaattaaactgtgtcttctaattggactgttgataaatatataattagataatataacataaatttcagtgtatttcagggaaatattcatagttactaataatcactcgttaagcataagactctgtaaggaatttaattcttttattttaggagtctctttttacttttgtaagtaagatttttgtaagaatatctttgtag

SEQ ID NO: 60986 - DNA, 1077 bp, Homo sapiens
gtagctgtgtaattttggacaagtgtctccacctctctatgctttgtttgcctcattggtaaattgggcataataatagaatctgctaggtagggttgttacaggattagatgaattaaaaatttacaaatcaattatactattacctcaagaaacaataataaatgatgatatggatgatgtcctgccatacctgcccatttttaaggttagtttttaagtcaagaccgatgagctcattaaaattctgatcactccatctgtagttgctcaaaatcctaagttccaaaattgccttcattgcctgtgtttatatagtttgatgtcttgccctggtttgctattctgcagctgtttgtaaaggctgcaatttaggtgggccaacctgccacattcaccctgccaaacagcaggaatggtccaggcctgacttctcatttgcagaagagaaaattttatagatggtctagaaaagaacaacctcctggttaaagcctaccagaaaaaaattccctctactatgcagagatcatgtgtttacagttttttttttaatgtcccacagtagctttattcctttgagaaaacaaaaactttttttctagctgcttggagattgaatgtgaagtagagcttgtctttaagattcttattagtaaccctcgcttcccttactagccacaacctcattcttgttcttgagcatccaggagtctctactgcaaactcgggaagcattccataccgtggattgtaatcattttttctatttccttaacccccagacatacacacgcatgcacatttttcttaaaatccattttctcaacatggtgtaagttgaaatagaggacctagccccagtgtcaagtgtctccttgaaactagcctaatagtgggaatataaatataaggtcgtataaagccagtacagtgtttcaaacctcttaaaacctgatgaaagtgatagactccaccttccactccagatatacgttaacacccagtaggcacataattgtttgaggttcatgaatctcctgaatttgtcccatggagtccagtttaataataaaa

SEQ ID NO: 60987 - DNA, 1111 bp, Homo sapiens
tacctcccactgatagtcactttttaagctctgttttcaatgttgtatattctaatgaaatcttgttcttggtaaaatatcatagccatatattttgatctaacattttttaagagttttgaagttgtgtacctagtgccaataacaaatatgaaagatattttcaggagggtggtggcaacatttttaagaggagtgttctttataatggcccgtgtgcgtgggaataccttggggatgcagaacgcttttttatacctctttgctgtgcgtctttgtagtgttcctcaaacagagctgttgtctgtattgctcacatctcctgtgaaatctaggcactcccatagcatctttggcatcgggataatctggattagtaactatattattgttttattcttcagttttctacagctataaaagtaccttttcagatcacatttgtcttagcatccaagaaatgtggaatacagaattaagaattaatatggaatatgaaattaggaacattaactaatgtggaatatgcttaagatatagacatgatattagatggcctgaaattagttcacaggtgattttcagtgttctcttttcatttgttacctgttggattttggatgttggaagcaagtgatttaggtgaaaatggcaatggcgggcaggcaaggcctgcttctatgagctggtttagtactaggctgttattagatctgcctctcccttttccccttcacatgttcaaaaaggagtaagcatgctagaaaaatataggcccaggtccatggatgtgcagaactggcacttgccgtagcaagggttctcaaaatgtggtctctggattaactacatcagcatcacttggggacttgttggaactatagattctccagccccgcatcagccagactgaaccaggaatgctcgggtgggtccagcagtgtttccacaagccctccaggtgactgtcatgtatgctggagttcaacacgactcttacaagaacagaaacttcacccacaactgtattctcgctgtcatcacctctctttatgactgcttaatacataaaatccaatttcaaactttagagaaaggtacctctagatct

SEQ ID NO: 60988 - DNA, 1049 bp, Homo sapiens
ttatttgagacggagtcttgctgtgtcacccaggctggatggagtacagtggcgtgatcacagctcactgcacccctccgcctcctgggctcaagcaattctcatgcctcagactcctgagtagctggacttgcaagcacctcaccatgcctgactaatttttggtatttttagaagagacacggtttcaccatgtttgccagactggtctcgaactcccaacttcaggtgtctgcctgtgtcagcctcctgaagagctgggattatcagcatgagccactgcgtgctggccttgctatttattttaatacagaattcaaatgaacatgagaataaatttccattgtgcacttatacttttatagtggtattttttttttcattctaaatgcatttcttggtctttttaatgcattgttatctgaggtacttgttttataatccttattagaaagaaattttaaaagtaacagggaggtgtacctttacattctgggttcttgctgaactgttctctgagaccccgatggcctaagcagtgatcctctgcccatctgtggctgcccagtccccattaaattccctgtgacttgtcttgattgtttcagagtctgaattgtaggtagctgcacttctacctgagcctgtcatacagtttcccaataaagttcaaaatagaacttaacacctttacatggtccggtagtttgtgttttaataaaagaagctggactaaaaaatgcaaatgagtagtcttttatttttcttcttcaaataaggaacttccccaatgctcctgccctgggatggagcagtctgtgatagcactgaagtgaataattctagacttggcagttctatgtcaaagcaagtctcataaacacagcagatgtacgttctgggtgactgccattagcgtgcatctgaggggttattgactggttatgggcagatttgggggtagaagatagtgaaggaaggggaaccaggactttaccccttgttgttttattttctgagtgattgcccccaaagaaaaactttcccag

SEQ ID NO: 60989 - DNA, 1055 bp, Homo sapiens
tccttgcataaaaagagtgtatttagcaagtttccagcttcccctcctaaagtacaggttcttaaatgtcattgagggattgtagtcaagaatgacgtggaagaactgagaaaaagagggaatatttttaacaacttttgcaccttataagcactcgaaattatttgctgaattgatacagtgaatgaagttttactaagagactgtcattcccaaacaaccatttaagtcccacagttagctctttgcaaactttccacagccctcagggaattaaatctgtcattttgagaaatactcctgaagactcatatgttaaatacatttttctattcattaacaatagtactaattagcttatctcagtagctaaatgattgctgaggcaggtattaaagcttaagaaccctatgtacagacagaggaagtatcaaatgattcctttaataaatgaactttattttgcacattcaaacataaatgttgaaaaaggaaaaaaaaagactgcttgggttgaatgaagaaatcttcattatatagtttatgtattgtgattatgtagaaggaacaaaatattacttatacaagataagattcattaccaaccaatttatcccccaatctaggcagtgtccatgatagaggcattgttacagttttgggacagtcggggactgggagaggaatgaataatctgaccaatgtagacttatctgttgtacctggtttctgaacctaaggtggcccagtggctgtcttcctttatcggcggattcccttctccctgcgatctgattgctacttgcaagagcctctaaaattttcaatcacatatagctagttaaccttcacctgaccaaactggcccacttccataactgccacttagaattatcagtgtattcaaacgctcccacttgtcttaaacaaaacagaagaagtgagtctgaaacctggacatctttccttagacattttcatcatagaccctctgtgatttttttattgcaggaaggtctacccagtgatacatccaacagcaaaagtatatgaag

SEQ ID NO: 60990 - DNA, 1193 bp, Homo sapiens
attatccccatcttacagacaaggagactgaggctgagccttgaagctagttgcccaaattttcaccctagtcagacagtggtagagctaagattccaatttggacagtctaactctctagcttgtgctcttaactactgtgccatacaaggtatgtagtatatggcattaatattttcacagctacacatcaaagtgggcttgtttcagaaaatcttctaagtaataagctattttctagacatgtgaaactttaaacgacaggctttatgtctctaattcagtattgtagtgtctgtttttcttaccctctgcagtaaattttaatgttttttcttaagattcttttttaaaattttttggaagttagaaatgaaaattaccaacacaaggatttcaaatcctcagacacattgtgtaatgacaacataacagtgtgttagatgcctgttgtatgtcagcaatgtgcagaggattcccatgggttattcttttttcttccctatgactttcctatgaggcaggcattattttcatctccatttttgtaggtaaaactaaggcttaaaaataccttgtctgaggtcatatagctagtgattggtggacctaggcttgaacttgggtcaaaggactttgggttctgtatttaaccactgggtttattgtaatgagatgctagcagtctcttttaaggtcagccacaatataagggtttgagaacagattttttaaagacatgaactatactgttatttcttgctattgaagctcagtgcttcctgatgttttacaggctttccccattcctaattacctgggtatctctgacaccctaagatgccaggcaagagtaaggttttgtactgcagcagctggacttttatggtagaagattgtgtagatctttatgagatcaaggaaacttgctctgttccctgctgcattgagtatatggactccaggtctccagggagcatggtcaattagcatacttgatattctgtaccataattatgtgtttacatgtctgtcttaccaagagactatgagctccttgaggctggagatggtgtaattatctactacaaccaaactggggcttgctgggtggtgaatgagtgtatgagaggcagtatcatgtaatgattaagagtgtgaactatagagtaaggttgtctgagttcagattc

SEQ ID NO: 60991 - DNA, 1914 bp, Homo sapiens
caaagcatgggcattgatgattccttactgatattccaaggcagggggaaaataggaggaatattctgggtcagtggtgatttattatagcccgtgagtacttagagtgcccttaaatatgactcctaggtactgagctgggagtaagaccccaaagcacttttcctccatgataattaataaaaattgactaaaactctgtgatctgaataggaaaggcaggtcataaagcatttttatgtgtctttgtgaaaattcccaaaggaaagatatccttaatttgagcagtaaggcatgtgctttctaaatgacatgcagattgcatctcccacatgtacccctcttcaggagtgaccatgaatattcctggtacctttgccattttcttcagagttaggatctatagaagactctctgccttttgttgcatagctgactttgagattgaagctggagagctgcagttgtttcactgcaagatgttaaatatagatagttcctactttgatattcttgtaaataaacttcttgaatatattttcataaaaatacaaacttgggttaagaaattgtgtgcaggcgtatttcaaagccttgcacagcacagttgttatgaaattgccatactttgctagattctggtctaattttattgtgtgaggtttctctgtgggtaggtcactaccacttgccccctgtccatacatctctgcctacccccaccgtgataaactagcttctaagaaagatggaaaaggtacatatatttgtatgaagatatggtgtcatattaatattgacactatattttagggttgttaggctagctaggtttatgtacagcagttttcggtagcagtgatgacagatctgttacctttgtgcctgggtccctgtttgacttggaagcaaaatagggaaggggtgaggcagagggagtttctggactcaatgagctgtagcaaatgctttgtggaccaaagtgctttgttaccagtacaacagagtctgtccaatgtaaatctcttagcaaccagaagggaacaaggagaaatatcaatatcgctattgtaaatgtgcaagtggatttaaatgttttgttctcaggacactcacagagtagatcctaaaactggctcatggataacactttcattgctgttgtacttgttaattcttaacatagtaaaataggtatattctgtaagatacagtgtattacagaagatataatattcatagtccaattatttcatatactacttgtaatgtacaaagttaagactgaattattttgaaaacactctagatttccttcagtggcatagccatatatgaccctcattcctctataaagtgaattgttatgactttgagtttctttatccccacctttttctaagatcctgatgaaggcctatgggctacttcgttccatgttgtagacctcatgtcaataaaaaatgctgcttctaaatattttgtgggttattatggggatagttgctcttgttcatatgcagaaatattgtataggatttttttttttttgagatggagtctcactcttgttgcccaggctggagtgcagtggcatgatctcggctcactgcaacctccacctcctggcttcaaatgattctcctgcctcagcctccttagtagctgagattacaggcacccgccaccctgcccggctaatttttgtacttttagtagagatggggtttcgccgtgttggccaggctggtcttaaacacctgatctcaggtgatccacccgcctaggcctcccaaagtgctaggattacaggcgtgagccaccacaccgggccaggagcttttaatcacataaaagtaatagtggatacgctcaaaagcttgggaaaatcctaaagagtatctagtttataaa

SEQ ID NO: 60992 - DNA, 1028 bp, Homo sapiens
cattagcgtctataaagaaagaaaagatgatccaggagccagtgggaaagacgccagctttttagctggctgttctcttcaacttgctgaaaataaaagaaattgtatgaacgtttttcaaaagtataagacgatttatattgggaaaatgcatacgaagttttaatttttactctgccccagctgttactaatacagtaaaatatcttagtagaaaaacactcatttttactacaaagacccaaatacctttcatctgcttttggagctgaattacatttaatcccccaccttcatttttctccatttttgtatggtttcataggcaatggagaaactttccagaactctttcttcatgaagatagtttgtgtggaagtcaagcatgtgagcatcggtgcacatagtaggcccttggtaactctatgaccagcgtggtttccctgtggttcaccgtgaggcctcagagaagtgcgcagtccattggtagtaggaatgggatgccatggtccctgattctttcccttcccatttttatcactgcttcgcagagactataaagcgtcctacaagaggaaaagaggaaagacctttgaaccccaaatctagaagtatggtgagtaaaagttgtttgcaggaactcacacttggcactctttgtgaagcagacaaacaacagctccagagaaccccaaccaaatcctcacatgatgcattggacttggtgctgtgtcctttacacacctacactttcagccctacaaagtcaaatgcaccgaccgccaaagttatggacttttgtatcggaagcacacatgctaacaaagtattttcatcagaacatcttttttttttttctgactcattttcttggtgaaattgttgtttgtgtgtgtgtgtgtgtgtgtgtgtgtgtgtgtgtgttcttttttttactaggtctcatatgttttaggcccagcctgacatttcagcagtttcttgctaaagcgcttactgtgaatactgtgtagtatgtgtgcaaatga

SEQ ID NO: 60993 - DNA, 1040 bp, Homo sapiens
ccttacatattgtctctggttgctttttcacagagtccattaggtgcaatagagaccacctggcctttggagcctgaaatatttactctctggccctttacaaaaatgtttgctgactcatgtcttagaagatacaaaagataagtaggatgaaatctgcctgaatcaacgaatacctcacagtattacaaacaatgctgttcactctcagcccctttttaaaagatattgggaaagaatgaaaaaattgttctcgagttgtattttttgaaaggacctcatcacctttatctccaaaacataggaccttatattccagacagactgttttgaatattcaaactttaatcgttcttgtgattatattggcatgatctaatggaagggcaaggaaaaagttgcaaagttgtggaacatataacatgaaactcaattagtctgattccaatttgccttccaaaacaacatgaaagagaaaacctgctaacacttgccaagttcaaggacaagtaggaagagggtgaatcccaaatctactcaggaaccctgagtgccaatctgtgttactgtctccccaacaagatgatgtcctgtgtttgcgtgttaatgtttttgttctctgtgatgtccgtcttgcttcatagacattgcttattgaaacacactagtaagatagggaagaagcaggtgttatttccactctacagaaggatgaggctataaactctacatgtagccctttccatggcaggaagtcagttcattgctaaatccaagaaaataagatgtctttttgttagacttaaatttctgcatggtggatatgttccacaatatgctaaagaattattatctgagttttagtctgaaatttgactgattttcattatagcatctggagtagtgtttagtttttttttttttttaatcctactataagtatgacctcctaaatcaacgaattaaatgcttcattctctagagataagatcctttgctttcttatatgtgctgctccattcctcctacacagagtcagc

SEQ ID NO: 60994 - DNA, 1079 bp, Homo sapiens
ataatcccagctactggaaaggccgagacaggagaattgcttgaacccagaaggcagaggttgtggtgagtcaagatcgccccactacactccagcctgggcaacagagcaagattccatctcaaaaaaaaaaaaaaaaagtatatgggaggatgtgtatagattatatgcaaatgatacatcattttacatcaggggtgtgagcatccttgaattttggggtctgcagggggtcctgaaaccaatctcgtggttgcagagagacaactgtatttgtttgctcttcagtgcaaaattttaagcaaaatgtgtcttaaaattctgctgagtgaaaaataacccatggctgcagaccatggggaaagagaatatatcccaaattctcttggttagtttatatggcagagaaagttaaaataagcaaattatgataaatacttggaattttaagcttaccatatataaaaatctaggtgtctggtgcttcgctgaaatttatgtacttgtatgaacactagagggaagtgttgtgaatagcaacaaaacaaatgagtaggaattaagtgatcttattgtacttactgtaaatataattttacttattatgccagatataaacattttctacacctttgttgtttaagcatgaaacagattttaataggaattccagccatgtaattgctgttgtgcatgtataggacctacacacagcatttctaagagaaaaattcaagataggagaagtagaaatcaagcttcagaaactttacatattaacaaaatatccagaggaaaaaatgggcttctgataataagagtcagaggttttattatatattagttcattctttgttaataaaagtaatgctttcacctagattttttagaaagtgtattaggataacaatcctagatttctaaatctcaagaaattgcatgttctcaggctatttggcagtttttctcatctctaaaatcaggagtggaatgatattttgataaaaatagtaatgctcattgaaaagtaaatctgaacgatgcaagaggaatgatattataaagaaaatagtctctca

SEQ ID NO: 60995 - DNA, 1145 bp, Homo sapiens
acatttgtgaaatggcacaacagacccgtgattgtgcctgttcctgattcaggccatgtcttctctctactctactacactaccgcccactgcatgtcactgattcgctctcagacttaaatggtttctggcaggatataccacactaggaatagtaaggacccaaggataaggcagacatgaatgaggggttgtttgctttaataagcagagcctagaatcttcgagaatattctctcaaagaaatcaggaggccctaactctaactcttttcctgtcattttcaccttccccatgaggctccatcctttcatgttcctcttccaatactctaaggagacactgatgatcattttatcctatgacttaaagggcgacctgaagggtgaatccccttttttggttccattaacacaacagagaccactggaacttgctaaacaccaagggagagcaaaagggatataaacacaattttagaacatattagcaatctattctataaattccaggcttctgttctacctgacttcatcttctgccagaactggcagagcctttatcttctcctcatttccttcaacatccatacattagcacagtgatcctaatggttttctccattatgagggcaacttttacttacttagtaagagacaacatttattgttcataggaatttgtaggctcctttcaattaccatacccatcatttctacccattcctggtatccacagtttagctctaactttgcacatgtttagcttctttctatggagagggtgatgtattattgccctctgctcaggagctccttctgagtatgacaaaccatggttaaagtcaaggtagagagacttaaggctgtcttacaggcccaacttcctaagaaatatgccccttccttagattgactccaggaatggagacccaccaatgtttgaccttttggccagaagactagaaaagtcccaactatagttgatagttgaagactcgggcaggcaactaagcacatggcccaggctcaagggagagaggagcagtaagaagaatcctattcagtgttagagagcagtcaaacaataaattaaggttaaccagacctagcagcaggaagcaaaaatctagtgttggagattgc

SEQ ID NO: 60996 - DNA, 1033 bp, Homo sapiens
ataaaataaaggctcatatgagatgatctctagggtagttccagctctacttaatatttggtttctactatagccagaaaaagagcttaatttcacaaatagctagacttttcccaatgaaataccctaactcttcatcctaagtcctctttttttgaaaaaaaaaaaaaaaaagaaagaaaaaaaagaaaaagaaaactattcctattaggaattcttacactgctgtaaagcattctgtcaagttttactattgagtttatttcggaaatcatttgagaagatgtccctggcttctaacaaagggaagaatcctgcaatgtttggcctcagtggcagagtgacctagcctttcaatatccctctagtcacactttcttactcatttcactctggtttaatttcctcccaaaactcttcaagaggaatgtctctcctttcttttgaattgtacagtttcctgccctatggatacagacatgatgactgatcaggactatatttatttttgctggtcatttagatgtggacttatgttattccaggcaactggaaatcatacatattgatctgtaattttgtgcaatgtgcatgggaatttttatagttgacgtaggatctaaaaattcctacacaagtctcagtagtaaatgaagaacttctctctcttttattttctgttctttcttttttttttttggtgactaggtctcactctgtcacccaggctggagactggagtgcagtggggcaatcatggctcactgcagcctcaaattctcaggttcaggtgatcctcccacctcagcctcctgagtagctgggactacagtcatgtgtcactaggcccagctaatttttgtggggacagctttcaccatgttgcccaggctggcctcgaactcctgggctcaagtgattgcacctgcctcgtcctcccaaagtgccgagattacaggtgtaagccactgtgcttggagcaggaacttctcatgagaatctggtttatcacagaaacatagttagaaaatag

SEQ ID NO: 60997 - DNA, 1050 bp, Homo sapiens
caatttaatttttacacaaggacttcattttacaaatgaaaggactgaatctccagacggtccattgactggcttaggttgatacagtctatgaaataacagagccagagttttggctgtaaatccaattcatattcagagttttggctgtaaatccaatttatatccagaattttgactgtaaattcagtattctcaccactagagtaaagctacattttggaagttgcccccttaaactttatcaaaaacatatggttagtgcctacatataatttttggcattgcataatgtagtttaaaatagcagagtaggagcttatagttttctatgaagctctttgttagctgaaagaaaatagtttctacctacttttcgttatttcctgatcgttctcttaggtaaccaaggcaaacaagttaaaatcacttaaaaaaggatgttataatgtgctgtgcctacagaaattatattattgtttatcctctatacaatttacatcatcaagtcacatgtgggctgccatatttcgagcatttgatatgtctaaaggctcctccttttgttccttcaactttattaactccttcattatgaacatgattttggagaaaaaatttggaacttcattgttctcttttcctccattaaagtcttcttaaaaatactttatttgttattttattctgagatcccagttaccagattcataacaaacatgtaggtatgacttcatttctcttagctcctggcttcaatgttgaagacaaaatattattaaaacaacaacaataaaacatagaggtttctgctaagtcctgttgttttgatttaaccaagatttctctttcagttgttttcttttttgtacattggttagagatgatctttttgggattataaacccttacttttaaagcgctgctttaggtggagttggaatatatctatcagcatggtgtgtgtctttggtgtatcttggctgcttcagaaccagattttttcgaaagcgactccgtcccatgagaccagtggaaatgtgtccagac

SEQ ID NO: 60998 - DNA, 1006 bp, Homo sapiens
tttcagtatttccttatttagcatcattggtggtgaatgttagcaatactttattattgcttatcttcatttaggatgtgagtttaataaggagggaaatggtatctccagaaagaatgcacatggtatcagaaggtggaagtccaggctccttatcttaactttgttctctaacaatgttagcttaatcaagtcaactagtcactttgcttatctgtatattgtggacagtacctcgacattgttctgtccgactgtcatatcttttgcaagcctattcaagccctttgtgacctaagaataaatagagactctcttcttgccttctcataaggtcttgttcggcggtatagacaagcacgtggagtgtgtagctgacatgggcccatggtgagggctccatgagttcctgggggctggagggggaggtcgagaaaacattcaggcttcgaaatcattgtcattaaaagcgaaagcctaacaaaatatgctctgtgtcattttaaaattgctattacacattgatataaaatcaaagagaaaaaaaatcagttaactttcctaagcatacaaaaagagctgaacagaacccattggatcaaaggtctttgtcatcttatttttaaccatgctgaaaattatctttgaaggaacatgagcctgagtaaagaagaaaatgggcggcaagggttgcaaaacgacaagtagttatttacagacttataccttggtttctatggctatatatttgatgaaaatcccattacatgcaaaaatattttggaagtgttagatattttcattattttggaattaaagtttttaaatagagatattacagatagaagtctctttgcttagtatgaatcatggtatttcatgcttctgtcctccagagatcaggtgttttatgatgattgaatgcctgggccttggactcaaacaggcctttttccaaacaccagctctgccacttaataaccaattcttgggactaacaagatac

SEQ ID NO: 60999 - DNA, 1020 bp, Homo sapiens
aaaagatcaagagaatgtgaagaacagttgttctaatcacagaaggttgaatatacccagtgattcaaagacagaaaggagaaaaaggtctgggggcagcgaggtagaaatgggaaggaaggcttttagaaaaaaccttgtatgagaacagaagatgaggcaatttggagatagagattgtgggtggattgtcaggagtccgacggtgataatggatgttccaacaaaaggtaaacataactgcagataaaacctctaaaaatactttcctttcctaagagatgctgaaagttctgttctctgagatacaggggtaaaatgaaattttgtgggtgatttatagcaaccatattttgtttgtgagtgtgcggtgctttgtatggtgcatctatatctctgtgttatcatctaggacagtacttttcaaactttgtgcatcaaagttgtctgagtagctttttaaaactgcgaaggggatctgagcattatttttaaaatagatggctacagtgccaatcaaatgaacatttttagtctgtaaatactattataaagaataccaagcaaagaatgcttctctttgttccttataagaatcttgagaggcatgtacaggaagtgtgccaaaatgtaataaaaacaaaagcttaataaatcaatcatgtatatgttgaatttcctccagcattttgctttgtgcatttttatggcttatctcacaaactctgaagtacaaagtgtgaatacatgactgcctgggacttcactttgtgtgttttctattgttggcttttggggttaagcatatttaaatgtaattaagcaggtaccagaacaactacaattattctgactatgctattaagaagattgatactaggcacatatttattacaacttacttgggccatttttttctttttttaaagacagggtctcactctgtcacctaggctgaagtgttcactgcagcctcaacctcctgggctccagcaattctccttcctcagcctcctgagt

SEQ ID NO: 61000 - DNA, 1083 bp, Homo sapiens
agtttccactcattgcatttgttatatctctcaagacttaaattttagaacaatttctacttttccctcctctctgtttcttggcattgatattgatgaaatttgaccaggggtcctatagaatgttctgtattctacatttttcttatttcatcctagttgtattttttaatttgttcctccatcccccatacttcatgcaaactagaaattgaatctgagggattctattattttaatattttcaacaagaatacttcatagatgaggttttgatacattctctcagtatcccaaacacatttgtttagtaactaatgtcattttattccactcttcagatggacttcttgctgcaatattcaaaagtaattacattctgggggggaaaaaagccttttcctacccaataagtctttattataatcaaatccttatgggagtaaacttcaattaattgatgcatgaaaaataccagagacaaagtgaaccctttaatttctctaaatttggctatgcataaagaaagctgcacctaccatgcctgtcataaactgtcaatggccagtcagactgaacctgctgccctcacattgcccctgttgtgagcaagtatctccatgctctagtgaactcttactgagatagacctactatttggagctttgatgtccatcaaggttttactcccatctctatattaaagcatcatgtttttaggttttggataaacatccaatgtatgtcttttatgagtaaaacagatcacaagaaattatgatatgtgtttggtttgcttacagaccttgctgtatccatttggttccctcttatacttttgtatttttaactcaacatctccattacttctagtcatagggcttgaaattctcactgttagaatcattctttttggtctttctggaaatgtttattaaagagaaatcaaggtatcacattacttgggaaaaataacgcatatataagactcactgtcacctaaaccgagatgatgatctcagtaggcactatccaaagaatgtcttgaccttggacaaacatctcatcttggaatttttcttg

SEQ ID NO: 61001 - DNA, 1026 bp, Homo sapiens
caaagcaccaagtttcatacaagtttttaaacaaccatttctttctttttagaaaaattgatacataataattgtacgtattttagaaggcacgatgtgatgtttccatatatgtatatatttgtgtaatgataaaatcagggtaattagcatatccatcatcttaaacagctaccatttctttgaacaacccatttctaaatgctggatggatgtgtgaataaatgccattttataatggtggttattttcacaacaaattaatatatttcacatttcataaattagggattatgaattataaataaaatatttttcccacgtagtatttgcaaagtaactgctttcactgctaatgggaaaatgtccttttaaaaaaaatttggatgtaagaactttcaagatgaggccttgagagaactgggcacgaacttcagacctgtgaaatttttagtttacctccttctggaccttgaatcttgtaaattttctttatagtttattcatcagaaattaaaatctcaatcaacattatgctttgacccaataagcatcatactactagtttcaaatatcgtggattttactgggatactcctggtcacacaagtatttaattctgattagaagcagagtcatgtctgcatctgctaaaatccagagcctttaatcctggcaaaactggaggttcttcagaagcccgtgaaacttaaaggtagcttaatatacagtgaattgtgtttatgtttggagtatatggttcacatcataacacatttttgagtccccaaactttggaaagatgccccagccacatctttctctttaatagaagttcggaaatagccaaagttgttattcccaggtaagctttctagagtcactttgggattttcttgagtgattttgtttgcattatgtgtcatttgcatagtcctttaaagggtgctgatgttaactgagttgcttcccttgtaggagcagaatcattttaatagctgttatagaagaacagcacttttttgt

SEQ ID NO: 61002 - DNA, 1001 bp, Homo sapiens
ccagttgccctagaactacattggcaaactcccagcaataactagcaccatttagtcctgtaaagaaagagttgcaactgatccagcaacaatcattagacacttcctgggaaacatcctcaagatcttaagcgattcctggttcaatcacctgttttattgtcttcaacaaactgaagagcaatcaattgtttatgaactcaccataaagaaaatattctacttctgcatctaattaacttgtatctgtcaaagaatttatagattgtaggtgggggaagggaccttctattttcaagcagtgttattaaaggccacacagttatatttgtctttttctttgtcacataatctgctttaagtcaaagctaattagtagagatgtgaagaggtaattgtgccttcatgattagagagatttaaacctctgcttttccttttgtaggtaagtgaacttggcattggccattgcttattatgcttcctgtctggctcttactcatgttgccattttgtggactaaaactcaaggcagttcaaaaatactgatatgcaggtgccatggatgctgttggagtgtgtgtcctaagagagagggtaagtgctggttttccattttaaacatagctcgtgatatcaagttgccccctcccttcattccctgactcccgtcttcctccaaaagcggctctcttggtttagtaagcatctctaccctgcaaagcggaaataatgaaaaatgagattcactttgcaagcttgttgggtgagcttctggagaataatttttaccaaaagcctgaaatcatttggcattgttggtgttttcaatgcatctgcatcacagcacattgcatttcacatctggccagtttggaatgaaacttagaaaatcaccagactatagtgatgtaattgtcatgaagtggtttttgtagcttagagaaaagaaaaacacttggctgaaagaatggtctgaagtcccacccaaagtaaaacat

SEQ ID NO: 61003 - DNA, 1056 bp, Homo sapiens
tcaagggatacttgccttgatatgtagatatatatatgaaagctctgtctacctatcacttacctatgtgtctatgcaataaccttaatgattgcaaatattttgtaaggggagatttgacttttcaaaaataaaaagttatttgatactagatgaaggactacttccactaaataatatggtttttaagtcaaaatcaaaatgttataaagagaccatggccttgtgggattcatataatgtctgaagacagctctaaaaaatgagagatggtaactacaggggagtgagtacactgcttccatgtggggatgctttgaaaggaggtctgatgccattgactatagaaggttatgttatgtgtattatctcatattttatatatcaggtatcagtcctatgaacaatccttaaagaaactttagtgggactggttttagataattcatctaaggacaaataataatttgatactttgcaaactttgatccactgaagcgttttatttctaccaaagactgattgttaatagtttgttctaagggaataatattcactatcttggagaaaatagctataaaaccatactgttatcattttgatttttttgaagtgcacaattgcagactcttcctcaagtctttcaaaaacatgtcaaaatgaatcccatgagggaaagaactttatgtcttaactcatgaatctatgaaatctgagttgacaataatacacaaaatacagacattatatgaatcccacaaagcacacatatctttattctagctttgccattcttgaacatgtggctttcagcaagtttcttaactcttctttttcttccttgtttacaaaaaaaatgaggatactactagtttatgcctcaaataattgtttaaaatattaagtgaatttgtacatgtaaaatgctttggtatttgacacaatatgtgagctcatgcatactagttgtgctagagttagaggagattatgttgacttttttttttgctagttatatgtccttggtgcttcactattttgcatatttcctatgtc

SEQ ID NO: 61004 - DNA, 1062 bp, Homo sapiens
atgtaatagtagcaagaggtagtgtgctgcaaggaatatgagattcagaatcaggtgatgtggaatttcccattgccatttatatgaccacacacaaatatcactgttttctgccatgaatacctagcacctacttcaagttgttacaatcttacaagcttaaattgccacaactgtttgtattttaagacaatatacctgaaaatataaaaatgttcattgagtttactgtgtgacattgaactgaaactcccattttctaatatcagaaatgcggttgaatgagatgatacttgtgacccttatgggttttaagagagtactactctataaaaggtattgaattcatcttttcaaagcaatgggtaataggtggggtttgctgcattgctgtgtgtttgctgaagaaggtgcaaaggcctaggagaacctcttctttgtagttgctgtcttccattcaacatctctaccattacagtgtctctaacaatacagccaccttgtttactaatttgtgttctagtttttgtatttttatcattgagatgcaaagaaaacaagaaacgtttcctaatcttttcaagtagaatttcaattgccatcctatattatatttaataacaacaatgcagtgaagtgttttgaattttaaaatcgtttttaaaagaacaccccgtttaatgtcaaagtagttggacccttttatgtctgggccttttatagaatttccctctggggcattttgtcaattgcttacacgtaggtcatgggcaatttgtcattctttttaaattgtgacaaaatactcataacataaaatttactattgtaataattatatattatattgcaaaatacattggttacaatatatatttaaatatacagtttagtggcattaactatattcatgatgttgagcaactatcaccactctttggttctagaactttcacacccccaacaaaagccctgtactcattaagtccctccaaattcctccctctccccaggctttggcaactactaatctgttttctttctctatgtattttcccattc

SEQ ID NO: 61005 - DNA, 1703 bp, Homo sapiens
gaataaaaactaacttactttatttaaactagtgtttatggtttgtgtttcttctaagggtagacttcgtaactgtatctcattctttctttttctttctaccagaccaccatagctttgccttatgtgtgagagctgtacttgtttcctctctgatgaatctcacattatccaaacatacattcattttttaagggcgagtcaaaggaatgtccatttctaattttcattccctgttcttaatgctgctggaattatattgtattcttatctggtcctggagtctttgattagggtgtcttgaaacacaccatgccctcttactaagttggtggtgtgctggcagaccttgagcacacggcagtttcattgacctataattttcattctcgtgtttggacattgcttaatttgattgctactgctctacaggcaaataaccttttgaagtcttttgttgttgagcaggtgatttgagtaatggtgtactgagcatggtcacgtgttcagtgcattgtttcttctaatgatacactccatatcaagaggcatgttaatccttttccattttactttaaacatcattgttgaatttttttctcttagtcttacatagctataaattttttaaaaaatgttttctgctgggctgttaattttatttttataaatgctatccattttatagtcagtaggcattcaaaatgattcaatgtcttgtgcatacacatccatgaaactgaaattttgactcctccagtacttaatttgaaatgattttttttgaacttagcattggaatttgcttattttagtacaaaaatttttatgttgtctttgcacaaggtgattgtgcacttagaactttctttttgtaaggagagattggatgaacctgggatattacttcttgatatcagaatttcataaaatgttagacctgtagtataatatcaccttttaaaaatcaaacttagtgagatagatttactggagattttcttcaagctttttattataaaaaggatggaaaaaacatgatataaatttattttatatatagtagccttggggcatagactctgagcatggcttcagactgaggtactgaaaatctcttctccataatttcaaaatccaaaatgaaaaactgaaattttttccttaacttctttggcggcaaaatctgacctgacctgagcacatttggtagcaaaacctgatctgacctacgtgaagctatttatagtctttattcatcctacttagtgtgagtattcatatgttttgctgaaaaagtaaaaattctttgcttatgggatgctgccccaagacactgctggggatgttcataatatttatacatacctttctaagatgaaaaagttctgaattccaaagcttggctggctgcaaggatttcagatcatgggttgtgaatctgtattgagttctgagctgggactgggagccagtaaggttagcttggggtgagaggaaaggggcttgtttttgtccttaataaattccagataaagtggtgctctgtaatgccaagcactatagcaaaggtctgtagtgcagttttcagtttggtaggaaaaatatttctagaagcactctaacagaaaactgcttgcttaatcataaatctgaacatttggaccaggtggttttcaagatgatatttataaagcttggtt

SEQ ID NO: 61006 - DNA, 1620 bp, Homo sapiens
atttttaagaagctgctagaatctgaatgcttttgtttttccagtctattaatgggtgtgttctgtcttggaggaaaatcatcacaactcggatacactgctaaaatatttaaacagttaaatacagtcatttagatttcactgacgtggtgtgtttttcatagtgatattcaggattattaagtaaacacgtcctaattatgtgggtgggtgtgtttttttctcctttaaatttcacagaatgctcgttaatcaacagggtataattactaatgaatattattatggtatagatgtttagctttaacatatattttagggaaacttagagaaacctatagttatactttaaaattacagcatggaggtgaactccattttaattattgatcactttatggctgacagatctcaggtttgcattcgaccctgcagtcatacagccatatacccagtttgtctattataatccaaaaaattaattttgttttccatgtaaattgaggaatcatcaatatattaatagatgattatggtaaacctgtagattcattttggttttcttgaatgtgtatatcttcaaaggtgctcctaactttttaattcattttgaaatggggaaaaaagataattctctagatctgtcatttggttttgatccattgtgatttataaattgtcttggttttagggtgtgccaccaatggaaaagacagttgtgcatctgtaacaaagaaaaacaaatatctaaaataggattatagctcatagatatttaaggagaatgtgtgctgtattttaaaatctatagtcaaaatcttcagatataatattttaattactaggactcatatataattttacctctttaaaatgcttccttggcccaatgtaatgtatgctcagacagtggacacatacagaatggtggctatagtagagaagataaagatttcagctactcgtggaatatatcaggcgtttaaaaaaatgttcataatctgtttattattaattaaaaggttaatttgaatatgatgttcttaagggacctactaccagcagactgttctgaggtcatgtctatgtacatgccaacattctagggcagtggttcaatgtcttccagatagtgaatctgtgcagactggttttaagtcagccttgacttcttgtacattgccttggcaagggttgatgatgttgcaaaggtgttagtctgatttcccaagggagcaggtctcagctgcacagcacaaatgatttgtttaatgcctagcatagtggcactggtctcaaaaaaaaaaaaaaaaaacctgtcaggtttgctcatgtttataagatatggctttaagtgtcttgacaggctccaccatgattctgaacatagagtgtcatagagagccgagacagacacatgaaccacgacggtgcaatccatattagagtgagcagtggctggattcgttgtaaatcatcgagcttttatgtggaatcctttaacacgggcttttttttcccctctctctaccttgaaattttcccagctgtgttccatgtctcctcatatgaggttatcctgctcagagcacaatataaagtcaattgctttgagccctt

SEQ ID NO: 61007 - DNA, 1043 bp, Homo sapiens
ggaaggaagcttcaatgggactacgtaaacatgtgacttatcctaatttgcattttagagcatgtggaaaatagatattggttccaggccatctatttttaatgtgtaagtatgtgctttcactgtaaccacttttaagtcaaagcttacaggcatttcattcacagaaacccatgtagataccttcattttcctgtttgtagctttttttgtcagcagaaaaattaatggattaaaacttgagtgaggcaaccatccacttcaccacagttcccttgaacaggagatatttttcttagagccctttcatcaaaattacctttggtacatatttaattttcttgtagtaaatacacatttggcctcctagccttaaaggccctaaaggagatgaataaacattgttcatacttttagaaatattgagaatgtccagaaagcaatagaaacctcaaaggtcatgatttaaaaaaaaattttcctaattatggattaaaatgttttatttgctacatgaaaaagatttggaggctatttgtcctaaagctgccttttattattctatattacctgcccttaagtacttaattctctttatagtgagtcctttgagatcaaggcacgatatcctggggtagaaatccatggataacattttacataaggtaataatttgtatgttttgattaaaacaaatttctttacttcccagctacaggacaggcacagaatgtcttaaaagggttgggggaaaatggtcatcagttccttggatatggaggacctatgataataagagttaattaataggtgcttaaagatccttaagattaattgctgtattcacttaaatatcagttatctttctagccactgctaattatctttaaggtagcccttggcaactctaaaaacttctatgtgatattgatctcaacaaagacattaggggtcattcatgcctcttgactaacagaaattctaagtaggtttcaaaaagagggaagaaaaagggaaagagttttctttctaccccttctctc

SEQ ID NO: 61008 - DNA, 1048 bp, Homo sapiens
gtgttccaaaagaaaatgttcctcaacccaaatttataactgtgtttattatttttctaattcagcatcgaaaaactaagaaatgcatcatttttaaaaatcaggaagtatagggaactgagaagagactgactacctttcatttgtatgttccttttctaattgtcaatattgctactcatcaactgctaacactaaattttctgatggcttaaagtctaataataaagctacatttttatttttttccaagaacttctttatagacagaaataaattaaaatttgccactttcgactgataatttgaagctctagaaattgtcagtaccaatatggcactcctacaacatgactttagaaggcaggaacttttgcatgaagtcataaagagtattcagaagtttgtaaatgctttctgtcactttacttgaaattatttgatttttaaaaatcatccttatgaaatgagcagagaagctcttattaatacaagtttatagataaacaaactgaatctcagcttacatgacttgcacaaagccacatattgacctgcctatgaatacagcacaggcctttgtccattgatttttccatcatcccattatttgactcaactcctttaagagaccacatgctcccattcacatagtttccttgtaagaagcaagcaagctttgttccttggtggcctggactttaaacatgaatggataaaatctgtaactaatggatagaatctataactaagtatagagaaactaaaactagttcataaatgcttatgaatccttctgtgtgtgtctctattttcctttttatttatttatttctttatatttttattttatttttgtagagatgggattttgtcatgttgcctaggccggtctcaaactccctgcctcaagtgatcctccttcctcagcctcccaaagtactgggatttacaggtgtgagccactgcacctggcctgctttcccttctttaagtgcatttgagtctgtagacagatcacatcttgtcatgtgtgtcatttatgtgt

SEQ ID NO: 61009 - DNA, 1043 bp, Homo sapiens
ttgtttacttacttattttctaacattttctgctggaacataagctctatgaatgcagggacctacctacctatctcgttcaccttgctgttgcagcaacaattggtaacatggtaggtacaaaataaataattgtacatccaaataatttataatatgcatggattataaatggatctttataattaactctaatgtcttaaaataaaaatgtaaagaaacattttagtttttttctttagctgtattaatttttttcacagagtgcttttttatatctagcacattttgcagcaaattggtaatgaggaggagggagatatcatgccctttgacagataagaaactgacactcagattaaatgatttatgcaaattcatatgctggtaaatgatagaataggaatcatggagtctttaatgtcctttaaatacaacatcctcctgcaaatgagaacccaaggctttcagaggttacatagctggactcttgaaaagaataggaactaggaaaatgttaaaataaagtaaaatcaaataataaaaaataaaatctaaacaaagtgctattgaattgctttgagggttcacattgcaatgtagcatgcacatcttttgcaactggggaaaggtatatccattttcataaaaaagtatgagtctgtatttaaaaaaatataaattacatattctcacatttattattatattgatgtagattctttaaataccagaggcattctttttttataaaagatttttaatatgtcttttatattttctagctaatattgcctttgaacactgattttgtttattaaatatacaaaagcatccataacatttgtaataaatgttacatgagctatttggtctctagacatcacctctttgactctctgttgctatgggttttcattagtattctgtggagcctgggttgccatagaaaatgtgtggttgtagaggagttactatggcaacaatccgccattatgtatttttcaatatcatctagcttgagatgatagtgaatctgaatg

SEQ ID NO: 61010 - DNA, 1051 bp, Homo sapiens
ctcttaagcagatgtgaggaagtcatagccctggacagagctgactcactgtggtttaatgttatctcctttcagctgagccttgtaacactggtcaaggtagagctgcttgggtggaaacaagagacgaggggcttggggaccctttctattagccagtagcttcaacaaggagccttctcagtggaatctgcctctgccttctccctatgaccactgtataaaaatcagtggccctttccccacaaaatgcttgtagtagtttcttgaatcagaatttcaaacctcctggtggccaagaatgtacaatacgaagtgctttaatggcagcaatctgatgggggaatgtgtgttctttgcatagctagcacattacttttatgtgaattgctcattttgggggactgattttgtgaggcgagttcatggaggagaaaagacttggtattaccatgaactcttaggttgtttgactcatttcctcaagtagtttgctcttcaggacttttgaaggactttatgtaaggcttatttgtatagctcctgaagtcttacacaagtgttctgtaaatttcccagtaaccaaatgaataaaacataaagttctgggatagtttaattgtttatcttaaaggccagtttaatagcagactgtactcttaatatattcatccattcaacagatatcttttgagcaccaacgacatgctagacctggctctagatactcgggataatgtagtgaagaaaacaggctcctgtcctcttgaagcttgcgtttatgtttcagtgtataaaacatagatataaacatttgctagggattgataatggtatttgttctaattaaaacttgcttaagaaatcggtcagtatattttatatgtttcttttaataaatgattcagattacatgttataaagtgacagacaataatgaatgtgtttagaaatatatacacatatttagcagtaggttagattgttaggatttggttctaacaaatcctaagattgttaaggatttggctctagagatcatatagctatt

SEQ ID NO: 61011 - DNA, 1057 bp, Homo sapiens
cactcattttctttcctgtaaggctctttgtattttacctattgtcttaaatactaaggtttgtaaacactcttgatgtctaatagtgacctccatacacacttatttaaaattatcttacctattcttgttcttctgaaaaaattgatatcagtttgtcaatttgcataaaaattcgatttttattttaattggaattgagtttatagatcaattttggagagaactgatctgtgagaaaagttttactaagaacagtttttctgtttatacctagggttgctctattattttgttctgtattttttgttattctatttatatgtttatatattacctcccattcttttgtgtttggagcagatgcacttaattggtgagtttgacattttcattaaaagtcctctgttctttacattttcttctttgcagatcttgctagcattcacagttccaactatcatcttatggaaatgaatcctcagtctctttcatagtttgtctagtcctgctcttaattcccaaggtcttcattctaggtccttgttttccattcccattttcaattacaaatattatccattcttaaatgtattgccaatgttttttagattagctgaagatttgccagccttctcttcatgagcgcgggttatttctgtataataaacctgttgtaaatcttcagcaaaggctaataatttgactgtactttacggctttgtaaatctaaatgatttaaaacacattcttagtccagaactttaatgagcattttctaataactgagggaggggcattaagaaccatgtccacatttttttttttcactctttagagttttatttcactaacttcaggtcaaatttctacaactgtgttctggtcaatttactatccttgcttggcttccccaaatggtagtaccaaaagatttgtgggatagggagaagataccactttaagaagcatgcatttactcatcctctacaaatcaacagagttaggcatctgatcattgaacaatacaaagctttaatagcatccaggagggcag

SEQ ID NO: 61012 - DNA, 1283 bp, Homo sapiens
ttgtgatactaatctttgaaatccttcctgtcttaagaaaatgtctttttggatcatagagtagcagtatccatgatggtggaaccttgcctggcatttagtaggcatttgataaatacttgcttaatgaaggttttctgcttaagggcctccataacttgatcatatcctacatatttttcttttgtttctttttgtttcctgggataaatcttccattagacttagactgatctccttctaggcttacctgtgttaatgatttttgcctccttagttatttatacttagttaaataccctagagtatttctgtctttagaattcttagttcattttggaggatatgccatgtatttcaaaaataattttggatgattaaccaatagaaagttctgctttgtttaacccctcttccagtagttcagtgagaagtgatattatctctaaaattcaacacattgagtgttggccactggttaattgttaattctgaaaattatttaggattagatgagattgtacacttgagggagaagaaaggatgctagaaaaaaaattagttctgaacttaccattaactgtttatgtgactgtattatgcaagtgactaattttcctgagatcacttaaacagtatgccagatgattgtgctactggtttacctactttttgtgtttaatgagagctgaatttacatccaaaaaaatgtagattttaagtatatgaaggttgcctacttttaaggatggctgtgaggattaaatatagtcaattctcctttaatgtagagtaattttggttatcaaaaagttatacattaatccacaatttaatcaaaatagtataaaatgactcatgtcagtttatagttttaaaatgacaccagtatttaagaaaacatagacttttgtatagaggttctgtcaaaaaaattaagcttaagtagcatcaatttgctactgctcaaactgcttaattttttaaccaagcagttggtaatttgttggttgttagccttttttaaaatattgctactttcagagaaactcataaaagctatagaagaggccttcttcctagaacagtgcactctaatcacttttgaagttaaaccaatgccatggaaagcaagctattcaacaaaattttgtgtgtacttaaggggttcaggacctccctaaactccaactcgagtttaaaaagacttatctagggaattcagccacgtatatgacagattttagctagtcttctcccttattgccatttcattccctgta

SEQ ID NO: 61013 - DNA, 2430 bp, Homo sapiens
taagccatacagattgtagttactctcaatttctttttggaagcaatgagggtatgagtaagatacttcccatatggccacaccagacatttctatcatgtgacccttatgggattcaatgatcttgaaatcctttagtttgaccaggtgcggtggctcacgcctgtaatctcagcattttggggcggcgaggcaggtagattgcttgagctcacgagttccagactggcctgggcaacatggtgaaaccccatctctaccaaaaagacaaaaattagccgagtgtggtggcatgtgcctgtagtcccagctacttgggaggctgccgtgggaggatcccctgagcccaggaggaggaggttgtagtgagccttgattgacccactgcactccaacctggacaagaaaacaagaccctgccataaggaaaaaaaaaaagaaaaaaagatctttagtttgtggggtgtgtcacacagcatattatttactttgtttcaggtacctatggagttgtgtataagggtagacacaaaactacaggtcaagtggtagccatgaaaaaaatcagactagaaagtgaagaggaaggggttcctagtactgcaattcgggaaatttctctattaaaggaacttcgtcatccaaatatagtcaggtatgttgtaatatctgaatgtaagccattttctgcatgctatttcaaatataaatttcaacttggaaatctttacatttgctcaatttcttggtctagccttactgagtggactagaaccctatttttggtagttgagaatgccgcacatatgtaaaagagaacaggctgttaaagcaggaacagagttggaggagctgggtgatgtagattaatatttgggcctagaatagcaaggtaaattggccatgggagtaaagccgttttcatagagctttgtcaactctctcctacttggggagctctagttcctgaagaccctttagttagagtcttaagaaaagtagctaggtcaaatgaaaaagattttttttccttaaagtatttgcattgggtgtttttggagacctgtcttcctaacagtccaagttaaaatctaattgtacttggctggggctagagattggaagtagcttttaaggtcagataccactttaaaatttatttgtataattcacttcagtgaaaaaataagctctcagcaattagtagccaacctagatatgttcttttgaatacaggctccttataaataagcacctcctgtacaaggcttaattttaaatagttgccctgagattcctttcttaaatttgagttttgagtctcttccattagggaagctactacgtcttccccagtttttattatagcaactgaaattatggaaggagttttattttgtgaaacagaggtcaaaaatgtttgctggattcttctctcatatattttttttccccagtcttcaggatgtgcttatgcaggattccaggttatatctcatctttgagtttctttccatggatctgaagaaatacttggattctatccctcctggtcagtacatggattcttcacttgttaaggtaaaagcttaactaattttattaatatttatgcactgtggatataaagggactatatatagaagtccctgcattttgtgggaatatgcttggaaaaagtgttagaataagaaaaagtatttcatttttctccctcatggttagtttatacaggttagagatacccatgttattaccagatagtgtttctagtaagtaaaaattagtgcctgagataacatagaactggtaggtattgttggaagctagggtagtctggtctttctttggctgtcagatacatgtaaaacaaagtaatgaaagcctagggcagagtggtggttgtaggtgttttattccagttttgaacatgttttggtcaatttattgtagacatttattatatttcaggtaaattataaaattgtatagttttaagtactgaagtatataaaagtgtcttattcttgcaccagttctaccaaaccactctgcagaggtagcgctgttagttttatttgtaatcttacacttgtatgtatgttcactttgtatgtatataaagatttttttttttacacaaggtggacttatttgcatatgtatatatacatattttcccttttttgtgtaaaacattatcaagacgtagatctacctatgtctatttacatttttgatataattaaaccacttccatattgatgaacatttaaattattttccaacttggttattgttgctcttattaacagtactgcactgaatgtccttatagatatttatcttcgtatgcaactttataggataaatttttagaatgggaatgatggattgaagatgtttatttacattttgatagatattgcc

SEQ ID NO: 61014 - DNA, 1829 bp, Homo sapiens
ggctacgcttagctacgtttggtaggttaggtgtgttcaatgcatttcgacaaggtattttcagcttagaatgagtttaaccagatggatcatccgttttgttttgttttttgaacaccacttgtccctctaagatggagcatctgtattactttccaatttcaaactgtaagtcatttttctgtgtactttgtttttgtaatatccatgctacttcagatgtcaatgacattgtctttggcaacaaatgtcttgtaaagcacttttctctgaactaagcagcattttatgataattttatccattgaaatatataatcataatatctttgccatcacttttagaatctaattttttcaagaaggaaatgaatatgtaaaaatgaaagatagaaaaggccaactgtattgaagatacaaaatagagttggtagcggtatatagaagaaaaatcaagaggcttctgtgtagaaaaccaatttgtaatttaaggatcggggaccaaaaatgtttaaagactaaatgtgttcacattactatagatatgtctataaggtgaagattcttttcttaggtatacaaatgtgatgttgtatataaatgggcttcccacccacaaatgcttattagcctaaaatggcctgaaagctctagtaattaaattatttctctgcgtcctaattttttgtctttgaaacagattatttagaaaatcatgtacttcgcttaagtttctaacttttacttgctttttccagagttatttataccaaatcctacaggggattgtgttttgtcactctagaagagttcttcacagagacttaaaacctcaaaatctcttgattgatgacaaaggaacaattaaactggctgattttggccttgccagagcttttggaatacctatcagagtatatacacatgaggcaagtggaatagtggtttttgatggcttttgaatgtgtgtgattgctagattattttctgtatttgtgaaagtcaagaaataactcaataaaagatatctactctgtggcagtatcaatttattgcctctcagctccaaattcattgcatgctatgtgaaaatggaactgaagcctttaagtattttttctttaccagctgctatgttgttaaggtagagggtactagagggacatggcaggaggaaggagttttcctagctacagtttttacattttcattattttttactttatttatttacatcattcccatcctttgttgtactttaattctttatattaaactctccccattcaaatcaccaccttggtttctgtctcctgactgaaccctccctgattatagtcagattgattcaaagacaggttttgttccttaaggtatattatttctgatacatttaggaattgctaactataatttatgtttgatctgtgttatattgctgacttggcatttagtgtttctgaaggaaagggaacattgtataataaaggattattgaaaggctgtcttctgtggagttgtctacccttgacccaaagactgtctccagatcaaaactagtaacagtgctcatctgattagatgtcttggctgcttgttagtctttatcatttttttacatggctatataaataaactaagattattttgttttctttgtcttaaacaaatgctattgacctcattagctttgttctaacaggcaatatttttaccatatgataaatatactaaaatggttggttagttctagatcactaatctgttatttgacttattcacgttttttaaataatttaaaaatcattttttatcgacgcattattatac

SEQ ID NO: 61015 - DNA, 1307 bp, Homo sapiens
ctttatttctttctcatgtttcttattcatgttataatggtactgttagtaccatcttagcaagtaagcagtacctgcactttgttcagtgtcaccccaaatctattatcaatgggtttggtttttcagtggggggaagataaggctgtataactgtcttgatctttagtgatttgaaaagcaaaaaaatatttattatgcttttatctgttttgtcttctaatgaatagaacttagaaatgaaatatttatcttcaattttgtgtacctttaattgacttaaacaatattattggtggcagtcatacaacctttaaaggacagccctaataaaaatataaatgtttaagtgtaggtaattttatgcaccacatttattcattgtaaaaatttgctttttaataggtagtaacactctggtacagatctccagaagtattgctggggtcagctcgttactcaactccagttgacatttggagtataggcaccatatttgctgaactagcaactaagaaaccacttttccatggggattcagaaattgatcaactcttcaggattttcaggtagctattaaaaactgagataataaaggtaacatatatgtaacaatgagattacatttatgctttaagaaatttttaatttcctgttttttagagctttgggcactcccaataatgaagtgtggccagaagtggaatctttacaggactataagaatacatttcccaaatggaaaccaggaagcctagcatcccatgtcaaaaacttggatgaaaatggcttggatttgctctcggtaaggagtgcccttgatactgactttcaaattattgatgattctgaatatattcagttctttgttttgcctagaaaataggaagaacactaacatttttgagctaggtgtctgttatgtacattgtattatactagcttcattttagatatcaggaggcactagtggctttgagaggaggatttagcattagtttttgttttttatctgacaggtagctatggatattctgagggagaagccaggattaatacacatttttttttttaagttgctgaattgtagtggctctcctttctagcatttttgtcactattgagccctcttagtttatgctagacgtgtttttcttattggttgatattttaaattattaaagccatcttctgaataagctttattcgcactttgtacctagtttctccatcagaaggatctattgctataccattgtatacattttctcattggtcttcgggttactttcagagtgtaaagactc

SEQ ID NO: 61016 - DNA, 1934 bp, Homo sapiens
tggggggttttggaacttgctggaagctacatcagaaactgccatagttaattgccatttcaagaatgttgtaaataactcaggtggccgtttaattctcaatgtaaatataattaactagacgtctttcctatatttgtgtctcagttttaaagctatttctggatgcttgagtcttaccgtaattgataacaaaaagaggttattgagaatatctatgatttacagagtaagttattctagacctcaagagtgaaatgtaggggaggagacatttgtgtgttaaactaatggaaatgctcatttaatagatattcactgaaagtattagttttggtttattgctagaaaagttgaggttttatggagatttttgtaaaaaatggtttatttcctaaataaatatctctttttcttttttctcccagaaaatgttaatctatgatccagccaaacgaatttctggcaaaatggcactgaatcatccatattttaatgatttggacaatcagattaagaagatgtagctttctgacaaaaagtttccatatgttatatcaacagatagttgtgtttttattgttaactcttgtctatttttgtcttatatatatttctttgttatcaaacttcagctgtacttcgtcttctaatttcaaaaatataacttaaaaatgtaaatattctatatgaatttaaatataattctgtaaatgtgtgtaggtctcactgtaacaactatttgttactataataaaactataatattgatgtcaggaatcaggaaaaaatttgagttggcttaaatcatctcagtccttatggcagttttattttcctgtagttggaactactaaaatttaggaaaatgctaagttcaagtttcgtaatgctttgaagtatttttatgctctgaatgtttaaatgttctcatcagtttcttgccatgttgttaactatacaacctggctaaagatgaatatttttctactggtattttaatttttgacctaaatgtttaagcattcggaatgagaaaactatacagatttgagaaatgatgctaaatttataggagttttcagtaacttaaaaagctaacatgagagcatgccaaaatttgctaagtcttacaaagatcaagggctgtccgcaacagggaagaacagttttgaaaatttatgaactatcttatttttaggtaggttttgaaagctttttgtctaagtgaattcttatgccttggtcagagtaataactgaaggagttgcttatcttggctttcgagtctgagtttaaaactacacattttgacatagtgtttattagcagccatctaaaaaggctctaatgtatatttaactaaaattactagctttgggaattaaactgtttaacaaataatgctgctcattgtgattcttacctataagcagcctaatttgaattatttgctgcaatcaagagaagtgtacaatagttttattacttttttagtgtacttctatcctttttccaactatatctcctctatttttcctcctcgttaacaggctagaatgtgcattcctgggttaccgatttttacactcaattggatgtgtaatgagggatctatctaatccatcttgtcttggaaattttgcactctagaagaaagtgtgtcactttcttcagcagcgagaccttttaagattggtggtttggttgtcctgttctgtggtctttggtggaagccagtttgttgtaagagaatgtagagcttattaatgtaagtcatttggggttatattgtggagggttgtttaggattgcatggcaggaattgggtaaatgaaaggtaacactaaagattggagatggtataatggcatatctacaggtctgtgtttccttatctgcgaagtgagacattgaaatagatctgttttgca

SEQ ID NO: 61017 - DNA, 1067 bp, Homo sapiens
aaaaagctaactttatccaacttcagtttaattaaaagcatgtaccagataagatttattgtgatagttaatattgcatatgcataaagtcactggcacagaaacatctaacgtatgtatagcaaaggaaaaaggcaaagagctcaacttcatctcttttatcgttttttcaggagaaatatctcatgcgttaccatgtttggaatatttcctagcatgtgcaaaaagcaaggaataaacaataattcaatgtgcctaatggcataaaataaaaggattattcacaaacagaaaactggacttttgagcagatgtttatttaaatacaaacagcaactcctacttttcctgttatctccaattatgtgatgcaacatttttagcagaagaagtgctttttaaaaacagccttccagggagtgaataaacaatactatatttggctagcagctgcttttggaaaatgagatgtcagcaaagctgaatattgtttaaagaaaactaattatccagctacctttgacttggatcagagtaaataaagcacttcctgatttgcactgaaatgttttgtctagaatttaaatattaggtattagtcagatacttctcttcttccttcgcttgccttgtggacccaatggatttaaataagtaccctttgtgtttggttgtgctgccagtacccctttatgttttctggagtgcctagcatttgttgcttcttttcttatttgccatccactagttattgtgttaggtgtaaagcagtgtgtttatggttacattaaaatctaggtaatctatgataatataggatggttgcatttgtatacatttaattatgcaaatgtaaaatatatattttatgagtaatttttaaattctatttaaaaattatgtgtagaatttgaatgaatgtaaataccctccatttttgaaaattcatttcaaggttagcaagccaaagaagctgcaaactggtttatactattgccacatggcactttggccagtaaagagaaattcctgcagccctttttcagggttgcatgcatcagcctgca

SEQ ID NO: 61018 - DNA, 1078 bp, Homo sapiens
attttacagtgagcaattcatacaacagtatacaacagtgatgatcttgagaaaaataaaaagctgcattaaaatacacatatacaatagttacagatttcaaggaagtgtctccctacttaatactttactgtggaaaaatttgtgttgaattgtgcaagtttttcaagaatatattctctctataaaatctggtatatgatattcatgtaaggagtgttaatagaaaacaattctaagacaagcagaaatttaatggttctataaatgtttgttcatccaatgaatattgagcacctattatgagtcagatactgtgctaggacatgaggacatattaatagttttgaacttaataggtttatacttctttacctccattcatgagagattatatgcaagtgaatacatgtaacaggatcttagaatggaactcttcctgcctcagttttgactaaagacaataaggtaatttccagaattccatatctgatatacatatttataaggaaatggctctaagaacctgtcccactacttgtaggttcaggataagctacataatttgtggggcccagtgcaaaatgaaagtgcagggcctcttgttaaaaaactattaaattccagatagcaacagctgagcattaaaccaagcatagggcccttctaagtgccctgtgtgactgcacaggtcagacatccatgaagtgtcaccctgcttggatccttcagccaaagaaagaaaatgaaaagggcatagagtgaagaagggagatttgggggagggtgatttttggaagctgttacatgcttttagaatgctgccatctaacacatgctcaatggagagggcttcaaagggacctcttgaggagctctgaaacatgcctgtttgaagtctcatttacgctcagactcgcctggggtgtaaagcctacccaaacgatctacaggactgtcaggagaatgccactgtggtagaatgccactgctcgcctagaggtgatgggggcaggggttaattgcctaaccatgttggggccaagagggagagagagttggaaaggggaagtcttgg

SEQ ID NO: 61019 - DNA, 1029 bp, Homo sapiens
tcaataactatacagtgacctcatgtatccatcactcagtttcattattattacatttgaaaccctcaatgtctctctccctgattacatgccccttttgcccttaaaataaagattgatttctttattctttttcagcttttacaatctatctagctatctgtcatcatcatattgcatataaagggtattacactacacattttgaaatttatttgtctggctctgctttgtgagagttctccatgttgataaatgtagctatagttcatttgctttcactgctctagggtatttcactgtgtgactctaccacaattcattgatctattctgtcgatagacacttgtttctcatgttttgcttttaagaacaatgaggctataagttctagtgtatatgtctccattttcttgggcaaggttgtgtttgtttcctttgcagatcaactccttgcccttatgctgctctgctctgtatctcgggaccagacccacatgggttgcatttcccaggcccctgtatctacccggcttgtttttcagtttaggcactggtgggagaggggagagagaagccagagtgcttggctccgtatctgccagtctcagatggcctcattctgcacatctagcacccactggacagacccaccccagttctatccttctctcagaaaagccagttaactcctggtggggctacccttttgtcttagactggggtgccagaggtttcctgaagttgctcactcctggttgcctcgctgactactctttgacttaactctttcaattcccagataacctattctgtggattaaaccccttctgtttcaatacttggaatgattttttgttttcatggttgtaggtatggttgtatacatcttcaactccaaatgactctccacacatgctgatttagacctctgcctgcagtgtgtaagagttctcgttgttataatcttcaccaatattaggtattaccacactttttaggttttactaatctgactggcctgaagca

SEQ ID NO: 61020 - DNA, 1068 bp, Homo sapiens
tctcacctctcactcccctctccagctccttaacattttctttatacaaactcaagcaaatttgaatatatcttgttatacttcccaatttttatacaaaaataacatacaggcagtttttaaaaaaactacagatttaagtgatgtttaattgatagtttttaaactcaggttttaatttttaattagatatttcctgtgaattgactatcatttggataatttttccttatctcctatgacaattttcaagttttcttttaagagtctgtggttagtcaccagtgcaagacaagtaagtctggggtgtctttgtttttattatttcagaatcggaaaagtttatatgtgtttggtaaagaaaatttgaagaaaagagaaaccacaaaaaagagtaatcctactactcagaaatatgtaatgatgactgttattgtgtttaggactctggtactgtataatagatatcttgaatgtcccaataaaacacaaacaaaagtaacatttactttaaactgtaaagtggagaagcattaatttaccatgaaatcacaaatgttcaaaatttccaagttcatgggtgacagcaatgagatgtgtttgtcgatgtgtattaacttgctctctctatattttatttttatctatatatcctctttattttattttattttatttttttttttttgagacagggtcaggctcaggctggagtgccgtgatggctcactgcagcctccatctcctgggctcaagctatccttcctgcctcagcttcctaagtagttgggactactggtgtgcaccaccatgcccggctaatttaaaaattttttgaagagatggtggtctcactttgttgccaaggctggtctcgaactcctgggcttaagtgatcatctcacctcagccgcccaaagttctaagattacaaacaggagccactgtgcccggccttattttatttttaaaaggagtcttaaatagagatacatgttgattatgtgcatagtataaggaatttcatcacccctctattcagtgcaatgtacttcaacaagtatgtat

SEQ ID NO: 61021 - DNA, 1028 bp, Homo sapiens
gtcttttgaaacagttccaggggatggtttataacctgtactctctccagcaagtattcctcctagagaaaaatgtaatgatccagaatttcatattgggaccattcacttgagggaatgatttgcagttgtgtctgtttgttgcactgtgttcccaccttacccccatacacacccactacaaggaaataatatgattattgctaagccctgacaagccttggcaggaagagcttaggatggattctcccatgctcattcattagaccctaacctagtgatgtgctggtaagtgtttaacagtcagcttgagggcaagtgggaccccaatctgttgcgtttgccaatttctatgatataaatactcccatcatggctgatgataacatatgaagtcactaaactcaaagtagggaagaaatgcacacaattggttctctcaagctggaacaaacccacctggcagaacactgccccagccttgttttcagagagaaatctaacagcaagagaagttggaagcaccagctaaaactgtctctgatgtttgggttgtgattttcagtgagtctcttgagtgggtttctgaggtctctggcttttctattggcctcacagtggagatatggggccacagaggaagcatgctgtaggttctagggatccacctgaccaaagaaacatcaagagcgacagacaacagaagggaagtcagagaagggcacagacagaaagtgagggatcgcagcaggcccaccaggtctggggagggaatgggggagtagatagttgatttttgaggatctagtcttttttaatcatagccacctcagctgccaccttcctgagcattgcttagaatggaagggtggagtatctggatctctccaccctgcccataccgcctgctcttcttatgtaaccaaaggagaggtataggacagtcacacattctgcagtctcctctttcggatcttggccccagcaagctgagctctgacatgcgacacgaagtattccattgcgga

SEQ ID NO: 61022 - DNA, 1031 bp, Homo sapiens
atttaatgtaagcaccctgcagttttctgcattgcaagtgattatttttagaaattttatggttgcctgcatatatttgtttgtcttcattgatatgtagggggggaagctcattaatgatttaaaaggaaggtgttttgattcatcgacttgactcttctcattacataaacagtaaaggcaatggcaataaattaacatctaatgaaattgtaagagtttatttctgaatttagctacaagatagtcttgaatccttgggcgtaacttttcttattctttgtatccttttgcctcagtgttttgaaagtcatcattcagcacattttaacctagaatgatggtttataattcctatgaaagattccttttagcagctatttatcaaacaccataattggacaactgttttgtaaaatagttctttgactcctagaatggtaagttattatgtaaaaatggaagacccttatgtcaaaatttactataaagcagtttttcttttccccatatacctgctttgtatctcatgtaacatttgagaaatctgcttccaatattttctcatcttgttagtcatcaatctaattctcgcctagttatatgttaaatattaccttcttgccttacttagtaaagagtcaaaattcctgcaaattcaggatttttcttttcggaaacagataagtggctatgctgtctacatgtgtgcataagtgggaagaagggcagaaatccttctgtgtatttgctgaccctgtacagcaaatacttgttacattttcagtaatgtttaaattgtttgctttatctcattgggatgagtcatcatcacctttatgttttttaaactggtgaaaggtagtttgtattttcttttctcttgaaactatttcttgtgatgaagagaaatagttcagcatgttgtggttccaggactgagacaagtttgggtaatcatctctaccataaaataacttcatcggaaacgtcaatgcatcagcattctgcagtgcaatatggaaatgaac

SEQ ID NO: 61023 - DNA, 1025 bp, Homo sapiens
ctgcatttagaataagatccaaactcctgactatggcctgaaaggctgagtatgatctatccccacctacctttctaaccttccggcttccccacttcctatccctcgggctcttcaggcctgtttcctctcccatctcttgaacgggcccttctcattctccagatggcaggaatgaggcctcttcagacaggtcacccagtctgcccttcaggcttcccatccattattttttctcgacatcctttggtttttttcaaggaccccccaaatttgtgatgatgtatttgtctacctgtttacttgtttctttccacctgactgtgaaccaccgctggcttgcttttcactgtacacctataggcctggcactcattcagtgcttagcatgtaatttttaaattaagactgccttagtgagaaaatttcagcaggtgagttaagggcacgaggaaagggcctttgtgcagaagtaatgacataggcaaattgtcaaaggagaggttccctggtgtatttgtagaagaaagtagacccatgtgtctgaacccagcacacagttcacttatggtggttttgaaatctgccctggaattttcatgcatcttttaaatttttggtttattttttcaagaaataaatgaagtctttattttttcaatgagggcaatgtttattaagaacagcacataaggtagaaaagaaggttggtttctaatcttggttcatctcccccactgatcttgagttttaaaagcatagagagcacgatcttctgtgggtctccactgtcagagagccctggtgagaatcatgagcggatgtagtaaaaagtgcttctttcatatcagcaggtggttctgtagtatttgcatccatagacttctatgcagcatcctttctgttacttactcttttcttttttaatcaaaacagtccattgaaaaaataatgttgattacaacaatgaattctgttgatttaaatggtggaaggcaatgttatcctggagatataattctgtg

SEQ ID NO: 61024 - DNA, 1169 bp, Homo sapiens
cagaattcctcggtttgatcgagttgatagtacttttggcattgctagttcactccctctccccaggatcgaattactcgtcagtggtctatgccggttaattactggagttcgtcgaaacgttcgccctcgaatctgccttttcggaaataagcccctcccacctccccgctcacctcccccctccaccctccccggccagctttggtttttaaatgttcatatttcccgacgtccgcctgcaattttaaaaaggtgttgtttggaaatactgtgaaaaatcctgcaacctaccaacaggttgagctctttccccctcccaaggtctggctcggccccctcccccgacccaactttcctgcgcagctgtcttcctccccctccctctccccctcctgatttcttattatttgcttttcaaatttattacttcaacatggcctgtgatctggaaaagggaaggattaaatatccagaaaagaactggtgcttaacagacttctgactaagtccaggaggaaattattcagtgttttatgggatattttgtggtcactcttttttggggggcggggaattgaaattgggatgttttttaaagaccctgagttgaccccacttggtacagttttaatttttgttggtgtaattaaatggtgaattctgatttaagaataaaggctatatttgccaaacgttgcatctgctagaagtgttgacagtgaatagatatatttttaaatacacgatttctttttaattgttcattatggggaattgaaagggaaccattgtaatgatctgtgcatttcgtcactgctatatgagccatacctgagaaaattaatcttgccatttaaaagtaaactctagggggtttgcggagggagatggctctatttataatcctcagctgcatatacatcgtctaatattatgcatgatttgttttttaatgctaacacggctggtaattagctgtatgattatacttgtatatttcattaggactttggctgatgtcattgtgaattattcagccatattaaaacaattttcaattgagataatgacacgcctcaaaattatgcaaatgcagactgcattgtgcaaaataattatgacaaatgtaaagcaggtagaaagtttcccaatgcagatcggttttc

SEQ ID NO: 61025 - DNA, 1040 bp, Homo sapiens
gaatagtaaaaaaaaaaaacaagaatgttctcacaaatgtgtgtctgccaacaaattaatactccacaaagagaaactctgccccacatggcagcttccaataaatgctctgattcaaatcacaactctttcattttttttttatccccttcccccttgagggagcacatttagacaatatttgaggatgtcatctttctgctttttaaaactctctagagttttcatttaagactcttaatggttgatgactaaaactacagatctggatagtggaaaaactaataatcttaaaaaacacttctgaaatgtggtaaagtgcattcattctcttccctcctctttgtccttttcaaagaaagaaagttcaatatgaaaccaatgcaaattatgactttactcagtgagatattttaccttctttcagactgtttcatactgaagtttataaaaaaaaaagaaaaataactatgttaaaataggagggttaaggaatgtattattcataagcataatgaacacaagaacctgtttttccagaagaattgggttgattaaatcattcaccacacaagcctctagttatttatttttgtctttagaattacagtacttagcttttataataaagtggacttgatacccatatttggtatggcagttgaaagtagtcaaatgaagaattatttcattttacaaaatttttagtaagtaaggaatataaacactatcagttaaacatagcaaacttgcatttttttattccttgggctatagtttgaaaaaaaaatcaaattattttatgtaacactgattcttacagagttcctttaagcgaagtatgaaagctgcagtgtaagctttattggcctataaatatgtcattatagttggactacatttatatgctttggattgttgtttaagccaagaaaatatgtctctacaggttgactttttattgaagccctttgaggcatacaacagaatgtattttaggccaaggttattaaaacagcattttcatttttttgcagcag

SEQ ID NO: 61026 - DNA, 1055 bp, Homo sapiens
gcaacctctgcctcctgggttcaagcaatttccctgcctcagcctcccgagtagctgggactacaggtgcgcgccaccacatccggctaatttttttgtattttagtagagacggggcttcatcgtgttggccaggatggcctcgatctcctgacctcgtgatctgcccaccttggcctaccaaagtgctgggattacaggtgtgagccaccatgcccagctgaggtgatttttttataccatttaactcatttatattgcaggagctcatttttactaagaatcctagagccagaataggagtagattctagagaaaggccccagtgatccattacgcatggccagaactctaaggagctggcttggcatcctccagatacaacatgacattagcaaaactactggactcttctctagagctgtatggccttggcctttttataagtaagagcaaaaagggggaaaatattctgccactacactccctgaagtttaggtacctatttttttgtttgtttttatacacagtaatattaagtgtagactagtatctaatgaacatcgttgttaatatggcagctactgtggctcaatatcaatgttgtgccttttgagcttctgtagttcctgtagttttttactctagcatttaggatagggcttgcccaaactgatttttgcctcagtaacggtctacagttgaagaccagcttggtgtctgagagtctgtttaagctattccaaccaaataatataaaaactgcaagtctttcctaaattttcatatgtgatagtttaatcatgttgttctcttggacttaagctgttcttgtttttgttttgttttgtctattttttctagcagtttgtttttttacagccatatctatgataaaagaccatgatggaggctgggcacggtggctcacgcctataatcccaacactttgggaggccaaggcaggtggatcacttgaggtcaggagtttgagaccagcctgatcaacatggtaaaaccccgtttcctactaaaaatacaaaattagacgggta

SEQ ID NO: 61027 - DNA, 1341 bp, Homo sapiens
tttcagattggagggtttcttttttcatgaatgtgtaggaaggaagggcatgactgtcttatttcatatatttttcttttatattttcaaattataaattttgacaacaggagacaataggtaatattcattctctactgtctggacagcatggaaatactacgtacagtaatgtcttcagtagttactttctctttagaaagctccaaggaagctcacaacagtaggaagtcctactgaaactccttttggtaaagtggagcacgttttgtaatggaaacacattttctatggcttaatttttatatatagggttttcataaaatgagacttgcctaaggattcttttggaagccttttgcctcttttaacagcaatgtgtttattataggaatcagtctcctgctcacttataaaatattctaaatattcacttataaatattctaaatatttataagattatgagttttgtcttttaagtagggagttctgcatattgtttttggccaaaatgtagcctgcctccttgagcatgagttgaagcccaagatgagaagcccttttttttcccctctgaccaagatctcatctgccatttactagattaggctacttgaagggaaggaaatgagggcccccttcttttaatccaggacattgttaggtatatcataggtgctccgtaggtatgttggatgaatggatggatgattagaccttaaatcttgtacttggcagcaacataatgtagtggtaagggactaaaagtctggcagacatagactagcactctggatccccaatctctagctttatgcccttcggcaagttgtagagtatcagttttctcatctgtaaaatgggtataataaatctatctgatagggatactgtaggatttaataacatatagaatcccaggtgcttatggacatttttctggtgccataaagcacttgatacatggtagcattattaaactcttaagccttaaatcaggatatcctagactttagtcatttataaagcaactttatagttcttgccataccaataacactgttttattatttacttaatttttctttaaattaattgctttttaatttaaagaactttaagtaggaaattttatatcatcactgtaaatggaaaacctgtatcacttgctataattaatggtgaaggtaaatatataatccttaaaataaaaaatatgtttatccatgtaccacctaacattgacttgggtaccgctagtgtataccacagttaagtcatttcctttgaggcttttctcttgggcaacagcctaacctaggttatcgatagctttgag

SEQ ID NO: 61028 - DNA, 1075 bp, Homo sapiens
aagtgctgggattacaggcgtgagccatcgcacccggccttctcggcaatttctgaatacagatcttagcagggtgagggaaacggtaattgttattactaccaactggccccaaacagttattgcataacgttgcacaactgagtcctgggtaaaatgagcttcttcagaaattgcctcgccaaaggtgatttgccaaggttgaatccttcggattgtctgcattggaacaacccccttgcccaagcactgagcttaagctagataaaaggaaataaacactgctttaaaagggagtgcactttagcagcacacaaaaaacaaaggtgaaggctcacatctgtgttgcattgcataattgataaaagctgaagcaccattagaaacagcctcatcatccatactcctctcctaatcatttaaatatgtacagcatgttttaggatgcttgttaatgactctacgggcacgttggtagtcagaacattacatgtgggtttgagaaataggcctggatcatttgccagacaatctaattctgacagtgtagtgaaggccatcttcaatttgactgtgctccactctgttatgctgtgaaagaaaaagataattcagctgagcattctgccgttggctagaaacaccgcagttctgaatacaaatattatgcaggtaaatgaatcattaaaagaatagaggcataaaatatctgacagatgaactcctaaagtttggactagaataaattttcccatatatgagcagtaccttcatccatcgactaacagtgttagttatccgttaagtcaccaaaaagcatttatggtcttagagtaaatgattggtaattatgacttacaaggctataaatacatggaggggatttggtgatatcataataaaccacgaaagaaactgcagtggtttttaatgttagtagaaacttaagaaatatttagagccgtgttcgcagccctacagttgttttttttcttttttctgggagtgtgtgattggtgttttgtcaaaatgtgcaactctaccaatggactcaactcaactaatgtaaattagg

SEQ ID NO: 61029 - DNA, 1055 bp, Homo sapiens
accaagtcactcttggcactttctccttgttgcatgggctaccaaagtgaaaacaaggagaaccttaaggtcatcatatggcatagtaaaccaaacccaactcagtgctggtagaggtgtaatggatgtgctccgtgatacatgtaatgattaaaagatggactcagcttctaagagagtaagacaaaagtagagcaagagagaagacctccttgggcagaggcctcagaagctagaatatcatttctcttgggaaaagaattttgtgtgttgctactgtaaattaatttacagtcataatatatggaatggctaagattcgaggatttcttttctgtttttggaacttgaaaggagatttaaaaataactctggacaccttttgtagctgagtgggctcaatgggttattaaaaacaatttgggctcatgggtacaataaacttttgttcacgccgtaagaaatgatttgtgtctatattgactaatatttcacctagcatttcatctagaaaagcgagaaagttatatcccattacattagcaacatcaacatatttctctctagggtgaaactgacatttttatcaattaaaaaacatacatgctgcaggaaagaaccaggtcattgaaaaatcacaagcaaaagtgctggtctggggtagtggtggtggagagagattcagaataagtctatgttcgcttgacttaagcagcctccttgataaatgaagattctctgtaatcccctttattatgtcctgccagggaactagatggatataagttccttgaactgtaggtgaggctgtgtggagatgcttagagcctattacagtgcctgacacatgataggctctcattcattcattcattcattcattcatttaaccagggtttattccacagctattatatgtgaggtgctgttctggtctatgaggacaacagttgtgaacgagacagaaaatttcccacttttatagtatgtggaaaggggagtgacaaaatgtgagataactgtggacctgacctcacaggtattgacctcacagg

SEQ ID NO: 61030 - DNA, 1037 bp, Homo sapiens
catggtgaaaccctgtctctactaaaaatgcaaaaattagccaggtgtggtgacatgccccgtaatcctagctactgaggaggctgaggtgggagaattgcttgaatctgggcatcggagactgcagtgagccaagatcacgtcattgcactccagcctgggcaacagagcgagaccccgtctcgaaaaaaaaaataagtcatggtattttgttttgttctgcttttttttttttcttcaaaaatagaaatttaggaattctgagtcaggccacatattatttggctaattcagctgcagagtaagttattaatgacccccagatgttgtttatagtgattggaaatgtttggttgtgaaataatattttcttttttgtgtgtgcaagtgatatttcttaatatgctctacagcatctgaataaaagtttgatggcagaacagtttgcatgtccaatgtaattgcttctaagtgagctcttcattcttcacatttttagctctaattgctttttttcccatatgtctaaaaataaatatttgcaagttttgtgttctgctactcattgtaatacataaaatatttgtacactgagcaaaattcactgataatgttcacagtgggctatttagagaaagtaaggtttgtgtgtagaggagataaaatacatttttattattcaatagtataaatgccagagaaagccatttatcttactttgaaagaatatttttaaagaagtggccagatatttgacctctgagatgatttaaatagattcagttggaagaaaagatccagtgtcaaaaataatcgggttttctatataatagatattttaaatgatctctgcaaggtggcaattaattttttattatcagggacagaggccccactatgtagattatctaagtccctgacttcctgggcagacctcctctcccttcgtttgagtttattccagctcattagcacctccatccgaaggttggcagagaaaaggagaggaagaaaaaatgaaatcacttctgctgctc

SEQ ID NO: 61031 - DNA, 1054 bp, Homo sapiens
gtgaatcatatacacacgtaaaagtaacagtacgtctattgctttgcactgttttttttctaataaaactgactgaagccagatatgctatcagtaagggtactgctctctccctagcagagctttttcttggtagagatcagtctcacctaaagaacaagagctggtctaattctggagtcttaggatttaggttctgtcagtaagtacatagcactgagctttcaaggagagggcaggtgtaggtccttgcagggtggctggaaggaggtggggctgtctcttacatgagtgaattaaagtccgcagacccatcccactcctgcccaccagcacaccataatgcacctgttttcactcactgacctagcaaatgacagattatgactctagagggacaaagatgtggcctggggaccagaatttttgctgtccccaaagccagtccttcaataccaaaactttacctggagtcttctgaatccaaaaggtctctgattcgattgcagaggcacctacccagtcctttgtgttccattccccccaccccgtactttgaatatttgtgctcttcagggtgtttgtgcattgcatgtggggactagattatagccttactgagataccaaaggcctttggtttcctgtctccattcccagtgcaaactcaagtcaccagtttatgtttccagagcataagcataagtagtaaaggtgaatgcagttttacaagtgcccagtgtgacaagtataccacgtgtgaggttggcgggaccagtctatgaggacaggaaagaacagtatgtgggcatctttatttccattagtcactttttcattcaacaaatacatgttatgcaatgcagccttttgggtgttgtgctgggcagataaaagacacatcccacagggtcttgcccttaaggattctccagtctggtataataatatgccaaaaaccacagctaaagtacaaggagtacagtgatatgttccataagagaaggagggaaaaaaagttcagaggggagagtaggagaggaatttgattttga

SEQ ID NO: 61032 - DNA, 1055 bp, Homo sapiens
cctagcattttggtgaaaagcacttagacctaaaaggcatttatttctagaaaagctttcaaatcccaaaggccttttcgacagaacttgcatcgaacatgctgtttttaaataaaggcaaaggttccgggaactgacaagaagtcatccccaaactgggtttattttctccattctttgagctgttttcagaacccagagaagcacatgtactcccccagcagattctgagaattacaaatttagaacagactagcacctaatattctggtcacacaaacgtaaactctaaatgggatttgatcaagagaaaaagccctttgttcttagtaaggcaagtacttgcgtatttcaggtatggttaggcaaatcctaccagtcattcaggactcaaaatcaaattcctctcctactctcccctctgaactttttttccctccttctcttatggaacatatcactgtactccttgtactttagctgtggtttttggcatattattataccagactggagaatccttaagggcaagaccctgtgggatgtgtcttttatctgcccagcacaacacccaaaaggctgcattgcataacatgtatttgttgaatgaaaaagtgactaatggaaataaagatgcccacatactgttctttcctgtcctcatagactggtcccgccaacctcacacgtggtatacttgtcacactgggcacttgtaaaactgcattcacctttactacttatgcttatgctctggaaacataaactggtgacttgagtttgcactgggaatggagacaggaaaccaaaggcctttggtatctcagtaaggctataatctagtccccacatgcaatgcacaaacaccctgaagagcacaaatattcaaagtacggggtggggggaatggaacacaaaggactgggtaggtgcctctgcaatcgaatcagagaccttttggattcagaagactccaggtaaagttttggtattgaaggactggctttggggacagcaaaaattctggtccccaggccacatctttgtccctctag

SEQ ID NO: 61033 - DNA, 3974 bp, Homo sapiens
gatagtcatagctctcaataaacagcagccttttccccctactttctgtgtagatcttaaaaggaacaagctcagcatcaaggatgaaatagaactttgatttgtatcttgtcttttcaaaagtgtaacccccatggaatcaggctaaccccagtgtaatctttggatgttatattaaataagccttaagatcttcataaaaatatattgaaaaggaaaagacagcatgctgatttaaatgtatctgtcagatttgttgagatttgaaacttgctggttgcagtattgttagtaaatatatgtaataatgttttccagcttgctgttgtgaatgcccctctctctatagctatctctctacttatctgtatggtaatttgagagaatgcccttgtctctgaatattttgtaaaagagatgttttcaaacatttcattactatgataccataagggcaggcatgtcacttaggtttcggaaagcaagatacaaaacaaaaaccaaagattgagctcaaagcctggctcagtttttcagcaccaaatgcttcttgtctaacaacgtggaaggacatttttcttatcatgatcctttagagctaagagcttcgtgttacttctattaattagacatgttaaagctaaatagattagctttgggaaacgtgtacagaaatgtatactctaccaatatgcaagccttcagagagagaagcatgtaataatgagggctgcctgccacagatctgtacatttctctgaacaattagaagggatcactgtagtgagattctgggtctttaataaagaaacccatgcaagtgaaaatgtatatcaattgttttccatttgttttcagcgccaaatcttaaaggcagaccacgcaaaaagaaaccatgcccacaaagaagagattcattcagtggtgttaaggattccaacaacaattccgatggcaaagccgttgccaaggtacggtcattcactccacggtattcatttcgttgcatctttttatttttgctttttctctttatctctctgtgcctgtgtcttggaggcagttttcaattcagcatctgactttggtattcagagcttttgaagctctatgctgtgcctgttcctgccacctcccttcccctggttgccgtgggctgggggaggtaggcattttgattagtcaacagaaagacttcctacctcccagtttggcctgttatgagtaaaggacagatgattaagcacccacgtcattgaggctgagatttcatagtgggtgacacaatgacatagtttactctgcttgtgtcaaaaatagaccagctgaaccgtcctctttctgaatgtgttcatctaaatgtgttttggagattaacagaggatgaaattagaaatagctagaattaatctttttagttatgtatttttcaaagtcacttctaatttacattagactaaaattaaagatacatagcaaaatatttagatgtatacatatgcccacaagcatttatatacttttaaagatctctgttaacatagaatgaaagtaaattctacgctgttgttcaagacccaggtcaattttttacctaagcattctttggaatcttgaaagtgcatgcatgcctgaagtattttgcacgacaaagggtaaagtatcactttatatttttagacttacctttctgacttttgtgggcttgggtcagatttccatggttctgtttactgcatttaggtgttatttttgtgctaaagacagcaatcgtccctttaggattttagttgacgaacagatttcaactgacaccagtttccagatcaaataactaaacttctgaaaatgggaccattttgattagtggtgaatttggaagagtctgatgtagaaaaaaaaaaacatgagttaagttctgtgttgacagtctactgtttctctgccatgtactctacctccttcccagtgtaatgaagtaaatcttagactttcacattctaaaaaatcttatctttaagcatcattgtttcattaggaaattttaaggacttttttgcttagaatttcttcatacttctaagattccaaagggttaagaagagatcaaccagtagaaatgtgtattttccagtttcttgctgaaaacaaatctctttccctaaagttattgttgttttgcacatttaactttctgcgaattaactccacatggatgccatgaatgacattttcttgtaagttggacacctcagccctagaactatctacctaggactttggtttccatcgtcttgaaggatgtcagcaggaacagttcattccctactatgtagtttgcaagatcctgcagaatggcgcaagaaggtttcaagaccataacattcagcagagcttgtactgcccatgccttctgttggtgcccagcccatccttcttggttgacagcatttgtttactccagcatattctgtacctgagcccggcaggataaagctccttcccatgccacttggaatcaccaccaaggtctgcttctgagaattttacagaactcatacaattgatctgaaagagcagacctccaatgtttctttccatggaaggcagctcagaactcactgttgggttcacaaagccgagaagaacaagagcctgctatacagatgggccatatttgatgttcactgacttcttaacaagaaggatagaagtcagtcctgggttttctaagtgacgcctttactccatccccgcaacagtgctgcccgtcagaatctttacaaagagatggatcattcttccaccgttggtgttcaatggtgaacagatgaatgtcatgctgcagtcagctcctagggactggtctaatggcttggctcttttcagagtcttggattacagtcatgccttggctgcttccagtgggtctggcaagaccacttaagcaaaaagatcagtaggtatgaagtgtgacgagcttgtctgttgacaccaacaggcagatgtaaaatccctacagaatgaacaagccacatctgggatgaggacagtcattaaaaagcatgtgtgtcttaacatggtcttttctcatgaaacactgcagtagagattatgagtctgtgaccatctaatcatctgttgaattgaaagcagcatcttagaggacagtgagctgtttgactttgtgaccaagacccatgtgactgtttctttttaaaagtgcctcaaacagaccatttctaactaagcaccaacttcatgcagctccacacagcaaagctcttagagtgggacccactgggtttgttgtgttcatgactggaaaaataagtcaagtgatttgccggtcgccatcaaaacgttgcactccctcaatgagaacatgaaaaccagctttgcaagaccatgttttccaacggagagagaattacatggctccccaaagacagcaagtgtcacgtggggaggaaactaccagttctttgaagatctcatgactgtgttcagcccaaatcctgccatttttttctggaataatcttaaagcagtgaacctgaggcccaggcctttcatagagtgatctataacagaaatcttcatggcataggaccctaataaaaggcctacattgatagaaggcaaattatttttaatatcccgtatgcattttctgaagggcagaagtgtattacaggtggtttatattctaaaaggaacacaaaaaaggaaactgtggtgggaagtgtgttcatttaaaccataaacatactttctatatttcacaaatgtgatactttcattattttcaatatttttcctctcatttggtcctcagaactattcccagggattatcatttttgctttactaaggtagaaactgagggtcacctagcaagttagcaaccaaaccaagattagaactctagctttttgtattgctggttcagcacatcttactgccccagttga

SEQ ID NO: 61034 - DNA, 1064 bp, Homo sapiens
tttctaatacgaaaataataactacctcattcgggttttaagtttgaaataacacataaacagcgttgagaatggagcctggctgcccaggaaacactcaggaaggggtgggaggcaatacaaattaaaactggagtgatgttatgatttcaagaagccattaaattatagatttcatcagaactttagatccaacagcctaaaatttggcagtgaaaaatgatgacaacataaagtttcacgggatgttcgccttcatataatgttagagagtacaaaatctacatgggaaaattgttttagtcccatttccatagccccttaaaagttaaaatcctacctagaagccccattgaatcagtttcagaggaagttttatctttgcaggaccagtcgaaagatattaaactgtatgtgttcacttgagagaataagcaatgaagaactcctgcagagaatgtactttcctttactaaataagcatagtcttttatgttcttaatgcttaggaaggaggagctgcagggaaagaaaaaggttcgaaatcctgtaatggacagcattgtagaatatgtgggacatttttattcgtaacatttccccagcacttgccctcttctctcccgatgtcagttacggagatgtaaagaatattggaatgtacacattccccatgggcacacttgaactcagagtctgaccctttgtacttcccccttttacaattaaaatagctcagcaacttagtgttatatttaacgaccatcaaagtcctcttgtagaacatggcagtgaggagggaaagttaggttagccgctcgatatgccaagttccctgtctgcctacagtgtggaaggaagaacatctggagactttaccgccttttattttttaattatggagctttatactcactcttcttgggtttttagctgacctctactctttcttttgtggcaagttaacatcttattcttagagctgactgataaagcaagaagccctcattaaacagtgagatcttttgtttcctactgagggtgtacccccgcatcactcttgg

SEQ ID NO: 61035 - DNA, 1328 bp, Homo sapiens
tgttgctggctctgtcactagctatgtcttggtaagcatcctggggctgtgcctcgtctgatgtggtatattttcccttttccaggtgaaatgtgaggccaggtcagccttgaccaagccgaagaataaccataactgtaaaaaagtctcaaatgaagaaaaaccaaaggttgccattggtgaagagtgcagggcagatgaacaagccttcttggtggcactttataaatacatgaaagaaaggaaaacgccgatagaacgaataccctatttaggttttaaacagagtgagtatacttgttttcgtttctgaattatcagagctgctcagattctttgaattggaaaaaataattttgactcaggattatgttgaaatcctaatctggggatagtgctctctgtttatactaaatccataaatgttccaggccaagaattttttccctgcctttttccgctacattgttcccttctgggacagttgcagtgagatatttataggcttgaatccactgattatgactggaaatagacatgttgaaagtttctcatttgctgttttgtcaatcttgagtgtctgtgacgcctttcttgtgagataataatatgacgtagctttatcaggcacagatgttgcctgtgaaaaaaacagcttttaaaaggaggacatttaaagatggacaaaacaaccacaaagggaaaacacatttcctaagccccaaatgtgttaaaatataacaaaaatccaacttcagagaaaacaagaaatacacaaattggaacagagggcctaattttgaattactttgacatgtacatttaaatataagtgtcattgtatatttgcaaggagaacaggaaactcatagccaaacagaattccaaatcaaaagagaagaaatccagatcctgccttgattttgcaaccgaatatatattttgcctctgtctggatttagtggtgcacaaagcgatgagcctctggcttgaaatagtattttctccaaatgtatcttcgtagattaaaaccatgtgtcattttgatgaagaatgtcaaaactgtgtgttttacataacaatttacatacctaatagcaattggcactgattgcaggagaacactcgcagccattataaacttatataactacgaatgattacaatgtttgtctgaaaactggttgcttgaaatagaagtaaaattaatgtattatgaacagctttgttgcattatgcattggttcagattaaatcaaggccgaggcagggctcttgatagctctgaagtagtgcaaggttcaatgaggctttgcgaacatgttgtg

SEQ ID NO: 61036 - DNA, 1018 bp, Homo sapiens
ctgcaaagagaaatctgtttgaaaaaaatatatttgcaacatcacacaggccagttaggggactaagtgggttcatgattcaattcctctctgaatgaatgtcttccttcccttttatctgttgtatcactgtggcctccacgtgaaatatttgttttcctactcactgccagccaccacatgttggtgaaatactgtatgaacctttaatatagtgctgccatcagacattctattaagaaggtaatcgtatattaaagtggctgttatttattgattatggagagttcttatatgagagaagctctatatattactgtttaatcaatggcgtctaagggtcgaacaagaccaaccccagttttgagagcccatgctttttcccaaagacatctaatttagcttctcttgctctgctgatgacagtaggactaaaactcttgcctttatcctaaaagtagaaccatttttgtagctttatgactgtttcttaagaaatgttttaagtggtaataatagattctgttgtcaaatgccctttgggcaaattgtttcctaagaacttagctctctggggtactttagtatttctttttttctctttctcgttgaaaaaaaaaatgttttaattgacatttcttggaagtatgttaatgcaatgcttatctaaatacttattgtccctctaacagttaacctttggactatgtttcaagctgctcaaaaactgggaggatatgaaacagtaagtgtttaagcaacttaaatgaaataattttgcaatctaacttttcccctctctttgaccaaaatggagaacatgcaagggcaaaacatcactgactgccttttcaaatggctctacacttttgggggtttattgggccgctttggaaacagtcccaattagttccaggtttggcaaaattgtaaacttgtcgtaaaaactacaagtggaaaacatatgtaactctcccctgtcagggaaattagttgggtctgtaattttttcccatgt

SEQ ID NO: 61037 - DNA, 1766 bp, Homo sapiens
gctgcataaacaggaagttatcaaacttattcggaacaggctctgacactctttatcagctaattctaactgacagcaatgggttatttttagcccacaggaaaatttgatggccacggatttttacagcatgtattttgaaccaatgaaacattacagcaacaaactgagattaaaatctttaaataagaaagagctgcataaatataacccacagagatgacatctgtaatataatcaattgacataggaagatgttgtcattgggaatactttctcctccacacaatgatcagattaagttgtgtagtttcttcttgcaattgaataagaacttattttttcattccctgagaagtaatctgggatatctctgtaccatagtaaaatgacagtaagacacacaaagtcaagaaaatgaaattcattttagcccaaacgtaataaccagtgcttcttgccagataaagcacattgttccacaaactaatataatggtttgatgtgcgggtcttgggatggggaaagaggacaagcattatgtggttcagataatctggtattttctgttgagctatctgctatgaattccgactaaaaattctttcatatgaataatatgtgcttgtaatatgtttcatatatggcgtatgtacacatgtttataaagaaatatagtcacatggactacatataaaatgtgcatttcatattcataaatttacttgaaatatttattttatcaagtgacctatgtaaaaatagtaatttttcacttagtggagtcttttgataggatcaggatatgaactccttgccactgtagctcatagtttatggcaaaatcttgagctaattatagccctcattcatgtaaaaaaaaatggtaacttattcagggttagtctcataaacgtagaagtcaacccaataggctagactttcaagtctagcttttaatgtttagaataggaatatacgtttttatatgaaccatgactgcagatagttatatgatattgaacaatattatgaaacgtcttttcacactctggaactttttgttattcactgatagggagagtgccaacaatttcacagaatcagtttttcctgcttttgtgtcttctgtatcttcacaaagattttttttccatgcaacagcaagttgatgtagaatgtacagaagaaagtttaataaatttcagggcatttgcagtactctttgaacaaatagtatttatccttttgttggatgaatgaatgaccacacaatcagcaaaacacctgaccacatatttactgagtaccttatgtgtatgaggcattgttttagacactgttagatgcaaggtttcagtcaggccagtaatttcagtccttaagttgcttaccatccaagagagccaataatgatcaaacaaggtggaaaaaggtcagtgccctacacaggtaaagtacttactcacgtagagatgagagaaggaaggcttgatggctctgaggccatttgggaagaattctggggaatggataaaatttagacatgaatgatggattatgccttccagaaagagagaatgaatcaaataagggaaaatatatggaggtagaataaggttgggcatggagagtttgaaaaacataaaatagagtgatgaggtggctgggacaagtggccctgaagggaagtttctagagagaaggatggagagaagatggaaccaagtgaggaaagtcctccgatgctagctccctgatgttag

SEQ ID NO: 61038 - DNA, 2866 bp, Homo sapiens
cgtggcataatttaggggtgacatattctgatccccttcactggggctggggaatatggaggatcaaattggcatctgctctccatctggtcatgaacagaattttaaaaggcatttctgcttcatcccttcctcatttccttccttccttcttcctttttctttctttctttttaaatgtttcatgctatagattggccctgcagatacttcagtttgccaccactattctacatttaagcttctgaacctcctataagtacagaatacatttttctcttggcatattttgactaataaaactgtgagatgttcaatgggcattgaattttgaagtcagtccaggagatgtacaaataatatccaaagtctgaaggcttaagctgtcatcacagagttactagaggacacttatctttgacatgatctgatatcagaaacgagtgtagacttgtagtcatttagaactcaaaagagatcttagagtcttctagatcagtggctcctaaaagctactcaagaatagggctcatgtttttaatggggaactttaagtggttgtttagacccccaccccaagatataaactgtggtggggcatgggcctgagaagcagagaatccttttcttttaagctgcccaggtgatgttaattcaaatccagtgataacagtgataagtaacacttagccaagtgtttcccatggctcttagcttcagagtgtgacccctatctaagtcaagtatcaaagatttttcttcatgccattactacagaaacagggtagaatactcatattccttcggctcaagagcagcagagagtttctgacaagtatttttgcatttggtaaaatggtagtctaagttggaactcagtaaactatttttgttttcaatgaggggaagtgtagaactgtagtactctcaaattattttttctcaaattggcctttgtgcaaaaaaaaaaaaaaaaaaaaaaaaagtatgcctgctgtgccccagttcatagcctcattttacaagcgagaaaactgaggcactgggagatgaaatgagttgcatgggatcatcatggctttcttcaaattctgactcactgagaatttggtacacaattgtctcaccctctgtagcgttgctgaaagagatttataaatgattattctttgtggctttccattcctagcaatcactaatctaaaatgcctcctacatatttggggcaatgttttggggaaaggatctgataacctgccttttgtagcatcttttagtctgttttgtagcatcttttagtctcttctttgtatttaacatttgtagcttcttttagtctgttttttgtatctaacatgagctttaccagatgtactaattactagctgagatttttatctgactcttgagaacaaaatgtgtgaattcaggagatgagtcaagaagtatggataatgtaaatattcaataatagtaaaaaactgcaagtataaaagctgtagatgtattgcttctgcggttaacttgtgattggataaagacatctctctggaatcccttctggttataaaaagaggccatcttaattggcttgtttttgtttgtggttataaactattccaaaccttctggtttgaattgcggattatggattatttcatttcagtcctctacaaccatcaaattgaattaaaaaaaaaaaaaagaggagcagaagtttcattgtaagcctttatagcatttgactaatggctatatgcagttctctcagtctcttctgcctttgctggaaatgtatagagtgtttcttcatccttaggttgagagagcataaatatattgaatggatttgatttcctacaaaacaatattctggcattttgattaattgacgaggacccttcctttgcaatgtacccaacttttccttccaaacattagaatgtggatcacctacatttgaagaggtagagctggataaatctttgctgatgaactaaaaaggctttcacttcagtgtctggtgaagcaattaatgctggaagagtagcttggggtattaccaggatgcagcatatggcggtggtttgctaaagtgatttccatttggctaaccacttgatggcaagccagaggcagtatctggagagaaggtagagttgggaaatgggtcttgagtacatcttgtcctcaaggcacagggtgatacacagtggtgccttctaagaatgtcagttagcaaccctttctcctgccaccagtgagacagggccattgttcttcatctggaagaagcctctttccttgctgaaaggattaggctttgacatcaaattctggctttgacatcatttttaagacatcctctgaatctaaccctagttttctgaacaggcaaagcctctcgcttaaattcaaaattctccaggccaaagatgatgtcatgtagttttgaaaggctccagttcctggagtactaccaggaaaagaaagtcatcttccttgaattcagtccaccctcaaggtgtcctgagaaagaagctgtttctcagaacagcccaggcaacattgctttcaggcaaactcttctgttgacttcgtatttcctacacattcttaagccactgaaagagtttaagtctgaaagatttctgatacctatttcctcaccaggctgcaaaaataccagaattatttcattcctgcagcctcaaagatagagaaatcaaggctccaagagcatgtcttgagctaaaatagtgattttccactttttttaagtgacaggatattttcatccaataaaactgtggaagggacagattatttttccactcaccagaccagtcttcttgaccaggtgggc

SEQ ID NO: 61039 - DNA, 1050 bp, Homo sapiens
tgtttgtttttgttttgttttgtttgaggcggagtccctctctgtgttacccaggctggagtgcagtggcatgatcttggctcactgcatcctccgcctcccatattccagtgattcttctgcctcagcctcctgagtagctgggattacaggcacccactgccacgcctggctagtttttgtgtttttagtagagacaaagtttcaccatgttggccaggctggtctcgaactcctgacctcagatgatccacccgtctcagcctcccaaagtgctgggattacaggcgtgagtcaccatgcccgtcctctaaagacggtttgaaacccactatatttgtaagcaatgaaaattttatgaacatagtaggtgtggagtgcttttcacagagtctcttgggtcttacctacactagggagaaataactttcaaatgtcttcaaagtgagattaaatctcacatgcacctagattggtttgttttacctgggtgtagtctgctcagtttttcatcttgcgttatggttaattgtgtgaagttatgcttcccactaaattatgaaccttgaaagcagtaacatctctttcttttcgtgacaccatctcacactctaccctccctcccttccttcctttcacttccatatctctgcacaggcatagtgcccgaaaatggtaagcattggtggatggtgatgtgaatctgtcatctaattgcggaccttgaagaggaggcacagctcaaaagaaataactgtgtggatgaatttggctattttctttaggaaacaaagagccaggccaggcacggtggctcacgcctgtaatcccagcactttgggaggccaagatgggcggatcacgaggtcaggagatcgagaccatcctggctaacacggtgaaatcccgtctctactaaaaatacaaaaaaattagccaggcatggtggcagtcacctgtggtcccagctactcaggaggctgaggcaggaggatagcgtgaacctggaaggcggagcttgtagtgagccgagatcgcgccactgcactc

SEQ ID NO: 61040 - DNA, 2793 bp, Homo sapiens
gctcaccgcaacctctgcctcccggttcaagcaattctcctgcctcagcatcccgagtagctgggattacaggcatgcgccaccaccccggctgattttgtatttttagtagagacggggtttctccatgttggtcaggctggtcttgaactcccaacctcaggtgatccgcccgcctcggcctcccaaagtgctggggttataggcgtgagccaccatgcccggccagaacttctgttctaactagagatacaagtggttagggtggactttatgctttgagagtaaaacctcagagcactgttaattcaacccactaccttaaattgatgctgtcctcttagctagatttccccattgggaaagactcaaagctaaaggttgagaactcacagcagaaacagtgattcccacagttacctgcctcatttgaaggaaaaggctcccagagttctgtgttaccaacttgttacaagcatgggctattctcaggtcattctgatgtggaagctgctttatgcagtgaaaagaagtccactcttgagaccagaagacaaccatatggatcctagttttggtactctgctgctgtgtgtcattgggcaagtgtgcagcctctctgaatctcccttcttctgtgaatgagatttcctataacctgcctcacaggctatgggaggattatatgatgtcatggatgcgaaaatcctttataaaatagacagtgtacacaggagacacaaggatgatcagagtgatggtttcttaagtgattacagggccacacacaggctgttttctaaccctgttgtcacccccagggcccacaggtctcatctgagtgaggggaatctggaggtgtgtttcaaggggtattctagggtctttgaggaatcgtgtaggcacttggaggtatcctgtttcttctcccttgatatgtgggcctcagattagcccaagattatatcatttaaaggttggaggcagattgtaactaaatataaaataattatcaaaatacatattttgagtgttttgaaagggcgttgaaaccatttcttgtaatctaaaacaaactgtaaataaggaggattttattttcagttacacctgctagtagatgtaagaggtggttctgtctagtgagaactattgaaaccgattggtgcaagaatgcttcatgggaaattgaatgatgcacagctaacattgtctcgaggtcctatttgggcctgttgagaagggtttatgaaaatgaaggggttctttctatttgaaatagaaaaggtaccatttaccccataatatttaaccagccacctcctcctcctcagatttacaattacagagccccggttgcaagttgaggttttttaatttttttttttttcatttgattgctgcctttagccccttggtgaactccgctggcagcctcgtgggtatttttcaaaagaagcctcctgcttgactgtattaaattccactggcacctttgccacgccctgtcccctacacattcaaataacagagttttcccgtaaccctgttgagaaatgttcacgagggccgcagaacttgttctgtcttccaaatttcaaggaaatactagacttacttggatgtagtaaatgacatggtttccccaaattaatcatttgccagatcttgcatctgttattttgtaaaatcttaatttttgtacaaaaataaaattaaaggaaaaaattaaacaagaccatagtgtgcagctcagtatattacaagctgtttgtttttattcactcaactcaataatgtacgtagctagcattttaactgtggaatatgttagttttcatatgatttgatcaatatcccattttcttgacctaagtgaataaaaataaacagcttgcaacatatacagtttcagattttggttttgttttggtggttagagaagctggcataaaaatatagcctgaaatgactataaattccacaaccaatttgatcatttaacttaatctgtgtagtaattttatttattttttaaattggcaacacatctcatggatggaaaatcagaagatacaaaagcatgtttggtaaaagactcttttttacctctatacccggttccccatttccacatgcctcaggcaatgttaatgttgattcatctaaactgttgaactaagatatatttcagctaaaacctgattttattttgatgctttatcaaatgacttaaaggaacagggtatgagtatgagtccttgacaaacctacatgaatatccagggaggtgtcttaaatgaaacgcacttaggatgacaaaatacacatccaaaagtagaattccatttttattgtaaagaagagtgctgaaagcgagatctcactatgaaaccataaatcaccccatatactcttttggacttctctgtttctgggtttccagaacagactgttctcttctgactgttgcatatgtattgaagcctggcactatgaatctcttatgatgtaagattgaatttcccattgccattttttcagataacagcccgccgtcagtggaaacatatttatgatgaattaggcggtaatcctgggagcaccagcgctgccacttgtacccgcagacattatgaaaggtaagaaaccatttcatggaattgcttagttaaaagtgtgttaattgaaaggagcttctggtcaaggataagacagaggaagtctaaatgaccttttgggaaactgaaaatttccctctggcattttactttgcataccgccttgtgattt

SEQ ID NO: 61041 - DNA, 1050 bp, Homo sapiens
tagaagatgaagaagtgagtgatctctatgcattatccactgatttatttttcatgcactgtggttcatgtttccagtaaacgttttcattttacaacaagaaaaatgtagccagttcctcagtaaaatgttacttgtatattagttgagcacttttggtttattaatgagtgcaataatgaaagtgtgggttgttgaaaagaatcaatgggtgtttttatttaaggcaaagcagaaatggtacaatgcttgtgaatacatcattgtcactgaaggcctgactcgtacaaacttgcctctgattggtttaaatcaaataggtccaagcacttcataaaaatgtctttgtcagccgggttttgcttccaaatctattcatctctgtcagtttttaatattagtaccaggctcctggccatagtccattagtactgtacttaattgctcatgttacagatgattaccaatataaaaagcattaatgttttcccatcgcaaggctgttgctatgtagatgtctcaaactcagcaaagcttatgaaatgtggttattctggacatttcttgctcaggatttatagatgaagttactgtagcttttgatgcaaagaaaaatacccacctcattctttctaagtggaacattttctttcttgtctaactctttacttaaaagtaaccagttcactttatttttatcagtaaaggaacaaaaaggaaaacgactacttttatggaattctcttagcttgattttctggaatagtaaatcactttaaaggctttgttttcacatgcagatttccctttttaaaaaatgtttttaaagtccatgcagggggaaaaaaatctttactcagaatgctagattactggttttaattttcctgaataaattacatggtctgtttctgtggagcacatgaagttgttattagggattttaaaaggagcattaaagcaaaagtactttatgatgtgcatttttgagtatttagaaaatcaaaatcataaacaaatgtatttgtttgtgagggaaattagcaacta

SEQ ID NO: 61042 - DNA, 1129 bp, Homo sapiens
gcttttaccataagcattccttggacaagattgtcaccctgcatggctgaggcagctttctttgcagggacttaaggtgagctgtacccaagccagatgtacttgggcagatactgggtgatagctggagcttctgccttttttctctgaaggtataaggtagagtgtgggaggcttcatgttttgaataagataagcatgtgctttaagttaaggaccaaaaatatatcaggttctaaggaacccacctaatcataccatggataaaggctggggaaggaaaggtgagttacagttctgtgcacatcaaggacatgattccatgtattcttgctcatttggacacccttggagttaatagatacgcaattcagaaagtcacaggccacatctcagaattgtatatttaagaggacccctagcaactccctagaccagtgctactcaaatgagattttctgacttgtccatgaactgttttctactagcccataacaagctaataagcacagcaattgcgaataagcattgatacacttacgctgaaatttgccagaataacattatgtctgttgaagctaataaaaacttggggcttgtgttttgtatgcctccttttgaattccatttttctagtaattcatttttatggttgtttacaaaagcatcagtcagcatcagatgggaaatttagaaaactcgtctttcacccaggtcagtggagaaggtccgctcctacatcttggccacaaactcagatatttatggaggcaggtagcaaagatgagtgcaggggccacggctggaaagtgtgaaactggcacgcacagcccgggccagagagcccaaagggaccagcccacactgttgctgtaggtagatgccgtctgtgcgcttcctgaccttctatgttttcaagatatttttttaatgtgaaataacctaacttacaaacactggctccaatatttaaaaaaatattttatataagctaaatcaaacatgcccaggggcaaaatatagcctacaggatgccaagttccacaaagactgaaatatgcttgacactaggctctccagcctctgatacagcgccctgcagtgggagggcctagaggaagcttcaggg

SEQ ID NO: 61043 - DNA, 1464 bp, Homo sapiens
cctttgtggaatggctacatatgtattttataggcctgttgcctctgagaaaaggagaatgctcactccagtttctcaggtaactccttaggagctaggaattcacttaacccaggcaggagtgatctttcagtatctcctccgtgttggtatgtctccgtgttgatacatctgtgtatgaagatgcacagccacctttttgagatgaagatagctggactagcagaggcaggcagtttggtggtcgaactcaaaattttgacactaaatagctgtgtgccattgactagtcacttaatcgtttagctctgaacctcagttttgtcatccataaaatgagataaaataatatatctgtagatatttctttctgtaatggttgaaattaaagcatgcagagtgcctggtattaataagaatgtaatgcgtggtggtggctgttaatattgtaatgcctaatcaatatatatgaatgacctgaatgaggtttctctaccttcccaccttgcttctaacacagtcccctgaaatccatgtaactccagttcaggaaagctgtcatccttgagctaactctctcacactgacacatctttatgggagccgagccaccaccttgctgtgtccagtaccacgtacctttctttcttctcttcatttagggtcacacacactccgggaccatggagggaggtatcagaattatcagtgggcctaagaaacaactctcccacccacttccaggggcaaatggagagagcattaaagccttcaaaaagttttcttgtccatctgctgcccattgagtaggtaatgaagcccctgtgagcagatcattttcccagaaaagagaccttttgtggtgacaaatggttatatttcatcgttgttaatagtggactccataccttttaggtgtcttagcatagaatacaggtgatgctagttatacctacctcatttttaaagtatgtaaggcagtttggctttggtagctcttgggcaaactgagtctttcacacagactctgtgttgcactctgccgccattttgttggctcagatgggccccgctataggctcgttcttcatgtcagcgtggcttcttactccgtggtttggtgccccagactttcagttcacatccttgcctgttgggaggtgacactggaggcctctttctcacctgtcttggttatggggagagcttgtcacactcggcacactattttttctgctccactcaagttcacaccataaaatggagatcttctgtggctcacatctctctcagatggagcttagcttttactgtgctcaaccagggttgtgcccgctgaggaaacattctcatttctctgctcatttacatagcacatttgtgtatttggctgttgatttggttccctacccccaaaagctcttcttccacttttatggtcatggtctagcacctgagaggtga

SEQ ID NO: 61044 - DNA, 1063 bp, Homo sapiens
tacttcacagtaaagttatattttaatttctggctgcaaagggaaatgtctggccaagctgtagaaatttatcaaggctggaatcaactcagaggtgtaatgactccatttggggtgagatcaggtctgaagtcccagttgaaccaatatgtcatttcgttgttactacaaaaaaaaagcctaatagtattagaatagtagtgccttttttttttctttttttgagacagagtctcactctgtcacccaggctggagtgcagtggcatgatctcggctcacttcagcttctgccactggggttcaagcaattctcctgcctcagtttcccaagtggctgggattacaggcacgtaccaccatgcctggctaattattgtatttttagtagagatgggctggtctcgaactcctgaccccaagtgatccgactgcctccgcctgccaaagtgctgggattacaggcgtgagctaccacacttggccagtagtggcatctttgacctgacatgcaccaatgttatttccctctgcccctagaaaatattctgctccaaggacaccagcaaacctttaggtctggaatttctcactgatttgataccataaagtgcctatgcagtaactggggtgactttgggattcaaatacaaccctaaaagttcaccacttcttgcccccactctctggattcaatcagttccagacattattgtaataccatttttcaagctctgtaaatagatggattctcgtttttcctattaagcactgtttgctaaatattttggcccaaaagttcagtcattccatgcaagcattaatcaatacaggagacattagtggttactggttcagatgagatttgacattatttttcctctgcttctgaggaagggaggggaatgttgtgtaataaagatgaagggtcttttcttcttttgtacaaaatgcaaatgatgaggacatgtgtgatacacacttctctaatgcaaggctgctggtttttgttgagaaagagaggcaaggccctggaggattttagactttgtaaatataaaatt

SEQ ID NO: 61045 - DNA, 1347 bp, Homo sapiens
ttattcctagggaaaaataaaatctcatgctgctacaaatcttatgcctatggaaagatgttattttttaatacataatggcttacctatttcagatccattaatcgcatcgtaaataagcattttgctaatctgaaatgtgaaatctggataataataaaggcccatttatctgtccagctttcaatccccagactagatgtagatcaggaaggggaaaatctctggattttctaatgaatatattgcttctcttccccattacttccacccacctaaaagccagcccccattcttagagttgcagtccattgaaaatatttctcctgtgtaatgaattcttgggggctggagtgcatgtttgcttttatctgtacagtttagaaactgataaaatctttgctgtgctacaaatatttgagaaataatcaacctcaaggcgcaggcatggtgcattttactaaattctttatataatacaaacctactcagctttctacatagggcaatgttgacctaatctaaggctaacctgtttttaatggtaccacatgtacgttgaacgtttaaatgttcagaaacctataatagcttttgtcctcttgtactgtaaaaacttctaataatcatatgataagatcatatcctgtggggtaattgtgttgtaccatgacaggataactgaaaaaacattcagtgaaaattgcaccaaacggaaatcactatatgaagcagcgattgtgtgccgtgcgagaccgtgccctgttcttcaaagcttagctggtcatatttctacttgcttccttttagcttctgccttgcttgttttattttaggaggcttttttccccaagccactataattatctttcaatgatttagaagggggggaaaaaacactcggttgacctttacacacacacacacactctctcacacactcacacactctcatatactctctctggaagccttgaacaagtagggcttgtgtttggattcagttttaccttagtcatgcctctttccagatacaagaaacatttaattccagatttcctgcttctggctttaggcctttgaccagcaaagtgaaatgtattttttactgctgtcagccagccagctgctgagttgagtgaaggggagaaaaaaaaaaaaaaatgaaagaaaaaatgaaaaaaaaaaaaaaggaaccgaaatgagaatggtgccctactttgtgaacttgcaaaattagaaaaggaaattaaagtctccttagcacccatctagagagccaggttggcccagggctctcagaacccagagtgaggggtccttgggcgtccatggggtgtctctccc

SEQ ID NO: 61046 - DNA, 1046 bp, Homo sapiens
tgtatggttaagcagttgagatccaaataacatagatagaaaccaattttaggatagcaaaccaatatccagaccaaggaagtttttgcctgggaatcttagtttaaaaataatcaggatccccaatatttgaacagacttatgatgtttataagccaagtacattttcttcattgagtcaacttgtcttatttaaaacaaattatgtttgctgtattaaagttcatatttttaaggctgagtcttatattaatcccacagtgagtcattaatcataccaaatgcattataaaaactttaatcactgaagttgaaactgagattgtaatgcaatccatcccttttaattacatcagctatttttccctttcagataaagagctacgtcgcaaagggaaaacagattaaaactagagctgtttgatgtttctctttttagagcaattttatgcagtttgtttaaaaagttatataatttaaatgcttgaaattttcaggcctctggtttttgtggcttgcatagtctgtctgccttccttctcgctggggcggtcttttacttagcacactaaaacagaactcctagtggagtcccctaccccactcagagctgtgggataagactaaactgtctcttggccacgctgtgcttgcctctcattgacctttttatcttagatgtttcatctctatcttgacatgaatgaaaataaaatgttttcagatgggcagcactaggttcagatctcacctctaacaaatggtatgactcaggcaaattgtttaacctttataggcctcaattgcctcatatgttaaaaaagagaataataataatactccatagggatattgtggagtttacataaaataatctttaaatgtacctggcacatgctagtacctactagaatataagcttcatgagctcagaggctttgaatgtttggttcatggctgtgtctcagtgcctagaacactgcctatagtatgtgctcaataaatagttgttgatggactggtaaagcagctagcattattgttgc

SEQ ID NO: 61047 - DNA, 3759 bp, Homo sapiens
ttaacacttatgcattgctaatcttcagtgcatcatattgaatacattgggaagggatttgccctgttaaggaaagcagggagttgcaataggtttgttgtttgtcgttaacatggggttggttggatttttgaaagagaaatgctttaaaaaaatctttctcaggagtatcataaaacacaacatgtaatttaaaacccatttggataattgactgatttgacaagaagacaaccttagaattaaactatatattagaatcaaggagtgatatgattgtataccatcagtacataatactttgctattttgataggtatctcataagggactgaagcgaatatgcatatttcccctaatgtttctgtaatttagatttctttgtttagagccatgattggggagtaataaagctttacagaaacttcacgagctgattgacaagcctgttttcaagtaaaactgctgtgtggaatattttatttcatagcaaaacatgtctgtgtatttggttttcttctgactgtcttttgaaatatgttaccaggtttcatcagagcaagaaaaagaacaagagactttaataagccagaaaagcatccctgagcctctcccagcagcagacatgaagaaaaaaatagaagggtatcaggaattttcagcgaagcccctggcatccagagtagacccagagaaggacaacgaaacagaccaaggttccaacagtgagaaggtggcagaggaggcgggagagaaggggcccacacctccactcccaagtgctcctctggccccagaaaaagattcagccttggtccctggggccagcaaacagccactcacctctcctagtgccctggtggactcaaaacaagaatccaaactgtgctgttttacagagagccctgaaagtgaaccccaagaagcatccttccccagcttccccaccacacagccaccgctggcaaaccagaatgagacggaggatgacaaactgcccgccatggcagattacattgccaactgcaccgtgaaggtggaccagctgggcagtgacgacatccacaatgcgctcaagcagaccccaaaggtccttgtggtccagtcgtttgacatgttcaaagacaaagacctgactgggcccatgaacgagaaccatggacttaattacacgcccctgctctactctaggggcaacccaggcatcatgtccccactggccaagaaaaagcttttgtcccaagtgagtggggccagcctctccagcagctacccttatggctccccaccccctttgatcagcaaaaagaaactgattgctagggatgacttgtgttccagtttgtcccagacccaccatggccaaagcactgaccatatggcggtcagccggccatcagtgattcagcacgtccagagtttcagaagcaagccctcggaagagagaaagaccatcaatgacatctttaagcatgagaaactgagtcgatcagatccccaccgctgcagcttctccaagcatcaccttaacccccttgctgactcctacgtcctgaagcaagaaattcaggagggcaaggataaactcttagagaaaagggccctcccccattcccacatgcctagcttcctggctgacttctactcgtcccctcatctccatagcctctacagacacaccgagcaccatcttcataatgaacagacatccaaatacccttccagggacatgtacagggaatcggaaaacagttcttttccttcccacagacaccaagaaaagctccatgtaaattatctcacgtccctgcacctgcaagacaaaaagtcggcggcagcagaagcccctacggatgatcagcctacagatctgagccttcccaagaacccgcacaaacctaccggcaaggtcctgggcctggctcattccaccacagggccccaggagagcaaaggcatctcccagttccaggtcttaggcagccagagtcgagactgtcaccccaaagcctgtcgggtatcacccatgaccatgtcaggccctaaaaaataccctgaatcgctttcaagatcaggaaaacctcaccatgtgagactggagaatttcaggaagatggaaggcatggtccacccaatcctgcaccggaaaatgagcccgcagaacattggggcggcgcggccgatcaagcgcagcctggaggatttggaccttgtgattgcagggaaaaaggcccgggcagtgtctcccttagacccatccaaggaggtctctgggaaggagaaggcctctgagcaggagagtgaaggcagcaaagcagcgcacggtgggcattccgggggcggatcagaaggccacaagcttcccctctcctcccctatcttcccaggtctgtattccgggagcctgtgtaactcgggcctcaactccaggctcccggctgggtattctcattctctgcagtacttgaaaaaccagactgtgctttctccactcatgcagcccctggctttccactcgcttgtgatgcaaagaggaatttttacatcaccgacaaattctcagcagctgtacagacacttggctgcggctacacctgtaggaagttcatatggggaccttttgcataacagcatttaccctttagctgctataaatcctcaagctgcctttccatcttcccagctgtcatccgtgcaccccagtacaaaactgtaggctcagctctgcccagcagtccaaagcggcatggccaacagagcttcactccttacccaggagtgctggcttatagagttagaagtcagtatttcttctaatctgaggctatgatcagtcccagctgtaggggcccagaggggaggtgaacatgcctgatttttgtgggacaactctagcccacaaactgactggctggtgagtcttgactcccttccaacacagatgcccaggcacctccagatcattcacttcgcacgtgggccttgtgaagggatttgtgaatatccaggaagaacttagaggaccccatctgagttcggatggtcaggaaacaatctgggcaaaaaagaggcaggcatttcaaaggaaggggcaaggaagactggcaaacagatggcaagggatgcccctctttttcataaaactctccaaggttcaatcaatgcaatgtatagtgaaacttcaatagatctttcattttgacactattaaacaatccagagaagtaaacactgttaaattgactgtatatatttgcttcttaaaactacctgtatcactgtttgctcacctaatttatatacaggtagttccattttctcccagttccttctcgtctttttttttttttttttttttttttttattaaatggtattgcttttgtttgcaggtctttttgtttttgttttgtttttgaggctgactgactgtcctagttgttgtgtgtttgtaatttttccacatcttattttgagcagctttgggtggtaaagttattgtttacaaattgaagcaactgattctagtggaacaaatgaaaaagaaacagtcaagcacacaatagtgcaaagaacgttcctttgtagatccgcaacttaaggattttgttcctcataaatggcatagttgaaagagcttatacactgcttacccagccaaatgctttgctttgaagtattgggttctgtgaaaatattgagcattgtacttaccttatctaggctgtgaaactgtcctacataccagagaatcataaaa

SEQ ID NO: 61048 - DNA, 1415 bp, Homo sapiens
tttcttgtcattcccaagaagaatctcccaggccacatctttggggataactgacatactggattagccttttcaaaagaaaagtcatcctatttggttttatggggtgtgagttttgtgtgtacacacacagaaacatgtaaggtggtttgggtcatgtttttaaccacctggcaatacagtccactttctggtttcttttattgtgggaagtaaatggtcaagctgctcaggcagtgaaaagatgtggagaatgtccgttgtcattcttgccactgtattccatttgctaccgagatataacattaaggtggacacattttctaactgtattaattaaaagtcaatggatacagagagtggattttctccccaagtcccatccctgctgaagaccgcttggatgaactccccaacccactgtgcccctcccgcaacactaccagtagactttagaaccatagttaactaagtcttttacctctgagatacttaattctgggaaaattggtgacaattttcaacttctaaataggtaactcgactgcaaaataatcaaaactgataacaatgaaactgcggctcttaaacaaagccatgcatgccgtgcatttgtattgaaatgtctccatgatatgaagccaaatattcaatgtaacatacttaatatccaaaggtggaaacaaaagaatgtagagatccagtgttaagagttccatttgcttcaattaattatttaccttcctgtggaataatatatatatatatatttaatagaaccatagatagactagtagaatttagattataaatgtgtgagtgcagattatcctgctattgcacaagctagaggggggaaaaatctcaattccagctggcaagatgctagccaggacacatataagaaagttgcactagattgaatggtcacagaatcggaggacatggaagaaaaaggaaacttcggtggttctgcagcagacatgggctaggtcatatgtggtttctatgagttcgtgtctcaaaaaaaaaaggagggggggcatctgtccccggtggagctcacctatttggaatatggggcatttgttttttccactgcaatgatttcagtctggtttcatcatgttggaattcgatcacaccattttcaaacaatgttaacatagtccagcttttgtttttctcatctcttctgagaggagactcactgtttctgtctgaggaagctcataccctcggcaaaacatcaggacaaataaagagaaatgggggtacgcattcccaacagaagcagtgtgttatttgttttaaaactctgaacagagatcttggaaatctttcaaaaagaccattgaattcttcattggctgagaacgacgttttaaaatgtcttaaataaggctttgtttgca

SEQ ID NO: 61049 - DNA, 1135 bp, Homo sapiens
tttaatgtttggcaactccacatgataaaaaaataaaaacagcccaaccgagtttcggaattaagtattcttctagtaagtgattcaaacttgtaatatttgccacaggactgacttatttatttactagctagaagctcttaagttcacttgtttatcagggcatatacagaagggtttgttaaaactcgatgttaactttacaactttctgacctggtgcatgaattctcaagtactgtatttcactgtgttggtgtgtctgatggaaatttcgaggtggtcccacaaaaatattttatgtagtgtgccttcaaagagaaccatttatttctcttcacttatcgtcccacaaagtcacatttggtggtggtcagccaagtcgcatctggtctagttttactcttgtcccaattttaaagagaaatgggaatgagtttgccctggtgagacccataccattgcaatgattatcttgagcacttaaagtccagtgttggctgttagtgtatttgatattctgcctgtctcctcatggttgaaatatgtctgaagaatagcagcataatctcttggctgtttatacttttttaaactttcctgtgttgtaaatattgtatacttttggtgattccagctatgtaacctctatgctctgtaaggtgattatttgtatatagcaacatggcccagtgatattatatagtttcccaatggagaggttattgagtaacctttgcattagtttaaacactaccagaagaatgctgagccaactataaacactcaattttgtatgttttccaaattgtacttattactgcttttgatactgtattacgtgccaatagtttcccaatcacatagcaggcaagagatattttgtactttttgatccactgtaatatttaataaaaaatgttactatctgtttccttttgggtgtgagtaatctgtcactcttcctgaggagcctgtggcctccccagaagactttccaccccatctgtccaaattgaatgataacagtaatgatggcaatgtctgtaattcactaaggacctagtgggtgcccatttggcaaatacctcttatcttcacaaccttatgtaaatatggttatacctattttactt

SEQ ID NO: 61050 - DNA, 1424 bp, Homo sapiens
tgcccatcagtggtgggctggatcaagaaaatgtggtacacatacaccatggaatgctctgcagccataaaaatgaactagatcatgtcctttgcaaggacatagatggagctggaggacattatccttagcaaactaacacaggaacagaaaaccaaataccacattttctcacttataagtgagagctaaatgatgagaacacatggacatatagagggtaacaacacactctgaggcctatcggagagtgtggagggtgggaagagggagatcaggaaaaataactaatagttactaggcttaatacctgggtgattaagtaatctttacagtagacccccatgacacaagtttacctatgtaacaaacctgcacttgtacccctgaacttaaaagtttaacaataataataataataatgaatatgttggcttatgctcactcacacctctaactccccacttcaaacacacacacacacacaccatagacaatttatttgctgaagaaattgatcttttatcctgcagggtttttccatagtctggatttttctagttgcatacctgggttgccatttttcttttcttcttctttttttttgagatggagtttcgctcgtgttgcccaggctggagagcagtggagcaatctcggcttattgcaacctctgcctcccaagtttaagcgattctcctgcctcagcctcccgggtagctgggattacaggcatgcgccaccacgcccagctaattttgtatttttagtagagatgggtttctccgcgttggttaggctggtctcgaactcccgacctcaagtgatccacctgcctcttcctcccaaagtgctgggattactggcatgagccaccgcacccagcctgccttttttcttatatttttggatcatattcagatttgttggttggttagtaagaatacattttaggaagggtcatatactttcatcaagaagcatatcatatatctaggtcttccactcatcttaacaaccactgatgagcattgttttagatcctttatttcattaaggattacaaactggtagtatttttacattcgttatagctggaatgcctctacttcatcagctatttggttaccctgaagtacaattcttatagggaagacaggaaaagtgcttggggttttttttgtttttttgtttgtttgtttgcttgtttgttttttcccatttatatgtcagttaccaaaacaatgagatggtttcctaccatctttcacaggtgaccaatgagttcatttttaaatatcgttttgaatttttggatttaaatacatgtcatgtgtctgtccattgccattgctattctagtcaatgttctaatcaatgtccaatgtttgactagtagaagccccttcgagttgactcttgaa

SEQ ID NO: 61051 - DNA, 1013 bp, Homo sapiens
gggtagttgacattttccgatgctctgagaacagtaagggaaaataatattttgaacatacagaattgtttttataattttcctgagtcatttgatgaattgctatagaattctaagcactaatttttaatcgactagcttttctaaaacaccattgatctatggttttatgtgtgtaaaagttaggtggtaatcgttgcctccatttcacttaatgcctttaagaattccaaacttttcttctctgatattaacatactcttggatttggggcaattaaccttttgtatatcaaattaatggataattccatcacattttaaaaattctaaataactaatttaaccttgataagtattttgatgtatttaaagtgataataacttaaaattgatagtctcttgattttttttttttttttttcagcaaatggtagaaggtctgattagttggagaaggttgtattgtgttttgcgaggaggtaaactctattgtttttacagtccagaggaaattgaagctaaagtggaaccagctttggtagtacccattaacaaggtaaaggaaatgctattttgagaaaaaaatatacatcttaggaagtttgtttttgtctgtgcagtttacattgttgttgtcttataaataaaagagaagtactggtaaaaacaggttacttcataaatatgatttaatctgtttctgtttttctattagagcttatctgttataagaaaatgtatatttcctaagaaaacatagtaatggacatctataccagtaaataggttttaaggcagagaatgtaactccacattagcagtatatttaaattttttatgaatttacttaagagattaaacataaattgttagctcatgttattatagtgatgctgtttctagttagcattcaaatgaagccataaaaagacattcttgactatactttctgatttcttatgggattgataggcaattgtccagtcttctgacagaacagaaaagcctgac

SEQ ID NO: 61052 - DNA, 1021 bp, Homo sapiens
atttgctttcaaacttctaaatttacaaatcacaaagttgatttcagatgtattactgaaatacatgcttttacagaattttcatttcatttgctgcctgttttaggaaagataacttttgtttatttgtgtttgcattttggaattgtatgtattatgctcgtgcatttatttttcccagattaagccccttatttctaaaatatagcagctttaaaatgtattaatgaaaaagatttgaatagtctcagaacattgttgtgtactattctatagtagaatcttgggtaggtaaatttaaaactttttggttttactacaaacctttgctgccttgcatgtatatattaactatttttacaaaaaaaattctggggtaattaaaactttttggtgaataatagttacggccagtagctagcgattttgtaggcactaccaacagggcacagccaaaactttaaaaatcatttttatgtgatccagtgtgaactaagggccatatgtttggtttttatttatactctgatgtctagaataaattatttaatgctttcctccatatagataggtagtacacaggtaggtatcttcattaaaggactatcttaatgttttttgaagtaacttttttaaacaatgtcaaacttacagaaaagttgcaagttgaatgtcaagattttttttttttaattagagatgggtatcggtatattacctagtctggcctcaaactcctgggtgcaagcactcctcccaccttggcctctggagtagctgggactacaggcagacaccaccacactcagcttaaatgtcaagatcttttttttctcaaaaaaattatgacagcaagttgcttacatgatagtctgtaccccaaaatgtattaatacatatttcctactatcaggacattcagctacatcatcatcactcttgaagtcaagaaatgaatactaatacattaccaccatataatcctcagagtccattcaagatgttgcccattgtcacaata

SEQ ID NO: 61053 - DNA, 1075 bp, Homo sapiens
tgtcagcctcgagttttctcaagcaggcactttaagaagacatcttagggatgcaggttagagctgctagaaacaatgctagtgtttgttcaggtccttagaggccaaggttgaggcctagttgagtaaaggactcagaggatcatggctagagtttggtcaaaaagacagcctttgtccctgggaaattaatataaatcagaccctatcattccactttttatcaactttcctattacacttagaattaaatccactcctcttccagggctcacagagcctccaggtgagctcatcactccctgtatttccagccttgcgttgcaccatgcttgctgcttgcttgctgtgcactagccacactggttttccttcagccctccctttgcagatactcactctgcttggaatgttttcctgcattctttgcttggctagattcttttatgactggataactgttaactcctcagaaagtccttccccagttcacctacctaccacaggtcctcagttttctcatctcctttgtttctttcatagaaaaagttgcattccaacttgcaaatgctggtatttggtttattcctctgcctactttttttttcattctgcctgcatcagaatgtaatgctggatcttgtttaccattgaatgcccatcacctagcattggacttggcacattttaagtgttcagtaaatatttattaaatgaacggggacccttcagagaaacatttgtgtgaattaaaacaaataatttgcagatttttattgacaaagtatagagataaacttgctaagttaataacttgcatcgttgaaaaatgtcatctattatatctaaattttttcttttttgtagtaaagcattcttgaatatacattcagaggcattaagtacattcatgttgtacaagcatcaccaccctccatctccagaagtttttcatcttctcaagctgaaattctgtacctattgaacactaattcctccttctatcctcctggcagccaccattctagattccatctctatgaatttcactactctaggtacctcttataagtga

SEQ ID NO: 61054 - DNA, 1102 bp, Homo sapiens
ctttgcactcgtactcatgaggaatagatgaagaagcaagagaaaaacagttatacttcctggtctcacttgagatacataatccctaaccttaagtgggttcccagtatgaccgagcaattctactgtttctatagtcttctactttacctctcttcaaggtaagtatttcacatgttctcctctctaactgccaatatcctctctctgcccctcattcatagctgataactttgtttcatatgtcattggtattactgaagtaattggaagagaaaaatatcctccatccaccaaatctgccagcctacccacatctgcctcagtgtttgctgtttcctttcttgtgaactaccttcacctcatctaaggcctgtctacttgtgcgctagagcccacttctcagttactcacagtaggctcctgcatgtttcctccccacctatcctacatcaccaactttagtacggcatcatttctgtatacttataaacatgctgaaataccttcaatttcataactatccttcatggaaaataattttttatttcataactatccttcatggaaaataattttttatattcctatctacttcctcttctgccattctctattgaaccatttcagttggcttacctcatgttacctccatcccatcctacagaaactagtctcgtcaaggtcaacagtgatctaatgttgccacatttgattgtcagttattggagttcctcttcctggaccttttggtattaacacaattgatcactctccttgaaatactatttttatatggcgtctagaataccactttcttgatttttcttccacctcagtaaccatttattcattgcttgtctcctttgttcattgctcttcatttaatggagtgcttgtgtcccagtatttggtccttggacttcacctaactaactttcattaaatttcatgtatatactgataactcccaaatttatatctccaatacctatttctcttctaactccagactcatatatccagttgcctggatgcatctagatactgaaaacaatctcaaataatgcacctagatatcaaaaacagtcttaaacttatt

SEQ ID NO: 61055 - DNA, 1005 bp, Homo sapiens
aattatatttaatctatatttctttttgaagcctagaggaatttttgagaataaattattgtgcattaagttctttttaatagacagccatatagatcttggagtgtctgttttcctgttcagaatttttcattctatttggtttattctgagttcaaacacgaattttctttataaacatttcccccttgaatcttgcgtgccatttgtttatttgataccattaaagtgggtcaaaagatacaataaaaccttttacaacatttcacaaatcatgtccttgtaataccagcattctgttgacactgtagtgtgaacccagagtctactaggttaactcatagcccgggactactcttacctgatgcttccttaactgaccacttcagcaccatggtaggagtttaaaaatcaggatgcataaggggatcaattttgtatatttaagtgatctaggtcaatgcgaagatttctaatacagcttttagtctttaaccaaaatggacacatataaaatgataaaattttccctagtaatatgatatgtgaccaaatatagccgttcttcctgacaagagtgcattttttagactaccatttaagccatttttttttaataacattccccttcctccaaaaaaatgttgtaacaattgccctatttgatagaaaaaaaaatgtagctgattaaacttttgggaactcaaaattagggttggctaaaaggaatgagtgtgatgttttagaaagaaaatgttatcctgacaagaatgttttaaaagtgaggtcactgttggttttggaagcactggcattgtagttagtcatgttttaaaaatgaagcaacttgaaatatcataaagtattgtttgatctgaaagaagacagtgaacatttttggtaatttttagtaagctccctgataagattcatctattcattttattgtggaatttagcttactaaaattcctttagccagattttcccagtgcatctaatagct

SEQ ID NO: 61056 - DNA, 1025 bp, Homo sapiens
atggagttagaacagttatttttataagaagaatatatttttacctcacaaaaatttgacagattaactttttaaaagtacaaactataaacaatgtctagaaaatgtgctgttaaataataacactttattttagctatagtagtcagaattattatggaatgcagaggttcaggtcactgtaaagaataaaacttaccaaaattattacttgtcatttctttttcccttctttatagatattcgaataccactaatgtggaaagactctgatcacttcagcaataaagaacgtatgtatgattttaatttgtaattgaaatgttttctttagtatgtagtgtatctgattattgagaaaaaagactgcttccttgctgaaataaattgatgtcatttgaaagaataagcagcatcttgaactgttttctgatttttaatataaatatgttgcagtcacttgatactaattaatatagtgcatatgtagtgtacttttagttgttgataggaaccagtgctaggacagtaagtaccgggttcagagtgggaacgggggaagggaaatatggaacaaaagaaaatgtttagcgaataaaggtaaagccaacatttcttgtatttgaccagaatctggaagatttttctgccttatttcattacttcaggttatttaacaggatgaaatagggaaagatttttagcttgatctgattttttttccttcaatattttatggttttatacagtctttacaaatccgtgtattgcttaggtcatggaaattaacctcgaatgatttctagctattagaggcaaagcaggaaagatatgataatactttatctttcttgtctattgtgatagctttgttccttgtactttaaaaactgaatcatattaagcacaattagttttatatgaagaatttaaaatcaggttagtatttattattcaattaggaaatataatttactttacaaaggaatacatgtgggaattaagtaaagctttctgattactaa

SEQ ID NO: 61057 - DNA, 1034 bp, Homo sapiens
tttgattctaggtaggagttggcaaactttttctgtaaaggtagtaaatattttagcttttaggagcatagagtctctgtctcagttactcaccactgccattgtggtttacaataaataatacagaaattgatacggcagcagtaaataatgcagaaattgatgtggatggatttggcccatgggctgtaggttttaagtgcaacataaaatattatgtgcaaaagtcacttgaaaccaaaaagcctctgctgtcatggagatgagcagcaatcattttagtagtgtgtttttcagccgacttgtaaactacctatttcccccctcccaggacttttagagtaatgcaacagaaggcttttgaggaaagcagatatccctggcaggagtcctttgagaatgttgctgtgtgcctgccattacgctgcccgaggtgtggagaccataccagatttagaagcttgtcatccttgagggcccatctggagttcagtcacagctacgaagaaagaaccctcttgacaaaatgcagtctctttccatccctcaaagacacagacctagtcacttcctcagaactcctgaaaccgggaaaattgcagagcagtggcaacgtggtaaagcagaaaccgagctatgttaacttgtacagcatttcacatgaacattccaaggacaggaagccatttgaggtggtggcagagaggcctgtgtcctatgtgcagacctacactgccatggacctccatgcagactcgctggatgggacacggtcgggtcctggactgcccacctcagacaccaaagcttctttcgaggcacatgtcagagaaaaattcaatcgaatggttgaggctgtggataggaccattgagaagagaattgataaactcaccaaagagttggcccagaaaactgcggaactgttggaagttcgggcagcttttgtgcagctgactcagaaaaagcaggaagttcagagacgagagcgggccttaaacagacaggtggacgtggccgtggaaatgatagct

SEQ ID NO: 61058 - DNA, 1032 bp, Homo sapiens
agctagacgcgggcggcgggcaacggccgcgggccttgccgcccgagcagcagttcgagccgccgctgcagccccgggagcgagaagccgtgcggccgggcgtgctgcgttcgcgggccgagtacaccgaggccagcggcccctgcatcctcacaccgcaccgggacaacctgcaccagatcgacgccgtggaagggcctgccgccttcctggacatcctggccccgccctacgacccggacgatggccgggactgccactattaccgggtgctggagccggtcaggcccaaggaggcctccagctcggcctgtgacctgcctcgagaggtgtggctcctggagaccccacaggccgatgacttctggtgcgagggagaaccctatccaggtcccaaggtcttcccttgaagccactggcgcccaggagcggtgggccgaagacgtgccctaccctaccacaagggctgtgtctctaccccctagcctgggcgttggatctactggaatgagcagcagccgcttcctcggcagccttgggaagcacgggcgactggacagcagccgccgggcacggttatgggggcggggtgggcggggaggctagattgtttcctggtactgtcactgccactggggctttgatttggaggaatggggcaggggactatctgaagcgcttccatcctaaagccataatgaaaatatcttcctctcttccccattctatacaaaatactaagtggttttcttgctcccactccctaccccttagttaaatagggtttattttccactcatgcccttatgcctttttttcttatagttttttaacttattgactgtgcatgacccagtggtttgaattgtttttagttcaagtcattggtaaaaactaggtttaaggagatgagctactgtttaaagtgagctggcctgcctaattaattccttgtgaaaactaaatgattttttcagtttggggatcattctcacaacataactatgcatgtagaggacaagatttattttc

SEQ ID NO: 61059 - DNA, 2279 bp, Homo sapiens
ggagctgaatgtgttatgcttccaaacaactgaatgtaaaacactcctagccagttgttgcattccctatatttatttacttccaatattttactgtaaaagtagggagaaatattatgttgatagttgtttcatattctctcaggaactttaatgttcccgactcgggtgattccagctgtgttgctggcagtgttgtctcaaccctctccctaaaatgactgagccctgggttcatctaatgtggttttccttaggaagagatagaaggcacagaagatcacagctagagaattgagaattaactatactactagccattttagggcaccaaaacttgggattaaacacttcctacttcccactcccaactcctgaaatgaagtcttgctatctgtgactagttttatttttgtgcttttaatagtccgagcagtcttaccttgtttacacatgtattgacaccatttgcttcaggccatggagcactgtttctccctttttactatttataggattccgttttttcacaagacttttaataaaaagaaattgtagaaataaacacattaaaatttgcccagctgtcgtctaagccctcttgattgacttgcccaagtggcaatagagttctaatatctataataaagggagatttgctattattagtggaatgttgaccccgtatgtagagaaacagtacgtgcctttgcctctttatgcacacagagacccagggtgagggagtatttgttcccagtttttaagatagtataaaaaagcaaatacttggtgagtgatttaaaaataaaaccaaaacaaaacacaaaaagatattccacaggacatgccactttattataaaacctgacacaggcatagtaccaagtatttcctgcattgttgctaaaattgttttattgtagctccacattctggtgtagtttaaaatgcctttgggggcagtttgaagcagttcttcatgccacttagtttgaaaataaaattctagatatgcaaatgattttcttagaaaacttcacaaaataaaagatcttgtttttttttccatagcacagtaatgaatgtggttatcaatcacatacttttttggattatattgtagcaaaaagttgattagcttaccaagattattaatagcaatgtatgtgttataatacaacttagtacattaaagctacgaaaactcatcctggctgtaggatagtaataaaggaagaattatgacttcattatgaaaaaaagaagttttaaagttttcaattacgagcaatttggaagaaaaaacctaaggtgcttttcaaaagagtaactgaaattgttgcaggccaaaacagcaatatgatatctcagatttagttcaataagaacagtgaaacttttggttcactaataaattctgagtaaattagtggtgaagacaaaatataacttgttttagtgagccactgaggaaagaatatgcttattacaaagacaaaatgtggtgcagaaactatcttgcacctgtgtgcataaactgttagtcgtgactgacttggtgtgttgctattgtgtttctatatactccgtccaatatagataatgttttaataacaactgtgggataaaagttatcttccccttggaaagactaatgagcacaatgatattaatcacttttatggtgaataataaatgcaataattgcctcatgggtgagaaattgtctgtctaaatgcttctgaagcttttaaagtatctggttctgtcactggccagttatatcaatgcagagtattgtgtacctacttactattttatgagaattgatttttactaagcctgatttgaatgggttgcatttacaccaactgctatttattaatgaaagtggtagcctgctttttaagtaatatgtgttttggcaacaggagagggttttctgagcttttaacaccagtaaccctgaacttcttccaaaatccacaccttttattcccccttttccttgtctccttctaggtgcctcagtcctggcatctcgggaggactctgccattactcatctgttactgattctgaatcttgtgctctagctctacagcccagtgaagaagcaatatatctttaattcagggcttgcctcttgctttccaactctaacctgagagcagtgctacttttgtaattgcaggtctaaataacttaagcgtatatacagaagccaatcactgatcacttccattgcaatgaggcatctgttgtcaaagaaggaa

SEQ ID NO: 61060 - DNA, 1050 bp, Homo sapiens
gcctccacctcccgggttcaagcagttctctgcctcagcctcctgagtagctgggattacaggcatgcaccaccctgcccggctatgaaaattctgacattcttttatgtcagtgaacacctaacttagtatctagttgactcaagatgagagttctcaatgctataatttgaatgtctttgaaaattccactagtattatacaagctttttctttttctatactcagagagttactaatgcaataagctttgtcaaatgacgtcgtagtgtagtccaaattcattgtataaggacttatcacagtacatggatttgtaatcatgtgtcctcagagcatcctcggaacttagtaaggtgtgttttccagttttacagataaataagcctaagctgagagaattaggtaattacttaggtcagtaacttaaatacattatgaatcacgagttattttgatatcaagacctctttctagcaatgctgccatattgtactcatcatgttcatttcagtatggttctcatctatattgaactgtagattctgtgttagcatttattacctctgctccagtattgattcttttatgttaggtttggcagtaagggccttagaaattcctcacagtgaatttttaagatctggaagagactagtttgaaatattcattttaatatgtaccacagaggtaatggattctaattatctggttattgaagtttgtcaaaagaaaaattgtacttccactgaagaaaaaaatagctagtctttgcactctgaataactttgtttcattagggttttttggtcaatttttctttaagagacagggtcttactctgttgcccacactcaagggatcctcctgcctgagccctccacaatagctgggactacaggtttgcaccaccatgcccagctaattttttcaaaaactttttgtggagatggggtcttgctgtgttgcccaagctggtcttgaactcctggcctcaagcaatcttcctgtctcagcctcccaaagtgttgggattacaggcatgtgcca

SEQ ID NO: 61061 - DNA, 1005 bp, Homo sapiens
caagaaaacctttctaacccttgtcgcaaatattgggaatatgtctcacctgctctgactgtgtcagcttcatggcttcagaaagatatgctgttaagagaaaaaataggcatgttaatatgtgtcttcattttgtaattaacaggtaaaaggaagagttttaataatcttcatatgacaaagagaactggtctgataactctgatacaattggggattttttaaaagaattcttaacttcccccaaaaggatgtcagtggcaataaaatgaaaatattccctaccctatcttgaaggttttgttatttaaaactcctacagattttataattcagaaactgaagatggtctaatcagaaaaataggtttaggaaagataaaaatcaaacaagaacctatccaaaccctattactcatcatactcacaaaaatatcatgagattatcaatgactttttatccgtctgaatacctggaatctatcattttggactcctatagaatcacttttaatgaattgtctctgagttaaaccatcagccttatggttaaaagccctaagaacttgttgacatatttactgcgaggaagttactgaggacagtataatgtcatttatgaagaccttcaataaacttctctctgatcttagatcctcggtgactatttgtttgaattttaatagccaatgtaaaaattattatctttcctctttaggatgactgctagaaaacttaagtcaagttcttaaaaaaatatgcaagaactaatggtacattttgtgaactacactactagtcctttctcattttctctatggatgtccttatctatgtatctttaattacattcgatattttattgtacattcatctgtaagacattttataacctttcgggaacaaggttaggtataaataagttctctattatcaatgaattgtccataatgaatctccatttttatcttgcttgttataaacatttttggcatctctcatacct

SEQ ID NO: 61062 - DNA, 1640 bp, Homo sapiens
cttgtatttcacggtttttcttttggggataggttcagaattttcacagctgtattcaggtaactgaagattttgtgtctccagaacatcttgtagagtcatttcatttaacacaggaactgagacttttgaaggaagaaatcaattatgatgataaactacaggtaagagttgggtgttctaggtcctgttcttcaggctttttatattcagaaatatgatacatgtataacagcttaggcagtcattgcctagttggtcacattagggtgacaaccaaagattaacaccaacatgtatttaattgtatgatttatagtgtcccttttggcttaacactttcaaacatttttcttatatttggctttcctagttccctattatttttttaaatctggaagttgtcattttttaattaatttctgtcgaactgaagtgattagaaatatcaacatctctttcaggttaaaaatattttgtatcatgcagtcaaagaaatggtgagagccttgaagatacacgaggatgaagtagaggatatggaagaaaattaagtgtgatccagtttgatatttttaggttgttgaactgggattacttaaccttgaatgatgatatgtatgcacactgactttaagcttcataaaaccatcagtgccaagaaattctctttgtagtaattacttgttactgacaccacagcagtatagcatatgtcacagctcctgtgattcaatgttataaaacaagcagaattttaaaagcagcactatatagctgttttgtattatagtgtatatgatgtttgtgaaaatgccagatttaaaatgatgtatttatttttggtaaaaaataaaaaattctatgctatattgttgatcaagtgtaaatgtgaccttgtacagtttactaaaattactgatatttttcactacattgagacagttactgtgagaataggacacaaacaccagctattgcctgcatctgggaaattgctgaatcgcacagcagtcatgtcataatcagaaaattactgccaaataattgtaaaatttgtaaagtataaagtatataaagtagatactaaatacagacacttcaatattttgttgaagctattgactgtacaattaaacattttcaaaaggtgtaatttatttaaaattgtctcattttggtaaaatttatgtgaacttttaaagctaaatattaaacttaatatgctatgtaaatatatacatatatacatttaatgatgtatttttttaaaacattggcttgcttttgttaaagtgcaagtgttacatatggctttgtacattaaagttgaaaggggttttacattttccattaaaaggactttatcaaaaattgactttttccagagtactccctctgttgacaagcatgacactgggggcagagaagagcccgaagtcagtcatcctgggtataaatatgagttctgccacttactgtatgaccttagaaagttattttaattaatttgaagtcttggttttaatagctggctgctattgtcggttggttaaggctgacatattcccaaccctttaagttactggaaagatgtagctctccactgacacctgcaggatattgagaggatagccttt

SEQ ID NO: 61063 - DNA, 2154 bp, Homo sapiens
ctgagaagagtgggctgtctgttcaaggaagctgagatatataatcttagcaagctgagggaaagcagcatagccacagccctctttatatgctaagaactattctagaattggagacttacaaatcttaccttggtaactgggactcagtctgtgaaactcctgtacatccctccacagagcaatgaccctgacctccaggatttttgtctcagctgtagtattctgaggtttagagtggcctttacttaaaaacagcaacagttgttttttttttaagttaacacataatctttagtaaaatttgtcgaaaaatactaactttgattgtgtttggtcatttatcatgagtttagaaaattgtaaagttgtaattctctgtatttatatgaccaaaaggacttcttggcaaaatctttccacactaagttctcacaaataactgagtaaatagcaatcacagtgtcaatataataaccttcctactatgaatacaaattatattttcttaacattacctatttataattataactgatgcttttaggcaagtatgaataagacaatgtcaaggaagtgaaatataaatgagtcaaatgtggcaaagaaaagggataatcagaatgagaagctgagttgtgttctgctttaaaactgaaccttggctcttcaaagtaaccctcaagcctttatccaaaatatatcaggtaggggtcattaggaaacctaatagcatcttgtaagcactaataaaggttactgttctaaaagtcattttaaaacaaccataagctggcaaagactgacagaatgaactttttcagaactctggaatctaattgaaaacttacaacagcaaccaagagactgcttaatgaagaaaagggcagctgatttttggcatttaaggaaatctctgttaggtaactggctgaccagtgagatagtggaacagagacttcagtgaccacacccaacaaggaatactgcctttgcaaaaacagtttggaaaagtcactaaacaaatggatgactggagccctcaggaatcaacaacagcaaaccctgaggcagggagagaatatgattacccattgtaatgttcagatgcccagttttcaacagaaaggtataaggcatacacagaaagaggaaagtatggcccattcaaagggagaaaataaattggcaaaaaccttccccgggaagcccagacattggacttactactagacaactgtcttaaatatgctcaaagagccagcagaaatcaggaaaacgatggatgaacaaagtgagaatatcaataaattatataaaaaaagaaccaagtatacattttggagctacaaatgattttaggacatgctagagctagatataccaaaagttctttcatgctaaaactttggaaagacttactctccttaagttcagataaatgaaagacataaggagagagggcatttggagactctgtatgctggtatgagagttaataagcaggactgtaaagcatctgttagacaagacaccgcaggagttgggctcctgttgacttgccatttattggctgatttgtcttgggacaggcgctgaacatctcatccatagtttcctgctctgtgaaatagagcatctgttctacagacacattatgaagagccagtgagactgtacagaaatgctgaaaatgtgaggcatccactatgttcatcctccagaggaaccaacagcctaatgattaaagaaagagaatgtttactttactatgctaccaagttatcaatagaggcacagtgcttgagttaaagaactctgcagacttcagcagctgttcaggtggtcattatgcccagaggaggaattctagcccctctggaattccatcaccctatcatcaattagattttttttccccacagtctccatttcccacttactatctctttcatctcactcctcccaattaaatttattttgcatacttagagtaactttaaatgcttagtttttcaattatttctcctttcccaggaatttttatgatgttttttaatatcactagaagacaatctagaaacaccacaaatcccagattggatcagcttgggccttcctctgttgttttactggcattaatagaaagcagct

SEQ ID NO: 61064 - DNA, 1011 bp, Homo sapiens
atgaaatccatacatatgaatggtttggcttttggtaaaaaaaaaaaaaaaaaaaaaataccctgttcctcatccatgtgctatacttttgaaacagttataaggaaggaaaccagatagatggaaacttcatagtggaaggaggtggtgagaaggaagtagtaaactgttaagagcatttcagcattgctgtattgttttaatattctttggctttccaaattattgcagaatgttattttttaactgaagaagctcattcagttgttccattgattctgagaagaaaagatttgttattacaaataaaattgaaatttaactgaacaggatttaccatttccttacttaaattggagtgtctattttaattcatatttcagatttcaaaagaacaaggccttgaagttctaccagaacatgatccaatacgtgaccaaagttggtatgtgaacaaaaagctccgtcaaaggctgcttgaagaatatggagtcagaacctgtactcttattcagttccttggtgatgctattgttttgccagcgggagcacttcatcaggtatatacaaacttatttctaacatattttttactgactgaaagaactagttttgaaaaaaaaattgctcttagtatagatataaatggaagaagatgcaaataagagaattacctgcaccagtctgcctttattagaatgacatctcagtgcttgcagaaatctcacataatttccttaagattttaaattgttttaacatgagccagatttctatttgtatactgtctccgatttaatagatcgaaatctgatttttaagccctcctggtgacatgtatacctctgaatagtgaggcttaaaagcatggggggacacagtatacagactttttatcaggctttaagcatacctcctacctttcttcagcatgctagcatatcaggggcctgtctaaagaaagatggtatgtaatttatataactgttgatccacaaaacataaaaacta

SEQ ID NO: 61065 - DNA, 1185 bp, Homo sapiens
tgtatccacttatctattcttgtagtcctaaaagttatgaacatataactgtgtttgactcttttttaagagtactgatctggccagggacagtgtctcatgcctgtaatcctagcactttgggaggcccaagcaggtggattgcctgagctcaggagttcaagaccagcctgggcaacatggtgaaaccccacggctactaaaatacaaacaattagtcgggtgtgacagcttgcacctgtagtcccagctacttgagaggctgaggcaagagaattgcttgaacctgggaggcggaagctgcagtgagccaagatcatgccactgcactccagcctgggtgaccaaaaaagaaaaagtactgatcctagtcaggcactctgctgctctgatagatcaactttaggagacttggctttctggtattctttgccgacaatttgaaattatgttcctttgtttcaggaattctcaagaaatttgaggaagaagatttggatgacattttaaggaaaagattgaaggactcaagtgaaatacctggtgctctgtggcatatttatgctgggaaagatgttgacaagataagggaatttcttcaaaaggtataagttagtttgcaaataatatctcttcccctcaagcaaggacttattcattgttgccgtaccttcacttggcattcaacaatataagaccattacataatttttacttcaaagtagatgggagtttttgttgaaagtcaaaaccctgtttctcttgctcctctttgaaagtctgttaacattttgagggttttgaatggtgatttgttcccagttggtagtgtgcctccattccctgttaataaaagactgatctgttcttgagccagatattagttgggtggcgaaaagtagctatctggagtcgcgggatgtaaaaacaaatatttcatggaaacgtctaaagaaggtaggatctttattttctttgaatctgatagatatttttggctgctgacctagggaatgattctactctatcacatctgatactatgatacttactgagtagactcagattttgagtaatcataccttgactgtagttggcatatactctgaaagaaatttatatatcaacctgaaataattggttgaaaccctttgctcaggtactttttaaacttcgtaattatgg

SEQ ID NO: 61066 - DNA, 1038 bp, Homo sapiens
aagagattgagaccaccctggctgacatggtgaaaccccatctctactaaaaatagaaaaattagctgggtgtggtagcgtgtacctgtagtcccagctatcaggaggctgaggcaggagaattgcttgaacccgggaggtggaggttgcagtgagtcgagatcatgccactgcactccagcctggcaacagagcgagactccttctcaaaaaaagaattactgttcctacaaattgtctaatgatttttagtttctactaaatctgttcctttaatccatcgaaacccttttttatatgaagcaacatgttaggaattaacagccaatatatagttaagtacctgcttattgattttttatttatttgatttttaatcatagtacattttattatagaaatgtaattattcaaataatagggtcttttatagattgtggcttttggaacaggtttttgtaataaggaaactaaaactcaaattacaattaaattatgcagatcgagctaatttgggggaatatctgattatgctattacatatatataaatattttgtcaagtaaaattttgttttatatacaggtgtagttgctgctaaagatcatgatataggaacaacaaatctccatattgaagtttctgatgttgtaaatatactagtttatgttggcatagcaaaaggaaatggcattctctcaaaagcaggtaaacttaaaagaataagtagtctttgaaataagagttgaataatcacattcactagtattgtccagaatatcagcttctgagttaacagcgaagatttcaaaaagaattgcaatggatgtaggggcattttagcccttattacttgaagattgaataattttcctatttctttttatgtaagtgaaattttaattttaaaattgaatattttaacttcttttctatcattaagtattgtgttgatgaaaatacaccattaagcgcacttgtaaacatttattgaggctgggcgcagtggctcacacctgtaatctcagtactttggga

SEQ ID NO: 61067 - DNA, 1116 bp, Homo sapiens
acattttataataactgacagcaaggcagattagaagttgagttagaagagaataataccattggcaaggagtctaatcagaaagctttacaggcctggtgctgtggctcttgcctataatcccaacattttgggaggccaaggtgggacgattgatcgcttcagcccaggagttggagaccagcctgggcaacatagtgagaccctgtttctaccaaaaaattttaattagccagacgtggtggttcacaccagtagtcccagctacttgggaggctgaggcaggaagattgctttagcccagtaagtccaggctgtggtgagccatgatcatgccactgcacttcagcctgggcaacaaagtgaaaccctgtctccaaaaaaagtaaaaagatcatggtgatagcctaagatttctgctttgaattattctgatacactaattagcttaacccttatcttttttaaaaaatttacttttaacaagctgctgattaccctaatagcagcaatattattggatagatactaggcactaggaattaatctgtgaattgccagcaagagttaactaatacctggacctatttttaaagtcgtatatattattggctcattgaaaaaatgtttaatggaacattcaaccatgtagtaaaccagaatttagggtgttttttctttttaaagatgtcttttgtaattaaaaaaaaaatctagctagagattattcttttgtggttcctatattttaattatgttacaagtttaagaatactaataatcacttaaattttttgtttgtttgtttctggagacagggttttgctgtgtctcctaggcaagatacaaactcgggctcaagcaatcctcccagctcagccttgggagctgggactacaagaatgcattgctacacccagcctagtaaatatcatttttcagaaacttttaagtcatagcttactgtgttctctatattccagaattctgcttcattagagtacaggaatttgtttaaaacctgagaataatacatcagatgttcttagatatgtttttatatcatttattgtagttttagaagctgtaaatcttccattactggtttctgcgtta

SEQ ID NO: 61068 - DNA, 1497 bp, Homo sapiens
atcctagcactttgggaggctgaggtgggaggattgcttgagcccaggagtttgaaaccagcctgagcaacatagcaagaccctcatctctatttcttataaaatatttaaaaattttaaaaaatgtatatgagggatgccacctacttgtattctctgtcccaggcctataacaatgtaaaagacaggaaggctgtacttctaagtttttcagacctggcagttctcacacaaccagacttctggtttgcattttgtcaggaatataggaactcaaatctaagagaagtgcatattgtggagtgtagggatattgtttaaaaaaaaataagtctgtgggaggaaaatgtatttgatttctctcaaaaacaggttttttttgttttgttttttccttaatagagtagcaaaagtggacggactatgcctaacattcttgatgacataattgcttcagttgttgaaaacaaaattccaccaagtaaaacctccaagataaatgtaaaaccagagcttaaagaagagcctgaagaaagcataatatctgcagtggatgaaaataataaattatacagtgatataccacattcttggatctgtgagaagcatattttatggcttaaggattataagaatagcagtaattggaagcttttcaaagaatgttggaaacaaggacaggtgtgtattttaggctgataaagaacactcttggtggaactgaagcttattaaatagaatggttccctccttaggaatagaaatggaggggggaaaaatagtggttaacacatttgggggacaataagatataaaagtaccgaaaagattgtcagaatgcttgtttctcaattcctgttttttggccagatttaatatgaattaatagggaaacgttgattattttatgttactttttgatctatcagaacagacatgtaataacgccttgaatttacaaaatgcagttcctttctcctctttttagattggtattttagtccagttagtagatccatgtctactattaaaatattaatattggcagcatttttcatgaacctatgtagatgttcttatctgtaatatttatacacagaacatttacttacaaattagttcatcaaatcttgaatgacaaactatattgtttcattctcctctaatataaatgattttgttggacaaaagttttgataatgtttgatatacatttcagatggcaatttactacattaatgcaaaaattatgaacaaattaagtgtttgtatgacagtattctgttaaatttattgttttctggaaaatgtttactttgtttattcaacagttattgagcatctaataagagacgcagtctctgtcataggcagtaagaatatataaaaatgagtaagctatgtaaaaatgagtaagaaccattttagtgcaatgctgcttgatctttttaggttactaatccctttcaaaatctgatgaaagctgaatctttcacc

SEQ ID NO: 61069 - DNA, 1425 bp, Homo sapiens
tcaggtttgtgtttaggtgaataaatcacaatgcttccttcagtttttatctcacagtagaaaatgctggggccagttttgtctgtactttagcaccatgcttaatagaattaaaatttgtaagggctgcgcacaatggctcacgcctgtaatcccagcagtttgggaggccaaggtgggcagatcatttgaggtcaggagttcaagaccagcctgaccaacatgatgaaaccccgtctctactaaaaatacagaaaaattagctgggcctggtggcacatgcctgtagtcccagctacttgggaagctgagacaggagaaccacttgaacctgggaggcagaggttgcagtgagccgaggtcacgccactgcactccagcctgggcgacagaatgagactccgtctcaaaacaaaacaaaacaaaatctgtgaaattttctatttcagaaaacaaagaacttacccttgaaaaccaaattaaagaagaaagagaacaagacaactctgaatctccaaatggcagaacatcacctcttgtgtcccagaataatgaacaaggctcaaccttacgggatttgctgactacaacagctggaaagctacgtgtggggtctacagatgctggcattgcctttgccccagtatattcaatgggagccccagtgagtgatgccagatttttggttttaatgtgggccttaaatagagatgatttggagacttagtttttggctctgaactacccagtatgctgatgaaatcaagtgtaccaaattgctaggcatgtttctatttgcattataactctctttaccttgaaagctggcattttctgtctttttttccaaggtgaaaggtggagggggggtgctcttcgattccagaaggtccctaagatacccctttagaatttggaaactatttgtctagtgaagggaaaaacccacatggaagtgaatgttgtatgttacttaaaataattagaagtcaaattttgctttaattatttaccaggaaaaaagagcagtataatttcttttaaaactatatggggggccgggtgcggcggctcacacctgtaatcccagcactttcggagactgaggcggctggatcacgaggtcaggagttcaagaccagcctggccaagatggtgaaaccttgtctctactaaaaatacaaaagttagccaggtgtggtggcacgtgtctgtaatcccagctacttgggaggctgaggcagagaattgcttaaacccaggaggcggaggttgcaatgagccgagatcacgccactacactccagcctgggcgacagagcgagactccatctcaaaaaaaataaaagtatatgggggctgggtgtggtggcttacgcctgtaatcctagcactttgggaggctgacgtgggcagaccacctga

SEQ ID NO: 61070 - DNA, 1243 bp, Homo sapiens
ctaacacagtgaaaccccgtttctactaaaaatacaaaaaattagccgggcgtggtggcaggtgcctgtagtcccagctacttgggaggctgaggcaggagaatggcatgaacctggggggcggagcttgcagtgagcccagatggcgccactgcactccagcctgggtgacagagcaagactccgtctcaaaaaaaaacaaaaaaacaaaaaaaacataaatttggttgaataatcaaaactgtaatagatggaagagaatggagaaaaatggaagaaatttaaagggcacaagaaaacctccgttattcccaattataatacaaaatattgtaagaaaaaaattttacagcattaacaactagtggtaatctttttattaactaccattttattttgtagttttgacagatcttctagatgccatgcacactcttagggaaaaatatggtattaaatcccattgtcattgtactaacaaacagaatttacaagttggaaattttcctacaatgaatggtgtatctcaagtgagtaaaaatctctggttattcaaataaaatctgtggttaaattagtcaactttgatatttatttgaaatttggtttaggacttatgtatgaattaggtttgctgtgtttctgtgtaaattttttgtatctatactactaattgaattattgaagaaagtgtttaaaaatgtaattgttctacctttgtaggttttacagaatgttcttaatcacagtaataaaatttctctgtgcatgcctgagtctcagcagcaaaatactcctccgaagtctgagaaaaatggtggcagcagcccagagagtgatgtaggcacagataacaagttaactcctccagaatcccagtcaccactgcactggttagcagatcttgcagagcaaaaagccagagaggaaaaaaaaggtaaacataattgattatctaggcatgtgtgagaggagtatagtataactaaccaacaatgtactattgtacaataaagtactgttaatattgaggtaaacaatttactttggtctttttcttgaattatgggttaggttcaatgtaaaacattttgtcttcacttattaggaactagcctgttgtttttttgttgtttttgtttttgtttttttgagactatcacccaggctggagtgcagtggcacaatcgttgctcactgcagccttgacctctcaggcccaggcgatcctcccagttcagcc

SEQ ID NO: 61071 - DNA, 1016 bp, Homo sapiens
tttttttgagatggtgtcttgctctatcacccaggctggagtgcaatggcgcgatctcggcttgctgcaacctgcacctcctggagttcaagtgattctcctgcctcagcctcccaagtagctgggactacaggcatgtgtcaccacacctggctaaatttttatttttagtaaaaatggggtttcaccatgttggccaggctggtcttgaagtcctgacctcaagtgatccgctgccttggcctcccaaaatgctgggattacaggtgtgagccactgtgcctggtctagttctagatttttttatgctgaatttattgaactttgtgacactgaaactcttgtagccacgtcgtaagtagctgtctgtgtcactaaatttgtagagaaggttcttgagatcaaggtatcaaatgcttttattctttatgttatgccctatgctatgccttaattctttacaacttcagggatgaaaccttatttgaagtcagcaatagcagttaatagtaactgtatggtaccagctttttcacatgtctcatgtttctctacatgtctttgaagcataagaggaaaatgaattaacagtcatctcaaactgtgtcagtctgatgtactaggatcaggcataaattctgtttggcacagaaaacagctaagagatagaagattagctacaaagatagaggtcactaataataatgactggtaatttttagaaaggctatcattatatccattttgtgtcagtgtttttataaaatcaggaaatggtggaactgtttttcctgacttgtttcagaaccaaacatctaaagcatatcattgacattttatttcattatttttatttttttctttttctctttggctgtgactctagccaactatgaaacattttatataatcgttaagttctttacactatcaatttataattatgaaaccatgagtgtgatatacaagttttattatcttacagataaagaactatatgcttggatgaagtgtgt

SEQ ID NO: 61072 - DNA, 1044 bp, Homo sapiens
atcagattatgtatttcaatagaaatacgttgaaactaacctgtagtttctaactatataaacctttaatctttacgttcttgctgtggatcttgaaagagctttctcctatgtaaaccaacttttggtatagaaggactgtattttcagttattgatatacacagaatatgaatgattcttatgtttgctattatacatacatgaatgatatttaaagagttcagtcagctggaaaatttagttctgcattttcagtacactgacataagagtggttcatttggttaatagaattggttagtaagtaaatagaaacgctgctgcactttttagtcattaatcagtacctagagctcttaatgtctttgcttctttactaaagtcttaccgtatcatcacaattgtataactgacttgaatttcatctcaaggagtttaactttttacaaagcataatcttgctaaaactttcctactgattttacagctggcattcctcgttcagtattgaaagattggcgtaaagtcaagaagctgaagcaaactggggaatcctttttacaggatgactcctgctgtgagatagggcctaatttacaaaagtgtcgagaatgtagacttattcgcagtaaaaaaggagaagaaccagctcactcaccagtattttgtagattttactactttagacggtaagtgaaaatatgagattgggaaaaaagtaatttattgatttgatattggaaattatatagtgttattctgagtgtcccttttggatgggggagtaagtctttgagtctccatgttttggaaacattataaaagagttattaaatgttttcgtgctaaattttaacaatttctaactataagactaaatacatacattattactcatgttccatatgacctttctgttctgagagatttattcttaatgagaaaatgatttttttcttaacagttgttaacctatatactaacttaatatgaatattaccaaataatattttaaaattaaaaacttaaaggtagacttgcaa

SEQ ID NO: 61073 - DNA, 1050 bp, Homo sapiens
actaagtgtcttaatctcaaacttctaggttttatatattgccagtaaattatatatatatggaattgaaggatgaagttttatttattgtacaaatactatgacagttaaattcataaaaggagttagttgcagtcatgtgtggccttgtctagaagcaaaaattataatatcaaaagctctacgtatgaattgggccttaatgtctttgtactcatttattcttttattgaaaaaaagctctaaatgcctattttgtgtcacataattgagatttgctttgaaatgtctgattctttactatagtactatctgagttgttcacagtggtatggtgatccatactctgaactgttccattatctggaattaaaggcatataataaaaagaaatagactgtatttagtttattctagtgtaataaattgaaaagtaaatagatgattagaagcaagtgttccaaataaaaatttatcagcagtataacaattctatcattcattccaacttgtaaaagctctgaatattttacacagttcataggaaaaatctcttttgcacaatggaggaaataaacattttacataagtcttctggaaatgggtttataccataaccgggagatgtggtgtgtggttatacacatgggtgtttctctagtggattaagccaaatggctccttaccctaagttagagacagagaggggaaagcatgtaattgtaaagaacgaggcagcaattcagaagtgcttaataattggacctgatttcaaatgggtcactctatatggtttatttaaacacagtgctttgtaagtttctgcaagaagtacgtagtctcaggagaatagctgtacctctgatccacacattgggcatgattagaaaacacaagggtaggaaatacagttttattctttcagcatgacagaaatagcaaactatgtaaatctaatatctgacatatagatacattaatatgggtgcaataagacacttacaagttagagccaacaactaattgctgatcctaacatagcttgctttt

SEQ ID NO: 61074 - DNA, 3372 bp, Homo sapiens
tttctgatgaaatgtgttttaggaataatattctgtttttactgttagcaatatacttttgctgttagaatcaggaaatcatataaactaggttctgtatatggcatttatagtaaatttaaggcactgatttcaagatctgtttttagtaagatgacaataaattatttaatactgattatgatatggaaaaatctgtttaattatgttattatttgtctgaatatttctcataagatgtatttagaaaaagttacaagtttcccaaagaaactgctatttgaatgaactaataaaccaccaagatcatacccagttctactgtgacacggtgtttagctttttctagtaactgaaatctaggtgttttttttgttttgttttgttaatagaattctcccagtccttggctacatcagcccacccctgtgacctcagcagatggtattggattacttagtcacattcctgtcagaccttccagtgcagagcctcatcggcctcttaaaattacagcccattccagtccaccattgacaaaaactttagtagatcatcataaggagtaagttcaccagtgcttaaaaattataaataccttgttcataatttttcttaatttgccttttaaatagttaattttaagttaacacatatcttaagattaggctttgttctgttttgatatttcttcaaatttattatagtattagagtacatgcaaagatgtcttttactttcataatagaatgatattgcatagaagctgtctttgtattttgcaggaaaaagtggttacagaaatatttgtgtattttctttacagagaattagaaagaaaagcttttatggaaccattacggtctgttgcatccacatcagccaaaaatgacctggatctaaataggtcacagactggaaaagattgtcacttacataggcattttgtggatccagtattaaatcagttacagaggccaccccaggagactggagagaggttaaacaaatacaaagaggaacaccgtcgaattcttcaagaaagtattgatgttgctccctttacaactaaaatcaagggacttgagggtgagagagagaattattccagagtggcatcatcatcttccagtcctaaaagccatatcatcaaacaagatatggatgtagaacgctcagtatcagatctttataaaatgaagcactcagtgcctcagagtttaccccaaagtaactatttcactacattgtctaatagtgtggtcaatgaaccaccaagatcatacccatccaaagaagtttcaaatatttacggtgataaacagagtaatgcccttgcagcggcagcagctaatcctcaaactctgacttcatttataacatctctttcaaagcctccacctttgattaaacaccaaccagaaagtgaaggtttagtaggcaagataccagaacatcttccacatcagattgcatctcactcagtaacaaccttcagaaatgattgtaggagtcctacccatttgacagtttcttctacaaatacactccgcagtatgcctgcattacatagagcaccagtatttcacccaccaatccatcacagcctggaaagaaaggaaggcagctatagtagtctttcccctccaactttaactccggtgatgccagtaaatgctggtggtaaagttcaagaatcacagaagcctccaactctaatacccgaaccaaaagactcccaggcaaattttaagagttcttcagaacagagtttgacggagatgtggagacctaataataacctcagcaaagagaaaactgaatggcatgtggagaaaagcagcggaaagttacaggctgctatggcatctgtcattgtgcgtccatcttctagtacaaaaactgatagtatgccagcaatgcagttagcttctaaagatcgtgttagtgaaagatcttcagctggggcacataaaacagattgcctcaaactagcagaagccggagaaactggaagaatcattttgccaaatgtgaattcagacagtgttcacacaaaatctgaaaaaaactttcaggctgtctcacagggcagtgttcccagttcagtcatgtctgctgtaaatacgatgtgtaataccaaaacggatgtaatcacatctgctgccgatactaccagtgtttccagctggggtggttcagaagtaatttcctctttatcaaataccattttggcctctacatcatcagaatgtgtatcttcaaaaagtgtcagtcagccagtggctcaaaaacaagaatgcaaggtcagcaccacagcaccagttacattagccagtagtaagacaggaagtgttgttcaacccagttctgggttctcaggcacaactgattttatccatttaaaaaagcacaaggcagcattggctgcagctcagtataaaagtagtaatgccagtgagactgaacctaatgctataaaaaatcagacactttcagcctcccttcctctggatagcactgtaatctgtagtacaattaacaaagcaaactctgtaggaaatgggcaagcttcccagacaagtcaaccaaactaccatactaaactgaaaaaggcctggctcaccagacactcagaagaagataaaaatactaataaaatggaaaattcagggaattctgtatcagaaattattaagccatgttctgtcaacttaatagcctctacatctagtgatatacaaaatagtgtagatagtaagatcatagttgataaatatgtaaaagatgataaagtcaacaggagaaaagccaaaagaacttatgaatctggctctgaaagtggagactcagatgaaagtgaaagcaagtcagagcaaaggactaaaagacaacctaagccaacttacaaaaagaagcaaaatgatttgcaaaagagaaaaggtgaaatagaagaagatttgaaacccaatggagttctcagcaggagtgccaaagaaagaagtaaactgaagttgcaaagcaacagtaatagtaagtcagttactttgttttatctcaggtaaaatgggctgaatgttttagctatactagtgtgctgctttaaagatcagtgagcttaaaggcatcctttgtcttcatttgcgtgccttagctttatgtatatgctcattgatctcatttctacatttcacaagtaagtaccctttaagaggaaatgagagaacacttattcctctatttttaaaagacttgtagaaatatatatcttacctgacagtcattgtaggtaatttgcgtaatttaacgtggaatttagtagttactcgtaattttggccatttctaagaattgtcaaaatgcagttatggc

SEQ ID NO: 61075 - DNA, 1030 bp, Homo sapiens
ataaaaatacttcaaaaataaatggagaagaaggaaaaccccataataatgagaaggcaggagaagagaccctaaaaaatagccagcctccctgggatcaaatacaggaagataaaaaacatgaagaagcagagaagcggaagtctgttgacactcagcttcaagaagatatgattattcattcgtcagaacagtccacagtttctgatcataattctaatgatttacttcctcaggaatgcaatatggataaaacacataccatggaattgctaccaaaggagaagtttgtatccagaccacccacaccaaaatgtgttattgatattacaaatgacactaatttagaaaaggtggctcaggaaaactcaagtacctttggccttcagacacttcagaaaatggatcctaatgttagtgattcaaaacactctattgcaaatgcaaaattcttggaaacagcaaaaaaagattctgaccagagctgggtcagtgatgtagttaaagtggatctaacccaatcaagtgttacaaatgcttcttcaggaaatgatcacttgaacatggaaaaagagaagtatgtctcttacatttctcctttaagtgcagtttctgtcatggaagataagctgcataagcgaagtccacctccagagactataaaatctaaacttaatacttcagtagatactcacaagataaaatccagcccatcacctgaagttgttaaacccaaaataactcattctcctgattctgtaaagtctaaggccacttatgtgaacagccaagctactggtgaaagaagattggcaaataagatagaacatgagctatcaagatgcagttttcatccaattcctactcgaagcagtacattagaaactacaaagagtcctcttatcattgataaaaatgagcattttacagtttacagagatcctgcacttattgggtcagaaacaggagctaatcatatttcacctttcctaagccagcatccttttcctcttcactcctcatctcatag

SEQ ID NO: 61076 - DNA, 1103 bp, Homo sapiens
tggagattatctgatagagcgcctttatacacaattcaaatactttggttaaaatgtagttaaaatgctaagtaagtgttactgtttcattgcatttgattttttccctaaaacagtgacaaacttttacctctcagaaaagcacaaaactgccttgaattgttaaaatagttttaaccacatttttaaaattattcatttgcacaatttttgtctttttctactccctaaagtctacctctgagttttattttacaactgctttttgaaaattactttctatttaaaaataaaaagtaatttaagaattgttggcatctgtattcttgattaatacccttgtttttcaagatgtacttgcagtaaatatatttgctttttaattcttggttagcagttgaaatggtgagtttcagaaggttaaaaaggtaattttgtcttaagtgaataaaacaaattattataacagcatcttataaattagggatcccaagctgatttctaaacatttctactgagtaaagaaattataccaaatatttgattagctcattctatttaatttttgtttttgttttgtatcatggattaggtactagaaccacagaatgtcgatccttctatggttcaaatgacctttctagatgatgttgttcactctttgttaaaaggtgaaaatattggcattacatcacgacgcaggtctcgtgccaatcaaaacgtcaacgctgttcacgtatgtatgttattagggatgaatttctgtaaaatatttttccttaggctagtagaaaccaggtagtaaacaattactgttaattggttatttttagagccattatacacgtgcccaagcaaatagtcccagaccagcaatgaactcccaagctgctgtaccaaaacagaatacacaccagcaacagcaacaaagaagtatccgtccaaataagaggaagggctcagatagcagtataccagatgaagagaagatgaaggaggaaaaatatgattatatatcacgaggaggtaggacccacttttttttttaagggaatgaaaacaaataaaacaaaaatacattttaaaatatgcttatttagtat

SEQ ID NO: 61077 - DNA, 1052 bp, Homo sapiens
tcaacctctcactttcttgatttttgtaaaagggctaacaatacttaggagagagaattaaataagcacttgaaaattttgaaagcactttgtaaattattaaggtacagcagttttttcccttacagttctttgttaaagtatttgataccattttaatacctgtgaattaaagatcgttttcatctcagtatcctcttctgtagagtgacttgttttattaggcatatctgaatatctgcagataaatatgtttaatattttttattattttctaatggatatctatacaagaatatcctttgaaaaagtgagtttagcacaaaagtgtaccatatttcgttaaaaatttttagtgctatatgtatacattcacttagccaatctcttttttaagacttttagcaactttttctggctgtgatagcaaatcaaaatttatagttgtttatggtaaagttttggcaactagaagactcaaacaaacatcaagttgcaagttaatctttctgtttcaaccatgtagtcatctactgcaatcttactaagtagcttcataaccttactgcattctacactactataactttgcattttgaactgttctcttattaactcgtgatcctagaaaccttccttctctcttaaagtattttatttctattgaatcaggaagtatgtgggtctagtgcagtgtatatagtaacttcagaatgattcatttgaaaggatatttacttctaaaacatttttttgaaaactgatagttggatatattactattatacactagctcatgtttcttctaaaaggcagttattaaatgaagatgtctccatttaagatgtttctgtttcttgtgttttttttaaggtccttattccttaaatggatacagagtgagagtatatagacaagactctgccacccagtggtttactggcataattactcatcatgatctcttcacccgcaccatgatcgttatgaatgatcaggtaaatagttccactaatatttttatagagattttaaaagttcaaatcatccat

SEQ ID NO: 61078 - DNA, 1527 bp, Homo sapiens
tatttgtttttggttattcaattgtgtgcaatataaatagaaggcccagtccaatattttgagttatatacatccaggaaaataatagcagagtgataataattttgatagaaagttgataatttcacaagtgtattaactttatttgaactgaatgcctgtcatgaaattacagctacacaggtgttttgttgacagaaaactgcatattatggaattctttaggtgtgtctttcctggagaaggaagcattgtttgcagtagagggttgcccacagccacaattgatttcctttgaagaatgttcttcgtatctggtaaaagtggcctatttcagtgcacctttttcagaaattactagtcttttgtttcctttgtttagtatgttacaacgtgtgaccttcaaaccagtggggtttgacgatttttagcaatttccatttctgtcagtaaaatcatgtattgtaaatacaagctttttggaaattgaatggaaagtgagacaatatggcatgaactgttgttgaatgtctttgtgaatggaattttgttgttaaattcccatatctatctcaaccgtcaacttccatgccattaagtgtcaagagagaatcccaaagctgtttgctttatatgggtatgtacagtagtggatcatctacatatttaattcttcctaggctaaatattctttaaacttttctgtggagaatttcaaacacatacaaaaacagaatatttcagtgaactttcattcacctctctcccagccccaacaactatcaaatcttggctgatcctgtgctatccatacccccttctatcaaatttcagacatcaccctattctatccatttttttgaacaaaacaatgctggaacattattctgaaaaaagtaattgtttttaaatttaaaatactaggtatttcaagttttcatttgtcttataaacgtcgaagattttaacaggtttgatttattttttaaaaatcaagggattcagaaaaggtccacacattgtgattatttggtacatccccattgttgctctttttttccctttccttgcaatttatttgttgaagaaaccaggcaaatttttaaaaaataatattttgtttctgcattgtatccttagaggagaaaagattaaggggcagtatagtccctattcattctatgcagaattgtgtgaggctgactctaagctatgttaagtagtgggaacaaaccagtgtaaactgtttgttaatgggaattgaaaactgatcatatttggagttactctataagcatgtcctatattatttagaaaaaataatatggagtcttattcttcaatagttagaaaagactgaagttcatataatggatatggctactaaacagtgtttacgcatcacctcccttaaattatagccagtcaacatcttcacttttctctagatgaaagtatttaatttacaggtcatatggaatactttctacagttcattgatttatatatatatatttaaagctggca

SEQ ID NO: 61079 - DNA, 1368 bp, Homo sapiens
gcatcagtctttttcatcttaaatgtttctttttctcattataaaagcaaaacatggtcattgcaaaataaaaaacttccagaaaaatacataaaagcatagcaaagtagattattcataactcagctaaagaaattactggtaatatctgttatatatcctggtggtggtgtgtgtgtgtgtgtgtgtgtgtgtgcacgcgcgtgtgtggatatatatatatatataatatgtatatatggagatacatatatatataaaatctttctagttggaaaagtaaaaggaatgtttttatggttctgtttgtgatcatttgagccaagataaaatatttttaaggctgtatcccattgcttaagtagatttcatttgggggatattttaattccaggacataaattctgacgaatataatgaaaacaattatattaaaatacccttgtatttgtcattaattctgttttgtttgcctggtgtgttttaatgtgattataatttgagatttgtttttttgggtgttgttagacatgaagtttaaaatttttttttaagtctaattttatcagtgctaatgttacagacagtgcttttctaagagttaaaatgactatactcttttatccttagggaaatatgcttaagaagtaaatcaggttattaatatgctgtgaagagtttgaaaacagtggtgctcagttgagcatattttagactatgcaggttaattggacacatttttaactataaaggattaactaaaattgtggcaaccttttcagccttgagattccattaaattgtagtgtgtttgcttgtttgtttttgtattgataatttttgtgaaagccttcaggtcagagtcacttttctagatcagaatgtcaaaattaactgagagagaataacttaaaatattcagtggaattagacagcattgtagttttctttttcactttaaatgaagtttgcagtaacatttgagttcccaagaattgtggtttgctaaaaatttgaacagaggaaaaatttaaaagtaaacagaaaatgaactttgaaattaatttaatggtgaatttatatataccaaataatgaaaatgacacaggaatgttatttcatgtaatcatattttaatttgaaaaatcatgagtccatagaaacatcatagaactttgtacataaaatgttaaaatcttgagactttaaaattcagaacccttttaccatttcataatttctcatgacatatacttctcttaaactttatcatttcctccttagtaattaatgatataagtagttgcaagcaatgccaaatggatgttccaaggagagatccctgaaatatctggatatataacagtg

SEQ ID NO: 61080 - DNA, 1051 bp, Homo sapiens
tgctcaccttggtctcccaaagtgctaggattacaggcatgagccactgtgcctggccgcctttttttctttttgtgtaatttaacacatttcttatgtacaggttgagtatccctaatccaaaaatctaaaatctgaaaaaccccagaatctgaaacactcaaaggaagtgctcattggagcattttggatttcagattttctaattatgtgtgctcaactactaagcgtaatgcaaatgttacagaatttttaaaaatctgaaatctgaaacacttctgactccaagcattttggatacaacctgtatttgtaattgctctacaaagacctcagtgaaggaagtggatggactcaaataggtgtcataaaagactaagtcactgggcaagtctagcaagtcttgctgatcattccaatttgtactggattgtattcgttctttctgagaaaatagaagtatggtactatagttcatttatagattcatcatttccatagcactatatgctaaaagtgaaaatcagcccaaaaaacttcgatgtggtattaatttggaagttacattcattgcactgtatattaaaaaaaaatttttagtgagtgtttggcgaggcacagtggctcacgcctgtaatcccagctctttgggaggccaaggcgggcagatcaccggaggtcaggagtttgaggccagcctgggcaacatggtgaaaccctgtctctactaaaaatacagaaattagctgggcatggtggcaggcacctgtaatcccagctactcgggaggctgaggcaggagaatcacttgaacctgggaagcggaggttgcagtgggccgagattgcgccattgcactccagcctgggggacaagagcaagatgtcttaaaaaaacaaaacaaaacaaaacaaaaacagtgtttgttctgtatgaatcaatcattgacacgatgtatatgtatactatttcaatattagttgtttttaaatatatatttagagacagggtctctctgtttcccaggctggtcttgaacacctggcctcaa

SEQ ID NO: 61081 - DNA, 1050 bp, Homo sapiens
cattcatttattgctgtgtgccagtcactttgctctaaatgtgaactcaaagacagataaaatacttgattctctttcaggtcataaatattacagcaacatgccagaagttctgaaatagagctgtatgcatagtattttgtagtatagaatcagctgatgggggaatatcttatggttgcctgtttctttttctttacttctcagaagactagggttctgtagtagtgtttctcagtagagtgctgtattagggttctcctcatacagtaccagtatgggatgtggcaagtggggttgtatatatgtttgtgtatagaaattgagaaagaggagatttttattgattggctcttggaattgtggggactaacaagtccaaattccacatggtagaccagcaggctagtagttcaggcaagacttgctgctgcagtctttgagtctgaaaggcagtatgaaggcagaatccatttttccttgagagaccttagtcttttttcttaaggccttcaactgattggattaaacctatccatgtgttaggggtaatctgctttactcagagtctgctggtttaaatggtaatcacatctaaaaatacttccagagcaacatctggaatgatgtttgaccagaccactaggcaacatttcctagtcaagttgacacttaaaattaacagtcatggctgttattcatatttgattcttagttttgtcatgcatttgtagcatagtaggaatctgtacctctgacttagcaaataaaatgcctttggcaagttctctcattcattaatggatatccctgagccatttcccatcccctttcagcctttatttagagccattgggataggtatagattaagacaattgggaaagtgagagcctttatttattttctttgagacggagtcttgctctgtcaccccaggctggagtgcagtggcacgatcttgtctcaactgcagcctccacctcctgggttcaaacaattcttctgcttcagcctcccgagtagttgggattacaggcacactccacca

SEQ ID NO: 61082 - DNA, 1125 bp, Homo sapiens
gcctgtacaatttcacctagattttgcgtacactggcatcaagctacactccaaatctgtgcattattttcagattcatttgttccctcggcaggtaatccatattaagatgttttctagtctcttttttttcagctgtctagttttgttttgctgttttttgtttgtttgtttgtttgtttttttggttgtgcatatgggtattctgaatacctagatttgctcaaagctaaaattcaaaaataaaatactttaaaatgaagcccttgtcagtctcttgccaaaacagttgtctctaaaattcaagtctttctaggcttcagactaaaaacaaaacagtactggtccttagtcattaaataatctggattgagagtcattaattcatatatttaagggccaggtttgttatgttcagaactacaaataccttcaaagaacctagaatttaatgggggaaacacacatagaaaaacaaatataagcaaaatgtagtaagtagcagagaccagggaggaataaggaattcattctggtcgtagggatgcggaggtattgttagaattagagtaggtgacccctgagttacatcaggatgaatagaaattagctaagccactaggacatcacggttggttaaataccaccgcgcctggtgcagtattacaccatatttttaaaaaatgaggccgggcgcggtggctcacgcctgtaatcccagcacttggggaggctgaagtgggcggatcacctgagttcaggagttcaaaaccagcctagccaacatggtgaaaccccatctctactaaaaatacaaaaaaattagctggacatggtggcgggcgcctgtattcccagctactcgggagtctgaggcaggagaatcgtttgagcccgggaggcagaggttgcagtgagccgagatcgtgcctgtgcactacagcctgggcgacagagcaagacttcgtctcaaaaaaaaaaaaaaggtgtaatataaaggtccagtttcattgttttgcatgtgaatatccagtttccccagcaccactttttgaaaagttgtcctttccacattgagtgctcttcccacccttgaaatcagttgaccatttgtgtaacagttta

SEQ ID NO: 61083 - DNA, 1009 bp, Homo sapiens
caaaagtgacagcttgcaatagtagagctaagctgaagcctcgatagtaggatggacaacaagaaaagaggaaccagcagctaaagcagagtcaatatacttccttgttttttaaaaattatttttaatataaagttgccatatcatgttttaatattcagtaattttgctctgtattctatttaaatattctattacctacctatatgattttatatagctataatttcaaaaatagtaatgaaacatgcttattaaggtcccataaattaccccagtacatatctgttgctatttaaaaaaggagctcttcatttgtaaaaattggttgcgaaacttgatgtgttgaaaatgtatccttggagtttaggaacatgttattttgactgaaatttggcccaagtatgagctattctgcaatattcagattaaaaacatttataagtcactgcagtagttctttcctggtcccaaatctgctgtgatcatatgctgaaaaatctgccagtctccttttaaattttcatagctgctgctatgaatttaaagtatgtgaaattatgcttgtagactctaagccatcactagttaccattgagaaagattttctggtttcttttttccaatcaaaataagatcataggattgatttattctttttcttaattgcataatcttactgaagcatgtcatattatttaaaatctcagaattagagttttattcctcagtataatagtaatattttactagaattagaatttaattttgggaatttgatcattcccaaaatattttcatgtgcattattttatttccaatgttagctttatgaggaaaatagattgtattctcttattttgtgtaatgctttcaggatatatattaatttattaatccacacaactgtttgagaagtctaacttacagatgagaaggaagcaaaaatagaaacgatgtaaagtagattaagttttaaaagggtgtgagtattgtgatgatatagcag

SEQ ID NO: 61084 - DNA, 1053 bp, Homo sapiens
tacatctcaaaaaaaaatagttttttttttgttgttactataatctctgtggtattgttgctttactttggagtatgattatagaagttcaaaaaaactttccattaaattttgataacagttttgatcacattcacataaaaattttgataatgaaatgaaatatttagcttttagcatgattttgaaatcattttatcatggattttggctactggccgtgcacacacctacagttttcaggttggggttgcttcatagagaatgtggaagagattatttcttacctgaaagttgtacatgattcataccaactaacctggcttggtctggcttgttagtccagtatttttaggcatcacattcctctttgcttttaaatgtaataaagaaataaaacaaaggtcactagttaaaaccgttagagatttgatacggaatgtggttgtccaaaattataccgcatgtttatcttacagtatattaaaattcattgtagtaatgaggtgttttccctaaaataaggtagaatcataaatcctagacctgaaggaatgattccattagaagttctggatcccagctactctggaggctgaggcaagagaatcacttgaacccaggaggtggaggttgcagtgagccgagatcacaccattgcactccagcctgggcaataagagtgaaactctgtctcaaaaaaaaagttctgtatcataatgagctgataaagtttggagataagactgttaatactacagttctatcattgtagagtatggacattgaactacagtactttactaaatactaaatacagtactgttgtgctgtgaattgctggttgaagggaatgggtagaacaaacctgagtattttcttagtacctggactaaagattgcttaaagacttaaccagagaagactcacacattgtctagtaaatgaatgtgtctggactgtgccagattgtttatctatttctgtagtctttcaatgatagtttttccagtttgaatccattttaacccatatttctttcatcattgatca

SEQ ID NO: 61085 - DNA, 3326 bp, Homo sapiens
actagatactcttccagaacaaaatagaaatttcagcaaatacttactgacctttaaagccttgttgtggatttctgagatttaaagatactttaaaattctcaagaacaaagtacggtttgtatttttctgcttcctttttcttttgtcttaatttacatttggtttttcttctcagcctgagaaattaaggtcactgccttttataaaagatctggcctcaatgtttttagttttaagaatttttaactttcatttgtttaaaaaggtttattgtgtttgtagtaatttaataactgtaaatgttaaaaaacgagtttaattgtttaaagtattatggcagaagtgcttcaaattaggattttcagactagtgtttcaaggaaagtgggggtatttgttttgtaaggtttttttttggttattcccttccccacccccaacttgttttctaacagtatcgtgtttttcaatagacctgcttgggtgggaatttggactttgttctttcaagtcactccagtcctttttttttttttttttggtagactaaatcttaacttctaaaatgttgcttaggttgttttctgctttagtatttacctttggtgagatttatattagtatttttgcagttaataagcctgtttttttttttaacttggaattgttaactgttaaccggagattgttagaaactaagactgcagacataagctccttgaatttcctgttaaatgtgaaatggtgagctttaacatcgtttgtttgagcagctgagttgtgtttaagagctgtagctgatttattttaaaaatgtttttcggggagggctcatctgttcgcgtcttcctcatgtgaatggaatgtggtgcagcatggagccccaaacaggatacagttgttctaagcattcttcctatagtttggtaggccctactagaaatgcaggctctcaactatatttattttggccgtagactatttttaaaaagtatgtttaacactgataaatgaccttaaaaaaaactctcactctaataaaattgaaaaagcattttgtttcaactgaacatttagtgttagtaattttcattttggttttcaaaggctttttagagcatttgaatgatagtcttttgtgattagggccatattctactgtgactttcatcagatgttagctcattgcttccctttaggctgtggaagttactcatagaatgatatatctttagagtgttgaattagttatgcatgagttctagtttctttacattccagtgcacctagacccatgaactatttactacaaatttcatcataccagctgtaggacccatttgtttttatttaaatatgttttttattatttttaaacttataatgttcctttgaaatgtactagactaatacaaaaattagcaatacttaacatggttgttttgccagttaaaaaaaccggggtgtattttaatatcacttcatatgttgtttgcctttcatttttccttaaagtagagcagtcacacatattcactgtttctcatttaataaatattgaaacatttcttttaacaaatactataaaagtatttatcagcactttttatttgctatttaagaagcatgatatactttggacttccacttgtaaatgattataagtactcatgtccttgtaagagtattcaaatttgatcattgtcagctagttttcttagatttctggtagccaaattttacttggctttcaatgagacatcttaaaacgtgagaatttttttagcttagaaatccttttttcaaattaacttagaataatttaaatcattggtcggcttgttgaaatttacccttagaactctggcctaccttgaaaaggagagctctcttcagaagaatgtttttcatattataaaatgactaggtctcataggaaatgcaagccacctgtattatttgcgtaagaaagaggcactccagaaggagaactttacttctttttcaaatcctacttaattgaattgtatctttagccacttagataataccttttgtggacctttttgttaaccttcatgagttgacctgatatggtactgtttgaaaagaaatagatcatttgataatgttcaaggattaaaagtcctcttgagaagatgccagtgttttctagtttacttaaaaactaaactgacagagatataatatgaaaaaacattttttacagtagggatcagccgaatatccctgtttatgttacatatttcatgtcaattggtcacgtagtggtggacacttttaaagcctaaatacaataaatgctcttgaatttcttacaaactttttgtcacttaagtaaaataataaataggattttatgaaatcctataggattttatgtaattgaaaagtgttaaatgataacagtagaaggaaatagctaaataatgtgaggattttctattttgaaaatgtgatttctcacccaaataatagtaattttgataaataatagagtgcttaaaaggttagcctaggatatgggagagaggatattactgtgactagattttctgatcttaaatatcgaaaataagtgagaatataagagagtttttcctgttttttaattaagaaaatattatttgtaacttcatgatgtagatagcatagaaataagacttgcttaaatttaatattaaatttttaactttgaaacattgttacagattgcagtgagtcaacctgaaattcctcttaggaatttcttaaatatagaaattaactccttaaaagccactccaaaccaaacatcttgaagtttttccctggagtatgtttattgttattaacaaaatgttatatattttttaagacagaataagagaaaggggaaacacaatgattttgaaatgcctggtaatttgtactgtctatgccaaaatctttgttttgtgtggaaatattaacacaaattaccctgtagctagaaagatttctccatgtgatataggtaacttagaaattgagttgattattaattctgttttccgaacttttttccagttaaaaaatttttttatagtaaagcagctgtgtttttaaaatggtggaattttgttttcattttcaagtttttagaacagtaccatgaatataagacacttgtattttatttaatcttcatctactttgaaagtgagtgtgatagtcataaagaaatttatacattgtatccctgtttccttcctcttcctaccctggctctgtccctgtcatccccacccaagatacgagttaaatctcatatgttaaaggtat

SEQ ID NO: 61086 - DNA, 1010 bp, Homo sapiens
tgattagtaactaccatattggacaacatcagacagcagaactctagaatttagatagatgttaagagactatattatataacacatctgagaaatgcattttatgctttcaaattgtatcttagaactatctaggttaagttgttttttgtaatgagtgaaaatggttgaggaatattttcaaatctaccaaaataaatattaccagtttttttttagtaaaatgcctatgagattgttgagatcattgtctaaaaatattttaaattgatttattttgaagtttttaatatttttaaggcaaaatggttatactaataaataaatcgtgcccaaaaacatacaaagtatatttgatgctttatttttaccaacttgagagatagtcacatgttatttcttttctgcactttctcaccttggtaaatctggaaagcaaaaacttagtatttgcatttgctttatgaaggagacagtaaacttgagctttcagtctcgccactagtctgtctttgtctgttgttaaaattatgagccagtctctatggccgcagccaaatgagtaatcactagtaatgtgactcgtgctggaagtgactccatcagcacctgtgacgggggattagttacagtttacagagcaccgcctcttcccttctctcagtgtgccctaagccaagtactcgttctcatttgggtgtctgcactgttggaagctactgcactgtgtttccacgcagacagagtacagtgggaaaggctttctccagctgatggatggctgttctctttatttggagtatcttactggttatgtaagcgacctcgagagaaattatcctgacccagatcggaggatgcagtagtgcttcagctgcaggatttcttagtcgttaacaccacagtgctgatgacaaagagcgagttgtaatcctcatcactgccagggctgagccagagcagacagaaaatcgtcatttgctcgttggagacttgttaggttacagctc

SEQ ID NO: 61087 - DNA, 1301 bp, Homo sapiens
accagaccaattaataccagaccagtcacattaatatatttatattagccagatatggtggcacttacttgtagtcccagctgctcaggagactgaggcaggaggatggcttgagcccaggagtttgaggctgcagtgagctgatagctccactgcactctggcctggacaacagagtgagacccaatctctaaatatatgtatgtcaagcccattttaaatatttaaaaggcattcattattaccaactagttgtaactctgcatcctttgcatcaagaattgattctatagtatttttagtagtggagaagccagtcttattttaattcaaccatgatgtagtgtgaaatactttttaaaaatgaatgtttggtttttcagtattgttaattacattaattttactaaaaattagtacatttgtgttactaagaatgtatgacttttgaggcaattgtatggtttagctaagtgtactttgtgctatatgattctgtaagggactgaagtacttgagaagcaaaaatagctgtttttaagtctatatcatatagtgtagacaaacttgagtttatgcaagattatgagataaatcctgtgaaattttctaatgtacaataaattggggaaatgtactaaagtacttaaaatttgatagtttgttatattaagctgtattaagcatttgctttttttggtttggtaacatgacattgtgagttcttttatttacatagattctttttattttatgtctgattaattatgaatgaattattagggtggttatatgcgatttaatatccacttgacaacattattaaaaacacttcgttctaaagttaccttggctgggagcagtggctcatgcctgtaatcccagcaactttgggaggccgaggcgggtggatcacctgaggtcaggagtttgagaccagcctggtcagcatggtgaaaccctgtctctactaaaaacacaaaattagctgggcgtggtggcgtgcacctgtaatcccagctacttgggaggctgaggcaggagaattgcttgaacccaggaggcagaggttgcagtgagccgagattgtgccattgcactccagcctgggcaaaaaagagcaaaactccatctcaaaaaaataaagttaccttctggatcatgcatgttctacacaatatgttctgtaaaataaagccatactttactcacagtcttaggctaatcattgcccatctctttttcattctttttataagtgcaagttcatcatatactaaattgaaaatatcttttcggta

SEQ ID NO: 61088 - DNA, 1117 bp, Homo sapiens
cttcagaatgaatgacagtaataaacataatgaagcataacaaagctcaatctaattcaccactgtaaaagaaggataaaggaaactccaggtcaggtgtgggtggctcactcctgtaatcccagcactttggtaagatgaggtggatggttcacttgaggtcaggagttctagaccagcctgctcaacatggtgaaaccccatatctactaaaaatacaaaaaattagccaggcgtgttggtgcgcgcctgtatccctgttactcaggaggctgaggcaagagaatagcttgaacctaggaggcagaggttgcagtgagccaagattgcgccactgcactccaacctgagtgacagagcgagactccgtcccccctcccaaaaaacaaaaaaaaaaagaagaaaagaaaacagaaaattctctttttcctagcaaagtacacagacattttaagttgactcttgacaaacctagttcatgaacaattgcttctctatgtagcattttgcttttcttattgtcagagtagaaaaatgcatatttccatgactactttaaatggtttttttttgttttttacactgaattatgtaactttttaagtatacccacatttttccaaggccaagtagaatacagcacaaagttaaaacaaaatattgtttaacctaaatgtgacaggaagcaggaagaatgattctgagaattcctgaaatgaagaagaatggttctattaaaaagctcagaaaggccaggtgcagtggctcacgcctgtaatcccagcccttcgggaggccgaggtgggtgcatcacttgaggtcaggagtcaagaccagcctgaccaacatggtgaaaccccatctctactgaaaataaaaaaaattagctgggtgtggtggcgggcgcctgtaatcccagctacttgggaggctgaggcaggagaatcgttcaaacttgggaagcggaggtcacagtgagccaagatcatgccattgcactccagcctgggtaacagggcaagacttggtctcaaaaaaaaaaaaaaaaaggctcagaaagcaggtggtcaggttgctaatacagggaagctttcagatccccaaagaaaaggcaatt

SEQ ID NO: 61089 - DNA, 1038 bp, Homo sapiens
tcatgtaagttacttaatagattgttaaattttatttactttttaataaagtaaaatacttgtgaaagcacatttatcggcaccagggaaagaaagtgttggcattcataattgaaatcaacgaatcacctacctaactgggttagggccctggctccatctcctttaggaaaaccttctgtggggagtggggcttcgaccctaacccaggtgggctgtaacactgctgtgttttctaaggggcagagttttctactacttttccgctggcccagccttccagatcaccccaaccagtgctcctatataaccatcctgtgctcctatagaactttgttttgtacctctgttttaacaatcagcacattctgctttgtattatacctatttgtttgcatgtctgtcttcccttaatagattgtaagttctttgaggacaggagtcatgtcttagtcatctatgtatggttccttggagtctagcacagtgctttacccatctcagaaagtaaattcttattttaaagtgatgaatgtgctgcaacccagctagtgaaaaagaaccctactgggagttatcacaagttttctgactattaacatatgataatatcaaaggacaggaaagcagaatcacccaattgtggtaaaactgtgagttaccaattttaaacatgtcaatatataataaaaaatactaaaaagcttataatgccaattctcatcaggtacaaatttgattcctgaaatcaccaaggggaaaaatgtaaaattacctgaaatgcgttattttaaagatgttaaaggaagaaacagaagtcctcacaattgacttaaatattcaaatctttgataatttacttgaatttctgaattgagttttaggaaactcagactactttttctcaatgtagcttttccttcatagataggcaattctggttcaaccaggaattgtgatgacatcataaacacgtaaactcttagcaatttatttattttaaaatattctcttagagtgctttttacttactatctg

SEQ ID NO: 61090 - DNA, 1170 bp, Homo sapiens
gttgcaataaacactgatgtgcagctgtctcttcaatataccttcctttcttttggacatttacccagcagtgggattaccagatcctatgatagatctacttatagtgttttgaggaacctccatactgttttccatactggaggtactaatttacattcccaccaacagtgtactagagttcccctttctgcttcctacaattagatagaaggagtaagtgctagtgttcgatagcacagtatggtaaccatagttagcaataatttattgtatttttcaaaatagctagaagaggatttgaaatgtttctaacacaaatgataaatatttgaggtgatggatattctaattaccctgatttgatcattacacattgtgtgcatgtatcacgatatcatatgtaccccataaatatgtacaattattatgcattagtaaaaaaagatataccactcttctattttgctaattgaattttgtgtttttgttttcataggtgtatgtggaatttgatgatcttgaatgggataaacgagagtgggttaaagtttatgaagatttttcaactttcttggtggaataccacttaatctgggccaaaaggaatgaccctagccagactcagggatcaaagagcaaacagattcagtggcctgcattggtaagatctattcctgtttcattaagcattttcatttgttcgtttaaaacaaagaacaacaacaacaaaacaaaggccaggtttggtgactgacacctgtaaaactagcactttgagaggctgaagcaggacaattgcttgaagccaggagttggagatcagcctgggcaaaaaagcgagaccccatctctaccaaaaaaaaaaaaaaaaaatagctggatgtggtggcacatacctgtggtcccagctacttgggaggctgaggtgggaggatcacgtgagcccaagaatccaagtcaatgtgagttactgtcacactgctgcactccagcttgagtaacagagtgagaccccatctcttaacaaaaaaaaaaagaataaatgaaaatttaagactaagaattaaatagaagtttagattcatcttactgatttataaattaatatttttgaagagtctctgatgaatctggcagagattttaaaacactgccttcattttgtta

SEQ ID NO: 61091 - DNA, 2187 bp, Homo sapiens
aggcttataaaaaggggcatattttaaatctttatcatcactttatagccataatatacatactaaaagtttggtagcaatttgagtatttaactacatagggtggtactttgaaggaaaaagcattttaagttgagctttaatttaatttctgcttttaaaaacccaatatagtagtacgtcatctatgtatgtacattgagcatgcttcttaacatatttaacttccaattctttgataaccggttgcattcaattacttgtttaaataattgggcaagtttcctgagttgtaggctgtgaaatattttcaagatggtttgggtaaaaaattttttcaaagtaggtgccgtcagtgactttgatcacagagaaatcagtatgatcctgtgacaagtttagttttaacaatgtaacttcttgtgtaaactcagtcacctagtaatgtgaattagttgcaaagtgattctgtattcttagtgacccactgttagatgttttcagactagtaaatgataaatatttattgttaaaatcatccttaaaattttatttgaacatgcagcactttttgcagtgtgaaattgaaaaatcaattgtttagtttttaccaaaggaaaattagagttttgtatacatatttgatgaatacagtaaacaggttaaaatttagcaaatagaattttgtaagcatttttaaaatgtgtgaattctgtgataagggggtggctttgctacaatttattacaaagctaagttatatttcattacttatgtaaaatagtgttctttgtttagcttcttaaagtggtaggagaattgtataattccattgattggttccatgcagtggaaatctgacctttagcagatgtttgagaaattgccagcacagcatgatcagccaaaaagacagttttccccttgttacttgacaggcctttcatgctttagtaacatgccaaagaaatgtttaaattatttttttataatatcacatgctctctaaaatattaagaatacattgaaaaacatgcataaaatgagatagatttttcctgcaattacggattgcaattcagctgacttttaaatgtttattattaaaaaaaaaaaactaagataaatgctgattgttttgtgaattatgtgttactttgagatttaaaatgtcttcggctatgtagttaattgttattagggtttgatgtgtgttattttttccatgatcatgttttccatgatcatgtataacaatttaaacactgttataagtttctcttattttagtgttatttaatcgcaagtatcgtctttggttggcttttttattttttaatagaggctttttgataggggttaaatgcatcacagagaagttatcctatctggaacttctcgctaagggcaggatactgcatgaatccactttaaagcctcttctctgaaggacagtatttctttagagaatgaaatgggttcagctgtgtagttgtgggggttcagctgtgtagttgtgggagttcagcaaaaacactgtaagctctgttttcttcaacttcatggattgagcgtacaggaaggggaaggagttgccttaatgtttaagaatgaagtgatgaattgatagtatcagcagttgccagactgtatctttttctgcaggtgcttattttctgtagggcattgcagttgtttttcattgtgttaggttatgagacgattttaaggaaaatttaaggaacatgatcttacatagtttcattttacagttttgtaactgttttgtatgtcttaggtttatatactgaattagttcttccagaggattatgattgaaagttttggctgtgtgtacctatcaccttacaaaaataaaaagatttttttaaaggtcatgttcagtatcagtagttctaagaatatgctaaattaaaatttaaaaatcaaacacctataataaagttttgctgaatccacatgaattgaactaatggtttgtaataccagttatattacaagtgagaactagtttcatattttgatatataaaagctttgaaggaagcataattgataactgtttattaatatcacataatagttaatctttcatattggtactttctgataaggttttattagatggagaagggttatataatttagtaaactggcagcttttaaa

SEQ ID NO: 61092 - DNA, 1054 bp, Homo sapiens
cattgaggagatatgaatattatcatcatggtttgtgaatgacgtaattgaattatgagttattcctgatgttacagttaagccattgctgctattttttaaattctcagtatctaaataaataaataactcccttaggccgggcgcggtggcacaagcctgtaatcccagcactttgggaggccaaggcgagcggatcacctgaggttaggagttcgagaccagcctgaccaacatgaagaaacaccatctctactaaaaatacagaattagccgggcatggtagcgctttcctgtaatcccagctactcgggaggctgaggcaggagaatcgcttgaactggggtcgggaggcagaggttgtggtgagcccagatcgcggcattgcactccagcctgggcaacaagagcaaaactctgtctcaaaaaaaaaaaatgataataataaaataaataaatcccttgtttgagatccatgtatataggaaaacagattatttttattttgtgtttataacctatggtaggttgacagtgaagagaagaactcaggacagttaatgaaagcatcaccttttctttactgagatctcctgtgtaaggaaatcattcagttagtcttagaattgtcatgaaagattaagaaatgttcatagcattgtgatcatcatcttaggtattcagtcggtgaatttctgtttttaggtgtaatctaaaagttctgtaaaataaacatcaacaatgttgtatgcttcttatggctgttctaggtctctgtgtttttattatgaacttgtatctgatcttttcaagtttttgtctcatggtattttttcctcaatgccaattaacagtggttaaacaaaatagataaggttttccttctaagtccagaagtagacattccagagttgatgtgatcatttaaggatgccagggctgttgaagactgggctgttgttctcttggtcttttcctcatggtcagttacaatatagctgatactgttgttgtcttccttagttcagctccaggcaggaaggaggaggaagca

SEQ ID NO: 61093 - DNA, 1031 bp, Homo sapiens
ctcaaaataaataaataaataaataaatagaaatgtcctagaattttttgaaatttatctttaattctttgagatgcatcactttttattttgaaaaaatcctagtaaaaccaataaaataaaactctgtaatatgcatatatgaaatcagaaaactcctcagtcacttactgttatgaattgactctcagtaaatgttttgaatgtataaatatcaagtattgattatgtatgtggtcagtgttgtaggctaacatagcatttaagaagtaaacccgttctcaagaaatttctacttctagtggagagagttgatgaatattcagcggttgattcatactactgtatacagttgtatatttagaaacatgtttgttatttgttcccagttcctggcacagagcttctgatacccttggactctcccgagtgataggggtgatagaagtgtcatttcttctatgaggcaacccttggtggacttctagataacttcagggtatggtctggtcaccaaaaagaccagaccttgaatagaagcttggaacactctcatctccatgacctaacctctggggagtggggagtgactggagatagagtaaattaccagtggcatatgtaaccaaacctctataaaaggtttgcatatgtaaccagacctctataaaaacctgtcaaaaggctgggagcagtggctcacgcctgtaatcccagtactttgggaggccaagttgggtgggtgcctttgagctcaggagtttgagaccagcctgggcaacatagcaaaaccctgtttctacaaccattacaaaaattagcggggtgcggtggctcacacctgtagtcccagctactcgggaggctgaggctggagaatcacttgactcaggaagaagaggttgcagtgagccaagatgctgccactgcatcccagcgtgggtgacagagtcagaccctgtgtcaaaagaagaaaaagcaaaacaaaacaaaaaaaacaaaaccctgtaaatgatgggatttggagagct

SEQ ID NO: 61094 - DNA, 1363 bp, Homo sapiens
tcatcctggactcctttctctcacatcccatatccaaactgtcaagaaagtcttgttggttctatctataaaacatattcagatcccaggcggggcgtggtggctcaacgcctgtaatctcagcactcggggaggccaaggcgggtacattgcttgagtctaggagttcaagaccagcctgggcaacatggcaaaactctgtctactaaaaatacaaaaaattagctaggcgtggtggcacgcacctgtagacccagctacttgggaggctgaggtgggagaatcgcctgagcctgggaggttgaggctgcagtgagcccagatcacaccactgcactccagcctaggtaaccagagtgagactctgtctggaaaaaaaaaaaaaaaaaaaaaaaaaaaaattcagatcccagcacatgtcattttttctattagcattatactagttcaaacctacattatcttttgcctagattttcctcttaagagtctgttgagtctatttctagtagtcacttaactagttacttgtaactagatatctaactgcctcctaactagttcttacccataaaagtctatagtgcctatagcaaacagtcagattatgttacttttatggtcagatgcctccaaaggcttctaaactgattaagaataaaagatgaaggccttataatgggctgagagactctacatgatatcctgctttccagtcattccacatcgacattatcttctattaccctcttacttggcctttttgctgttccttgaacatgtcaggtctggtctccccttatggcctttgcacttgtttctctgtctagaattttttccccaaagatacccacatgactccatcacttctttctggtaagtatgttcaaatgttaacatgcttgctcattttggtcttctttgaagactaccttatctaaaattgacctcttccctcctctgtcaacattttctatcatctatcaccaaatatcactctacttgctttgtctcttatttcttttttaaaataaaaatcatttaaagactggctcttgttctgtcacccaggttggagtacgatggcgtggtcatagcttactgcaatctcaaattcctgggctcaggtgatccacccaagtagctgggactacagatgtgtaccaccacacccagctaattttttttaattgtttttttgtagagactgggtatcactatgttgcccaggctggtcttgaactcctggcctcaagcgatcctttcacctcagcttcccaaagtgatgggattacaggtgggagccactgcatctggcccttgtctcttatttctgtcatactaaacattgtacttctttttc

SEQ ID NO: 61095 - DNA, 1121 bp, Homo sapiens
cttccttataattttggtttctaacctattagcagtggttgtgtttctccacttcaaattgcccagcttgagtgttctagagaaaacagataaaagccttatagttattttaaacattcagattactactgtaaactctgttaactttttttttttaaatagaggttcaggaaaatctcaagaaactgaaatttagaatattggactacctataaaaaagcagtataaagggtgcctgaaatcgaactgctcactgacatttgtagggaggtttgatttataacaaataagttgatcaaagaagagtgattgttccaagttagagatctttgtgtgggttagggagtccgattgtaattggatgggaaataaatattttttttcttgaattgtgattggctaaaatccttttctttccatggtattttctaataactgaatctggggattttctctgcttttattatctgaccagtgtgtttgagctgtgtaccagtactaaaagtactaagactgtcgcagacacggtttgtgaaatttcaggacgttgacaagggcccgccacggagcatttgctgttcttataataaagcagtgacgaatttaaatctgtgaatagcttaaacatgtaattagtatcaccacaaatgagaagaatgaaaggatcacattttccccctcgttttcccttgaagtcatgaacggttggttctgctgtgactttggggcttagttttcagtagaagtgttgtcctgctctgctgctgttactgcgggactgctaattcaggctaactcaggcggcgggcgctgtgtgctctgaacatcaaaccgcgggtgaggcgtcaacccaggagtttattttgtgatcagagtggaaccactacacttcactttcccctcacctccacctctgagggagcaacgaatacaaaggtagacccccaaaagctttgaatagctgtcgcctactttcccgcggccctcttcattttttcgtctcccgctgccgccgccgccgccgcctctggatctggacggacccagtggccgctgccgcctccgcagggccgggcactactttccgtctgcggtggttccgccgaccctcccgcggctgc

SEQ ID NO: 61096 - DNA, 1341 bp, Homo sapiens
tctgctaaggtgttagcgtggagggttgaattagtcttgcttggagttgatgagaatttgccttttattgctctgattaccttcagtgcattatcaactttatatatataattatttatatatatataataaataaatatatgtatatatttgtttatttttagacaaaatctcattctgtcgcccaggctggagtgcggtggtgcaatctcggctcactgcaacctcttcctcccaggctcaaggaattctcctgcctcagcctctcgagtagctgggattacaggcacctgccaccatgcctggctaattttttgtatttttagtagatacagggtttcaccatgttggccaggctggtctcaaattcctgaccttaaatgatccacccacttcagcctcccaaagtgctgggattacaggtgtgagccactgctaccagcccattatcaactttaaatctattatcacctagtacttaagatggggattgatttgctgcaaagttttgaccaatgtttttacttcatgtttacctgttagccttatctgcgcacctgaacttcagagagggtctctctctgttcttttgctacttctctagtagtcgaatgctcttacttaggtgttacttggagctagtttgtgttgttgtggtgggcatggggccttggatgctgtttagctttgtggtggtaggaattgagctttctcttttgttctagaccagtattagtcttaggcaggctctgttttcctctattcttgataatcctccttctccccagtagtaggagacctctattgttttggtcttaggttactttcttgtctgtccttcagaagtacatacagtatcatctaattttgcaggaatttattaggaagtgttttcacatcctgtattaaaaggaatatatttggaagccatttttgacaagtacccgaactttttaaggtagcgctaactattttcatggaattagatcttccttactaagtaaaacatagttttcagtggtgataatgtagaccaaattgaaggctatttctattccctctaggaagtatgtattcagatggattatttttttaaaagcataaaacaaaattgtaaaatggggagtatccttagctgtccagggttcataaatgcagtcctaatcgaactgagcatttgagagagacataatgactctacatatgttgcaagtaataatgatgtaattatttattataactgtaaaggaaaggataattatgtttagaatcatgaacatctgcaaattttcatgatttatctttacattttatactcgcttaaccatcactatatgatga

SEQ ID NO: 61097 - DNA, 1295 bp, Homo sapiens
tggcatgggcctgtagtcccagctgcttccggggctgaggcgggaggatcccttgagcccaggaggtcgagggtgcagagagccgagatcacgctttactccagcctgggtgacaaagtctcgaaagagagagagagaaagaagaaagaaaaagttataatttactctatatgttgtttaaaggaaaagtttctctgtaaggaaaaggaatttctgctaggttgcattccccccgctctgcccctcttagtttagaatgaattctgttttgtgctgacaaatagctgtttctgaagttggcaagaaaatttcctcttgggactccactagaagtgttgtagtagctatctgattcaactgcttagaaagctctctgaaagttgccttgtttgtctggaaagagtgaggagcccaaacctgctttttccctggaggggggttgtagctataagctgttatgggaagaactaggagggattgtgtcataacagtatgaaattgagcaataccaaggcataattaaaatttcatactccaaagcaaattttcagacacaataaagaagggctcttaaagataggcttgggtagtattttatactcttatccaccttcttaggagatagaaaggaaagaggaggaagattttccttttcttcattttctttttatttaaaacagtccacaagtaagctgactgccttatgcgagtcattatgcaagaaaggaagggggatcaagagttactggtgcagattccatcttactataaaataaaattgtgggtctttatgtaatatcttattgaatactaattgttttatattaaaatattacatgtaaatattaagataccccatgaaattattttgaatcagatcaagtggcaaggagaaaagagtcagtagttaagaataactgggggagggggtgatgaaaaagaaaagttataatagtaaaatgagatgaggaaggtaatagaaaagttggaagcagagaagttaagtaaaataactatttctgttttctccatctgccatcttcattctttgccaacttttaggccaccttgaagagattaccttgattatcttgcccacacactaaattgtgtgaccacagggcaagatacaacaattcgtcatctcagttttcttatttctaaggttagtaaactagtacttagcacatagagttgttgcatggattaaatgagctatctatagattgctcattagcgtgcttcgtgcatggtaggtgctcagtaaatgttaactgttatttttgtcatcacta

SEQ ID NO: 61098 - DNA, 1033 bp, Homo sapiens
cctgcctcagcttcccaagtagctgggattacaggcatgtgccaccttgcccggctaacttttgtatttttagtagagatggggtttctccgtgttggtcaggctggtctcgatctcctgacctcaggtgatccgcccgcctcggccttccaaagtgctgggattataggcatgagccaccaggcccaactttccaaactttgaaaagtattctgagtcaggctacatagaaatcatataccctacttcctgccagctacgggaagaaaagactccatggtttctctctctctttgtttttatttttttccttctttttaaaaaatgtgatcagagatctggattggaaagaaaacattcttagagttatttgagagctttgttattttcccagttcctttctaactttatatgagtttattccctccatttgtaaagtggctactcatctgctctgtgaaaatggctaatccctaaattaatttatgttcaaaaagagaacatttatgcttctgttttaggtgctgttgaatttattatctaataatatgtactttcaaaaattaggaattagccgggtgtggtggctcacgcctgtaattaacagatttaaaattttattataaaaatatgaattaggctgggggtggtggctcacgcctgtaatcccagcactttgggaggccaagtcaggcggttcacctgaggtcaggagtttgagactagcctagacaacatggtgaaaccctgtctctattaaaaatacaaaaattagcagggcgtggtggctgacgcctataatcgcagctactcatgaggcggaggcaggagtcatgaggcagaggcaggagaatcgcttgaaccaaggaggtggaggtttcagtgagcctagatcatgccactgcactccagcctgggcaacaagagtgaaactccatctcaaaaaaaaaaaaaaaaaaaaaaaaaaaaagaaataacagttttgttcccatctacttaaaaatagcctgtgattcttacatatatgttgatt

SEQ ID NO: 61099 - DNA, 3249 bp, Homo sapiens
tgcctaggcctcccaaagtgctggggttataggcgtgagccactgtgcccagctgaggaagcttttttaaatggagataagaccttgctgtgtcactcatgctggagtacagtggtatgatcatagctcacctcaaactcctgggctcagttgatcctgtctcagcctcccgagtagctgggactgcaggcttgtgccaccaagctcggctaacattttatttttattttttgtagagacagggtcttgttttgttgcctggggtggtgttgaactcctggcctcaagtgtgctgggattatagatgtgagccacctctgtgtctggccccctatttctattattgacctgtttcaatctgcatagcaagcagagtggcctttttagtgcacaaatgagagaacctcttaaaactccctccagtggctttccttgcacttggattaaatttcatgtttgcccacaaagccttgtgtgagctggtccctgcttgcctttccaaattcatcttattatcattatcctcctggcccactaagcttcagtcctattggcctttcttctgtttctgtaaacatgtcagcctcctttttccttagggtcgttgattctgctgttccctgcttcagaatgagcaactgtctcacctgcattggcttcttaatgctattcagattccgtggtgactccttcatttattacccaatctcacctaaccacctaatcactcctgggtcatcctgttgcagttctctgcattgtacttaaccactggctgctgttgttgttttctgtttcctcctccaattagaatgtgagctctgttagagcaggaatgttgtctgccctgttttattgtagtagtctcagtacctatatatctcctatataacatcctctaggaatttgggtggttatctatagccagaaaagtacagaaacaagtaatgactttatacattaggtttattatactttttgtccatagggcacccataacattttatgtagtatacctcaaccaaaatcagccataacagaatgatcagtttaagggtgtcatggcagagtgtggcttgtagcagctcaagtggaatgagcaaggaagcagaatagggaaaactgcccatgaaacacaagcatgtggaccctggtggttggagatactgcttaatctatcaaaatgatccacatcccagaggaggctaggatggagactcaatgatcatactctaagcagtcaccaggagattttaggagttgaaggggcagaactacgaaagttgtcaaaggcaaattaatcaacaagtatccaggagaatctgaaagtaatgggaagaaaccagataaatgggaagaaaaattgctctggattcacagcaaagaataatgttgagtcaactttagctttttcagctcgtgctggtgagagccaatctcagtttattaggcttgcccgtaggaataaaaagcagctggtcggttgtgagtgtggtattcagagggagggagtaagggacaggagtaagggtggggcaggcacattactggtatagaaacctttagcagaaactcacatgttagatccatcatagatcatgcaggtcttttagtccattgtctcccaaacttttcatagaaaggatctcttaaattgttttttccactattaatttcacactacgaaaatgtttttgctcagaacgcttaattattaataatttgtctcccagtttttagcaaaagattctaattagggcaacatattagtatctatactgaattgacctaagttgaactaaaagcccccccaaaaacccctaaaaaacctacaattttagttagggaatttcacatttaaatgattgtttcatttagattttggaagtattaaaaatggcctgtggcctttaggttgagagcttttggaacttggtcattaaaggcctaagcatatttctcaggccctttgtctttaaatatatctttgtgtgtcacttaagggctaagcttttttacatggatcatttagctttaagactcagtttccccatctgcaaaatgggtataataatagtatctacttccaggagttattttgaagatcatttgaagcacttggcatattgggtgatacatagtatgtgctcagtaattgttacccattattctgtttttattgctgttatctacagctgtgcagctcatgtttctcggaatagtcttgtagattttggattcaaagtttgatctttttatccgtaagaattgattccaagttagagtgagaccctgtatcaaaaaaataaaataaaaataattgattccctttcttttagctccaagaaatacagagttgaacaaagaatatattatattggcagttgtgggtggaaggagagttgaagagctggcagctggcaggtttttttttttttttttttttttgagacaaagtctcgctctgtcacccaggctggagtgcagtggcgcaacttggctcactgcaagctccgcctcgcgggttcacaccatgctcctgcctcagcctcccgagtagctgggactgtagatgcccgccaccatgcccggctaatttttgtatgtttattagagacgggggtttcactatgttggtcaggctggtcttgaactcctgacctcttgatccacctgcctcggcctcccaaagtgctgggattacaggcatgagccacggtgcctggccgccggcaggtttttaaagctaacattttatacaaaaaacagcttttctagtttcagtgagcacaaacaagctttaacttcagtggtaagtgggttactgatgtgcagctgctggtgatgttttaggggtaaccttacttgggagaaaggagatagaagtgaaatctgcaaactggcaaaatttgtaaaactgattctgaccttaattgtctctcatgcattccattttcttgcaacatgtttcacaataggaatcaatatagaaatgaatgtacataaataagtatatttccttggtagccatttggcatattatttcaacacaggaaggaaaatatttcccttataaattatcagtcttatttactacctttagaaaaatgataaatttggccgtattttaaataccaaaatgaagtctttaccctgtccctgcctcctttcttctcgccttctttttctttcttaggaccattatcagtttgttcataggtgatgattttgctggagaattaataaagc

SEQ ID NO: 61100 - DNA, 1025 bp, Homo sapiens
tggtgcaagttcagaactggggcttgttcaagaagcatagtttaaaaccagaaggaattaaaaaggaattctatttgtcttcaaagagtgtattaaagggaacttaattcataaccacattaatattttttacaagttccttttctcttttccttgcttcctgctgcccaggaacttctcactggtcaaactctaaagctttcttcctaaatcccaaccaacaaggtttcttctcatcaacatttccttctttattcctttattatattgatcaacttagttccagcaaatcttcctttttaggaagggcagaatgagtagaggaggaagactgagtacactcacatgttaataaattttggcatgtcacactaagaaagtgtttttggtctcactgattattaaagaaatccagataaaaattttcttacctgccaaattagcagctattaaatagaaggatactgctgtattgttgagaatgtgtggataccagtaagttcttattggagagaagaaagactaaattttggcagggggagaaattgtacacgtttgccttctcatggatgtcaggcttcgattctgaatcccacctgtaagactttatctcaggcctgtttcaggttatgtgtgtgttgatggggggtgggtactgtggggggaggagggctatctagtatgtgtttaaaagctctatttgcatccctgtttgttttacattctcaaaagtgactctacactatttatcttgaaattgtttgtacagcctatgctcaaatcttctgtgatgcttcttgaacaaacattctcagttcctaccccagaccaactaaatcagaatctctgggtaggacccagtaatttttttaaaagcccaccataattaaatatataattagctatatggttaaataatcagagccattataacagactctaaagttgtgaacttctgctctgctatgaagcttccaatcccattcagctgaaaccctgaaaatacttgtccatctctaaaatct

SEQ ID NO: 61101 - DNA, 1037 bp, Homo sapiens
aagcattggtttctcttttaaatattagttttcctaggagatatgtggaatgtgcatcttctgcatgttaaaagagttcatttattagcagagcaacagagactaagaaagtacctaggagagcaggtagtgagagcagaattagagggtacaaagataatgtctgatcgctgtaattattaatgagaatgctaatgagactgaatactaggtcaccttcgcatttctattaagagagcattttcagtggctaaaaaatatatttatttggagaaaggctaaaattactaaatgagtctgtctttcatagttgtttagaaaatagggggagagagaggatcttaagaagactgacataacagaagaaagctgttctttttctgtctgctgctagatggatacctcttttctctcaggcagtcgcttatggaattatggttacaacagaggttcagtttggcttcagagattgaatgataatgaaatgatactgaaaatacaatgatcagatagcaatagaataaaaagattaggttctgattaagtattcactataggtattggtagaaaaagatggtgactagctgacaacacaaaaagtaaaatacatctgtgatggctggatctgggaagcacacacagtaagaaattgacattatctgagattcttacacatttccagtagtagccttaactataacaattaaggatttagacagaagcttttgtttttccttcatggtaaaatatggttttgtgtttgaccatgttaagtggcagagaaacatctagtttaagataattgaggtacttttactatttatttaaaatagaatagattaaatcagggttttaagctcaagatagacttatgatttcaggtattcaggtgcatatggggttgtggtataatttgccaaatctgaaatatttgataatgacatcatgtctagtaagcagaatttcaacagatttctgttgatgtcttgagtgataattcaaagcacgtggaataaatttaaaagggaacagtgaaa

SEQ ID NO: 61102 - DNA, 2984 bp, Homo sapiens
tctccattatttccctgaggcctgccagatgttcaaagtaaaggctgggtctaggattcctgacctgtcttaagatttacaactatattacagctgtaagatttacaactgtattttttggaggttgggttactgcttacaccttgctgttcttgcaaatatcatttcaagggcagacttttaaaactgttttttttttttttttgtgacagtaccaaattgagaaaatgatgttaaagtttagatatttttattttttccagttaagacgatagtaaaagataattctagtattcagatggtgcgaagaataaaagatgaaatgtaggcttggagcctttaattaaagtcctagaaaatatgatggcttttgtgaccatactgtaattttgtcttcttgttcctcagtttccctgtgataaaaagggggtaataatactgtagtctgtctcttgcctttcaagggtgatatgaggcactgctaaataatatgtttaggaaatactctgacttgcatggaagacaatcaaaggacacaacagattatcctaaattattttcagttctcagtcaataaattgggtaatatttcattatttaagaaacaagctcagaagctactttctactcttgggttaggttcttttcgcttattaattcatgtcaagactttttatttcaggaatttgagtaataatttgcatttaactctgaatcttttatttttggccattattcagcattatttgaggatcaggtgtgctgcataagcaccagttttttggcgaactctcttgttcaataaaactcaaatgaatttgaatatcattcagatcccttcatgaaaggtcctgaaatagctttacagcctttacttttactactttcacccccaactcctaatgtacccgttccctacctctcttctttcagccaacctgtattttcatgctcagtgcttttgcccagatttcgtttttcccttaacactttgctccccattctgtacctatcagaactctcatttttcagtggcctgtgccatgaagacatccttggttttcctcagggacaattattcctaattttgtctgtgctctcataatttattacttgaatttctatttcttatctgtgtcattctgcctctaccatgtctaatgtactgaatggtaaaatgtttgagaacagacatggtgtattagatttctttgtgttttccaactatctagcctcagatagggtaaacgtccaataaaaatttgaataatgtttgtgaaatacagtcactctttaggcatcagatttaaaaaatttcagccacgtacattggaagtctcttaaaaatgtctttcttgcctttttactttggaggtcatcattgtgaatattaattatttcagctaatcctagtacattaatgccttcaggggttgctgaaggcaacctaggtaggatggctggctgctctctgaaatgtccctagactgctgtgcgttaagtttcattttgtatgcttattatatcttctgcctcttccacatttagattactttttgctgctttctttctatttacctggaacagtgccttttttcacatctcaataggccatgggttggaaaccacctactatgtgctatacacgtgtcattgagtcattctgacaacttaaaaagccatatagcgtttattcccttttggtaccatggaaagtgaggtttagagaagttaactcaactggcgggtgatcacataggtcattggtaacagaactggagatctaattcatgcttcccaagcttgtttacattatactgggatagatagcggaactgtgtttaaggcggtgggtccagcttggtgttgccctccaaggggaaactggaaggcattttttagattgttgtaatgattggagctaacaacttgcatttgttgagtgaaggctagagaggtgtgggacagtcctgaacaaagtgtccccatgtcttgcatgatttaagaatatctgcctgactttcatgtagtatttgtaattatcaaagcctggaacctccatcttgcatcatgattttaactgagactgaattttaactgagtctgtttccacatgcaacggttatgtgaattgaaggaagattgttttgttcacaacttgaccaagaattgtttacagttttggaaaattgtatcacaaacagctctgcattcatagatatattcagctactagttacttctttaagtcttctagtgtagttttgccccacgtcgaaatatatgttattataaatcattttcatgtctcttttccactcttatttagggtatatggatttgtttgaaattgtaggaatattgttattttgtttcagggtggtaaagcagaagttggaaaatattttatgcaaggggcacattgaatctgatgtggttgagaactgttgatctaaagtaagagtaacttcatctgagaagagtctctcatgaaaagtgcccagattttagtggagggtgtttataatttctgtgtattggactgtgtctcagatacacagaaatctgccaaatttattagcagatagttgagatttgctaagaaataagtggccattatgctgggtgcggtggctcatgcctgtaatcccagcactttgggaggccgacaagggcagatcacttgaggccaagagttcgaggccatcctggccaatgtggcaagacctcatctctactaaaaatacaaaaattagctgggcatgatggtgcacacctgtaatcccagctacttggcaggctgaggcaggagaatcacctgaacctgggaggcggaggttgcactgagctgagattgcaccactgcactccagcttgggtgacagagtgagactctgtctcaaaaaaaaaaaaaaaaaaaaaaaagtggccattagataagtacttcactgtataagataaggtgctaggggcactgggagaaaa

SEQ ID NO: 61103 - DNA, 1069 bp, Homo sapiens
gtgagccgtgatcgtgccactgcactccagcctgggccacagagtgagactgtgcctcagaaaaaaaacaaaaaagaatggacagaatctaggcagccaaagatgaaaaaggaaaggattccagatatagggaccggcgtgagccaaagcccagaggaggaaaagcccagattagttacagtgggcgtgagggactcgggtggggaaaaagcaagctggaaaggtagcctggggcctgttttcaagaaagaaggggtaaatgttataaggcagcaacagctttgctttggaagattctctgcccttctgtgaaatgattggcaatggagacctggaagacaaggagactccttaggaggctccctaactggagagaggggattaaagcctctctccagttaaagtacttgagctacagaatgtaaggtttgaggctaacgacagggagcaataatgtgaggaagaaaatgtcatgaaaagaaatgtatttctcaagtgtcaggaactgttattttgtgagccgtgaacacattagcacattagaaagcacacttgtagagaatataaacatcattctatttttcctctttactcagtttctctctctaaacatgaaagagcaatcacaggatctacacaaacttggaaacctttttcacaccaggaggtagaatttacttgattctttctaacccactgagacaaccacctcctcctgagcaagatcagacccttctctcaacatgaacctctggtagcatgggcagggaacctccataaccaaagcaccctgtatgtagaagcactttgtcccaagatcctgcactttaacaccagagaaattagccctggacaccactcttttttttttcttttttgagacagagtctctctctgtcgcccacgctggagtgcggtggtgtgatctcaactcactgcaacctccacctcccaattcaagcaattctcatgtctcatgactcaacctcccaagtagctgggactataggtgcacgccaccacacccggctaatttttttgtatttttagtagagacagggtttcacca

SEQ ID NO: 61104 - DNA, 1048 bp, Homo sapiens
aaatcctatttagtatcttctgtttgatcaggccagtattattttcttagccattcatctatttgtatttaattttacatttagataatttttaatatttcattattataagtaatgctgaaatgcaattataatgctataatggacattatatatacttcttttgaagtacatacttctttgggataaaaatacaagaggaatatttctgagtcaaacactgaatatttttatgatcattgatatgaattgccagattgctttccaaaagaatattaatattttacatgctagcagcaatgtgtgagtactttctttatcacaatgtagccagaatcggaagttttaattttttaatactttaccaataaatataacatatctcattgttttcttttgtattttatttatcagcacagttgaatgcttgtccagatttttattaattatatatattatgcatacagtatgtatatactttgcccatttatctcttggttacttgataatttacttgttttgtctgagctttttacataataaaggaattaaccttatgtgatatttcatgcaaatgtgtttctcaatctaatttcagttttcttttagatattttattcttggttgcatagagagtttatagttttaatatagttcgccttctttgttttttattttgtgatttcttgatcatttctaaatgtaaaattagatactacagatatttgataagtactactttcctatgtagaagtggattaatttggagacttccttttcaattctatatatcgatatttcccttttttacaatgataatacatttttgttttaccttagtttaattgtctggcagtactcttaaaacccgcaattatttttctctgattctcttcatttatattgggtgctataatggatgtcttcaaaggctaaattatacaccttaaaaaccatacttcagcagctttcccccttcttttcagcttcatctcttttttcttctctactagatctttctcgacagcataccaacatgctattactt

SEQ ID NO: 61105 - DNA, 1051 bp, Homo sapiens
actagctatgtaccatcaaagaaatttggcatatgcatcaaaagacatttgcaaggatatttataggaaaatccttaaagcaaaagtctatgaaaaataatagtttacgtggacagaagaattggtaagtaaacattggtttatgtacaaaatggaatattatacaacaggaactactacttagaagcctcaacttggatgaccgttaggaaagttatagtgtttgtgttttgttttttttaaagcaagccagatatgattacctatggtatgatagcattttaaaggccctaccataggcaaaactgaacaatgtatagtttagtaatgtatacatacacacatatatatatttagcaagtctatttttcagaaaagacaataatgataaattataggataggggttagctctgagagtctgggagaggagagggatctggaacaatgatatttgatattctgcttcttaagttggatgccggattcactgggctcattttactgtgtgtgcttcataacttagaagtgtgtgtcatatattcttttcctttaatcaatgattacattaaaaacatgtttaacacttgcagtgagtcaggaccaagatatctacagtaactaaaggggcgagcttagagaagcagggagcaggtagcaacggaaaggagaggctgatcctgtcccagcccatatgcttcttcctggtgtagaggccagtttcagtgctgagccaggccacagatggaggcagggaaggggctgcacctgtcatgatgagtatgtgaacagaaggccagaacctctatgaaatcgccaggcaggctgtctcttgtcctttctttttctcaaagctggtatgaatccaaagaagaatgtccaatttcttatttacccaagggatttttgaggttctggaggtacatacatagatagccacttaaaagctttcttccccccccgacccccattgatttcttgtctattcagataacagttgttttcttgtctattcatttgatacatgggatattgctataaaaagaaaatgt

SEQ ID NO: 61106 - DNA, 1044 bp, Homo sapiens
aaagatggctattcgcaattatgattgtatgccaattggatatccatcacttgcagaatcatagtcacctatctcagaccaaacacaaaaaataaattccagttggatcacagataaaaataaaacagtaaagcttctcaaagataatatagaaaacttcttcgtgactttttttttttttgagacagagtttcactctttcacccaggctggagtgcagtggtgcaatctcagctcactacaacctccgcctctcagtttcaagcaattctcctgcctcagcctcccaagtagctgggattacaggcgcccgccaccatgcccagctaatttttgtatttttagtagaggcggggtttcaccatgttggccaggctgatctcaaactcctgacctcgtgatctgcctgcctcagcctcccaaagtgctgggattacaggcgtgagccaccatgcctggccaattcttcacgactttaagataaccaaaaacaaccttaaacatgatacagaaaagcattaatcatgaaagaaaaggctgataatgacaaatgggaaaacactaaaattaagcacttctcttcatcaaagacaccattgagagtgaaaaaagaagccaaaatgggagaaaatcacatgtaaatgcaaaaaatggctcatattcaaaatatacaaagaaaaatggacaagatacttcacaccaaaaaaggggtggggtgcatgcaagtagccaagaaacataggaaaaggtgctctcacttcttttcctggagtggtggcaacattatgtaatgctggaccacatttctatcctctttttatatctttggggaaaaaactagagattcctgggcctttatttgtaccatcacacctttaggattgcataggaatcaagattgttcaaatttagcctaaaatgtgaatggttgtacatttaaagagaataaaaatgtattcttgaagatgagattactattttaagaaaagctcttctaccatttgcatcagataatattgggcacactcacactcatgcataacc

SEQ ID NO: 61107 - DNA, 1040 bp, Homo sapiens
tagtttaccagctttgattctgctgggttagggagaatacagtccagtcttaacatttatcccaaaacccagtttctttgtggtatttggttatgacctaaatttcactgctatctacttcaaaattattttcagaaagcaaacattttcggttaatttacttcttcccacccccaactactaccattccccttaagcctgcaaatggtagattgcacctgataaaacagatgctgtgctcaaatcaaaacaaatggaaagtactgtgtattttggcaaccttcctttcttcctttgcctatttttaaaacagagctttcctaggatataatttcctgcatagtgtggctgatatggcctacttaaagactttcagtcttgcagtaattgaaatgtaaacttactgaagaattagtatggttttgcaaattttttcaggctcattccatctcatgacttgaaaatagagtgtttacttccaagtcgtgtgtaattgctgtagcttttctaggaaaccagtgttcttattctaagaatgttggagaaagcagcaatgaaaagattggctaacagcacttacaaatcaaaatcagacatttggttctgagatttactgtgagcaagaacaaagaacaggaaaagctgggagattactctctaaaaggcctagaaatggccctctaaaagtctgctgacttggtttttgaaagtgacctaattttcgactgactatttaggtgatatgaaaatgaacaaatataccacatgccagttctacagatcttattgataatgaaatctgaagttgtctgctaactttagagtggaaatagaaggggaaaaacatactaaagaacttttctttgttctcaagaagtgtttcctaggtatcttttgataattttgataaaaagtattcatttcatttaaaggttttaataatttagaaagtttaaagattagcctactgattatgatgggatttttactgaaaattagttttgtcaggctgcttgcttgtctgtgtattttctattcta

SEQ ID NO: 61108 - DNA, 1039 bp, Homo sapiens
tcgcagatgactccatattcttcaaaagaacttgcctaattataagagcatatttccttggaaaatcaatttcttttgatttttaaatgactttaagattccatttgaggattattttacttatatatttttattttaaatgaaaatattcatcacatttctttagtcacaaaaaatatagtaggtaaagtgctccagtagtgaaaatgattgccatttcattgtgaccactttcaagagaagtttattaccaaataattagaaaaaaaatggaaattataatctcacttgttaagttaacccagttcattcgttctttttttaaaaaattaattttttatggtaggggtagagatggggtcttgctgtgttgcccaggctggtctggaactcctgtgctcaagcaatcctcccacctaaacctcccaaagtgctgggattaaaagcatgagccacgacacccggcttattaattcttttaataagtatttttgagcttctgttttgtgccaggtactgtacaaggcattagatacactcttggcaaagaaaacaaagtaagcaaaataaaacatcaaacatctttgtttatagagttttcctactgacgtttatgcatgttttttttttttttgcattttattcactggcctcccactcagaatatatttacttgaaatattgtgcctatttctaacaagttcatttatctgatttcttggcctattgaaagtagaagaggattgctgctgaaaccatgtagactgaatgcagatgatagctaacaaattcacacagacttcacacttgccaagggatcacaataataatttaaaatggtattcctctagctctgcctctgtctgctgcatgagaacatcaatccttcctacccttcatttctttccaaaatacttccctgaggatatctcaaccacagttgcttaaaatgtggtccccttctccatttctcaatcattgtagcactgtcacgaccagtccgggcattagccctgccacagatggcagctaatagtac

SEQ ID NO: 61109 - DNA, 1092 bp, Homo sapiens
tgaacctcattctttttacttgctcctggtcagtgtctacttacattttgtctgggtctgtttcaaacctttactattctctccttaagctgtctttcccattttgctcttctcctgttcatgtggcacattaggtcctattggatttgcaagaaaaaaaatagaagtcttcatactaaaatatttttaacaaccttcccttatttgcaaacgtcactgtatctgtcttctgatttgaaatactgtaaaaatttcccttcctgtgccccaaagctcattcatttatctgttatatttttggtataggggtttggttgtggggggtctctttgtttttaagtgacagagcacagatccccaaccgtgctacatcgaagtttccaagttctctttttaagacttcatttttttctgattgcaaatgtagcctatatatgttatttaaaaatgaacgatgtagaaaatgtttaacatgaacaactgaatccagaaactcctgtaattgcagtgtggcagagacctctttgttgactacatagtaagtcatcctcactgctctctacctgcccaccttgacagaagaactcaaatttgctcagctatcatttatcctagtgataaatggactacatttatgtggttctcacagacaacaagatactgagcctctcattatatattagtgaacttttgctgtggcaaaaaaacaaccataaaagtacagtggcttagaaaagcaaacttttatttcttgctcaagctacatgagggcaaatggttgactgcatctttgctggggtcaggtcacttttgctgttgtttctgttgttgttttagagacagggtcttgctccattgcccaagctggagtgcaatggcatgatgatagctcaccgcacccttgaactcctgggctgaagcaatcctcccagtttggcctcccaaagtgctgggattacaggcgtgagcacctcacctggcaccttaaaccaaggctgaagaagcagctgttctcatgccagaaggcaaaagcttaaagcaagagtttgagggtaatgggtaatggagtgagggagtcgaagggtgttctaa

SEQ ID NO: 61110 - DNA, 1027 bp, Homo sapiens
gagaatggcgcgaacccgggaggtggagtttgcagtgagccgagattgcacaactgcactccagcctggacaagagagcgagactccatctcaaaaaaaaaaaaaaaagaagcgcctgggctgggtgcagtggctcatgcctgtaatcccaacactttgggaagccaaggtgggaggattgcttgagcccaggagtttgagaccagcctaggcaatatagtgagaccccgtctctacaaaaaaattaaaaattatttggtcatggtggtacacacttattgtcccatgccactgcattccagcctaggcaaaaggaagagaccctctctcaaaaaaaagaaaagaaaagaaagaaatgcctatcaacacatgcttaatgctataaaattaatgaaactattatagggagaatgttctagtttggggcttattaacactatttttaagtaaaactaacatctgtggctttttcccccaggagattgatgattatattgtacaagcaaaggaacgaggctatgaaaccatggtaaactttggacggcaaggtttaaaccttgcagctactgctgctgttactgcagcagtaaaggtaattgttcatttacctttttaatccaatgtcatattaagtcaacaaataaaggtggcttcttatttcaaaccattataaaattgtggcattttgctatatttatttttctaatactggaaaacaagtaaataattttaaagatattttaattttgtgttttccatacttgatattttgaatctcttaattcatcacaaaatgaggtcgttaataaataatacatacctgaaaatgtcatttagtcataattttcccacttaatcaccttaaagtagtttgagtaaatcacctgatgtaaagatgaccattgtttatttctctgtctttggtgttctttctctctctttttttctgtctctttgtcaatggcaatatcttggtaggatttctggcttacttctgcacctctacttcaatcaatttgaggtaacc

SEQ ID NO: 61111 - DNA, 1355 bp, Homo sapiens
tcaaattatatacctaatagcattacattgagggttaaatggaagtttattaactatgcagcactatacatgtaagataactatattattaatgattattaatggtcagcactttaatatagcatagttttcttgttatttggcttttaaaggctttttcttttattaggataggtttataaatgaatacagaaatagcaaagttttcagcttaaaggactatgttttattttagaagttcattttgttttttatttcttgcttagtgaaaatgcattcctgatttccatatctgctaaaaaagattatccaggagataatccagccactgggaattctaaaaagagggaatagatgcaattatcaaagaaataatacaataatatttcccagaactgaaggatatgaatcttcagattgaaaggacccaccaagtacttagcacaatgaatgaaaagaatgactgactctaagtgaagtcattgggtatcccaaaacaccagtgataaggaaagaattcataaagattccaaatataaaaagcatgtcacatttggccaggcacagtggctcacacatgtaatcccagcactttgggaggccgaggcagatggatcacttaaggtcaggaattcagaccagcctggccaacatggtgaaaccccgtctctactaaaaatacaaagattagctgggcgtggtgggggggcgcctgtaatcccagctactcgggaggctgaggcaggagaattgcttgaacccgggaggcggaggctgcactgagccaagatcacaccactatactccagcctgggtgacagagcgagactccatctcaaaaaaaaagcatgtcacatttaaatgatgtagaatcagaatgacattaaatttctaaacagtgacagtgaaagcttgaagacagtaataccatccatgataccatcatgattttcaccctcaagaactattaacagtcaagctctcaattgtgttagcttagaattaagaaatttcttaattctaggcatgcagagtcacaagatttacctactggttatcttttgtccaggcagatatgctccccagagctagggaatggtccacaaaaaagaaaacccatgggatctgggaaacaagtcattcagcacagaaaggagatgacaaaaattcccaaagagaacaccacacagcaagtccaaagtgcagccagccaaaactggatgtggtggatgaaaggtgccaggagggatgtctctggtagacctacaaagccaagaggatttttcgtgctgcacagggatgatactaaaaccagtgagaggctgggcgtggtggctcacacctgtaatcccagc

SEQ ID NO: 61112 - DNA, 1045 bp, Homo sapiens
ccacgagattttgggcaaatcatctgcattgatctaagcattaatttttctcacttgtaaaacgaagaggtgaaacatgatttctaaaaccccttatatctctaaaacagtggttctcaactagaggcaattttgtgcccctacccttaccacgggacattttaggttgtcaccactgagagggggctgctactggtatctagtcggtaaagaatggtcagggatgctgcttaatattctacaaagcacaggacgttccccacaacaaaaaattatctaacaaaaaatagcaagagtgttaaggttgagaaactgctctaaaagtatgatgagtcagaaaaaactaaaagaatatataaatatgtataagtagttttggtggtaggttacaaataatttttacttcctttttaaaatttttctccatgttatcaatgttcttcagtaaatacgtattgctttaaactcactaaaatattttattcacctaatgcaaatgcagtcaattccattctgggcttgatcagattaattgttaaatgtgcatggggaaatgagatttccctaaaaactgggaactaaccttatctgcaattataatgtaacatcagggatcaacaagaaatagagcttagtggctattctttactgaatagtataataagaattattctgtaaaagaatgttttgtgcttgtacgattataaagcattgctggttatatgtttttaaatctgtgatttaaaatgtgaagaaaataaaggttttatacaaaggtgctgataaacaaaataagttcttatttaaaacaaaataactaatgttaatgtagtgtttaaccaggaaatgaagtatttaaacaaagacagcattatttgagtgtaaagaaattggaattactcatacatgcagggcccctttttatggatgccaaccacgtgcttggatacttgagtagacattcagatgtcctagtgcccttggatgtaaatgagctctgtgtggagccagtgtggggagctgcttctcagctgaagaatccctt

SEQ ID NO: 61113 - DNA, 1151 bp, Homo sapiens
agctcactaaggcctcaaactcctggcctcatgtgatcctcccaccttggcctcccaaagtgttggaattgcaggcgtgagccactgcaccaggtccttttctcatttttcttatacttttgtcttaatattatataaattaaatagaagaaaatagatacacaaagcattattaatttaaacaaaaccaatcccttttagcattgttatttacaagtgactataatgttctatttgtggcctcaaaaatagacatttttattttattgatgggaataaagcattagatacaggacacatgagtgagaaatggattggaaattcttatagtatgccacatattgactaattttgtaatattaaagacaatattttaaaaaaggaaaaaagtcacccatcccatctgcctaaacattgtactgttgttagttttgcatttttccatgcctacttatagccatactgcatacttgcaatcatattatgcatgtgctatagaattctggggtagagggaagatatctccacttaccgttaatatagcaaacatagttcctttattactggactttttgtgctgaagatgtaaaaactggaaggaataaggtagtcttcagaagtgattactttgtaattatacccatcctttaaactggttacattggatacatgtaatttacgtaatgttttcaaagtccacaatattgcaccaatttctctcttatattagttttattctggatccataaaaaatatacagtggaaagtccaattttccaaggtaataatggctgttaaagtgttggaggttctcaaagagggctcatattccctttttgcttttccctacagtgcctggctttcctgaaagccttgaagaggttgataatacttgggtattgataatagtagcattggttactcaagagctaaatttaaatccagcctttagatagatcacccagatacctcaaggttgggccttgccttgctcatgtttattctgaacctgaagcaaacccttggtaggtggtgtagtctatccatggagaaacctgtggccatacctgtagtttgctgctgaacctctgcaaaaaacctacagtgtttacattaaaacatgctgccatctatggagaagtctttaacag

SEQ ID NO: 61114 - DNA, 1039 bp, Homo sapiens
agcaaggactgggtttgttgaactgtgctcttatgctacatttgtggccttagagaaattgtttatcacagttacttcctttctgactttttccttgattcctcattctgttttaccatattaggatcaggaatactatataagcaaacatcaataggaaaaaaaatctagaaatgacaacctaaacctgaagcctggtttatttttctcaattataaaataaacattttttaaaaataagaatttggcaagtaaaaaaagaaaaaatgaaaaaatttaaaatcacctgaaagctcacttccatgagatataatcctttcatttatgtttttcctttgtttgtttctatatgtacattttttttttccacacttaatattgcttcaggagcttttttccaggaccactgatccatccccttccttgccacactggcctccttgcagttcttccaagcaatccccaagccctagctactctcctcactgcctctgtgcatgctgtttcttccacccggaacacacacacttccttggaccactgcaagaaaacaaaggatcttggcctaaataaggactgattccacttccaaatctcctctgacttctagcctagaagtctaagaacataaaattatacctgactaatatacaatgcaagttgcttatgttattatgagagtaacaagcttattaacaactctttgtagtttgcttagtgtttctcaaattattcgtgtcttagaagagcagaccaataaacatgtattcaatttttttaatatgtatattttttgaaacaggctataatgcagtggcatgatcacagctcactgcagccttgacttcccaggctcaggtgatcctcctacctcagcctttggaggagctgggactacaggtgcacaacaccatacccggctaatttttgtattttttgtagagaaaaggttttaccatgttgcccaggctgatctcaaactcctaagcttaagcgaaccacctgccttgacctcccaaagtgctggcattacaggcat

SEQ ID NO: 61115 - DNA, 1068 bp, Homo sapiens
tttttacggttcaggataaatcagcctttgtgatgtactgtgtttacctccttttgtgttgtatctggtaattaaataggcctcagattcagcagtgacataacaaggacataatgtaagataataaagtaggttttatatattctttaaatttttacttatataatactttctagtttttccaccatcagctgaaagtttttgaaacaaatatttgaaaaccaggtatccacacatagcacttttattcctgactagttttgcacacttgaaaattgtttacttattttacaactgttttactgatgctatctttattgtttttgccgtattctgacatgtcaaatctatgccttgaattatatcatctcttttcctgtgggtttcatttgttaaattcattggattttaataatataaaagtatagctaattgttcagttttaactatttttaattatcttcttaacaaataagaagttgctttaaacattaaccaattttctatatttagctatacagagtaattgaacttaacatgtttttgtcaacaccaattacattttcagcttttaaaaatggtagcttttgtgaaatagaatcagtgaccagtatagcacttagatcccttctaactcatataatttttctcagccaatccattcacaagcttggcattgacatgtgctgctagtttataaactggcattgacgaaaatcatttgaatctcttctggctgagataatttgccaatgcaaaatacagttgtcattaatcctgcacattagaaattattagaaacatattactttttaactttaaatctcaaagagattttgagttattgaattcttaaggctttcttagcttgaactgataactatgcattatgaaccctaagtcaatatatttttggtggttttagtgatcagtaatcaaatttgtacttattatgcttgttcaggtaatttacttgactgttctatttgtttgtccaaaagataaaatgatgagagagattcgagaggtctttgatctgtctcccttttaagaaatgaagccagctgg

SEQ ID NO: 61116 - DNA, 1031 bp, Homo sapiens
aattttaacctgattttccttggctgtgagtgctgcaaagctgaagagggggtggcagacactgacttgacaggcctggaaacattttagttatgtgattcaagagaaaaaaaaaataccgtaaaaccacagagaacacagttggagcttccatcacggaaagcacagtccccaaccaaccccttgttgctagtccagctctgccatgtgatgttgggaaaggcatttcatctctctgagtcttggtttttccatctgcaaaataagggtgtttagactgaatgatctctccagtcaacccttcctgctgtaaattctatcattcttcagtatttctttttcggtattgagggatttggttttttattcttttctatttttacagaagataactcatacaaggagaagcgtggtggtgacatgatcctggaaaaaaaatcaatgtattttctgaatctttttttcccatataaattctatatttctgtgtgtttcttgctcccccttctgtccaaactttggtttactctgaatattttcacattttgaaggtcattgtacagacttggagctttactgtttggaacctttgccattattgtcattgctgatatttcctgtttcacttttaaaaattgagttggaattcacataactagaaaattagccatttcaagtgtacaattcagtgacatttagcacgtccagagtattgtggaactaacagctctatctagttccaaaatattttcctcatcccaaagtgaaaccctgtacccattaatcagctactccctactctcttttcctttcagttctggcaaccatcattctggtatctgtatttatagatttatcttttctgatatttcatgtgaatgaaatcatacaaaatgtgacctcgtgtgtctggtttccttcacttagcattgtgttcttgaggttcatcacgttgtagcatgtgtcaatacttcattcgttttaatggctaaataattttccatttcattatatgtgcatatcacattgtc

SEQ ID NO: 61117 - DNA, 1004 bp, Homo sapiens
gcagaaaccacttcacctcatcccagccatgatggaagttcatttaagtcaccagacacagtgtgtttaagcagaggaaaattattagttgaaaaagctatcaaggaccatgattttattccttcatatagtatattatcaaatgccttgtcatggggagtaaaaattcttcatattgatgacattagatactacattgaacaaaagaaaaaagttgcattcactcaagaaatcaagtacttcagtaagagatgggggcaaaagagttggtagtggtgcacaaaaaacaagaacaggaagactcaaaaagccttttgtaaaggtggaagatatgagccaactttataggccattttatcttcagctgaccaatatgccttttataaattattctattcagaagccctgcagtccatttgatgtagacaagccatctagtatgcaaaagcaaactcaggttaaactaagaatccaaacagatggcgataagtatggtggaaactcaattcaactccagttgaaagagaagaagaaaaaaggatattgtgaatgttgcttgcagaaatatgaagatctagaaactaataaaatacagtgttggatccctttctcctgtttctgcaagtgtcctgaaaaagactgaacgaaaggaaaaagtggaattgcaacatatttctcagaaagattgccgggaagatgatataacggtgatagagcagaatttcctgtataaagagacccaggaaactgaaaaaaacttctgtttatttcagagcccatcccccacccttcaaatgacttgagagggcttaacaagaaaatgagtaataaatgttccatgttaagtacagctgaagatgacataagacagaattttacacagctacctctacataaaaacaaacaggaatgcattcttgacatttccgaacacacattaagtgaaaatgacttacaagaactaaggatagataactataaatgtaacatacaggcatctgttc

SEQ ID NO: 61118 - DNA, 1005 bp, Homo sapiens
ttacaggcatgcgccaccatgcccggctaatttttgtattattagtagagacgagatttctccatgttggtcaggctggtctcgaattctcaacctcaggtgatccgcctgcctcggcctcccaaagctctggaattagaggcgtgagccaccgctcccggctatcttttctgttttttaagtagacttaatttatttttagattttggctgaaactgagtgagcagaattcctaaagatgaagaaactgttccaatgaacagtgcaagctgaccccataggcatgctttacacacgccgtgtaaatgttaaatgctgtactcgatgaaaatgattgctctataaccgttcatacattttaggtgcatgttgttttgatagccttgactgacttggtttcttttgcagataaccttctgttcggtgatgaaattatcactaatggttttcattcctgtgaaagtgatgaggaggatagagcctcacatgcaagctctagtgactggactccaaggccacggataggtatggctcagagctgttaattttagagagtaaatgtacggtttttggtttgtttgttttgagacagagtttcgctcttgttgcggaggctggagtgcaatggcgcgatctcggctcaccgtaccctccgccttccaggttcaagcgattctcctgcctcagcctccccagcagctgggattacatgcatatgccactacgcccggctaattttgaatttttagtagagacggggtttctccatgttggtcaggctggtcttgaactcccgacctcaggtgatccgtccgcctgggcctcccaaagtgctgggattacaggcatgtgccaccttgccccacctcacttgtcccctttttgtgtagtgttcttcatccggttagaatatcttcctccctcacttcatattccttgttttttcactttattgtacacttaccacttcttgaaaagctctgtatcttactttttaaattgtgt

SEQ ID NO: 61119 - DNA, 1092 bp, Homo sapiens
ggactggtacgatttttctatgtcgtagaacccttttgtaaatacttttggtattatggtgtgtgtttctagatattaaccataagaacttaattctggttgttaattaattagactcttgaaatatatacttacagctgaagggggtcttcccaactcttcattagatcttcctaatctcattgggatatagcattaattctgagtgtaccgagaatgaaataccattaaattgcattttcttactttgcaaaaaaccctcacagaatgctaactcattacttcagaaaataaatgagattttgaattacttgataagttgactttaagccttttcccccttattgtaggtccatatacttttgttcagcaacatcttatgattggcacagatcctcgaacaattcttaaagatttattgccggaaacaatacctccacctgagttggatgatatgacactgtggcagattgttattaatatcctttcagaaccaccaaaaaggaaaaaaagaaaagatattaatacaattgaagatgctgtgaaattactgcaagagtgcaaaaaaattatagttctaactggagctggggtatgtaagactagtacatggggaggtcgtatatgtattttcttatgccttttccaagtaggaaacatttttctggtttagaaggatttatccttacatgataatggatgtttgggaactgccaaaaactgagtgcagcagcagttgctaaattagttcagatttttaaaacctctccagccttaaaaaaatatttgcttctgcttatttatagcacagtgggtaaatggagttaaggcaagatttctacctacattatatcatagctcctaaaggagatgcagggaattgaaactctgcttttgttaagggatgtcagtctgatggagaaattgggtatttgttagatctttatgagaaactggaaacctaattggtattcacaagtgaaaagcttagtgttgggaagagtaacagattcctaccttccctccatattaattaagatgatgtgattgtggcgacttgacattttctatttgatctaccttagggttgca

SEQ ID NO: 61120 - DNA, 1503 bp, Homo sapiens
cacctgcattcccagctaatcagtaggctaaggcaggagaatggtgtgaacccaggaggcggagcttacagtgagccgagatcgcaccactgcactccagactgggcgacagtgtgagactctgtctcaaaaaaaaaaaaaacaaaaaaaaaaagaaaaaattcttccctacttaaaataatttgttgaaatggtttattttcttctcaagttgcatttgctttaatttgttggctaaatgcttaaaaggcttaaaattggcctgacttaaaaattccttatctgtgttaaagatggaatatgaggtatgtttaattttactcagttatttgggagttttatttctgaaataagggtagggttgtatttttatttcttaaaagaagtttcagactaaaattttctttctcaactcttacctaattatatggtaagagagctagctagttcctataaaggtagaagatttaattttacaaattatgccatgcacattttaggtgtctgtttcatgtggaatacctgacttcaggtcaagggatggtatttatgctcgccttgctgtagacttcccagatcttccagatcctcaagcgatgtttgatattgaatatttcagaaaagatccaagaccattcttcaagtttgcaaaggtactatgaactcttctggttgtttctttggccttctctcatgaaaaagtattttgttcacatacagccaccttaaggttatcgttcattgtttagtaaagtgaatgctgctactgtggcggagtaagatcactcattatggctagaattcctttattcctagaggaggactattatctacttcattttaggagtgagcttattttcaaagagatagttcatatttttaaaatttgcactgcagcgatggtcgttattctgcctgggcttttttaagaggtttgcacaccatataaaagtaacataacttgtgatttttaatattttattagagattgtaaaggttataacatcactttggtgtttcgtagtcaagttttaacataaggatgtgcctgaaaaatcatttgtaattagagaatgggaagattcttgggttgcatttttgtcagcaaattgcagaggatcattattctgctctagagttgcaccgtccagttcagaagccactagccacatgtggctgttgagtacttgaaatgtattgatatgtgcaataagtgtagaagacatattggattttagagatccagtatggaaaatacaaagtatttcattagttttattcatcaaatattaaacaaatattggtttttatatggaaaaaatacttaaaattaattttgaattcttttgaaatacttttgatattgggttaaataaaatgtattttgggctgtgcgtgttgcctcatgcctgtaatttcagcactttgggaggccaaggtgggaggatcagttgagcccaggagtttgagaccagcctgagcaacataatgagactccatctc

SEQ ID NO: 61121 - DNA, 1016 bp, Homo sapiens
tcttgttgtgttgcccaggctggattcgaactcctgggctcaagtgatcctcctgcctcagccccttgagtagctaggattacaggcacgagcctccacatctggctgaactgtttttttaggtggcattgttcattgagactggtgaatctgacattttgatggggggtggagggttgtcaaaacgcaagtaatgttggtggctcgtgcctgtaatctcagcactttgggaggccgaggtaggtggatcgcttgagggcagcagtttgagaccagcctggccaacatggtgaaaccctgtctctactaaaaatacaaaaattagctgggcatagtggtgtgcacatgtagtcccagctacttgggaggttggggcatgagaatcgcttgaactcaggaggcagaggttgcaatgagccgagaatgtgccactgcactccagcctgggtgacagagtgggactctgtctcaaaaaatcaaaaacaaacccagaagtaatgctaaactctacttctaatttatgtgaaaaattaagacaaaggtagagttcaacttagactttttggtggaatgtgtttttaatgttgcaagggttagcatcaattaatttatgaaatggtcctttatccttatattttttgattacagttttgatctttcaaatttaattgatttcacatttaataaattcaaatgtatagtttggtagaagtgtaacataccatgtaagatggaatttgggggctcagaatgattggttcattcttgtagtaacagccatgccataacggtgatatgtcgatatagtttacccaaaagggtgtgtatataaaagtgttcacataaaatttaaatccttattactctcaggaaaatttctttgtcatatatattctcatactgtctgtttcctcctctagtttagaatcagaggaggagagagagagatttcagttgcatcagatgtgtcctttcataagtgagggaaagaggagaggaaaaatattaaatcccta

SEQ ID NO: 61122 - DNA, 1047 bp, Homo sapiens
ataggagcagaacttgagcgttttataaaagacacttaactgcccatctgcttgcttgatgaaatgtaatggcttggttaagtatttagtgcatgggtcttttttgggaatttggagctcaagcccttgttggatttttgcataatgtatctgttgtggttttattagcttacttcctcctccctttttctaactcttatttttcaccctattttaggttccataccccatgaagtgcctcagatattaattaatagagaacctttgcctcatctgcattttgatgtagagcttcttggagactgtgatgtcataattaatgaattgtgtcataggttaggtggtgaatatgccaaactttgctgtaaccctgtaaagctttcagaaattactgaaaaacctccacgaacacaaaaagaattggcttatttgtcagagttgccacccacacctcttcatgtttcagaagactcaagttcaccagaaagaacttcaccaccagattcttcagtgattgtcacacttttagaccaagcagctaagagtaatgatgatttagatgtgtctgaatcaaaaggttgtatggaagaaaaaccacaggaagtacaaacttctaggaatgttgaaagtattgctgaacagatggaaaatccggatttgaagaatgttggttctagtactggggagaaaaatgaaagaacttcagtggctggaacagtgagaaaatgctggcctaatagagtggcaaaggagcagattagtaggcggcttgatggtaagaaaggcagtcggaccattttgaaagtataaatgtcataacagtatttccaaaaaattagctatttcggcaggttaatcgatagggtagctttatgtagttgattctgtttagagaaactgtacagttcgtaatcagaaaggtaaatcttctggtatcttaacatgatatggagaaggaagtgtttaatagtgctctgtatgttgtgtttctctaggggatggaaaaataagaatgggttattagctggcagaaatgatgacagattt

SEQ ID NO: 61123 - DNA, 2866 bp, Homo sapiens
gaactaagatttgaacccaggactaagtgtattgcttgtatttatttaattaattaatttttaagagacagggcctcactctgttgcctaggctggcccttgaactcctgggctcaagcagtccacctgcctcagcctcctgagtagctgggactgcaggcacaccatgcctcccagttgtttttaaacactaatagtagtctttcataaggacacttataataaaggcagagctggaacccacacttcattccagactgctcagactgagttagtgttagaaaactgaaagtaacatttttattactgtatttcaggtaatcagtatctgtttttgccaccaaatcgttacattttccatggcgctgaggtatattcagactctgaagatgacgtcttatcctctagttcttgtggcagtaacagtgatagtgggacatgccagagtccaagtttagaagaacccatggaggatgaaagtgaaattgaagaattctacaatggcttagaagatgagcctgatgttccagagagagctggaggagctggatttgggactgatggagatgatcaagaggcaattaatgaagctatatctgtgaaacaggaagtaacagacatgaactatccatcaaacaaatcatagtgtaataattgtgcaggtacaggaattgttccaccagcattaggaactttagcatgtcaaaatgaatgtttacttgtgaactcgatagagcaaggaaaccagaaaggtgtaatatttataggttggtaaaatagattgtttttcatggataatttttaacttcattatttctgtacttgtacaaactcaacactaacttttttttttttaaaaaaaaaaaggtactaagtatcttcaatcagctgttggtcaagactaactttcttttaaaggttcatttgtatgataaattcatatgtgtatatataattttttttgttttgtctagtgagtttcaacatttttaaagttttcaaaaagccatcggaatgttaaattaatgtaaagggaacagctaatctagaccaaagaatggtattttcacttttctttgtaacattgaatggtttgaagtactcaaaatctgttacgctaaacttttgattctttaacacaattatttttaaacactggcattttccaaaactgtggcagctaactttttaaaatctcaaatgacatgcagtgtgagtagaaggaagtcaacaatatgtggggagagcactcggttgtctttacttttaaaagtaatacttggtgctaagaatttcaggattattgtatttacgttcaaatgaagatggcttttgtacttcctgtggacatgtagcaatgtctatattggctcataaaactaacctgaaaaacaaataaatgctttggaaatgtttcagttgctttagaaacattagtgcctgcctggatccccttagttttgaaatatttgccattgttgtttaaatacctatcactgtggtagagcttgcattgatcttttccacaagtattaaactgccaaaatgtgaatatgcaaagcctttctgaatctataataatggtacttctactggggagagtgtaatattttggactgctgttttccattaatgaggagagcaacaggcccctgattatacagttccaaagtaataagatgttaattgtaattcagccagaaagtacatgtctcccattgggaggatttggtgttaaataccaaactgctagccctagtattatggagatgaacatgatgatgtaacttgtaatagcagaatagttaatgaatgaaactagttcttataatttatctttatttaaaagcttagcctgccttaaaactagagatcaactttctcagctgcaaaagcttctagtctttcaagaagttcatactttatgaaattgcacagtaagcatttatttttcagaccatttttgaacatcactcctaaattaataaagtattcctctgttgctttagtatttattacaataaaaagggtttgaaatatagctgttctttatgcataaaacacccagctaggaccattactgccagagaaaaaaatcgtattgaatggccatttccctacttataagatgtctcaatctgaatttatttggctacactaaagaatgcagtatatttagttttccatttgcatgatgtttgtgtgctatagatgatattttaaattgaaaagtttgttttaaattatttttacagtgaagactgttttcagctctttttatattgtacatagtcttttatgtaatttactggcatatgttttgtagactgtttaatgactggatatcttccttcaacttttgaaatacaaaaccagtgttttttacttgtacactgttttaaagtctattaaaattgtcatttgacttttttctgttaacttacattgtttaaggtatataatttttaagtcttacagaatttgtacagcttcgaatgctatagtattagatgctttctttctcatactacatttcttcatttggtttattacattagtctcaccagaccagtacttgcaaaaccctgatggtgctgatcgtagcaggtgatgcatcaccaccaagcatttcaaaaactatttcagccattctaggctagaggcctgagcaagtaaaacatggagaaaaggcagggcagggcctaagaaggatgtgacatgtcctatgataaaggaccaggagtttgggatttgagagagaacaggaagtggtggatagtgaaaatccatctgatgcaaaggctgggttaactgaaaatctgttctgggatgctaggtctttcaagtctgaagactgcagaccaca

SEQ ID NO: 61124 - DNA, 1308 bp, Homo sapiens
aaaaaaaataacagaaacgaagcaaatagaaaaagaaatcataatcaaaactgcattttgtatttggtttgtcaactagttctgaatggcttttccaaaaaagggctctcaaaatgttttggcaatggcaaaatactcacttatcaaacatttattaagcacttcctttgtgccagtattaagattatacttttaaagaaaaaatattgtgtggatgagcaattagaatgtgtctcaaaaaacttgtcttccacaaattaggaagtaagataacacgttagagcagatgttaaagtgaagctctgctgtagcgactgtaccaaatattacttgctactgtatctttttgttttgaagtggttgactgaatgatttctttcttggcagtatttttgacaggtagtgatcgcattcctattcttggtatgaagagtctgaaactagtcatccagtccacaggaggtggtgaggagtatctcccagtttcccatacttgttttaatcttctggatcttccaaaatatacagaaaaagaaactctacgctctaaactgatccaagctattgatcacaatgaaggcttcagtttaatataactttggagttataactattcagtttagtgcaaaagcattaaactatttgtgtttttcttgtggtgatgaattcagcaaggtgacagaggtactattataattcttacttgcagaatgttcaatctacgagtgttcatggaagccaaaaaatattaaaggaaaatgaacaaactgttaatattattgtacagaaccatggattttttttgaccatcttctaataaacatagcaagtattatgaatacattaaagttttactaacatgaattttaagagtttgcatatttcagaaatgatctggtgtgagtgcatggaaatattgcttaatttttcttcaatcattgagtgaaaaacctttaactttggcctgcaatagtcatttgattattttttcattttgtaaataatgttaagttttgtaataaaatagttatgttctgataccagtacagtttctatggttgtaattgaacttgaacagacttttaaaggttaaaaattatgatttaaatcttactctgagactctataaaaagaaaaaaaaggtagcatggtggaaacactatcttttcttttttgctagaataagtgtctttgtgcaaacctaaatcacagatagggaatatactacataacctgcagttcttttctttgtgaatcctgacacactgatagatgggggattgtcgatcagagaacttattaatattt

SEQ ID NO: 61125 - DNA, 1139 bp, Homo sapiens
gtaaaagaaataaaaggtttcaaaataactgcctatctttataaaccaaattagtacataactggaaaaactgtctgtgataaagtttacaacaagggtgatagaggaaccctggagtagcagttgtcatgtgggaagaatgcatggttttctaagctgaatagcattctcatacttggattttatcactcgtctaaggaaaacatcctgtctaatattttatagtaacaattctaaagttttatgcacaacaaatgcttagtttccttattaacttaccaaacttggtaatttgtaattaatcatggtaggatttcaaactagagagtaccaaatttctagttctggctttaagtagaattctcagataagctatatggtagcagaattttatctcaaatttagtagttttttttaattaaatgagagaaaggtagaatataataatagattattataagttttgagtctgacattgactttttttaaaaatttaaattaatagatcacagttgaaaactttggtgcaacagaagtgaaagagctggttctaaatggtgcagacacagctgttaacaaacaaaatcggtaagtgaattttagcagcaacagtgggagtaataagattcagtagacattttcttctgtacgtagaaaacgtgtcacaaccctaagcttttactccaataaaactttaattttgagtggttagtgaggaaataatctgccttttcctcctgaaatcccttgaagacattaaaacaaagagaagggagaagtgacagcagcaaacatttttggaagccaggaaacagtagtaactaacttaagcaaaccagagaaagctacaacatgagatggaaaagaggagtcacgaagccagctggatcacttcacaaaacaaaagtttgggtgctgagaataaaacatacctttagaaaatgcatggtgtttggggaaatgctagaactcttataagaagcagttagaaactagtttcccatgctaacattggatttaaaacaacaacagaagaaattagtttcccttagcacaccaggaatctggcaactgcccctctctggcctgggcaggagattggaaatttaccttctggagaaattgaactaaagagactg

SEQ ID NO: 61126 - DNA, 1050 bp, Homo sapiens
taaatacggtgtattaaaaatatttttctgagcttattataggtggaaatacacaaaatatttttaatcattattcctgagtgattggtttacaggtgtttattcattttcttttctatgttttttctttgttttccaaatttcgaatgtgtattactttttaaatcagaaaaaaagttatagtaattatttcacctattaacttaatgtcgaatgacatgaatatgcttatgtctgggagaaaacagttgtaaagtcgtatgtatagtacgatttcagctagatatattttttttaagtctgagaaaatatgctacatggaaatgtacaaaaatactaacagtgatgttatcccagggagacagtaatgaggatgaacttttgttatttattacttttttctctatcttcaaaattgtatatgagcatatttatgtaatcttagaaaatttaatattttaacttggaggacatgtgtttactttttcttatatttttagacatttgaagacagtgatttgttccatttgattggtgttatctgtggcttagcaatttataattgtaccattgtggacctccattttcctttggctttatataagaaactactgaaaaagaagccatccttggatgatttgaaagaactaatgcctgatgttgggaggttagttggaaaaaaaagtcaaaaagtagtagggtttgggaggtaaaaagtggggaaggtacagaaagctttccttctatgaaaaaatatattttgttcttcttgttaaatttctgaagtaaacaaatgcccttctaataaaggaaaatccattatgtttctcagatcaaaattttctattgaaagactaaatttggctggcccagtggcccacacctgtaatcctagcattttgggagaccgaggcaggtggatcacctgaggtcaggagtttgagaccagcgtggaggtcaggagttcgagactagtatgaccaacatggcgaaaccccatctatactaaaatacaaaaattagccaggcgtggtggcccacgcctgtagt

SEQ ID NO: 61127 - DNA, 1646 bp, Homo sapiens
ggtaatttgacattttctgtggtataattgggacttttattcagaagctatgtttaaaattttcctatttgtttttagtgaatcttttaaacttaataaataaaattatatttattttaaactattaattgtagagtattagtaataaataacatgttctagggtctccagaatgtactttcatttctttacagtctatttggtgtttgcattgtgctattttaggttatatttgttggagaagatgctgtggatgcaggaggggtgcgcaaagaatttttcttgctcatcatgagggaattattggatcctaaatacggcatgtttaggtattatgaagattccaggctcatttggttttctgataaggtaaaatgtccaaccatctaaattacttctgtgtatatacccatgtatttatacctgtatgtatcaagttaattcagtaaataaggaattactactggatccctaacatataagatctgctttattacaatttgagaaattataaactttggacttggagttgtcaaaatacatttgatgcttaccacacattttaaattaacaaaataaattaagagatggttagccagaaaataatgttgactattccttctgctgatttcaatttgaggattgaataataatcaccagattaacttttctgttgggaaaaattaatttatcattagggatcattgatttatctaccttgtcatttagagcaggtcagcagactatagcccattaatctcaaagaaaaaaaaagtcacacccactcttttacctattgtccaaggctactttcatgctacaatagcagcggcagagtttaagtaattacaacagtgaccttatgtccaggaaaccccaaaatatttgccatctggttctttatagaaagtttgctgacccaatttagtgatcataagtgaaaaggatggatcagtttagtagaactcctgacttgaaagaaatttagatagaatagctattggttgtaaaaacctcaatgtaatatttaatcattctgcctggaggttggctgtcttgtgtaatgttagcagcttagtgcctagactctaattcatcaggggttgcaaaatggtgtgctactctaatatttctttttcatttattagcttggatacttctgtatagagaaatttcctcacgttttctgattccttagtagtgcaattcataggaaaggattctatttagttaccaatttttcaaaagaatgaattggttcattagcatagtccactggtaataattcattttttgtgttttgctttcaagtatcattaggtattcataggtttaaacatacttgatgtttttcaattcactgcagttattgtcttcattgatgctcatattgtcccatctttgttcaaggagagctcttaaggttggtgcccaagtccttttgaaacaacctatatactttttggtaccttccttgctaccttgtgtacttactatgacagaatgttccagacttatcttacacatttactgcctaacagtaccaacattaccaccaatattatgattactaaaatgttttaaattgtttttcagttctttttgtacaaagagtataccctaatatagatagacagccagataat

SEQ ID NO: 61128 - DNA, 1519 bp, Homo sapiens
ttttgcttaccaaccctttttccctgtcctgtactttctattttaaattaattcagttttaaagaatgcttaatgtaagataccttatgttttactgtttttttttctgtcaaataaaaacaatttatggcttattttttcttactttgtgtccatatggcattttaatctactaaacactgtcagacattttgctgagattttaaagtcttaaagtctgaggaatgttttttccattttttttaagtagaaaaactgagccataaatttttttttttaagaccaagccaggcataggattagttttcttattctgcctaaattctgcaaatgggggtgtttaattgctgaaaacaaatttcattatgttcaagcctcaatcattttatgatcacaaggtacctgaaacaaagatcttacattagtagatatataagatgcttgtgtagggggtgtatttgattgtagatgtattttctacctcattacttcaatattctgctgtagcaaaatatatgaaatgctaccttgaatagaaatagttaaatttggacactaatattgctctttcctcgttattgttatattctgcactgctgtcttaggatgtcaaccatggattaactgaggtaagtttggtgtaataaagctcatgtttagagtaaaatatactccattttctcctgagtaatagaagagccaaagattcgtttttttggtgtggttaaaaaatgtaaataaatagatatatatgtatcattttttaaaatacagtctgtagagattatcttgtataacatttcagaagttttctgaagaaaatgaaattctgttaacattacacctatatgatgcctcaacaatatttgctttagaatagtttctgtcctcctcaagtcttccagtataaaatgtaatgtgtcctcagaatataaaaaagcaaacttttattttaaaatttagcaaatgcctacctaatgtggctgaaaacattttatattagagaagtaaaacaaacttcatttttaaaattgattaattgatactcagaatggtcacaaagttaaactttttgtatgattatctttctcacttctaatatataaagttctagcactttggtttaagtaatcaacaaccctagactacccttttaacacttgggaacattataatactttctttatccgttatagatgtcaggttttgctttgatttgcattttgttggttgctatgtttttcccagcacttgaaccaatgaagcattttgagttagctttaaattatagctctaatattgtttgcttcctcattgtcaaatagaattagcacataaaattatgaaaacatagagttttgaagccaaagggtgctttggagatatctaaatctttttgaatttcagagaagtaaaattagtttttatgatcattagctaggcagtgccacaaatataggatggaggtaaaccttgtcacatgaaaaatactgaagagtgaatgtttagaatgtaataa

SEQ ID NO: 61129 - DNA, 1093 bp, Homo sapiens
agattgtgccactgcactccagcctggttgacagagtgagactccgtctcaaaaaataaaaaaaatttgtctgtcttgagtactggttaaatttaatgtcaattacattttcttttgtaggtaaatgagaaaatgggacagattatacagtatgataaattttatatacatgaagtacaagaattgatagacataagaaatgattatatcaactgggtccaacagcaggcctatggaatggtaggttttctgtgcaatttgtgatttcatttttatgtatatgtatctaataaaaaaagaaacaattgcttggttttgaaatgagaaagttttttcagaacttttatccagaacttactttttaaataataacacattgcaaaggagtgctatatattttacaatatttatatgcaaacattctactcttttaccaaagccaaaccaaagaaatggattacactgtaaaacaaaacaaaacaagacaaaaaaaacctacaagtgtgaaatggatttttaactcttttattttccatgaggttgcctcttatttctccagtgttgaaaatactggcattcttcatactggaactcctaagaatgcattattgttgtgaaattggtgcttcaagactaccaaaagaggactgggtgtggtggctcatgcctgtaatcttagcactttggagcctgaggcaggtggattccctgagctcgggatttcaagaccagcctcggcaacatgacgaaatcccatctctactaaaaatacaaaaaattagccaagtgtggtggcacatgcctgtaatcccagctactcagaaggctgaggcatgagaatcacttgaacctgggagatggaggttgcagtgagccgattatgtgtttacttttatttcagatttttaatataaatgtgggtgcgtacatctttttatgcagctaagtctttaataactagacactatcccattaaaatagtaccatggtcttataaaacttgaattaggcacataaaattttaatgcagaaatgggtaagcagttagatacaaaatatttaggtttactactcttatttgctagccatttgt

SEQ ID NO: 61130 - DNA, 1370 bp, Homo sapiens
tgagttttatttatttatttatttatttttagcaggtcttactttgtgccttgtgcattcatggtttagagttagccaaggatgtggggggaatttgcacatagattttggggcttcgtcctctggattcctttctttgatttttttattcctcactgtctggctgtgctggcagcttcagtctgtctattaagactgctgctttctgcttgagctctatcctctacttgtgtccattcctgtttctgcctacttttggtggatctccagtgtttttaagtacagtagttgttctttaatgtattgtctagagtttataattgttagtgccaggaagagtagtctgatacaaagtattctgccatatttagtaccagaattcctctagtctcttttaatttagaatagctcctttttttttcaatccctgctaccttgactttttgaagattcttggccagttttcttataaaagtttcataatcaggatttgtctgattgtttcctcattgtgatgtttatttaacttgttcctctatcccttgtatttcctataaactaaaatttagattaggagacttgattggatttgggttaaactatttttacttcatagatcatttgtatgcttcttgttgagctatatcaccaagaacataatatttcattgttccagtattggtgatgattagttagatcacttgatgaagatggtgctctccactgtaaagatttgtttttatctttgtaattaataggtaatctctagggtggtaatttgcatcctcttcatttttcacatcgtgtccagatatcaccttctaaagtttattctaatcagatgccagcacagagcaacacttaacaagcattagctgctattattattaaggtcccatttcccaaccataagtctttatagtatctagtttatatataccgtatacagtttaatcattacatatctcatactgtgttgtagttataaagacatgtcttttctagattttggggtactgaatgcagatatcacatcttacaaatctttgtgtctcccatagcacttaactagcattttgcatatagtaggcactcagtaattattttttgtaggaagaaaaaaatagctaagaaaatccccaaagcatttttttctttagatattttaaatttctctgtcttggccaggcgtggtggctcacgcctgtaatcccaacactttgggaggccaaggtggacagatcacaaggtcaggagatcgagaccatcctggctaacacgatgaaactccgtctctactaaaaatacaaaaaattagccggtcatgatggcgggtgcttgtagtcccagctactcaggaggctgaggca

SEQ ID NO: 61131 - DNA, 1001 bp, Homo sapiens
aaattgttttcagtgctccaaatggcatcataagaaaatacctttggtacctgctgtcaggaatggatgtattatcagctaaatgagtttactggcaaataattgggttatttagtagtttccgagttccacgtagtacattatagacatgctggtatgccaaaagagaagccttacttggtctgtctagcctagtcgctacatatttgtgctgatctaaatcagtgattttcaaactattttatgtagaacccttaaataaaaccaaacagataaaacatactcaccataaccacccttgaactgaggtttttaagcaagaatactaaactttaattaaaatgtgaaataaaagtgttataatcaaacttatataggttttattttgtacatttaggcaataatcctaaacacataagttgttttgaacttctaccgtgtgacttctttttaaaattcattttgcaaatagagtgcctactatgtgcttattattatattagatattagtgatgtagtgataaaagacatgatttctgcccttgttgagcttacaatattgagagattgtctaaactttttggtctttatgttacagcatggtaagtactagattagggaaaatgcagagtgctatgagaacacttgggagggcatgtaactatgaaggactaaggaagacttcctggagaaaatgatggctgattgaaccttatctactatgcgaatatattatttttattctaacattaacatttcttttcaaaaacgtatatatcatatcagcaagatatacaaactgcaaacactggttgcgtttctttaattttttttaattcttaatttttgtgagtacatagtaggtatatctttatggggtacatgagatgtgctatgaaatactaggtttggccgggtgcggtggttcactccagtaatgtaaccccagcactttgcgaggctgaggccggtggatcacttgaggtcaggagttcaagacc

SEQ ID NO: 61132 - DNA, 5383 bp, Homo sapiens
tggtatttgggatgatgggttgtatttgaaaagctgttttgtttctctagcttgttttccaaaactataatttttctgaaaatcccaaaggcatcccagattaggctcactgccaatataaaatgtttaaaatttttttaaattaaaaaactttttacatgaacatacacacttaatttttaaaataccatgttttaaagcagataacattggataaatggatgaaagtaatatttaagaaagtctagaataaacagtaataccttcatcaagtattattttatcagtctttagcaatttatgtaattctgattcatctaattgggtgttagaggagtgctctgtagcattaaacattagattaattattcattttaattcttttttaagaaagggtaaacaattaaatttctgattctatgattaaaaaaacttttttaaattttttagtgagatagatggaacgttttcttcctctggttgcctaaatggaagttttttagctgttaggtaagtggcaattctttaatatgctgaaattttcaaatttattgtcttaaatagtatatcaaattaaaaaatgaaataattttaaatttttattctatttttttttttcttttctgttttttagcaatgatgatcactatagaacaggtaccagattttcaggggttgatatgaatgctgctaggcttttattccacaaacttatacaacctgatcatccgcagatatctcagcaggtctgtttttaaagtattatgtttacagtattatctgttgattttgttttcttttgttttatacgtttatagcctaatttactttgcagtttcacagactcttacgatgtgcttttaaaataagattttattttaaagcatttgtaatttagctgtcaaagatctataaatcttttcagatgtttgaagcagaccctgaattacttaacattaccacgttgcttaagtttgtgtatggttatagaggtagagagtttaaattgagacttgtacacgtgattttttaaattctccaagtaatgcttaggcattaattttcattgtgctccaaagtatattcattgtaagacattgtctttcttttttcttcttcaccatttcatatttgctgtagtgcaaaattttccttttctttcttttcttcctgccttccttttttttttttttctttgaaagtgtattcattttaaatgaagtaggttttactttttgtcaaaatataggtggcagctagtttggaaaagaatcttattcctaaactgactagctccttacctgatgttgaagcattgaggttttatcttactctaccagaatgtcccctgatgagtgattccaacaatttcacaacaatagcaattccctttggtacagctcttgtgaacctagaaaaggcaccactgaaagtacttggtaagaattctaatattttttcttttgaaaccttttctctttaaatgaaaatgcttcataagttcttttgccatttgcagttctgctgccctgcttatttgacactgtcttaggcaaaaatgaacctgtttttccttttcttgcttttgtctagtcttttgattctagttgttggagttgttgaaagaaaaacatgttagatatagaagttcaattaaacataacagcagagacagtattaggaaagttaaaaactgtcacccgtattcctttccctcatcgcctttagtataatcttgctattaaagaagtaaaggaggaggaacaattaaaactgaacaaacatgggctttaaatcttcttggaaccctgatataagccctttatcttgtgtttccttcacttgctaatttcatgatatttgattttatttttctgcctatagactagattttattgctcatctgatcttgcacttctatctcttactgttctggttttttggcataaagttttctcactttaatttttctaattgtctagattttatctctatttcctggcctttatactttttttgctacatttaacccagtgcttttctttctaatggtatttgttagatatgtggagctgagatatatagaagtaataatgtcagtacaagaactttaaggctgagggtaaatggaggaagcaacaagcaaggggtagaatatgggaatctgagggaaaaagagtcaagcagggactgaaaagagtattgctttcctgttgtcagaagtttttgtattctttctgcctgcttcataggattgaagtgtttgtacttagtaactacaaatagtgaatgtggggaaggacccatatgttacactttacattgttcagcttctgtatttgatcttcaggagtaccttgcattttaaaggtagtggttcacaatatttcaaccatatattaaattgaaagataaaagttagaaagatcctttagtattagagcaatacaatttaaaggatgttttgtttaaaaattgaaactgtaattttcaaaacattttttaaaaactggttttaatattaggtatagtggtgagttttttatataacttaggaaaccaagaatataaattcaacaagactttcacactttatttttgcttttgagagcttttcggacaatattgtttaacttggtcggggggaggtttataaaccttacaaatgttacataagatattgtgttatatgcatctttctggggttttctcaggtttaacaactactgtttcagaaaaaaagtcagtatgattttgaaaattgtgattttttaaaaaattcattttatttgcatgttcactttttaataacagaaaactggtggtcagtacttgaacctccactattcctcaagatagtagaactttttaaggaagttgtggtacatcttttgaaactctacaagatcggtattcccccttctgaaagaagaattttcaacagttttcttcatactgcattaaaggttttagaaatactacatagggtatgtccaatcattcctttattttcctctttccccattcctattaacagattgatactgttcattttaacattaatctattaaagatttagattggcaaaaacaatgcatattatagaaatttggaaaagttatctatactttctcttaaaagaagtaataaacctgtcctttggagctctggtcttacctgactttgttaggcatgtatagataacttatccatagttgggcagaacaataacatactaatgagttagaattctccttatatttccttatgaagaatataatttgttagtttgcattatatggtttttgttagctgtaagtggttatcttgtgaaagagattgggtcctagttgtaattatgaacattaaaacttgtgttcttttgctgtagggtactaatggcctcaaagtagaacatttcatttgaaacaaatgactaatttaaaattggaaccgtatgtaattcattaatttgcctattgttcttccctgcccttcttcccagtgtaacaaatagtaccctttacacttgtagcagttcaaagttatatgaagaagtagactctgagctgtttcattaaagatggattttcatccctgacagttggtaggtatacctctgttatgccatttggttttctcaagttgctatttagatgagacatgacctaagggagaagcgtatgtttctaacctatggaatgactaaaaaacccacatgaacctttaatctttagtttcttctccttaacagcttctttgcattttcagaccctcttgcctagtgctaaggtaaataataaagggataaaggagataatccatctgttctttgtctaagaacaaacctttaccggccatttattttcctattttagtgaagctcctgggtatttttctcaactacttaactttctggacttacttttttctttggtatttagtatgtccaagattcctagaaaaacaactcatttctcttcattttgattgatgaaatcatagccatgtatttcctagggaaacaggtcattcttatgtttgcctttacccagaacagggctttcttttagcatatcagggtccaggtctgcagtaaacagttactaagaagattctctaactacatgagatgggtctctacctttctgtgtactgtttgccgaggattcaagagattaattagattgtttcttttctctggacttcatcctactgctttggtgaacaatcccttttcagctggaccctattaccaaataattactcattctgtgctttcattatctgcttatctttattcccccctttaagaaatacttttttttcttagctgtgtcttttacctcgagaaaatggaaggggcagagaagcgggggaaattgaacattttttctttcaaactataggcagaacttaagcaagtaagttaaattacctgcctagctcagtaacttcagtctcaactaaggaagaacttgatagagtttcatcttcaaagacctttttgatggactcattctaaatactagaatcttcacatcttgatagttgaaggggaagggaaaatttattgcttgctaaccactagaacctcctttgtctgtagttcatgtgaatactctagatatatttaactttaaaaccctatatagtcggtattttgccccttttcatagactggaaaaatgaatgtccacatttatatcagcagatatagtagtataatctctttagaagggggcttgattttattttatgcccctagatctagaagttcatattctagatcacatatagtattatattataggcgctggactaggaatcaaaaagatcatatttctaacccctctgtgttgcttcctaccactgtgattttgaagaagtctttttctttatcccatatgcaaatgaagaattatctataaggattgaaataccagccctgatagttttccaagatttatgtattgtttacattatacagtatgggctgggcgtgatggctcatgcttgtaatcccagcagtttgggtggtgaggcgagcggatcacttgaggtcaggagtttgagaccaacctggccaacatggtgaaaccccgtctccactaaaaatacaaaaaaaaattagctgggtatggtggtgcatgcctgtaattccaactacccaggaggctaaggcaagagaatcgcttgaacccaggaggcagaggttgcagtgagctgagatcataccactgcactccagcctgggcaaaagagtgagactccgtctcaaaaaaataaataatacaatatatgtaagttattatatattcataagacagtgattttgttaccaccaccacttgaatggaaaaccactacttttgacttgaag

SEQ ID NO: 61133 - DNA, 1598 bp, Homo sapiens
tgggactacagacatgtgccactgtagcccagttcaattctttcttttttttttttttttgaggtggagtcttatgctctggcccaggctggagtgcagtggggtgatctcggctcactgcaacctccgcctcctgggttcaagcgattctcctgtctcagcctcccaagtagctgggattacaggcacacaccaccacgcctggctaatttttgtatttttagtagagatggggtttcactatattggccaggctggcgtcgaactcctaacatcaaatgatcctcccacctcagcctcccaaagtgctgggattacaggcatgagccactgtgcctcgccaagaataaatactcttgatttttatttccttctagctatcttttgtagcttttgttctattttttttaaatcatctttggtttaaactgaaatatactgagatgcagattagaaaaagctttttttcttggtgcagggcagaagaaaggcttgtaaacttcaccaaatgctgcttatgcttgtgggatcgtttaatgttcatcatttggtcagtctcatccccatagcagtcagaatatttcaagtcactttataccatgaagtccatgaatgggaggccttattaaataagatgattatgtgaaaatctaatggcatattgatgctctgaaatatgttatgtaaatcttggcttttaattttttacatttttattacagattctgaagaatatttctgtgtaaaaagaattttctcagggggagatcaaagcttttcacattactctagtccccaggtaataatatagtcatgtaaataattaaatagctccaataattttgacaaattttaaaaacccattattaatgttctttatatgttacaaagtaattgccttagtttttttccccttaagtctacagaataagttttttctgatctatttgataggtttttgtttcaggtgttcaggagagatttaattctgtttaaagaacaaatatatggtgggaatttcttggtttttgagttatatataatatctcttccctctgactaatcttatttgaaaatttagaactgtgggccaccagatgacttcagatgtcccaatccgacaaagcagatctggacagtgaatgaagctctaattcagaaatggctgagctatccttctggaaggtttcctgtggagatagccaagtaagaaaagcattttgggccaggcacagtggctcatgcctgtaatcccagcaccaggcagattgcctgagcccaggaattggagaccagcctgggcaacatggcaaaaccctgtctctacaaaaaaatacaattagctgggcgtggtggtgcacacctgtggtctcagctacttgggaggctgaggtgggaggatcagctgagcccaggaggtcgaggctgcagtgagctgagattaacaccattgcactgtagcctgggcaacaaagtgagaacttgtctccaaaaaaaaatatccatggatatttttaaagatcttaattaaatatgtataagttgtagttctttcatgtgcatagagatatgttaaatgataacataaaatatttaat

SEQ ID NO: 61134 - DNA, 1010 bp, Homo sapiens
gatgctactctggtgctgaatcgtttattgtaagggatttcagtatagacccaggctgtttaaaatttaaacattagtggaaattttctggaccatgctcgtgcagcctgtctatgtgatgcagaattcattctatagattaagtctgttaatgaatatttgtacagaagctttggaactacaattggttttattaattttttgaaaagaaaaattacctcttttgatattttctctgcttttgtcattgtaaattgttggaaggtaacattaagtctgaagttttctatcattttactctaggcagcacacttctgcttttgttccttcatcaggacgaatttactcttttgggcttggtggtaatgggcagctgggaaccggttcaacaagcaacaggaaaagcccctttactgtaaaaggaaattggtacccctataatgggcagtgtctaccagatattggtaagttctgtcatattaaagctttccttcatatattgaagttcttgttaaaatgttgctcttaaatcatgaagatttctgcgaaagaattccaagatacattgttaagtgaaaacagcaaaatatagaacaatgtatatggttgtttgatttgcttatatttacttgtaaatgcataaggaaattctggataagtaaaagttacttacagagagtgggtcatatgggaactagaagatggctacataccagtgggagggaggttttttgttttctattttaaattgtggtaaaatatacacaacataaaatttacagacgtaaccattttttaagtagcattaagcatattcacgttattatgtaaccaatctccagaactcttttcatcttgaggatactaaaactctatgcattaaacagcaactcttcattccctcctcttcctagtgcctggcaactgctattctactttatgtctttatgaatttgacttaacactaggctaggtacctcaaagaagtggaatcatatagtagtgtttct

SEQ ID NO: 61135 - DNA, 1033 bp, Homo sapiens
ccacggcactcaagcctgggtgatagagcaagaccctgtctgaaaaaattaataagtaaataaaaattgctctatttatgcactctggttacatgtactctttttgcagcgcatttatgtaaggcagtaactaccttgaaaagtgaagatgataccgtttttaggtttcgtgaaattatatatatgtatgtggaattcagcaagacagtataatgataatgaaaggcaatgcaaataaataattatttgtatctcttcagtgtctaaatattttataacggtgaaaacatcattacctggaattctcatagttttatgacattttactttgaaagagccatctgtctgttaaattgtgaagacagttcttagaagagaaaaaactgagtttatattaaagatttggacttatttttctggagatcagttattttcttttatcatgccttctaatgataaggggttttgtctttttttaggaaggtggagtgtttacttttggagctggagggtatggtcagttgggccataattctaccagtcatgaaataaacccaaggaaagtttttgaacttatgggaagcattgtcactgagattgcttgtggacggtaaggtgttatgtaaaagagcattttggtctctaaactgcagttgtttagggattgcttattgaattgtttcagagatcctaataatctgaggaaacacattctgcccccaaatacctattttgccactgaggagtcatagtaacaggagaaacatcttttttactgttattttatttatttttacttgaacagatttagctgaggcaagatgttaatagtgtatatgtaatattatatttattgtagttgatatcacactcgaaaggcttctttctttctcttttccacctttttttcttttcttttctttcctttttggggtgatagagtcttgctctgtcacccagtctggagtaccacaattatggcttattgcagcctcaatctcctgggctcaagtgatcctcttgcctcaggctt

SEQ ID NO: 61136 - DNA, 2048 bp, Homo sapiens
tgtaaaaagcaaacttcaccgcagctgcttaagtctttgcttggaatccctttcatgcaagttgcagcaggaggagcccatagttttgtactcaccctttctggagctatctttggatggggacgcaacaagtttggtcagctaggtcttaatgatgaaaatggtaggttctcattatgtatagtttaagtgtactttttgaaagagatggtcttttgagttagatcagtgattcttagtgtaagagagaaatgtatcttccctggtatagaggtggggatgagatgttatttaaaaattccatttggggaatgcagtgggaagatacaaaatatcctttattcattaaagaactataaaaagtatatctggacaaaatgtttagtattggatgtttattaaaagacaattgaaaaacattacttcaaattgttaatccattattggccactgttagtggaaaaaagctgtaaaattattctggggaagtaacatgaagtgttaatctttgagtttttcaaggaaatatttaaatgatttgggctgttaaattaatctttggttgggcttcacttttaacattgatgctaaagtcttaaacattttgaatttgaaaaaattgtaactgaaacaagttgggatcttggaacttatttttcatgattacattgagttgaatgccagtatttgacttacaaaagctaatttcttatagttcagtataattgtaatgactgaaatggacaaaagtgagttattaatctagtaacaactagtaatgataagcaaacaatactttcagaaagaattaaagaataccttgttttgcataagaaaaatatgtcatattaggatatcatgtatcttttctgctacaaaacagcctaaagtacatttttttttccaggcttttaagtaggctcctgtgggtgtaactatcatgaagtgaatataaagaatgatgtatgtgtggaaaattagaagcagttagataattttgaaatttcttgatttctgagtcctttgcatactggcatattggctgtttagcacttaactcttaagtccctcctttatcacaatagtatggataggcctgggaacctgacttagtaagcttgtactacaaaatcatcgaatcatagttaaaattatttagtcacaactatctactgagcttggcaagctgtagaggaaacacatctagatgagttttgatttttaaaatactattaacatctcttgttggaattttcagataggtatgttcctaatttactaaagtcactaagatctcagaaaatagtttatatttgttgtggagaagatcatactgctgctctaaccaaggtattgtacttctaaaacttctttattattactcatcatagttctttcataattaatgaatgttctcatggtattttctcaagttttaacttgagtgttattggtatttcaaaaataatttatctgggaaaaaagacttagattattcttgaaaaaaatttaccttatttttcaatgttgttttatgttattaaatgtgaattctgatatactattatatgtgatgatagtatattgctgaatttctcagctttatatgaaatactgcttaaggtcatactttgaataaaattattccgttttagttcattaagcttgccatgatatatgcatcaaacccatttatatcgtgtagctcagcctaatttgaatgtagtttccatttggcttataaatacttcatacaagcaatagaggagatgaatttctctgttattcataggccaagtattgtgcaagcagttacagtgatcacagtcttatcaatggctttaactctgacctctcactgtcttgggtatgtgccaattgagtatcagtactgtttagttcttgagtgactagaagttagatgaaaatgaaagcattcagttaacctttaccagataattatttattgcagtcatgttaatgtaaagtttttcattggtcaaattagaaactggttaaatttctttatcttttttggtcttacatag

SEQ ID NO: 61137 - DNA, 1032 bp, Homo sapiens
aagactgtctcaaaaaaaaaaaaaaaagagtggttgtctcttgaaagaggaaccaggattctgatttttttggaaggaagcttacttttaagtgtgtactattttgttgtttcaacttaaaaaaatcagttattagtgtatcagttatttagtgcagttgttagtttaataaaaggatgtctaaagttgcaaaatacgatggcaatatgggagcaaaagtgacaggcagggaaaactattataggaatcagttaagatggtgaggaatggatctatttgccgtatttttctttaggaagaaaactggatgtaaatttggtgatatatgatagactggatatgtgtgaggttaaaaaaaaaaagagagaggagtattaaggaagactccctaggtttataatttttgctactgagtcacttaggatgttacttaccaaaatggggagcactggaaagaggtccagggaagtaggatgggggtcatgaattcagtctggggcatcctaagttagaagttcctttgaaatttccaagtatagtgtcaggtaaacaatgggttatgtgggttttttgctcaggagaggtttgggctagtgttaaaattttgaatgtgatcagcagatagttattaaagtttgagcttgaatgagtgcctcttgggagaaactataaaataaaaatgagacttgaatattaaaaggagactgttgaggggcataaggaaatgagattattccttgttatgtgattcaccggttcatctgtgtagtcaatcaaacttaaagtgtactaatactgaatgttcttctaggtagtagtatatgttcatataagaaataagtataattgctaaaaataatatttatattcttttgatgataggcagaatgtcccaaaataatattctttatatgaaatttgaaatgaaatgattattttcaaattaaattttttgcatgtgagaaaaatggttaatttttccattactgttttacagcaagtgaagtcttctgttggggacagaataaatat

SEQ ID NO: 61138 - DNA, 3150 bp, Homo sapiens
ttgaatattcaaaaattagaaatgattaaacacattatcttttttatgtgacaaaggggattacttttgatgagttctaacaaatttatttaattattttctaatttatctctttagaaaaaatggaacatgggaagccttgttttaccattcacagtattttttaatttctaaaagctaaaacaaagaaaacaaagccaatatcccccattctttagggtattaatacatttatatgaagatgaaaggggatagttttttctttaacacagtaatgacgcagaagaatatacttctggtctctgtagcatataatggtaaaagatattagcatttaatgtgtgttacaagccttaggttagtattttggaaaggagagtaactgagtataaattgctatgcaaatttagaaaatttttggcaaattttatgactaatactaaagcctccaagaccttacaaatgtagttatcctttaacagtatattcattacgtactattaattaggcactatagtaggtgccaggcattatcatgggtataaaacacatagtctgccttcacagaacttactgtttagcagaggagacaaatattaaatgaataggtacctgtggttagtagcgataaatgctctgaaggaaaaaacatacagtactgtgagaatgtagtattttgaaatgtttcatttgcaaaattgtacttgatactcagaatagtgtttttttttcctaaaatacttaatatgctgaacaggtcaatgtatcatctgcctagtatgcataaacaataacagtaaatgtttagtaatttgagcacagttgggtatgttcatgtattttttattccttactctgtttgcattgccagtgtttgattttgctatttcaaagaaatggcattttgttgagtttgaaaatttgaaggtgcattggatcctgctaatttgttggattctgctaaattgtagcagtacagctctcaggttttgtagttaagagcataacttcactaaataaaaatatttttaatacaataatatggaatcagagtaactctcctttttcctgctcaaactttgatttgctgaagctgcttcccgaaaatcatgtgtgtcgactctctggtcagaatttgctccggactctcttatggcagaatcaggtcaggtgacagtatcaggtaaagggaaataagaaacatattgtgtacctccccatcccccgttttttcttttctttctttctttttttttttttttttttgagacagggtcttactctatcgcccattctggagtgcgatggtgtgatcttggctcactgcagcctctgcctcccaggtccaagtcattttcctgcctcagcttcccgagtagctgggactacagcgtgccaccacacctgctaattttttttttttttttttgtattttcagtagagacagtgtttcaccaggttggccagtctggtctcaaactcctgactgacctcaagtgatccgcctaccttggtctccaaaagtgctgggattacagtaacccacctgtaatccgcatctggcatcccccctttttttcttgaaaacattcattcaggaaaaacagtaacatgaccaggcaaagggaaagaaccaatggagatgctgggatggttgatgtacatacaaagttaattgagttttgtaatgttttaaaaatgagcctttaaagttgcgttgtggtaaaacaaaactcaggaaaggggggaaggaaattacgaaagtataaggacaaaatacaagacagaagaaaataagacttaacatattagtaatgattgttataactgtgaattgagtaaatttcctgagtaaaaaaattgaatgtccctgatttagacgtaaagcaaaaggatagcttgtaaggaataggtttcataatttgagagttggtagaacatacaagaatccctgttggttcttaagaaacccgataaaggagaacgtgcattaaactaggcaaaacaccaattttagacaaattagataatgtacatttgctttccagatgtattgccaagtttctaactgtaagctgatgatttaaaaacacgtttttataatgaaagaaaatatctgaattataagagcactctgaggagtacttgaggtatgagtatagctcactttgcttaaatactgtctttccaagatgtgttcttttcacccctttaatttttttttttttgtatctagctcttgtttactgattttagcataaatttttggtacgctaaaattgagcttgtatgaaaaaaaataatatgacctatgtgcatatagtaggccatcaataaataacataaatagcattcaagatcaatttgttaaatggaattaactggtcttgatctgtcttcttcttttctagaaatattaaaagtttgtcagatatccagattgtacaggttgcttgtggttactatcattcacttgcactttctaaaggtaagcattagtttttattttatttctcttcagttttattacttgatacttttttgattgtgcatatagttctccagctttgctcatctttctgcaagattgccctggttcttgatccttttcatttccatataacttttagaattagcttgtcagtctgtacacacacatacacacacaaacacacacacacactgctaggaatttgggattttgttgtctctataaatcaattcaaggaaaatctttacagtattgaacctttcaattctagaacacggtatatttgtccatttaagtctccctttaattttttccattagcattttgttttccctggacaggtcttatacaccttcgattagactttcccctaggtatttgattttttgttgttgtgaatggtgtcattttttgtttattatatagacatgaaattgatttttgtgtctgtttattaaacagttaaaaactcttcatagctgcaactggggaagattgcttccccaatctcatttaatctcatagatgaactttctatgcatagaaataaagaaggctaaacatcatatttattagctttgtttgcattcctctcttaccagtttaacttactagtatcctagctaaggattggaacatgggctagtaaagaatctgc

SEQ ID NO: 61139 - DNA, 1241 bp, Homo sapiens
agaatcacttcatggcagcatatacattgtaatatatgtgtcagttatgatcttattgttaaaatcaagcagcccaggttatttaaatgatttcttcttttttttttcacctggactcttttattagtaatagatttgaatagaaggtacattctgagagaatctttataaacccttaacttcttcccaaaatgttcaggtcacttgatattctgagttgattatgccctatgatatatttatctgtggtttaccacaatgagaattacgtttggaacatatttgttgaatagttcaaaataactggttatatctagtgtgtgtttaagcatttctttagcttgtttgtataaaatgaagaatgtgttttgttcttattggaagttcaaaactagaatgcaatatctttttccttgatttctgtactagaatgcaatatttctcttcttgatttctgtagagcaggttgttgccctggatgcccaaaatattgtagctgtttcatgtggagaagctcatacgttagcgctaaatgacaaaggccaggtgtatgcttggggtctcgattctgatggacagcttggcctggtaggatcagaggaatgcatcagagtacccaggtaacaaaggtgaccagaaagaggtccttaacaatcttttaaaataaatttgttaatctaaattgttctgcttatctttgggcctgtaagagttgacatctcattatttctcccctttgagtcctttgataagagtttggttcttgcttatgatgttgattgagctattgattgatttgctatttttatatactctatattttctctataatcaatagaatttatgtctgtaaaaaaagcatagggaatacttgcttcattacaaatttttttagtgggttatactaatttaaactactactatcttgagtattcctgctattgaaatatttattaaatattggtttgttgaatgtttttcactaacttgtcctttttttagtctttattgtttctgttgaatatagaagtccaacatgcttactgtaaaaagaatttagtcactttccactttgtacatagcagtgagcccaatttaattaattcatcatataattatttcacaattaaaaaataagcagtgcctcatcaatgttttagtcttacacagttacatagggcataatcgttttttgtttgtttgtttttgagacagagtctcgcactgttgcctgggttgga

SEQ ID NO: 61140 - DNA, 1294 bp, Homo sapiens
ttggagcacaagaagtgtacaatacaactgtttaatataaatgattgcttctttgtttcgtggattttggtacctttgactttacattgctatctttgactttacattgacatttggtacctttggtacctttgactttacattgctatctttatagctgatgctattaatttgttattgttgaaccaaccaagcagtcttacttacctgtcttgtcatcctatcattttctgctacttcctttgaggattgttctggagagaacttgactttttctggagcctctgagataacagatcttttaaacatttacttcttcataattaagatttatgggaatgttttgatataaacaaatgatgcttctaagtattttttcttttttttttttggaacagtgtgtgtcatatcttgcttgccttttttgtttttgtatgtttctgtaaaatacttttttaaaagctatacaaaaaatgagatattagtgtaataaacttcatgtactggaagcttcaggagtaggtaagtacttaatacatcattagagttgtgcaggttcctagaggctatatagggctaacctccctctccaaaatgcaagatagtaatctagatacaatttgaatttctgtatagataggaatttcagcctctttggttcagtctgtttcattattgaacagctgcatttgtaaattgagctaaactatgcctctgaagaaaccctgattgatccagttttaaccactttcaacataagacttttagtttgttgaagacaatgattatagctttcttattaagctgaaagaaagttaattttaaatggtatcttttaaaaaacttgtgatactagtaaaaaaacctgacaaacacatcttgaggactaagagaaacaaattcactttccttattgatttgtcaattgatggctactggtagtagggccagtattttaagggccaatattttaagttaatttctgttttaaaaattgaacatattttaactacatgtatcttttgatattaagttggcagtccacaaatggaaaccctgtcagtcatggtttactgcctttcagttctctactcaccatatctaatagatgctttatttatgagatctttaaaaaatttgttttccattcagaaattgctaattcagattatttccttaatttcctttttttatcttgagacacggtctggctctgtcacccaggctggctggagtgcagtggcatgatcttggcttactgcaacctccatctcccagattcaagcgagtctcc

SEQ ID NO: 61141 - DNA, 2926 bp, Homo sapiens
atatataatattattataatagcgagagaaacaaaacaacccaggaataaagtagtaagaaatgtgcaagacctatatgatgaagacttgaaagcattactgaggagcacaaaaaacttgagcaaatgaaaaccacatttatggatagggacactcaaccacatcaacccgtcaattttctctaatttgtaaatttagtatgatctcaatgaaaatgtcaaatggcttttgagggaagtagacaaatatatactcaagttcatatggaaaaagaaaaagctaggaaaattctaaaaacacagtaatacgtattaactttttttaaagacagtttctaatatacattaagtaaaatgagcaaggtgtagagagtaatgtatagagagctacattttgggttttttaaacaaggaaaaatacacacttgcatttgctttatagatacacaaaaaaccctggaaggatatatacaagtaataacattggtaactgttggtgtagaggtgggaaaagaagtggtgagagttagattgatggagaacatacatagtagactctcactgcataccttttaaaaaacaatgtaaatatgttacccattcaattttttttttttttggaattagagtgcttacataaaaatcctggctctgttgctagatctgttttcttggtcacattgcttaacctttctgtgcctaggtgttctcttctctaaaattaggataatcatgccaaactcctagagtagctgcaggagaattacttgaacccgggaggtggaggttgcagtgagccgagattgcaccactgcactccagcctggtgacagagtgaaactctcgtctcaaaaaaataaagataaaacctaacagtgcaaagaacaatgcctagcgtatggtgagtattcaataagtgtttgcctagaagaaaaaccaatattagagtgggaatttaaatttaggtctgccttacggtaatgtggtattatgctgtttcatatttgcctaatgactgtatattgtcctgtagggaaactatattgctttcataattacctccagatatacaatacagatcttttcatttatgcctgaagttcagacatttattcaacagacagttgtcttcctgctgtgcccttgatattgtgctaggcatggaagtacttctttgcctttagtcttcaattaaccttactagagctcttattcaaagactatgccaaaattttaaaaaattatttgtttatggtacttagaggtaatgctttattggagcgatataaaatggattggattcctttaccttcagactttaaagatacaataatgtgaccaaaaaagaaaagaattaaagatgcctttttttttcttgtgagaagcacatacgtgatggaagttagattgatcattgattttaaaaaggttatttaatgattaataattataaggtggccaggcatggtggctcacacctgtaatcctagcacttagggaggccaaggcaggcggattgcctgagcttaggaattcaagaccagcctgggcaacatggtgaaatcccatttctactagaaatagaaaaaattagctgggtgtggtgatgcacgcttgtaatcccagctactcaggaggctgaggcatgagaattgcttgaacccagaaggtggtggttgcagtgattgcaccactgcactctatcctgggcaacagaacaagactctgtcttaaaagaaaaaaaaaaataataaggtgtagtttgtttactgatattttgaggatcataggcacttgagtaaatatacttagttatactttttttttttttttgagacagagtctcaccctgtcacccaggctggagtgcagtggcgtgatctcggctcactttgacctctgcctcctgggttcaagcgattctcctgcctcagcctcccaagtagctgggattataggcgcctgccaccacgcacggctaatttttgtatttttagcagagacagggtttcaccatgttggccaggctgctctcgaactcctgaccttgtgattcacccgctttggcctcccaaagtgctgggattacaggcatgagccaccgttagttatacttttaaaaccagccctgcccttcccaaaatgatgagctgaccttaaaatgtagaatgcatggtttgatcatacttctgtactcttattttgcatttgctgttattttcacaccaatctgaataatattttggcttagtgtgttgttgataaactgtgtacccactgttatacagtgcttgactgtgagagaaatttatatgtcaagaaaatcaaggacaaatatatatatatattacatggatgtttgaaattgtataaaactgttaagttgtggagaacaaaaaaaggaacatttaaaatggaagccattgcagttagctatctttatctgtcaaaacaaaatgcaaaaacaactccttttccttgtttgttaatgcttgcacttacttgggttcagaccttaaattcactttaggatcttttcctttcccgtagcaccaacattgacccagttgccagattttggttatttttctcagtgactgtcttgttttttaatttcctttgcaaatagctaactgtgtcgttttgagttaattactttaaactattgggtccttagtttcctcctctctcaatctaaaattctttgttttcattctggactattactggtgtacatgagaactgtggccagtagctctttaactgatctccctgctccagttcattcttattaattccaggttaatctttccaaggtatatttcagtttctctgtcttgaaatttgcccagctaaagtaccatctccatcattactccttggtcactcttataagaattcaagtcacacattttgtgtactaccaa

SEQ ID NO: 61142 - DNA, 1409 bp, Homo sapiens
agctgggcatggtggtgtgcctgtagtctcagctactcgggaggctgaggcaggagaattgcttgaacctaggaggcagaggtagcagtgagctgagatcatgccattgcactctagcctgggttacagagcgagactccaactaaaaaaataaataataaagtaaataaataaaatgtatgacaagctttctattacaacatgatgaatatcatttaatgatctagtagggaatagaaaacaaatgcacaaataatagaaaggcaattaaaatatgctaagtgttacaggatgtataaacaagagtgctgtgtagagatagtatactaagcagatggcaacaggcaagtttgaggcttactaagggaagagtagtccatgtaattgagatgtcttgagaatagtgagcaggaaggttaggcaaaattgaggtcagattgtagaaataaattaaggagcttgaatttaatttggtgaatatctattcactcatagtttgtaatgggaattaccatggatttataaaggaaaggttgaaagggagagaaattggaggtaaagaaatagttaggctgtgatggtagtcctttattttttatttattattttttttgagatggagtctcattctgttgcccaggctggagtgcagtggtgcgatcccagctcactgcaacctccgcctcccgggttcatgtgattctcctgcctcagcctcctgagtagctgggattacaggcacccaccaccacacccggctaatttttttttttttgtatttttagtagagacagggtttcactgtgttgaccatactggtctcgaactcctgacctcgtgatctgcccgccttggctcccaaagtgctgggattacaggcgtgagccaccgtgcccggccgatggtagtcctttaaagcaagaaaggagcaggtagatgatggagacttagagaggcagaaagaatggacaggctttggtaaccagatggaaataaatagtaaatgtaacggaaagagccaggtatgatcctaggtagaatcattagctatagattagtatattcattagtatagaaataaggaatccaggaagaagagaaatattctcttttaagaggcaagttaaaagattctggtaaggtgaattttgtggtaaacttaataatattaagtgagcagtaagaaatgtagtattgtaagtggggagaaagatcagggctaaatgtgtgaagtgtttattttcgattttgttttattttcagttcagataggctgacattccaactgtagacttctcccagttctaacctgttaagtaattaataattcattaacaatacttaactttgtgcttttggaagactgcttaaggcacatggtgatataataccgttgtaaatttaaagta

SEQ ID NO: 61143 - DNA, 1002 bp, Homo sapiens
tacacaataactcatggttcctttcaaaatgcttgtgacacaatttgcaagaattatcctcatcttaggggataaatttacggagaaatggcagcacacgttggtaagtaacttgtcaaaatagcagatgactggtgaacagctataagttgaatctgaaagttagagtctaccagtctcctaccttattcactaaattgtgcttatgtttagaattatttacagtaatatcttctgtttgaggcaggtcaaatactagtgcacagattgtttccctgccattcgatttgatggcctgttaaatcattattttaccaagatgcttacattctgataccactttgatacttcagtataactctgtgtggtatgaagaatatttgaacaaacgaacagaaacttaactatggtaatgcccagtcttttctcttttctgttatatattgtatatatccccttgtctaactgctatgctgtactacaagccaaggtccatagtaactgacttgcagaattgatttggtggctaaccttggaacttggattagttatgttgtataaagtccgccatgtagatacatgcatctctctctaagatgcattggtttggtggatgctttataaaactcttaaaacctacacagaagacaaaaatagcagtagatgcctaatctgagcagtctaacaaagggaaacttctttaaagtacttggaaccagtgattttctcttgggtatgttagtgtttttacatgattagaagtgagccacatactttccttaaaagatcagcagtgtggtagatttggttttacaatttgggtacttagcagattcttgttgcagatggcagtctaggtagtctagttaccattatctccttagtaaagattcttaggttctgtattcccaatatatcatacaaatgtagcactgtttttaaagctcatttctcacaaaggcatgtatttttaaaactgctttgaagacacaaaagttactt

SEQ ID NO: 61144 - DNA, 1131 bp, Homo sapiens
cctgcctcggcctcccgagtaggtgggactataggggcgtgccaccatgcccgggtaattttttatatttttagtagggacggggtttcaccgtgttagccaggatggtcttgatatcctgaccttgtgatctgcccgccttggcctcccagagtgctgggattacaggcgtgagccaccgtgcccagctgacttcacaagaactttaaacttgtgtcagaaagcacatggaatggagggaactaagaattgtttctttacataggttggctttataaatatacatattccataactaataaggaatgaaggagaaagaggtagccttattaaggataaattattctcgagattcataataacctactggaggacttggcctgacaatgtagtgaatagatttaacctgtggcctattgaaaagaggtgtttctgttctggactttttagggaccacacagaaagatttaactgaattcctttattatactaaaggtgcagattatgttcatgttcatctctgttgtcttgtatatgtatgtccttttctatcactactggcttttctgaattatttccagagaagtgaatgtctgtttcactttcatgtttttttcttcataagaactttaaaatactttttaagctaatgtctcaatttttaaatttatagctaacaaatatatttaatcttcagtgcgctagaccaatccatttaaatgaattgttgtttttttatactttcaaattcagttctgaagattttaagtatgggaagtatacttttctttacaagatccttttcttactgtgtatctaatcataggtataatttggtgaccatggttatgttttgcacattgatttccatttgtttcatgttagaaacagtactaaactgttctgtgaccataatttgtaaataaagtggtgttctgtttaaaaacaagccctgttatctaaaaaacagttttttgtgttttacaacattctttcaaatggagtatctcatttaattctcacaacagttgtatgtagctaaggcaggtatcatggtccgcattttacagatgaggacactgaggttaaaagagattaagagactaatagggtcacttggctagcacatct

SEQ ID NO: 61145 - DNA, 1479 bp, Homo sapiens
ctaagaacattttatggattcctaccagattttcatgatctcaggcattgaggtggtcatattggtagaaatgaatggtaatttactgatacgcatttgatgattgtctctgctccagagacaaatgggccctttactatttttgcttagcttggaatgctgcctcaggttgagattttcatggtacggaggctactgctgttctttgtactttagcatgccccatagaaataactgaacatctctctgtattactttaataatttctgaaaggccatagggcaagtagaaagtaaaaagccagcacatagaaattgccagtatagttacttaggtctactgaggtttaaaatgtttaagtgttagaggtagacactgtgtactagtagtataatgattatagtgccaggaacagcctccaactgtatagatgagattctgagaaacttaactagctagaataggcttctttgtggtcatgttgacattgtgatgattgcactgtgacatctatatcatcttgattcatcctggaaccattatttggtaatgtaaagttggggcagtgggtttccctaatttgggatacctctttaggattgcctcattgttgtcccgattacaccacagcctgtggaagagaaaagtgacaggcattagctttgtcttgagaaatttagagtctgggttgggagttaaggtatacatgaacaactggagagaactggaaattagacatgatgtgccatgcactttgagcctaggacatttaaatgatgggaaatattatgggatagaattaaagtaagatttctgggagaaaatgaaggcttacatttaattctattggtgatcacataaacagctaggaaataagtctggagctgaaatagttttgtagaaggggggggtcctgatcctgagaaaagctttttattatcagaagttctggttcgatgatatattgaagtgaacctaggtttcagagggaagagaaacaagttcaaaaagtagtagttgctgtgataggaacttcatcttttaatctcagctttgattgaatatttatttatttatttatttttatttttatttttttttttgagacagagtttcgctcttgtttcccaggccggagtgcaatggcgccatctcggctcaccgcaacctctgcctcccaggttcaagcaattctcctgcctcagcctcccgaatagctgggattacaggcgcccaccacaatgcctggctacttttcatattttaatggagatggggttttaccatgttggccaggctggtctcgaactcctgacctcaggtgatccgcctgccttggcctcccgaagtgctggaattacaggcatgagccactgctcctggcctaagatgttttttaaataatgtttttaactaaattttaagaatgtttttaactaaagttatttatatttggaataattcgttaatgatttgtgt

SEQ ID NO: 61146 - DNA, 1684 bp, Homo sapiens
gtcagtgtgctggaaagttctacagatttcgccatcagactatccattcctattcttgaaaaatctgcagtgctggagttatttgcaattcccccccgccaatctttaaataattgtctcagagatatagatagatatagattgcccacgggtgatttttttaatcccggttaccacttgtaataaaagaggttgaattttggagagaattgatatttaaattgcatgtttttttttctgtattataattatgcacattgatttagttttaaaattagtgaggttggaatgttagtattttgatttgaaatctgggatctttggaggtgatttaagattatggtttggtaagagaatcttcattttctctctgggctaaagagtaattgggagagtcgtttaaattgtggaaaattgctttaaatttccattattggttttatttctgttacagataagaactccattttctgttgatgtggaggtaggtattagaaagcttaattatactaggattgcaaggttatgtttctgcagttggctaaattttgcactgtgtatatttgctttttgggcagaggaaagatgtcttatttcttgttcccattgaaattatttaaagcaaaaagtagaaaaaattgtgattaatttcatcaaggtacttattcctattagtttagtctatcacaagataaccagaagtcaaaactagttaatatgttttaaattttgcaaaggatcatagaaagtgtcatattttccctaaaaatttctgtatgatacattttaaaaaatacaactgattggtttttgaaactgaatgatacttatgtagcatgttataaagtatatttaatgtttaccatgtagcaattattgtagcctagcacttgaaagagcaattatacatccttttttctttgaagtcatattaacttctttctatttcctcagacatagggtacctccaactttccggggtttcagaagagaattttttattgaaactggaagaccaaaataattacaagcatgttgtgctggggaaatgcatcctttgggcagctaggtttgggtggaattgatgaagaaattgtactagagcccagaaaaagtgacttctttataaataaaagggtccgagatgtaggatgtggactcagacatactgtgtttgttctggatgatggaacagtgtacacatgtggatgtaatgatctaggacagctaggtcatgaaaaatccagaaagaaaccaggtaagttgaaatgtttttaaaatttgctatttttaataattatatcattttaaatttgaatcatcgtataatttctctagttgtaactatatgtttatcaagctttaaaagcaaagtagaagttatgtatttccattatatgtgtatatttgtatggttctaagtactttatgttgtggtttctttttttttactactagtattataaaaccttattttgtatgacgatataaaacaataaagaaaatcagcctgcagtatataaatctttggtacagagtgtgtagtgtgcaggtcctctttaataaattctgttcagccaccctggatagattttaaatgcataatttactctgtgtttaccttactttgggaggggggaggaaaacaagacggaagctttttactttgacttgcttgcctaaa

SEQ ID NO: 61147 - DNA, 1050 bp, Homo sapiens
caaatagattttatcctctttgaagtatgctttggtttagagcaatggttctcaatcatggttaattttgcccttcagagtcattggcacttttgttgtcacagctggggggttgcgttcctggcatccaggaatggtgctaaacatcccacaacacataggatgacagccccccacaacaaaaattgtctagctcaaaatgtcaacagtgttgaagctgagaaatcctggtttgagcaaaatggaaaaaatgggctatttttctagtgagtactgatccttaaaggaatagctaaatccacagcttctacagaagcatccatttcatgggagctctgctgtatcagatcattcaagatggttttccaaaacccagagtggagtctagagcgaacaaccatgtttaccaatatccatatcagttaggcaaacattcttatgtgaaacaagatgcctctcaatttttcaagttcagttcataacctacatttgagattttagctttactattttcaaagtcttgaagtaggagagcaacatgttgtgatttggtggatacaagactttgatgaggagttataggtggacctttatgcgggggggtgtatgtgtgtttgtaacacagctaagagagctacttcttattgtctcttatcatcattgctaagtcatctaaccttaaaacagtgattaagtgccacagacactttaatttatcatgccagtttgtcacaccttagagacagtgctgactcttcaaaggcagctaaaccacaagatagtttatactcagtctcagctaaagtctccccctctcttcccttcctcaactccatctgcctagacagacaggtgacatcagagggatatcaggtaatatctccactcaatttgaaatcttcctaggtactgtgtcttccctgcatctatgtctaggaaaagagtccaactctgtaaaatagttggaagagatttattctcagccaaatatgagtgaccatggcctgtgacagagccctcaggagattctgagaacatatgccaaaggtg

SEQ ID NO: 61148 - DNA, 1028 bp, Homo sapiens
ctcaaactcctggactcaagtgatccacctgtctccgcctcccaaagtgctgggattacaggcatgagccaccatgccccgcctatcatcaagttataaacagtctgtctgaacattgtttgaaaggtgaggccaataataacacatttccttctctctctccacccttgttttgtgtacagtgattccactcagttacaacagcttcataaccaagtcttactggaacaacaccaattgcaaaacccacctccttcatctcctaaggagtttcctttcagcatgactgttttgaactccaatgctcccccagcggtgacaacatccagtaagcaggtgaaggctccttcatcacagacgttcagcttggcccggccgaagtatttcttcccctccacgaacaccaccgcagcaactgtggccccttccagctctccggtgttcactttgagcagcactcctcaaactattcagaggacagtgagcaaagaaagcctcttagtgtctcacccctctgtgcaaaccaaatctccaggagggctttccatccaaaatgagccactcccaccaggcccaacagaaccaacaccaccaccattcacattttccatccccagcggaaaccagtttcagccccgctgtgtgtccccaattcctgtctctcctaccagccggattcagaacccagtggctttcctcagctctgttctgccttctctccctgccatcccacccacaaatgccatggggctgcctagaagtgcaccatccatgtaagtgtcattgaggtttcttgatgtaagatgctagttaagagtcgatgtgcacattgaatagcttgatctgaaacagggctctcattttgtggattcctagataatcttattctcttaggcacagaatggatgtggaacacttcaggacaaaggggatgattactttgaatgattattaataattaaaatatcaggctaggtgtggtaactcatgcctgtaatcccagcactttgggaggccgaggaaggcag

SEQ ID NO: 61149 - DNA, 1044 bp, Homo sapiens
cagagcgctacggcacggttccttctacacactggcagaactgccattgccatcgccccgaggcggcagaatggtacgctctgaaaactggatggttctaacgtaagcaagaaaaacggtgcgcgctgcagctctttaactggaacagcctctgctcggtctacctcgcccccaacagctgcgcaacccaccaccgcgcaggcgcgctgcgtgccgccagcgccatgcgaaaccgactttcccgtctcgcgagagtggggccggccgccttcgcagttctcgctccgccccccacttcttgctcgttccctcccatccccccaagccagtagctgtgctgcgcagctccctaagcggttgtcaccgctggagacggttgggagaaccgttgtggcgagcgctacacgaggcaaacgacttctcccttctttgaactggaccccgcgagcaccagagtcggcgtaactatcgcctgacagggtatctgaagtaaaagggggtaggttgggctggtggtttcgagagcggagtcgggagaaggacgaaaggccgggaggggctgggttggggggtagtggggtggtcgccgctcggaggccgccgcttggaagcggcggggctgcgcctccccgaccatctcccacttcagggagggcggcttgccgatgggaggacttgctcaggtggaattcagtggacgacgccgaggcccgaagtaggggacatccagcattttcccctttccctgctggcttggcctccgccattttgggtacagtggcgcggccacctcggcttcccgcccttccccgctctttttacttttttgttccccagcttccgaaaactgatctagaaggccaggggagggggtggtcaaagctccctggaagggatgagggtgggtagtgaagcgagcagggaaaggccgggcagttgggtggagggaggatcgggtttgccgggcgcgctcccgatggaaatggcgccggatgggcctggcctcccaccgcggcctcccttcctccgcagtctcggcagggc

SEQ ID NO: 61150 - DNA, 3188 bp, Homo sapiens
cttttgagtggcctttgacctcagttttaatctgattaattcagtcattttataatcttgctcttggtgagtttaaactagatttggctaaaatagaggtgggagtgttggcccttcaaagacagtttgatgtgttcaaaattgtagtgcatttaaaagggttagacttctgtgatatttgtccaacgtcaatcagtactcattgcatttttttacttaggctcttgatgttagtggatactggtattatatgcaacttctgaataagttttaaagaatttgaataatcagttgaataaaaacctgaaaagtggtgaatgaaaatttgagagataaggaaaggctagagttggcattcaggggacacaaatagtttgaagactctggtagtagaattatgcaagttttcttaaaattaggcaatatataatattgatactacgaaattcagtacttttccgtaggagggggtcaggtctcattgccttttccgtaccccaaaatatgaaaggtggtctacaattttgttgtggcattgtcacagcagttggccccatgttacatttcctcttgtggcacctctgagaggtgtttcttcattacctcttgacaagagtatattttgattgactgctctatgtgcttgtttattttttatagcatttaaatcaaacggtattgagatggattgggttatgaaacataatggtccaaatgacgctagtgatgggacagtacgacttcgtggactaccatttggttgcagcaaagaggaaatagttcagttctttcaaggtacctctagtattagtcaaagtttagtagtattgtaattttatatttgtattgttttactgtttttaatttgtaaaacccatttgattttggaacttttaagtttaactatgatagtcttggttaatgtattaaaataatatgctccagttaatattcaatacagaatgtgtagaatatgtaaaacctagttaatgtgcagtaacatatttgagaattgtgatgaaatgaaccgtgaattagtatatggagcatatatttgattttgtagccttttttcatgtaatataggtgggcttttagagtgtgtaattacacagtgtttttacactggtcgcaaaaaatttatttaatccagtaatatttgaaaaaatctttcatttgtattatggggtgatgggaaactaagcttttttgttttgttttgttttgtttagacttgttttaaatatttgattcagatgggaatgtttcagcctttaacactgttccccttgatggggttatttgtccttgggttaaagggttggaaatcgtgccaaatgggataacattgacgatggactaccaggggagaagcacaggggaggccttcgtgcagtttgcttcaaaggagatagcagaaaatgctctggggaaacacaaggaaagaatagggcacaggtggggatggagagtttgggatggtgttaaatttttatttttgggggttgtgggtcactattgcttaaatgggggggtagccataacatttttctggggtagtttaaaagaattgataattatctaaatttaacttggaaactacagatttgggtggggaattaatgctaatagttaaattaaaattagattgtttccatttctctgtaggatgttgttgataaatgcttttgtataatcacctatttcctttaaaacacctattatgtactaaaagagacaaagtaaaaatatactttatgaattgttttccgtgactaatttctttgtaaaacttaaatatttaattaagtttgtaggtttaaactgttaacttacggtgtatttaggcaatttaaattgggttatgtatctagatatagaaaaacttactgcattttgcccagtatctaatttacactaatacatttatgctgaaacctgtaccttaaaacatttttaaataggtatattgagatcttcagaagtagcaggagtgaaatcaaaggattttatgatccaccaagaagattgctgggacagcgaccgggaccatatgatagaccaataggaggaagagggggttattatggagctgggcgtggaagtatgtatgacagaatgcgacgaggaggtgatggatatgatggtggtatgtgtatctaatgaacaaaggttctgttgtcattttcttaatgttcctgacactttgtcaagaaatacagaaatggcagtaatttcagtacctattaggttttaaaacctgttcatgaaaatacggattcccatggctagctgtgggacttgactgatgcacatattggcacctagaaaacttacacagaaattaaaattaagatgttggcatattttgacctttttttgcctaaggatgaaatttaatttacatgtctgaacttaattaactttctgagattttaaatttccatcacgttgactgcttttttcataggttttaagttgggaattgcaaacttgcaatcaagttacacagactgttaccacaaaatgtttttgtaaactaaattataaaatttatctctggaaagtgtgtagtcatgtgtttctccttaaattacacaggttatggaggttttgatgactatggtggctataataattacggctatgggaatgatggctttgatgacagaatgagagatggaagaggtaaaataaatattaaagacatttttattcataggtaaattttagtatttgctttgcaagctcttagtggtaatataggaaacttgtataaagttaattcagacaaatttcagtgcattcctatatagagctttataccttgtatagtatgtatgtatacttccctacttgtatctgtaatagtttataatcttggcaaattgtgttttccaggtatgggaggacatggctatggtggagctggtgatgcaagttcaggttttcatggtggtcatttcgtacatatgagagggttgccttttcgtgcaactgaaaatgacattgctaatgtgagtaatttttaataactattagtggttttatacttatcctggtgtctaaatctttaagcattcttaatgttctcatgtttatagcttaataccaaaatcccttgaatataaaaatagatctacctttaattctttttttgagatggagtcttgctctgtcccccaggc

SEQ ID NO: 61151 - DNA, 2132 bp, Homo sapiens
aggagaagcagatgtagagtttgtgacacatgaagatgcagtagctgccatgtctaaagataaaaataacatgcgtaagtggtgtctttggcacacaatcttatttcctaaacgtgaatttataaaataagaggctctaagatctgtaggtaacgcttggcagttgttgggatttaaaaccatttgacctctataatggctttctgtgggctttatatatcgctgtactagtaattaataagcatactttgtttaatattacttaattgatcttttttacaaagcttgtattgatgaattttatccatcattcctttctcccctgttactctttctttttttcttaaagaacatcgatatattgaactcttcttgaattctactcctggaggcggctctggcatgggaggttctggaatgggaggctacggaagagatggaatgggtatgtaaagtttttaaaatatgcagggttagctgcttatcgatgagtctcaattttttttcttttttctttttaaagataatcagggaggctatggatcagttggaagaatgggaatggggaacaattacagtggaggatatggtactcctgatggtttgggtggttatggtaagtatctctagttcagtttgtgttagtccgcatatgtagtgcaaactttaaagtgcaggtattacttttattattttatgcagatatctcctgctgagtgattcttaatatctttttcttaaggccgtggtggtggaggcagtggaggttactatgggcaaggcggcatgagtggaggtggatggcgtgggatgtactgaaagcaaaaacaccaacatacaagtcttgacaacagcatctggtctactagactttcttacagatttaatttcttttgtattttaagaactttataatgactgaaggaatgtgttttcaaaatattatttggtaaagcaacagattgtgatgggaaaatgttttctgtaggtttatttgttgcatactttgacttaaaaataaatttttatattcaaaccactgatgttgatactttttatatactagttactcctaaagatgtgctgccttcataagatttgggttgatgtattttactattagttctacaagaagtagtgtggtgtaattttagaggataatggttcacctctgcgtaaactgcaagtcttaagcagacatctggaatagagcttgacaaataattagtgtaacttttttctttagttcctcctggacaacactgtaaatataaagcctaaagatgaagtggcttcaggagtataaattcagctaattatttctatattattatttttcaaatgtcatttatcaggcatagctctgaaacattgatgatctaagaggtattgatttctgaatattcataattgtgttacctgggtatgagagtgttggaagctgaattctagccctagattttggagtaaaaccccttcagcacttgaccgaaataccaaaaatgtctccaaaaaattgatagttgcaggttatcgcaagatgtcttagagtagggttaaggttctcagtgacacaagaattcagtattaagtacataggtatttactatggagtataattctcacaattgtattttcagttttctgcccaatagagtttaaataactgtataaatgatgactttaaaaaaatgtaagcaacaagtccatgtcatagtcaataaaaacaatcctgcagttgggttttgtatctgatccctgcttggagttttagtttaaagaatctatatgtagcaaggaaaaggtgctttttaattttaatccctttgatcaatatggcttttttccaaattggctaatggatcaaaatgaaacctgttgatgtgaattcagttattgaacttgttacttgtttttgccagaaatgttattaataaatgtcattgtgggagataatagtatggcgtctgtcctagaatgctttgtgtcagttactaattctaaaatcaaattggtagaaggtggtactacatacgatgtctatgatttaggagagggagccggggcagcctatatatgtggagcctcttgactgaagctatgattcatcttaatgcttgtatccacttcct

SEQ ID NO: 61152 - DNA, 1058 bp, Homo sapiens
ctaattatttgtcaagctctattccagatgtctgcttaagacttgcagtttacgcagaggtgaaccattatcctctaaaattacaccacactacttcttgtagaactaatagtaaaatacatcaacccaaatcttatgaaggcagcacatctttaggagtaactagtatataaaaagtatcaacatcagtggtttgaatataaaaatttatttttaagtcaaagtatgcaacaaataaacctacagaaaacattttcccatcacaatctgttgctttaccaaataatattttgaaaacacattccttcagtcattataaagttcttaaaatacaaaagaaattaaatctgtaagaaagtctagtagaccagatgctgttgtcaagacttgtatgttggtgtttttgctttcagtacatcccacgccatccacctccactcatgccgccttgcccatagtaacctccactgcctccaccaccacggccttaagaaaaagatattaagaatcactcagcaggagatatctgcataaaataataaaagtaatacctgcactttaaagtttgcactacatatgcggactaacacaaactgaactagagatacttaccataaccacccaaaccatcaggagtaccatatcctccactgtaattgttccccattcccattcttccaactgatccatagcctccctgattatctttaaaaagaaaaaagaaaaaaaattgagactcatcgataagcagctaaccctgcatattttaaaaactttacatacccattccatctcttccgtagcctcccattccagaacctcccatgccagagccgcctccaggagtagaattcaagaagagttcaatatatcgatgttctttaagaaaaaaagaaagagtaacaggggagaaaggaatgatggataaaattcatcaatacaagctttgtaaaaaagatcaattaagtaatattaaacaaagtatgcttattaattactagtacagcgatatataaagcccacagaaagccattatagaggtcaaatggttttaaatc

SEQ ID NO: 61153 - DNA, 1008 bp, Homo sapiens
gctggaattaccggtgtgagccattgtcgcctggctgcaatcttgttttttatacttaatccacatcccacctccccaacccagaatattttgaggctaattccatacatatttacatatatatacatctctcaaagaaaataacttattttccattcttcatatatctattcctataaataatgttcttgggggaaaaagttttcacatttaatttttagtgttaccaatttgagcattaatattttcttcctactagggactggtttggctgaaagacaaagaagcaacacattgtaaactttgtgaaaaggaattctcactctctaagagaaaggtaagggagataagaagtgagtccaaaaatttggagtgcaaaaatgctaattttatttaaagtgtttttttccctctgatttttctgtttaatagcaccactgtagaaattgtggggaaattttctgtaatgcctgctctgacaacgaactacctttgccttcttcaccaaaaccagtacgggtttgtgattcctgtcatgcactgctcattcagagatgctcatctaacttgccctgagactccagaactaaatccttatgtatgaaattacctacaatgaatgttatgatgttgtatacaaaggtaaccagacagctctccttaagcggctttcggtcagtatttggtaccagtttatcttctacatattcagctcatggaaattacaagttatatatttccttccccattgtttttcaaaatgtattttcaacagagcatgcttaaaaatcatgtaactcattaaaaggccagagagcagagctaacacaacttgccttatcttgtaaaggccttaaaaataaggcttcagattgtttttttcttctgaattctgtcaatttggtatttgatggtgcctgcagttctcttaatgcactttaaagcttcacagttctgaaactggaaacgcataaaacttttaaaattattaatattctaattcaacag

SEQ ID NO: 61154 - DNA, 2198 bp, Homo sapiens
tagtttgcaaattagcactctgcaacagggctgattttgccgttactgaagttaaactgatttagcaattgctgtaattcttatattggaataaagtttgttgtaaaatttttcacatggcatagaagtgtaagacaattagaatcttacattcctcctcttagttccattcccaagatgtaaccagttttaatattatggtgtgtgcctttccaaggcattttctatgcttatgcaatatttatgtatatgaaattaattaatggtataaatggtttagcaaggattttttcgtggctggcaaatgagtcagtattttgtgactggaaaaccctgtgctgctgaacttgtttactgaaaaatatttgtgaaagaaaatgtctgaaaaatgcattacaaaggccaaagtaataaaccaaaagggtgattttagtaaagaatacataacaactgtcgtgtgagaaatagcactgagcttctgtgtgttatttgtcattcaagggtgcaactggaaactgacttgaagattgagaaggaatggaggcagactttgcaggaagatcttcaaaaggagaaagatgccttatctcatcttagaaatgagactcaacaaatcattagtcttaaaaaagtaaatagtggtaaaactttaaaaattctgtcttgacaaatgttaacttatttaaaaagataaatcataatttacattataccaaggaaatggatatactagtcatcttaaaaaatatcagtaaagagattaagtaaatggaaaatagttgatacagcagctaggaaagagctttggacacaatttgtttcttttaaaaagctaaaggatgtttgtttctaattaatggtatatgtacaatctggagtttcttgtttctttcttttaaatttcattttctgtcttttattgttctgaaggagttccttaacctccaggatgaaaatcagcagttgaaaaaaatatatcatgaacaagagcaagctcttcaagaactcggcaacaagcttagcgagtaatttcttttttccttcaactaagtagtcattattgacttttataaaaggtataagtgtgccaaatctattaggcagaagagtttaaatataggaaagatacgaactaggccgggcgcggtggttcacgcctgtaatccccgcactttgtaattcctggccgaggcgggtggatcatgaagtcaggaggtcaagaccagactggctaatatggtgaaaccctgtctttactaaaaatgcaaaaattagctgcttgtggtggcgtgtgcctgtaatcccagctactcgggaggctgaggcatgagaatcgcttgaacccaggaggtggagtttgcagtgagctgactccagcctggcgacaaagcaagactctgtctcagaagaaaaggagaaagatacaaactattaaacaaaacaaaaactctaaagattaaaaaatgagactagactagagagattttattaaaagttttattcaatttagtagacttagctttgaatatttcccagtagatgaaagctaacactcttgttcaatttattcaatgtcagagaattcagaagttattaatatatttttctcagaaaaacagaagctgaattttcaaaatatccggggagctgtctttgagattgttttgagaagaagccagcatcacgagaagtggaggtggtttcatgcctcctggagacagggcttaacttcatacagtttggttttgttgcagtaaaatgtcactgggatcctgtaaagacaagaaggagaaatggtgttttgcctttctttcatttccttttttttttttcaaagacagggtctcgcctaggcaggatgtagtggtacaatcataactcactgcagccttgacctcctgggctcaagcaaccctttcacctcagcttaccaagtagctgagactacaggcaggcaccatcatgccctactaattttttattgtttatagagatggggtcttgcatgttgcccaggctggtctcaaactcctgacctcaagcagtcctcccacctgagcctcccaaaatgctgggatcacaggcgtgagtcactgtgcccagccacattttccttttgttccccatagtctgtgttttggggtagcagctttgcgcctgattgaacatattgccagatatttggaataagctcaaga

SEQ ID NO: 61155 - DNA, 1062 bp, Homo sapiens
cacttgattcctggcatacacatcctagcataacatataacagtgtggcttcttcacctagtgtaggcataaatcctttgcttttcatggttttgtaaaaaggtagtaacatacctattatgctttgaaatttgattcgttatgctctgcataagtggtaaaggctgtattgctttgcactgttaattatgaacaagaaataaaacaaatttgaagatagtattctgggcatactacatgttatattgaaaaaaaaaaatcacaaaacaacttctagacattgtgtggctctttcacgtttgagtttgtgagttttcccccaaactttgttttcatttagaaatgtttctatttccccatttttcttttatttgtcttcttcacccttttacaccctagttctagcctcagttttacccaaagttgatttgaattacaccagattgcagcaagcagagaaggcgcaaatggaagctgaagatgaggatgagaaatatctacaagaatgtctcagtaaatctgatagtctgcagaaacaaatctcccaaaaggagaaacagctgtgagtatttcactctcagaaacaaatacttgtgttaacataaccccctcatttttttgcacataatgatagaataccaatatttttatttatctaatgatgccagttagcttttagtgtttactttaaaaaacaaaaaaatttagaaaatataattgtaataatacttatgtttttactccctttatgatttacagagtactttcaactctgttttgctgtcttcttgctctaggagagttttattcattcttctgttgtttaacattaatctgatggtcattatgtttctaggtgctgagtataggcttttgtaactacaagaaacttatattattaaaggacatgctgttttctgagaatatatatatatatatatatatatatatatatatatatatatatatatacacacatttttttgagatgaagtttcactcttgttgcccaggctggaatgcaatggcatgtgacctcagctcactgcaacctctgcctcc

SEQ ID NO: 61156 - DNA, 2570 bp, Homo sapiens
ctaagaatacaaaaaaattagctgggcgcagtggcgggcacctgtattcccagctacttgggaggctgaggcaggagaatggcgtgaacctgagaggcggagcttgcagtgaggcgagatggtgccactgcactccagcctgggcgacagagtgagactgtctcaaaaaaaaaaaaaaatgactaatagcactgctttatatcacacaattattttaatgtataaagtaactctgttcatttcaaagtaacagtcccatagcaaaatggtgtaagaaacttataaatactcaggttaacagatcagaactctacttgggaggctgagaggtgggatagcttgagcccagaagttcaaatccaacctgggctgcatagtgataccctatctattaaaaacacgcacacacacacacacacaaacacacacacacaaatcaaaaccaccatagcttttgtttttataaatagggttctgaagatggcttgaaagaaaaaaatgaaataattgcccgactagaagaaaaaaccaataaaattactgcagccatgaggcagctggaacaaaggtacagcatttccagtcttagtttctttttttcttttcttcttccctttttctttattcagttcctacacctgccacaaaaaccattaggaagacatagattaggacatgttttttgtttaagcccagcaggattttgcgtttttgctttggttgttgcatggaatcaagttgctttatattacgctgattcatttgaagttgtcatattgtagatttttcttagaggcctaatatcagcagtttcatgtcgttcagttacataaaacaaatacacaaataaaaatgtcaaaaaaattaaaaatgaacaaacagagtgagattatccctgattgatttccatgcatattaattgtcatattctttgccattcaccatctgtttatctgaaatcaagcattccgaattggtggtttagttttgtttctttgagctaggaccctcaacccaaccgaggatataattttgtttaaattgaattgttttatattggcatttttcacttttattgttggaaaatgtaatgtatttccattgccctgtcatgttggtgtcaacatatgtcttttatcattgctttctttgaatctacttatgaaaaacataactattaatgctttattgacatgaatattcttttattgacatcctctttcttcttttttcttttttgttttctttatccccatttttacattttggacatttttattacctttttctgtctttgatttctttccattccattatgaagtgacaacgatttgttaactcaaactaggacaattgcaatgtcattggtgaaatgtgccagcagtgacacgcaggaccagtacaagctggttaaagatatatctttctgaagaccacttgtatttaaacagactaaatgaaaagagaatcaacaattttataatatattaaatagaaaggaatctaaatgctattaaatattctaaaaggatgttaggaaccctgtacatttcttggtcagctgctgtggtaatacactgccatcaagcagagtgggtgcacttggatttccagacatacgttcctcaaaccttgtgcacaaagggtgatttgagtattgaccctttggaggtcaggattttcaaatgcagttttatctttttagctactttttgatgaaaaatataaagattgtttaaaaataacttaaccttcagttttatactgtgttggcacagatatttttttctcattggcccactctttgcccaatggctcccttacagatttttacatatgctttaaaataatttataacccagactggccaacaccctgtgcttcagcttctcagttttccggttctcccttgccctcttctgtgatagcacaacttcaaggcctacctcactctgacttctattttcctttttgtaaccttagagaaaagcttgggtccaatcccagcacctgaatattttaatttaaacttggatttggagataacttaaatgttactctcccttccttggaagcagcatttatacccctgaaatatgtgagggttgctccattggtatggttttaaggaagaaaggaagaggaagagttttttagttagttgaaccgaaatttctcttgtgatttcctgcaaggagttaatatcctttgaatcttggtaaatattttcttataaaaatattgaagttaaatacaagaaatcctagatggccaaagaaggcagggagtggagctaagcacaggaaaatgcaacgacttacaaataaaaacaggaaagatgaaaatcacaatgttttagctaatttttaatattaaatggtgaggaacaaaaatgatctctagcaaatgatgccaactggcaccaaattctttttgaatcttaaacatatatgcacacgtgcacacacacacacacacagagcttcggcataatttagtaaatgcataaagatgccgtaagaaggacttggctatcatttggagtaattgcaggtctttgctcttggcct

SEQ ID NO: 61157 - DNA, 1030 bp, Homo sapiens
attaataaataaaaaataaaaaatataaaaagttattcacacgtataaaggctaatttgaaggcacctaactgagatggcttccatttctgtaaggtagaagattaggaagataatggtgattttaaattttagtttttgaaataaatttgtgatttaaagtccttattttttaaattttcacagtgagttttatgagtatcacgcactaatgatggaagaagaaggagcagtaattgttgggctgctggttggcctgaatgtgatcgatgctaatctgtgtgtgaagggagaggatttagactcacaagtaagtgaaagtgactagtgccaaatgcagagtgttttcagtttgcacagttcctccttgatcaggtgtcatttgaagttgtaaacaggactgttaaacactaaaggaatattaagagtaacattcagtaaaggtacttctgataaagtattttctcccctttaaattaaaaaaaactttatttacttcaggttggagtgattgatttttctatgtatttaaagaatgaagaagatattggaaataaagaaaggtatgattttcataagttatttcacatattgggttttttatatagctctttacaaatcattataagatccatctatttacagtgtggttttattttgttgttttcccccctgtgacttcttcatttcattttcacttccattacaagctttacaaagcagattatggaaaatcacttaggagaaggaggttttattaatagtatgaagtgggacctttggttatacctgtagttactgagacccattttaatagtggttttttggaataaaagagatgaaagcttattattcacaagtttgcaaatactggtttacttcaagatcgaactatgtttttttttttttgagacacagtcttgctctgttgcccaggctggagtgcagtggttctatcttggctcactgcaacctccgcctcctgggttcaagcgattcttctgcctcagtctccccagtagctggaatta

SEQ ID NO: 61158 - DNA, 1025 bp, Homo sapiens
ggttccaaaagattataatactgtattttgactttaccatttccatgtttagctgtgtttagatacacaaatagttaacaattggttaataattgcctacagcattcagtacagtagcatgctatataggtttacagcctaggaacaatagggtatactatatagcataggtgtgtataccatctaggtttgcaaatgtacactccatgatgaaattacctaacaacgcatttttctgaaagtatcattaagtgacacactactgtgtttagagagtcatttcttccaagacattaaatagtacctggatgtcctacaggaggaacagatttacccagctctcagggattggtttgtgtgctcaaaaagataaacctataaaaatgaaaacaaaaccattataaaaatgccctttttccttgttaatgtttacctctagagacagaagatgtgatctttgggctagggctgttttctgatcaattggttcttctctttaggacccctctgggtcgagcaagagcgtggcttcgattagccctcatgcaaaaaaaaatggccgattacttacgttgcttaattattcagagggatctcttgaggttagtactattaagtcgtgatcttttcattttttattttatttatatgctgtcttccaaaaaggatttaagatgtaatatgaaaggatatataacatataataaaatgatataaaataagaggaggagcaaaatgagacagaaaaacatgatagagacataacatggatcaggaactagccttacatatgaataccataagctttgttatcagccaggatggggaaatttatatatattacatttcttcctctttgtttaaaaattttttcttttgccctgcctggaaactgccgtatataatacatttctgttagttttatttttctgaatatggttaattctatggataaaaatttgtgttggaatttgtggctttaatttcataggctttttgttttttgtttttttttttagaatttg

SEQ ID NO: 61159 - DNA, 1016 bp, Homo sapiens
taaaaaaaaaaaaggcattataaaaaataaaataactttttatttgtgcttggtttgtttaataaacttataaagatcaatcagctagggccaccagcctttattttggtattggtagagaatgagtgcagtcatttttcactttaattaccttactgcatatttgatatgaaagaatggtcactgtgtctttttatcatgtggaaaaaaatagcaggatgggcaacaggatcctactggcacaggctccagatccactgggatatgtagtggataaaagaggaaagatctctgaataattgtatgttaagttagaaatgttgaaactaaatatttaaaaataagttactacagttttttatgttgacattgtgtgcattatgtgttctttttttcagtaagaaaatcatttttgagttacaacaaaaccatctggggccctttggaactggtggagaagctgtaccccgaagcagaggaaataggagctagtgtccgggatctacctggtctgaagtaaggaggcctattacttgttcatccctagccacagaagtgtattcattgttcctccaaagtacctcacactctagcttattgtcttctcttagtcttaagtccccttcttctaatcctcttataataaaattatgttcattctttatggctcaactcaaatcccatttcctttatgaagtttttcttagcctcttcgatcaaaattaaccactcaccattctgccttgtattgtaggaaattgaaagtccttttaagataggatatatcagttatgcatctttgttttctgagtgttaaattagtttgcctgtagtagaaagtcagtaagtattgaggaaagactgatttaggctgaatccagggcacaggctcaggatattccagttctcagataagccagttgtataccctaggactggtgtacatttctttgcttcctctgaaaattggtacctataatgtcaccagcctgtttcatcagacaaatgtatgtaaa

SEQ ID NO: 61160 - DNA, 1044 bp, Homo sapiens
taacctccatttttgttaaggtaatttagaattttcaaggctagcaaatattaaagtgcagaataaaagaatgttagactgtaagacacttacaatctggcattaagtctcgtttattaagataagggggggattgaagccccattgtttttattttgagaaaatgtatctaagacatgtaatattttataatgacatttggagttttcatttacgataataactttttgtaatgtcagctaattctaattgagacaatactatgttgtagtgattaggaattggaaatttttctgtgaaagaaatagcagaaggtgaaatgtatttctttgtactgtgtgtgtgtgtgtgtgcactgttttagtagcatataatcctttacgttctcatgaaactaaaaattaagggagcaatgtctaaggaattatttcatcctgggaaatatggacagatttagagcaaattcagtaattgtattcagtctttgagataggaaagtttgttataaacatcagttgggcacataatgtaaacatttaattattaaattcagaaaagtttaacttaatcaggatttctttcttttaaattgtgtctttttctatttaggctggatgcagtccctctgatattggtattattgcaccgtacaggcagcaattaaagatcatcaatgatttattggcacgttctattgggatggtcgaagttaatacagtagacaaataccaaggaagggacaaaagtattgtcctagtatcttttgttagaagtaataaggatggaactgtgagttaattgtgtttgctactgattcatttggggcatttctctctctttaaaaattgtgggccgggcgcggtggctcacacctgtaatcccagccccctgggaggccaaggcgggtggatcacctgaggtcaggagtttgagaccagcctggacagcatggcgaaaccctgtctctactaaaaatacaaaaattagccgggcgtggtggcaggcgcctgtaatcccagctacttgggaggctgaggtaggaga

SEQ ID NO: 61161 - DNA, 1050 bp, Homo sapiens
gtttacttgattatttttaatttgtagaaaaaaattaaaatttgcatgctataaatatttcagaattaaataatatcgaaggattcctgatgccatagaacaaaaaccttttgatcttttcatttcaaaaatgagagaaacaaaactacatttcttttacatgttaaataactgatctgttttccttgtttttagcttatagttgcaacaacatgtatgggaataaaccatccaatattttcccgtaaaatttttgatttttgtattgtggatgaagcctctcaaattagccaaccaatttgtctgggccccctttttttttcacggagatttgtgttagtgggggaccatcagcagcttcctcccctggtgctaaaccgtgaagcaaggtaggcagacacttaagtgttaattttaaactagattattttcaaggaacagatttagtacactgataaacatgaatctgatttattgacagagctcttggcatgagtgaaagcttattcaagaggctggagcagaataagagtgctgttgtacagttaaccgtgcagtacagaatgaacaggtatttgtaacagtgttagctaggagtggttttcatgtttgtttccatctaccaaaactaaagttatcttttgtaattcccttagtaaaattatgtccttaagtaataagctgacctatgagggcaagctggagtgtggatcagacaaagtggccaatgcagtgataaacctacgtcactttaaagatgtgaagctggaactggaattttatgctgactattctgataatccttggttgatgggagtatttgaacccaacaatcctgtttgtttccttaatacagacaaggtaaaaaaaaaaatttctgtttagtttttctcattttgtcctattatttaaatttctcagttttcattagcacatgccctaattagagcttatcagttaaaaggcaaaactaggctgggcgtggtggctcacacctgtaatcccagcactttgcgaggccaaggcgggcagatcacaaggtcaggaatt

SEQ ID NO: 61162 - DNA, 1033 bp, Homo sapiens
tggaaaatgtaaaaatgacaggctcaatattagtctgttttgttttgtttttgtttttgtttttgtttttgagaggtggttttgctcttgttgtccaggttgttgagcaatggtgagatcttggctcactgcaactttcacctcccgggttcaagtgattctcctgcctcagcctcctgagtagctgggattacgggcgagcaccaccacacctggctaattttttatttttatttttttttttttagtagagatagggttttcaccatgttggccaggctggtcttgaacatctgacctcaggtaatccacccgcctcggcctcctggagtgttgggattacaggcgtgagccaccacacccggcctcaataataatttttaggagtcagatgaacaagtaagttgtaggaaaatgcagacacaatacttacgtatgtaatataaacagaagtttttttctctttggtcttttcatagggagaagagtggcagttgcattggaaacctgattagaatggaacatgtaaagatagtttgtgatgggcaatatttacataatttccaatgtaaacatggtgccatacctgtcacaaatctaatggcaggtgacagagttattgtaagtggagaagaaaggtcactgtttgctttgtctagaggatatgtgaaggagattaacatgacaacagtaacttgtttattagacaggtaatgaaatgttactttttttgataacagctttattgatatataattcacatctgtgtagttcatccatttaaaatgtacaattcgctggtttttagtatattcacagcgttgtgcagctatcaccacaatcaactttgagtattttcatcaccccaaaaagaaactcccaaggaagaagccctataccctttagtagtcacttttcattttcctccaatttccccagcccgtggcaaccactaacctgctttctgtctctgtagatttgcccattctggacatctcatgtaaatggaatcatgcaatatgtggtctttggt

SEQ ID NO: 61163 - DNA, 1052 bp, Homo sapiens
agagacacaaaaataaatgaagaagctggacatggtgggatgggcatgtggtcccagctactctggaagctgaggtgagaggatcacttgagccctggaattccatgccagcctatgcaacatcatgaaaccccacttaataaatgaatgaacgactaagtcttgctcaaatgttattatgaggtactatgagtgacttacatgtgttttaaaatgtcagtgtgtttcccagaggcagaaataaaaatactgaatatctttgctcttaaaaaaaaagtaacactatagatttgtttttgttagatgatttgctctatagtagaatatttaagtagactgtgaaatatttattaatatagatgtgaatatcaaaaaatgtttctaaggtattatgatgcatcaactagttcttccatgtaaaataattttagtgcaatatgaagacgtagaaatgtaaaatatgatttgaattgttatcctttatattaagaaaatgttttaaaatgtaagaattccatttattctgtttagagtactttttatgatttattataagcgtgtcataaatgggaagggaatatttaaagttctgtgttcagaaagagtaatttgtagaactgatgtgactttttttttttttttgagatggagtctcgctctatcgcccaggctggagtgcagtggcgcgatctcagctcactgcaacctctgcctcccgggttcaagtgattctcctgcctcagtctcccgagtagctgggactacaggtgcccaccaccaaaaattcgcctggctaatttttgtatttttagtagagacgggatttcaccgtgttagccaggatggcctcgatctcctgaacctcatgatctgcccaccttggtctcccaaagtgctgagattactggcgtgagccacggcgcccggccctttgatgtgactttaaagacattagaaggccaggtgtggtggctcacgcctttattcccagcactttgggaggccgagttgggtggatcacctgaagtcaggagtttaagatcagcatggtg

SEQ ID NO: 61164 - DNA, 1420 bp, Homo sapiens
taccatcaacgggtcatataagatttatttcaggcctggtgtggtggctcacgcgtgtaatcccagcactttgggaggccaaggcaggcagatcacctgaggtcaggagttcgaggccagcctgaccaacaaggtgaaaccccatctcttccaaaataataataataataataataacatagctgggtgtggtggcgcacacctgtaagccgaactactcaggaggctgaggcaggagaatcgcttgaacccaggagcagaggttgcagtaagccgatatcatgccattgcactccagcctgggcaacaagagcgaaactccatctcaaaaaaaaatttatttcaaatgccacatttctgattttattcagccaaggtactttgattgtgccattgaaaacacgagtgcagtcatcagtttgctctgccagcctggaatctctgttccttctgtgtaggaggcaaattttattcatccttgtatgcctacattgtagtgcaagaatacatttgtatgaatcaatcagtgaggaaggttaaaagtttaggaatctttcccagaacagcccggttatacttatgtgtatacgaataaaatctaagtgcagaatgggggtagaatggtgtgaaatgcaatgagggactgaatcctttctcttcacttgaagtttgacctggaaggaatgaagattccatgaacagcattttccttaccacggtgaccccattaaaatcctggattcccttgtctgtgtcatgactgctggaagaagcaatagctatcaaacatttagagaaaaattcagatgccctagtcagtcttaattctggcgtaatgccactggttattcctcctaattcggaaaacttagctcttcctgccctttcatttcttcattcataaagtgaatacgaccaccactgaggtccagggccaaataactaacagaaatattatgatgaactttgcagacatccagcccagagtcagggaacacagccctcatctggtttctctctttggtgttgagggcggttttccgttgctggcgacctagacattgctcaatggtgtcatctctgacctggcaccttcttcatacatttataaacatgcaatttagagatcctaaaaactttttctagagctcccctgggaaaaaagttaatgacaaaatcttgacacctctctacgtcttcttcggagacagagaagttgagagaggtggagaacgagggggagggggagggggtcgagagggagtcgaggagggattccagctccagtttgggtaaatccagctcgcgttttgtctctcgctcaactgtgcagggtccagcgaaggcagagccccagcttcactccctgaggtctgtcctggggagacactgctgctccggggggctgacctggcgggga

SEQ ID NO: 61165 - DNA, 1122 bp, Homo sapiens
tgcctcaggggtgggctcgttccccgcctcgaccccccaccccgggacgctcgggacgcttttgttgccggagataaacaatgcccccggccggaggtatcggccacccgctccggaggccccgccacagcgccgggttgggggcagcgggggcgcctggggctctgaccccgggctgcggtggaagcggggctgggggagggcaagtgtggcgtgggggagatggctgaatataccagcggttggttccctggcccctttggggagttggaggtcggggcgcctcggggtgaggagaggctagagtctgtgcaagttgtgagtggggagtccgggctgtcccgtgctcaagcgtaccccctaaacaagttttctccctccccccatatatatatgagagacaggttggtagggaaacgctttggcgcctgtctccccgagagttttgggacggcagctccagggatgaaacgtttggagtggaggcagtggtgcagtcttgctaggagttggctgggagttgtaaggatcagggaagaagggaagagggagtagagtgtgttctgtcaaaatggcatttaagaaactcatttatgagcaccactgggtcgctggacgcgctggccttgcgatcccatcagtccccgtctggcgggatcccggagcgggccccgagggtgggaggtgcgcggagctgggtgctggggctggtcgtgcagcacgtgaggggcctggtcctcgctctcgggcgaggaggcggccgcacaacctaccgcccccagagaaaaaatgctctcctctctctctgtgcttccctccctccctccctctcccccgctccggtccccgcctctctcgccccaggctcttgaatatatatatatatatattctacaagaagtggtctggaagggactggccgacgctggtaatctttccacgtgaacgagaaacccacgctgggcatttctgatccactaaaaactaaagtgtttccaaaagaacacttaaagcttcagcctcggagtctttcccgcgcccccaactcgtccctctcccaaattaaccaacctttctgcatacgtctcttagggtgcctcttcccctccgtcccggttccac

SEQ ID NO: 61166 - DNA, 1016 bp, Homo sapiens
cttttctctttgcaaagatgaggagtccaggcttacaactctgggactgccactttccattttaataagagttaactatcgctctccgggctggtctcccagaatagatgggtgggagggttgggtctccactgtccctgccctttgtttctcttccttctcccatctgatttgtctcccctcccccaccttctgagcgtccgtatcttccctgcacacttgatttcccctatccccttggtcttttagttttcggccttttgatcccagttgcctttttatgttctagctttattactatagatgtcgaaccccttcctcagtttttactataagtaatttttgcccttcctcagttttttactatacatttcttccccttctttcgtttttggccttttttgttttctttttgggcattttcttccttctcttgctttttcttctacttcctcctgttgtgtgttatgtctttcttgtcttcggaaggacagttctatgtccattctaacgtctcccttcccttttcttggcccttttccccccttttttcccccttcctctctgcagggcagaggggtgttttacatatggaaggagccattgactaaatgtgctggcattctagtgagtttccctgaacagcttttacatgtgccgagggctctcacacttcctgtggtagaaaactatctaggaacagcaagcagttgcctgcctgctcttcctttcgaggtagaacttagttgctggaggaaactgagccaggtgctgccttttttaaaaaatgttttaaatcttgtttttctctgccaagtgcaagagcctttaagttctgtagagctgaatggagggactatgaaatcagtctcttgcaactagctctatgtatgcaaataccacgtttttggccactgctggtagtgggaagaattgaaatatgactttaatttaacatgcaggctggattgttacatcagttaagcatttttgcccagaggattttgggggaatcc

SEQ ID NO: 61167 - DNA, 2933 bp, Homo sapiens
aaatgctgggatcacaggcatgaaacactgctcctggtccttacttttaactggccgggcacgctggttcacacctgtaatcccagcactaggggaggccaaggtgggtggatggcttgagcccagttagagaccagccagggcaacatggcgaaaacatgtctctacaaaaaatacaaaaattagccaggtgtgatggtgtgagcctgcagtcctagctacttggggggctgaagtgggaagattgcttgagcctgggtaggtccaggctgtgctgagctgtgatcatgcctctgcactccagcctgggcaacagaatgagaccctgtctcaaaaaaataaaataaaacaattagtagtgaatattctatttcaaataggggaatgcataggaaaaagactcacttcagtgtattctgttgttatttcagaccaaaaccttgtgtgactgagctgaagagcagtgcatccagattctcctcagaagtgagactttccaaaggaccaatgactctgtttcctgcgccctttcattttttcctactctgtagctatgtctcgatcccgccatgcaaggccttccagattagtcaggaaggaagatgtaaacaaaaaaaagaaaaacagccaactacgaaagacaaccaagggagccaacaaaaatgtggcatcagtcaagactttaagccctggaaaattaaagcaattaattcaagaaagagatgttaagaaaaaaacagaacctaaaccacccgtgccagtcagaagccttctgacaagagctggagcagcacgcatgaatttggataggactgaggttctttttcagaacccagagtccttaacctgcaatgggtttacaatggcgctacgaagcacctctcttagcaggcgactctcccaacccccactggtcgtagccaaatccaaaaaggttccactttctaagggtttagaaaagcaacatgattgtgattataagatactccctgctttgggagtaaagcactcagaaaatgattcggttccaatgcaagacacccaagtccttcctgatatagagactctaattggtgtacaaaatccctctttacttaaaggtaagagccaagagacaactcagttttggtcccaaagagttgaggattccaagatcaatatccctacccacagtggccctgcagctgagatccttcctgggccactggaagggacacgctgtggtgaaggactattctctgaagagacattgaatgataccagtggttccccaaaaatgtttgctcaggacacagtgtgtgctccttttccccaaagagcaacccccaaagttacctctcaaggaaaccccagcattcagttagaagagttgggttcacgagtagaatctcttaagttatctgattcttacctggatcccattaaaagtgaacatgattgctaccccacctccagtcttaataaggttatacctgacttgaaccttagaaactgcttggctcttggtgggtctacgtctcctacctctgtaataaaattcctcttggcaggctcaaaacaagcgacccttggtgctaaaccagatcatcaagaggccttcgaagctactgcaaatcaacaggaagtttctgataccacctctttcctaggacaggcctttggtgctatcccacatcaatgggaacttcctggtgctgacccagttcatggtgaggccctgggtgagaccccagatctaccagagattcctggtgctattccagtccaaggagaggtctttggtactattttagaccaacaagaaactcttggtatgagtgggagtgttgtcccagacttgcctgtcttccttcctgttcctccaaatccaattgctacctttaatgctccttccaaatggcctgagccccaaagcactgtctcatatggacttgcagtccagggtgctatacagattttgcctttgggctcaggacacactcctcaatcatcatcaaactcagagaaaaattcattacctccagtaatggctataagcaatgtagaaaatgagaagcaggttcatataagcttcctgccagctaacactcaggggttcccattagcccctgagagaggactcttccatgcttcactgggtatagcccaactctctcaggctggtcctagcaaatcagacagagggagctcccaggtcagtgtaaccagcacagttcatgttgtcaacaccacagtggtgactatgccagtgccaatggtcagtacctcctcttcttcctataccactttgctaccgactttggaaaagaagaaaagaaagcgatgtggggtctgtgaaccctgccagcagaagaccaactgtggtgaatgcacttactgcaagaacagaaagaacagccatcagatctgtaagaaaagaaaatgtgaggagctgaaaaagaaaccatctgttgttgtgcctctggaggtaagcaaacagtcaaggggctgggagacagctgacacttggtatagtgatctatatgcagagacacttctagtgtctctagtgtctctatgtaatagtgaattgcttcactattacatatttttactttggtacaatgttactttaagttatccataaaagaattcctggacctacctgaagtatgtcttgtgcagtgatgccttagctagcttatttttagaatttgtcccagaaaactagaacatacagtttttttctcattacaggatttgatggaaacatagagaaattgtatgaaatgtgtttttgcagagatttcccctatgcctcttttggctagttgcatgtcttttttggcagtcacagatttaaaaattaagagtggaacaaattcattaactccatagcagcctgaaaaaccagaggaattaaacatctttccttttgaaagaacacagttgca

SEQ ID NO: 61168 - DNA, 1076 bp, Homo sapiens
gagatagtcatactgcaaagcagagatgccatgaggagcagagatgatgtctgtaaagcgtcttgcagtgtgtctgctatacaacagatgcttaaaagtggtgggtattgtatatgtttgaagagatttgtgtatttatttcattactttcacctgttttccatcttgccattttattcatgttatgtagaggaaagtaattaagttttctaagtattccatatgtaccatttctcagtatctgcaaaagcatttttcctgctggaggattaagatactttatgaatgaattggtttcactgttcccatgtgatgcagaattatagttgtggtttccagcgagatgactatgccgcagttattttcttgtgcttgtataatgagagggttttggtgtttctgctgtgttctagacagttacactatacagctcattttcatatcatatttcatacgcaacaccatattgtggtgagttttctgtaaaagtaggatcaagggacgaggaagtgggaggacaagacagtggaaggccagagttgatccaagccatggaattttggatggagtggatataggttagatttagagaaaaaagcgggtgtctgttggtttcttctatccttggaggagtaagtaatttgtacaggagttattacagaattgcagggagatttgtctactgggcaacacagaagttaagttgctttccttatttcccattttctagagactctgatactgcattatgagttggtaaaacagactaataaaacaagaaaatcaaaatagtgttctattttctcttcctttttaaagaaccaataacctttattaattaggtacattactaattcacattacttcattactaattaggtacacgcagttttaacaaaattgaaactttgcttgaaacacacacaggaagctggcaaaggaaaggaaggtggaaggagactaacatttttttgaggggcagacacagtgataaaagacttcctattactgtattcaatgctgacagtaaccctaacccatgaggtgtaagtattcggattctcattatgcagaat

SEQ ID NO: 61169 - DNA, 1577 bp, Homo sapiens
ctccgctatgtagcttaggctagccttgaaatcctgggcttaagtgatccttcaaccttggcctctcaaagtgcttggattgcagatgtgagccactgcacctggcctctgctcagaatttctgactattctctcccatcaaaactcgcccagagctcagaccaccaaatcacttagtataggaattgaaacacctgatctatgctgtgttcaaacaagtatagatcttcgtggtgaagcatcaatttgatatttggagttaatgttagttctgatcacattcattaactttcatatatagctaggatgagccttggctttatttattatccaattttacagaagagtgcacacacaggccttcgatgtttgcttaggttgtcaagtgcaatgttgtatggcttcatgagtatcctatacagtgaaaacacctgtctttgggcctttacaaaacagacctctcagcaatatagatattctgtacacctaaccctctgagcctgatttcattttattttattttattttcatgatcacacagctaatggatttttttttttttttttttttgagaccgagtctcattctgttgcctaggctggagtgcagtggcacgatctcggctcactgcaacctccacctcccaggttcaagtgatcctcctgcctcagtctcccgagtagttgggactataggtgcatgccaccactcctggctaatttttgtatttttagtagagatgaggtttcatcatattggccaggctggtcttgaactcctgacctgaagtgatccacctgcctcagccttccaaagtgctaggattacaggcgtgagctaccacgcccggctgatcgacttaaattatacaattctatcataatatatcatggccactttactaaatattgaacaattaacctggaaaaaaatgttcattttttaaagttatattcaaacattcaacagaagaggcataatgtgtaactgaaatgcaaggcacttcaagaaatgtaggactacccttgtgcaaagctgatgggaatgtaaaatggtgcggctgctatggtaaacaatttggtagttcctcagaaagttaaacatagccttatcatatgattcagcaattctactccaaggtgtatactacttgtatacctacttgtacacctatgttcatagcagtaatattcataatcaccaaaaagtacaaatgtctaacaacagaataagggaaaaacaaaatgtgttatgtacatacaaaggaatattgttcagccttcaaaatgaatgaaattctgatacattctacaacatggatgaaccttgtaaatattatgctattaataagtgaagcaaagagaaacgaaaagaaaaatactatatgaaaaatactatatgattccaattataggaggtacttagagtagtccatttcatagacagaaagtagaatggaagtcagtatgggctgggggaaggcaaatgaggagttattgtttaatgggtatggagtttctgtttacaaggaagaaaaagttctggaaatggagaggtgatagttgcatagcagttgt

SEQ ID NO: 61170 - DNA, 1101 bp, Homo sapiens
accatattcattaggttttttttttctttttctttcttttttttttttttttggagacggagtctggctcagccatctaggctggagtgcggtggtgctcactgcaactactgtctcctgggttcaagcgattctcctgtctcagcctcccgagtaggtgggattacaggcacccaccatcatgcccggctaatttttgtattttagtggagacagggtttcctgttggccaggctggtctcaaacgcctgacctcaggtgatcttcctgcctcggcctcccaaagtgttaggattacaggcgtgagccactgtgcccggccaatagtttttttcttacatgaatttgttaaaaatgtgggtgaggggtgggtgagtgagaggtaatttaaaagtggaaaaacaacgcatgccggacttcacgttccaacacggaaagcatgcttttgtggcaaactgaaaggctagggattaagggtgatgaaatgcaggccttccggccctcactctgttcctgatttctggttgtgggaatctgttctgaatccagctgcaagtggaaaacccatctttggctgagcagccggggaggccctcctgccaatccccgaaatgtgctgctgaaactttggccctgcaaggctggagctagggctgtcttccccagatctgtgcagctgtcaaggtggctgtgatgggactgtgaccgccctctacactgcattttggcagtgaccttgagaccagccagctcaccacagctgccctgctctgctgccgctgttgcaatgccaggtggcttaagaggggtcgtggggggcacggctcccggtccagtctttcccagtgtctggcaggtgctagctgtggtgccagctgtcccactgcctaccacccactgggcgtgggggcagtccaggtgtgtgtcgggagatggtggtttgttctacccctggctcaggtcccgatccctgggaagtgggtggttccgtctgaccgcgagtctggtgcgcagaccggccccacgtggggacttgcttggcaggtctgcggatatagatgctcagtgacagttgatcttgggagacagaagagccaaagg

SEQ ID NO: 61171 - DNA, 1033 bp, Homo sapiens
catcgatccaatggtggtgacctgggggatttgtgtgcattgtttttgttgaagcctcctgtgatttcggcgcgaccagatcctctgcagcgaactccatgtcgcagcttgtggctgcctgtgtcctgtggtgagagccgagccgcacaggagatcctttgtctaggaagggctaggctgagaagatcactttggagttgctaagctctgcattgccattggctgcactctttgtggggctgtttttgcaaaaggcatgcccagcacgtctacagtgctggcaggccagggctgcctttaaacaccatgataataataccaaaaagcagtttgcagaactgttccactgtagaggcttcctctgcagaagcaagcaagatggctacctcgtgggcttcgctgtgaagaatgcagaggctaattaagacagactttaaggggaaaaaagggtatttccctgcttcatctttatgcaagatttttttagtgacttttaaagtatacattttacataagctctttaggttctgcctagcaaacatgttgatgattttaaatggtataaatagttttacagagaaatagccaaaaattttggggatgtgggagctaattttatttcttaaacagaggctcattttgcaatttgattttttttaggttataaaggaaaacaagaggccccagagggaaaagaagcccaaagttttaaaggtaatcagctgttgattaaataatatttcattatttttccatttcatatagtatttttctgcacttgggtatatttggagtacagtatatgtgaattctcccagattttcagtagatggatgaatttccactcaactaaagtgttttctctctcttttttttgatgtgctgcataatgtgcatattagcatcctttattttcaactccactcaagtctacagaaagaaaagtttgtatgcagagtgttgtgaataaaatttgtttttctttatagctccctttgtagcatctgcatttgtggtgttgcaccagtgtgta

SEQ ID NO: 61172 - DNA, 1920 bp, Homo sapiens
ggcatcactaaaagttcaaggctagctttagtctaacgaataggtgcttatgtgtttaagatttcaagtggtgtattgctattacaaatgtaagcaacctttgcaagccaccttttaaattcatgaagaaatactaagcaataaaatgacttatctttaattattttgtgtacatttaatttaaaatagttttacctaatcctagctttccttttttacacataaagttttagcactcaaagaggaacaacatgttgaactatgaatgtggcagaattttatttcatttgttgccccagtgtgtaacttgaaaatgttgacacggagaaccaaaccttgccctgctttcaaatttgcctgaccacattgagtttctgcttcctgtgtatatacagcattttcatgtacctgtttcatcaaccaacaagtatttatttaatatttaccacatagtcagcaatgtgctaggcactgtgaaatgaatgaaattgcttgacacaaattttcactgggcctggacaaatagaatcatggttattctcaaggtaaattaaacccttttctgtttttcttctttgtgttgatccatcgacccccatttattccttttccttccaacagagatagaagtttatcattaaaagctccttctatactttctgtgttggctatatccatctcaggcattttgtgaaaaatagatttagtcttcctcttaaaaatggctctcatttgttggggttgtggatggggattagcaggagaaagggatagattatgtggagaaactaatacagaccaagcctagtatctatgtcttcccctgccttggctaggaagtagaattggactttgggaatgcaatttaattctatgtttattttgttagattgtgagtgtcctgtcacctgaaataaatgtaaaaagtaaatatgccatgtgttgctttttggaatcacggtagtggactctggcttaaaagaaaaagaataaaagtgcctgtgggtggccacatttcatctgcaacagcaagcagaaccaaattgttgctcacgttcctctatagttagcaattactgtacaagagcaggaaaatattctaaaaggaaaaaaaatttctgatgttggcatttaaaaatggttttccacattttctgttagacataattttttttctcatccaaagaaagctttgtttctctgcttcacagtagaaatgctaaaaaaaactttcagattttagcttgatgtgtataaaattcatagagcaaatgtagaatattatataatcctatagaagacataaaaaaaatgaaacctgtgtttgggagggagagtgggagaggaatacaactgtcagcttgaggttttatgagtgaggacttcaacattctaggagcatgctacctgggggaccagtgatgggaatctcacagtttatgatttggtcttccatcattatttgctgtctttacatttggtgtcattccagaaatttagtctgcttcctttgactttatccttttagatgttgaaatctcctggatcatttaccctttgtcagggtggatgctgcaggtatcctgattgacttttcattttcatcatctattagaaagtagttggatacgtgaagaacctgattcaagaagttgggtatagaatttgagacttgtttcatcctacactgacctgaacctgataactattgaatccagttgtggggctgaaattggctggcatgtcttatatccctctcctcttaaaaacatacctgttatccaccaggtatgatgactcatatgtgtaatcccagaactttgggaggccaaggcgggaggattgcttgaggccaggagtttgagaccagcctgcaaaacctagcaaaatcctgtctctatgaaaaatttaaaaattagc

SEQ ID NO: 61173 - DNA, 1096 bp, Homo sapiens
ggagggttaaggaaagaactaaggatggtgaagaaatccagatctaatgaaggcagagctattactaatcctaggcctgaagggggatggtgagtggaaaccaggtaatgtagctacagctgagtagaggaagcatgggctggagcctttggtaaagagatgctcttgcaaggagtcaagtggggggtgggtgtgggataaatgccctgctctccagtctcctgctgctttgattggttgatcccaatggggagccagagtgaaaggggagacctctgatgtagtacacgctggtcagccttctgggatgtgtaagaaggttatggaaggtggaatgtaggcctggaagggaaaacaacatactgggcatgactagtgaccacaggggtggtatggtagagtgaacaatagtactagaactgtgattacataagatggtaacattaggcaaagatggctgaagagtacataagaactctatactatttttgcaactcatctgtaaatctaaaattatttcccaataagcatgaggatccttgaggggatgcatttatacattctgtaattagatagtctttttggctggtaaggaatattttctagctatttaattataaaatatcatcagagtagtatttggaagagctgggtgaacaaatataaagaaatgtcagtggatattaaactaggagagtgtctccagaggttgattttaaaaaggcaaaatgaaaactaagggatcttcctgcagggttcagcactgacttgctcttctcttttccttcattccttgatgatgctgataaagaacaagtggggccaggagagtggctcaggcctgtaatcccaacacattgggaggctgaggcgggcagatcacctgaggttgggtgttcgagaccagcctgaccaacatagagaaacccccatctctactaaaaatacaaaattagccaggggtagtggcgcatgcctgtaatcccacctactcgggaggctgcggtaggagaatcacttgaatccaggaggcggaggttacagtgaggaaacaagcaaaaattgccgagatgatgaaggaaaacatcatctaggg

SEQ ID NO: 61174 - DNA, 1053 bp, Homo sapiens
ctccttaagagttcaggagattcttcctatgacaaatctggttttcttaagacaattttgttttctttctttttttttttttttttacaacttaaactttatttacttgattgagagcttattgcacatgaaatgttttatgtggttgatcttaacttcgtttacattgacttcttttctatgctcaagattgttcaattgctgctgccgccgttgtgttttctttcaggatcgaggtgggtaccttcatataatatcttctttttaatttcttctctggcaattctttcctggattctttgccttgcataattatacctacagtgaaaccagcatcccaaagtcaccaagataaacccccctactccaacatcacatgatcttctaattctactagtgaacaaaaaatgtccaaagccagccacaacagatcctaatgaaccatacaatattgaatgccgggcgcagggagtattttcaacatctaaaaatcctaggagcttaagggacttcctctcctcgggctcaccgggctccggcgtggaggccatgaggactactccgcgactccacccgccctgcaccctttcttttttttttgaaagggaatctggctctgtcacccaggctggagtgcagtggcgggatctcggctcactgcaagctccgcctcccgggttcacgccattctcctgcctcagcctcctgagtagctaggactacaggcgcccgccaccacgccccgctaatttttttgtatttttagtagagacagggtttcaccatgttagccacgatggtctcgatctgacatcgtgatccacccgcctaggccttccaaagtgctgcgattacaggcatgagccaccacgcccggccagatcctgttttctactagggtttagccaatatcaagtcatctttcgtggaatgctccctcatgatcaaagatagctttcagggaccttgcctaactccaagcagaaggccatcagataactagttaattcatgatccgacaagccaccaatcaacgtttaggcttttagttct

SEQ ID NO: 61175 - DNA, 3437 bp, Homo sapiens
tttcttggagaagaggtctcactttgtcacccaggctggagtatagtagcacagtcctggctcattggaacctccacctcctgtgctgaagcgatgctgtcaccatcagcctcccgggtagctggggccgcaggtgtgcatcaccacacctgactaattttttttgtatttttggtagagactgggtttcaccatcttgctcaggctggtcttgaattcctgggctcaagcgatcctcccatcttgtcctcccaaagtgctgcgattacaggtgtgagtcactatgcctagcctagttgtcttttctttttgtatattatgtccttttggtattttatgacttcgctgaatgtgtgaaaagcaaaaataatattttaggctgtatccacaggggctttacatttagttgttattaaattttaatcttctatggctgttattcagatatttaagtagatgacataagtaatttctgtattttacaggcagattttgacaacaaaccagtaaatggccccaagtcagaatccatggactacagtagatgtggtcatggggaagaacaaaaattggaattgaacccacatactgttgaaaatgtaactaaaaatgaagacagcatgacaggcatcgaggtggagaagtggacacaaaacaagaaatcacagttaactgatcacgtgaaaggagattttagtgctaatgtcccagaagctgaaaaatcgaaaaactctgaagttgacaagaaacgaaccaaatctccaaaattgtttgtacaaaccgtaagaaatggcattaaacatgtacactgtttaccagctgaaacaaatgtttcatttaaaaaattcaatattgaagaattcggcaagacattggaaaacaattcttataaattcctaaaagacactgcaaaccataaaaacgctatgagctctgttgctactgatatgagttgtgatcatctcaaggggagaagtaacgttttagtattccagcagcctggctttaactgcagttccattccacattcttcacactccatcataaatcatcatgctagtatacacaatgaaggtgatcaaccaaaaactcctgagaatataccaagtaaagaaccaaaagatggatctcccgttcaaccaagtctcttatcgttaatgaaagataggagattaacattggagcaagtggtagccatagaggccctgactcaactctcagaagccccatcagagaattcctccccatcaaagtcagagaaggatgaggaatcagagcagagaacagccagtttgcttaatagctgcaaagctatcctctacactgtaagaaaagacctccaagacccaaacttacagggagagccaccaaaacttaatcactgtccatctttggaaaaacaaagttcatgcaacacggtggttttcaatgggcaaactactaccctttccaactcacatatcaactcagctactaaccaagcatccacaaagtcacatgaatattcaaaagtcacaaattcattatctctttttataccaaaatcaaattcatccaagattgacaccaataaaagtattgctcaagggataattactcttgacaattgttccaatgatttgcatcagttgccaccaagaaataatgaagtggagtattgcaaccagttactggacagcagcaaaaaattggactcagatgatctatcatgtcaggatgcaacccatacccaaattgaggaagatgttgcaacacagttgacacaacttgcttcgataattaagatcaattatataaaaccagaggacaaaaaagttgaaagtacaccaacaagccttgtcacatgtaatgtacagcaaaaatacaatcaggagaagggcacaatacaacagaaaccaccttcaagtgtacacaataatcatggttcatcattaacaaaacaaaagaacccaacccagaaaaagacaaaatccaccccatcaagagatcggcggaaaaagaagcccacagttgtaagttatcaagaaaatgatcggcagaagtgggaaaagttgtcctatatgtatggcacaatatgcgacatttggatagcatcgaaatttcaaaattttgggcaattttgtccacatgattttcctactgtatttgggaaaatttcttcctcgaccaaaatatggaaaccactggctcaaacgaggtccattatgcaacccaaaacagtatttccaccactcactcagataaaattacagagatatcctgaatcagcagaggaaaaggtgaaggttgaaccattggattcactcagcttatttcatcttaaaacggaatccaacgggaaggcattcactgataaagcttataattctcaggtacagttaacggtgaatgccaatcagaaagcccatcctttgacccagccctcctctccacctaaccagtgtgctaacgtgatggcaggcgatgaccaaatacggtttcagcaggttgttaaggagcaactcatgcatcagagactgccaacattgcctggtatctctcatgaaacacccttaccggagtcagcactaactctcaggaatgtaaatgtagtgtgttcaggtggaattacagtggtttctaccaaaagtgaagaggaagtctgttcatccagttttggaacatcagaattttccacagtggacagtgcacagaaaaattttaatgattatgccatgaacttctttactaaccctacaaaaaacctagtgtctataactaaagattctgaactgcccacctgcagctgtcttggtgagtacttgtgtgcatgtgttcttatttcacctgcacaaattacctcaatcatgactgaagcaaattctgattcatcttttttgtgtgatattttttccccattcttattctaactaagatggattaagtaaatctataaccatttttctgtgggaacttttggttctgccacaagaatggaaaattcagctcataatttggaaaaacaaacttggaaaaggtaaacccgctcaagtggaaaaataggctgatatatctctcaatgttgaatgtctgtcaatttatcgtgcgtagcataagaatgaatttcgtaggccaggcgcaatggctcttgcctgtaatcccaacattttgggaggccgagtcagatggatcacttgaggtcaagagtttgatactagcctggccaacatggtgaaaccctgtatttacttaaaattcaaaaattagttgagcatggtggtgcacgcctgcaatcccagctactcggttggctgaggcaggagaatcacttgaacctgggaggtggaggttacagtgagccaagattgtgccactcccctccagcttgggcaacagagcaagaccctgtcttaaaaaaaaaagaaagaaagaaataacttaatagtttattacagttt

SEQ ID NO: 61176 - DNA, 2527 bp, Homo sapiens
tacttgggaggctgagacaggagaatcgcttgaacccaggaggcgaagattgcagtgagccaagatctcatcactgtgctccagcctgggcaacaagagtgaaacgccatctcaaaaaaataataataaaaaataaaggtgaaaaaggaagccacagaagtaattcccctagtatttgacatccagtgaaaatgactttttggtgtaggtataccatggctagaaattcatgaaacgcagaaattccccagtaattcttactacacatgagtctaaggggccaagttaaaaatagcattttttaagaaacataaaattcatgctcacaaaaattcaagtggtgcagaaatacgacgcaaacatcttcctatactcccattctatacaaaagaacattattgattttaattttgtttccatttttacaaaaatttaaaacaatctttctacttggttttttaatataatgatattgtggatgtctaaatgttttataaatattattgtttcaatagatttattgtataccactatataaacatcccataatttatttaaaccacatgttattgacagatgttgagtgttttgctctctttttgatattacaaataattgtaacaaggaacattcttttgtaattgtgcaaatgtatagtagaataaattgtctgcaatgaaattgctcaattttcccagcactttgggaggcacaaggtcaggagattgagaccatcctggctaacatggtgaaaccccgtctctactaaaaaatacaaaaaaaaaattagccgggcgtggtggcgggtgcctatagtcccagctacttgggaggctgaggcagaatggtgtgaacccgggaggcggagcttgcagtgagccgagatcgcgccactgcactccagcctgggcgacagagcaagactctgtctcaaaaaaaaaaggggattgctcaattttaataggattctaagggcaacctttaacatttattgttcttggataacttttagtattacacctcaattaatacagattttttttttaagcaggagataggagtataaatatgacccacatcttaaaatattttttttctcctctgattttcagaggaagaaagaattcgttaggggcaggaagaaaggaacattaaaagttaaatttcatgggctgttgtccttgcctttaattatcaaatcttaccaaaaccttgtcaagattcatggttctgaattgagggggaacaaaaagtataaaagtagcttctcctgtcccctatgcaattctgtaaagctttgggtctaataatcttattccttccacagatcgagttatacaaaaagacaaaggcccatattatacacaccttggggcaggaccaagtgttgctgctgtcagggaaatcatggagaataggtgaggaaatacgcttccctgttaaaatcattcttactgtggatctgactcaacggagataaatcatctctaagaacaaacgccgtgattgaaaaatgatcaggagtatgagttggatgtttcttagggcccaacaaaagaggggtgtcctcgtgtccctactgagccacccatcatacaagctgttgggcacataaaagcacccacaaagcaagactagttgtctttgataaactcagaagtactttttatatatcgcataatggtagaaataggtcaaattaccacccttgacactgcataccctacattcccattgcttgtctggcactcagcctattttttaaagagtgatctttgaggataagtgagtaggactggttaacaaattaaaatacctgccacacaaaagcaaatgtttaacaagagtaaattacgaagagtgtctaatttttgaacttctgtacatctatatcttatatacattaagatgttcaaagccaaagccttcaagtacagattgcaattaattagtacattcccttcactgtgttttatactcaggtatggtcaaaaaggaaacgcaataaggatagaaatagtagtgtacaccggtaaagaagggaaaagctctcatgggtgtccaattgctaagtgggtaagtatttcctatttatacatttttttgaagcttgttattccagagctgatatttatacatttacaatagccagagtgatctttattttatttattcatttatttatttaatttttgagacaggctttgtcgccccggctggattgcagtggtgcaatcacacctcactgcagccttgatctcccaggctcaagcaatctttccaccttagcctccaagtacttaagacttgccaccaaacccggctaatttttttttttttttttttttttttagtggagagctcaagtgatcctcccgcctcagtcccctaaagtgctgggattacaggcgtgagctactgtactgggccagattttttaatagatttttaagtaaattggccatttgtgatgaaagttgcaaatatattttctcagtttgttgtggttttaccagttagatttttt

SEQ ID NO: 61177 - DNA, 1114 bp, Homo sapiens
cttgtctgttgtgcaaactataacagcagtgaaataaaacacagactgccttgtactacttctacaaataataaccacgtgtcacagatttttgttctgcctgttgtttgttagtcatataggttcaggtactcttgtgatgagtctcatggagggaactgttgaggcagtggaaagtcctacagggttttatcccttgagaagtagtaactttaaaaaaactaaaatatggccgggcatggaggcacatgtctgtaatcccagatctttgggaggccaaggaaggaggattgcttgaagctaggagtttgagaccagccttggtaacatagttagaccccgtctgtagaacagattttataaattaagtaaataaactaaaatataatcatggagaacatcaaaaggaatatccattgcattcaaatttggcatacttgtcttccatagatgaatgtattctgttttttcaggttttaagaagaagcagtgatgaagaaaaagttctttgtttggtccggcagcgtacaggccaccactgtccaactgctgtgatggtggtgctcatcatggtgtgggatggcatccctcttccaatggccgaccggctatacacagagctcacagagaatctaaagtcatacaatgggcaccctaccgacagaagatgcaccctcaatgaaaagtaattaaatctgttttatactgccttaccattcagatctctattacatattggtaaaattgttaattagctaccaactatgtatattatatgggagaataggatttgagtattgtggaattaaaaagaatgaacatttctgtaaagagagagtctctattttatagtgagttaaggttactttaaatcattctcctttggaatattacttcactgtgaccaggtgcagtggctcatgcctgtaatcccagcactttgggaggccgaggcaggaggatcatgaggtcagaagatcaagactatcctggctaatatgtctccactataaatacaaaaaattagccgggcgtggtggcgggcgcctacagtcccagctactcaggaggctgaggcaggagaatggtgtgaatccgggaggcggagcttgca

SEQ ID NO: 61178 - DNA, 1510 bp, Homo sapiens
tggtgacagggctagaccccatctcaaaaaaaaaaaaaaaaaaaaaaaacaccaaaaaaaaaaaaaagaaaaacccaggttctttatttccctatctcagacatctccaaatcaaacaatactgtgagtattttagatctgtatagtttattcccacttatttggatttgcaatcatgaccaaatatttctgctaaaaatttggttataataaagtatagttaaccctggtcccctagtcagatttcttgaaaaaacaaaagttagctttttattgttaacattaaactattttaaataagtaatataatagataagtgttataaccggttctttaggcatccatccttctaaagctatagaaacctgaaatgttctctctgaggtattgtaatgcttcatcaattcactctcttgaattacaatcttacagtcgtacctgtacatgtcaaggaattgatccagagacttgtggagcttcattctcttttggctgttcatggagtatgtactttaatggctgtaagtttggtagaagcccaagccccagaagatttagaattgatccaagctctcccttacatgtaagtgtccttctttattcaaataatttatttttgaattacacattgaatatgtaagtgcattcctttaacattttttgaaacactataaaaactaaatattgaaaagtagtaatcaaatagtaaaattatatttctattatataagtaaataaattaattaagactctaaataaattaggtaaagactttagctatctccccaaattccaattgtccctggcttcctcctcctgctctactaccccaccccagcaaaatcatcattaaaagaacctagaattttatactcagccaaaataggaaaaacccatttgccaaaatttcaaagactcagaaagtttactacccacagacctactatgaaagaattactaaaggacgtaatccagaaagaagatatatgaaaccggaacgaatcagtccgggacacgaggccatggtgagcaaagaaattagtcgaacttggtgttaagttaaataagttcaatacttatatattatattaaattaaaataacctataagtataactccacacctttatcagctcgtgggtgggtaggcagtgggagggggtggggcaccaataggaactaagtattctaatgtgttatgctttgtttgtgtagtgaggatttatatattgattaactataagattgatatcttttaatctttgagcagtgaccaagagtaaaaaacattttatattacaagccactatacacatacatagacataagaaaataattagacctatctgaaaacaatacttacctttcttacatgtaacagcagtaacatcaaaatatttaaaaagttaatatcaatgtagttattctaagagtctatgatacatcatttttttatcagatttctttctttttcttttttttttttctttttctttttctttttttttttt

SEQ ID NO: 61179 - DNA, 1058 bp, Homo sapiens
atgtgatagttttcctttgaaaaaatctgatgtctctatcagtagcaatccagatttcttgagtgttaatggtcctcatagtccttcaaagtcttcttcaatttgtagttattatggtgtagaaaagagaactatagacaaccacttgcccacttacttcctttgatctgcaggcatttactaaacctctcagttatcctgaccttgctctttcgtagagatcatgcgtaatattcctgtttcatgggccataaggacatgtgtttaattcataaggacatatggattccatttgaaacaggatctcacacagagtaggtgttttatgtatgtactctctcttctccgttataggaacctgttacattgtaaccaagttacttgccatttccccttgccagcaagaacgttgtttgcatttattccaagtgtgcaatactattgaataaatataaaacatagctctcatttttcacaacatgaacagtattgtaatttatctctaacactatttaaatttctaattaacttagaattttcatttcaaaagacttcattaaagcataacaatgtctaatagtttagatggagaaaagaagcagtgtaattttctgtggtagctattttatcaggataagtatgaattgtgcattaaccaccatcagccatgatttatgattcagttgtaccttaaacacatgaaggtgcgattataaaatacctaatggattctgttttcctataggaaaaaaaccttgaagataacttacagagtttggctacacgattagctccaatttataagcagtatgctccagtagcttaccaaaatcaggtatgtattggtatgaactttttatttatttattaatttgaggtggggtcttgctttgttgcccaggcagcagtacagtggcatgatcaaagcttactacaaactcctaagctcaagcaatgctcctgcctcaccctccaaaaatgctgggattacagatatgccagactgttttatatcttaaaaagtcattgttggccaagctcgttagctcacgcctgta

SEQ ID NO: 61180 - DNA, 1119 bp, Homo sapiens
gcccgcctcagcctcccaaactgctgggattacaggcattagccaccctgcccagcatccaccttttcattttaaaaggagttacaaattgactttcagtaatggttcatgaaatgtatgtatatcttctttttacggatattgaaaactctgtgtatatgattaatgcgcttttattggtctttctttctaatggaatgattgagtctattttacttgcttatccatctccaacaagaattagtatcctcaccctgccttcccttgtaaattcagtgattttccttttactccatgtattgtcaagtgctttctcctgaatgttgctaagctacaccttcatgacaataatacatttagtctcagaaattacaaagtgtaattaattagaaacttcatgaggaaattatttttactctttactgaaggtaggtgatttccttctctctcttaagattgtgctccatgctttcttttctaggtggaatatgaaaatgttgcccgagaatgtcggcttggcagcaaggaaggtcgtcccttctctggggtcactgcttgcctggacttctgtgctcatccccacagggacattcacaacatgaataatggaagcactgtggtatgtacctgtgtgaatttgtattctaaaagctccatcactatatgcttaggctgcagtccttacgtatactgtgatgactattactgtgaaaaatcttaatttatgtgttattagaaataagtggaaaataaagtgaaaaaaaagaaataagtgtgtagtgcaggtcttcattaaatgcattatctatgcacttctaaaaagtaacagggccagcttcaaacaaacattttattgaaaggctatgttacatatttaattgttgtgtttttgctgggaggcaggagtacttttttttaaatttatttatttatttattttttgagacggagtctcactctgtcgcccaggctagagggtagtggcacgatctcagctcactgcaacctctgcctcctgggttcacgccattctcctgccttagcctcccaagtagctggggctacaggcgcccacgaccacacccggataattttttgtatttttagtagagatgggat

SEQ ID NO: 61181 - DNA, 1135 bp, Homo sapiens
aaaattttttttaactgttagcgtataagtctttctggaaagagaaatcaattatgtccctgctatccaaggaatgtgacattcttgaaatatcagaaatatggtgctatgtgagctaaaatcatatcttcctaataagttatacttaatatgaacacaataaacatagttcaatagccattccttaatttaggcaatgaagtaagatgaaatgtaacaagaatgtttagtatcaaaaatacgtaagtattttataacgttatatttacttagaaaattaaatattattctggtctgcctacaaacaactgggaagttactatgattgaacagagttgggtggcttgatataaaataataatataccatcagcaaccaattgaaaataaaatgggaatacaaatctctttcccaaaggcaacaacacgaaggtaggaatagccacaatgaatgtgcacgacccgtatatctttcccatttcatgtttttctccctatcaggtttgtaccttaactcgagaagataaccgctctttgggtgttattcctcaagatgagcagctccatgtgctacctctttataagctttcagacacagatgagtttggctccaaggaaggaatggaagccaagatcaaatctggggccatcgaggtcctggcaccccgccgcaaaaaaagaacgtgtttcactcagcctgttccccgttctggaaagaagagggctgcgatgatgacagaggttcttgcacataagataagggcagtggaaaagaaacctattccccgaatcaagcggaagaataactcaacaacaacaaacaacagtaagccttcgtcactgccaaccttaggtgagccctatggaacctggtaatctctgcacaactttgatggatagatgtgtttggactttgccttgccttatttgtttagagttaaaactaagacactgaatatatttttacatataccagaaccaaaagtcaacaaaaaagtgacccatcagtatttcttggtaactttttcgacttatccttttttttttttttgagagggagtcttgctctgtcacccaggctggagtgcagtggcgcaatcttggctcactgcaagctctgcctcctgggttcacgc

SEQ ID NO: 61182 - DNA, 6396 bp, Homo sapiens
accctgtctctactaaaaaatacaaaaaattagccaggcgtggtggcaggcgcctgtagtcccagctactcgggaggttgaggcaagagaatggcatgagccgagatcgtgccactgcactccagcctgggggacagagcgagactccgtctccaaaaaaaacataaaaataaaaattattagatgaaaaattatacaaaactacataaaatttttaattcgtgtttgtgatttgaaatgaacagaacaaaaccaaccaacacaacatcagcgttttcttatataattctttgtacttgtctttgaaaatactttttaaaaggcaacccctaccaaaagtaatttgtatttttcttcacatttggtgtccttgtttagggagtaacactgagaccgtgcaacctgaagtaaaaagtgaaaccgaaccccattttatcttaaaaagttcagacaacactaaaacttattcgctgatgccatccgctcctcacccagtgaaagaggcatctccaggcttctcctggtccccgaagactgcttcagccacaccagctccactgaagaatgacgcaacagcctcatgcgggttttcagaaagaagcagcactccccactgtacgatgccttcgggaagactcagtggtgccaatgcagctgctgctgatggccctggcatttcacagcttggcgaagtggctcctctccccaccctgtctgctcctgtgatggagcccctcattaattctgagccttccactggtgtgactgagccgctaacgcctcatcagccaaaccaccagccctccttcctcacctctcctcaagaccttgcctcttctccaatggaagaagatgagcagcattctgaagcagatgagcctccatcagacgaacccctatctgatgaccccctgtcacctgctgaggagaaattgccccacattgatgagtattggtcagacagtgagcacatctttttggatgcaaatattggtggggtggccatcgcacctgctcacggctcggttttgattgagtgtgcccggcgagagctgcacgctaccactcctgttgagcaccccaaccgtaatcatccaacccgcctctcccttgtcttttaccagcacaaaaacctaaataagccccaacatggttttgaactaaacaagattaagtttgaggctaaagaagctaagaataagaaaatgaaggcctcagagcaaaaagaccaggcagctaatgaaggtccagaacagtcctctgaagtaaatgaattgaaccaaattccttctcataaagcattaacattaacccatgacaatgttgtcaccgtgtccccttatgctctcacacacgttgcggggccctataaccattgggtctgaaggcttttctccccctcttaatgcctttgctagtgcagtgtattttttcaaggtgctgttaaaagaaagtcatgttgtcgtttactatcttcatctcacccatttcaagtctgaggtaaaaaaataataatgataacaaaacggggtgggtattcttaactgtgactatattttgacaattggtagaaggtgcacattttaagcaaaaataaaagttttatagttttaaatacataaagaaatgtttcagttaggcattaaccttgatagaatcactcagtttggtgctttaaattaagtctgtttactatgaaacaagagtcatttttagaggattttaacaggttcatgttctatgatgtaaaatcaagacacacagtgttaactctacacagcttctggtgcttaaccacatccacacagttaaaaataagctgaattattatttcatggtgccattgttccaacatcttccaatcattgctagaaaattggcatattcctttgaaataaacttatgaaatgttttctctcttaaaatatttctcctgtgtaaaataaatcattgttgttagtaatggttggaggctgttcataaattgtaaatatatattttaaaagcactttctatttttaaaagtaacttgaaataatatagtataagaatcctattgtctattgtttgtgcatatttgcatacaagagaaatcatttatccttgctgtgtagagttccatcttgttaactgcagtatgtattctaatcatgtatatggtttgtgttcttttactgtgtcctctcacattcaagtattagcaacttgcagtatataaaatagttagataatgagaagttgttaattatctctaaaattggaattaggaagcatatcaccaatactgattaacattctctttggaactaggtaagagtggtctcttcttattgaacaacctcaatttagtttcatcccacctttctcagtataatccatgagaggtgtttccaaaaggagatgagggaacaggataggtttcagaagagtcaaatgcttctaatgtctcaaggtgataaaatacaaaaactaagtagacagatatttgtactgaagtctgatacagaattagaaaaaaaaaattcttgttgaaatattttgaaaacaaattccctactatcatcacatgcctccccaaccccaagtcaaaaacaagaggaatggtactacaaacatggctttgtccattaagagctaattcatttgtttatcttagcatactagatttgggaaaatgataactcatcttttctgataattgcctatgttctaggtaacaggaaaacaggcattaagtttattttagtcttcccattttcttcctattactttattgactcattttattgcaaaacaaaaaggattacccaaacaacatgtttcgaacaaggagaattttcaatgaaatacttgattctgttaaaatgcagaggtgctataacattcaaagtgtcagattccttgggagtatggaaaacctaatggtgcttctcccttggaaatgccataggaagcccacaaccgctaacacttacaattttggtgcaaaagcaaacagttccagcaggctctctaaagaaaaactcattgtaacttattaaaataatatctggtgcaaagtatctgttttgagcttttgactaatccaagtaaaggaatatgaagggattgtaaaaaacaaaatgtccattgatagaccatcgtgtacaagtagatttctgcttgttgaatatgtaaaatagggtaattcattgacttgttttagtattttgtgtgccttagatttccgttttaagacatgtatatttttgtgagcctaaggtttcttatatacatataagtatataaataagtgattgtttattgcttcagctgcttcaacaagatatttactagtattagactatcaggaatacacccttgcgagattatgttttagattttaggccttagctcccactagaaattatttcttcaccagatttaatggataaagttttatggctctttatgcatccactcatctactcattcttcgagtctacacttattgaatgcctgcaaaatctaagtatcacttttatttttctttggatcaccacctatgacatagtaaacttgaagaataaaaactaccctcagaaatatttttaaaagaagtagcaaattatcttcagtataatccatggtaatgtatgcagtaattcaaattgatctctctctcaataggtttcttaacaatctaaacttgaaacatcaatgttaatttttggaactattgggatttgtgacgcttgttgcagtttaccaaaacaagtatttgaaaatatatagtatcaactgaaatgtttccattccgttgttgtagttaacatcatgaatggacttcttaagctgattaccccactgtgggaaccaaattggattcctactttgttggactctctttcctgattttaacaatttaccatcccattctctgccctgtgattttttttaaaagcttattcaatgttctgcagcattgtgattgtatgctggctacactgcttttagaatgctctttctcatgaagcaaggaaataaatttgtttgaaatgacattttctctcataaaactggtcatctaacattatttctacccctctattatgttttactgtaatgatcaccttttcttatacctctcttataacacttaaattgggttttaaatctgcgtttgttcatagtatgatcattgaattcactgatacatgacctcctaatagcccactcagttcataatatgctacaaacttaccaattttaatgagagaataattcctgcctattgcagaatcgtacaaaatatcatgctgcccttgatattccatttcttttttcttttttcttctttttttttttttttttgtagagactgtctcactatgttgcccaggctggtctcaaactcttggccccaagagatcctcctgcttcagcctcctaaagtgcaaggatgataggcatgagccactccacctggcctgaaattccatttctaatggctcttcagccattgttgaaatttcttttttttcttgtgcttgtctgtctcacctacctcttgtttccaattcatctacaaagtaccaaatagaccaggtcataaacataattgaaatacattcttattggaaagtgaggctatctgaaaaggcatagctgtaggcaaattattgcaacatgtttacatcttaaataactttccaacatctttgttactcagtctgcatgttgataatttcatttattaaatatagaacttcaactagatgagatccataagtaatttacttaagacataaactcaatacatatttaattgaatgcatacccttgtgtaaataagctactgatttaattcacatgactaacctactttctaacattattacagtggatttctactgataacatttcacaatagcgtgtgtgaaaataaccctgaaccagtttttaaaacaaaaattatattgactttttatctgggacataggactttattgcacgaaacttccactgacaggggcacagcatttccttcgcatgtgccaactaaatcagtagctgtatgcaaactttaatagatttatagctactaccttcaatttcacaccttgatgcatggaaatcttttttatctagatttaatacaactgtgagttttgatcttttatagagatttatgacaagagaattttgaaataagttcatatagtagtggcctctcatagcaatggaagacacctgagaaatcacagagctcaatcactggggcccagagagcagatcttaatgctagattgtaattagaatttaaatagatgaaggccactttgtgttgagaactgtagggaaacttgattttcttacccaaagggtattttatcactgggaaataaacaagtatcagatgcttataaagtataggctttcaattcccctggaactagtgttaagcatatacaagaagttataaaggcatggatgattgaaataattaaggaaagtgtatttccactgtatatactacctagccatgcttacaaagttcattcatgccctttgcctagttagcctcacaattaagccccagcatagtttattttgatgtagctgtctacatgtattggaatactattttattgcacatagcttctaaacttgcccataagtatattgaacaccagttgtgtggcacactcaaccaagtgaatgtaatcaatacgtaattgctgaaggagtctggatttatccaaatcaaattatgctccatgttgagctacctcttaacagctttagaaaatgatgtcatccattgctctggaatgcagttcagaaagtcagactcagtatgtccatcagaaattaaatttgtgtgttttcatagaatgtattgagatttattgaaatgttcttgcttttcctatatgtataaaggggaaactgagttcctttattacttcctgagatggtagagctgacttttatgcaggatatcatcactatttttgtctgcattgatagctacaaattttattattatttttttggtacaaattttaattctctacctttcagtgtctggatgactttttaattccctatttcttctgggcttccaatcatataccattgtttgcttcaaaagggatatattatactctctctagtaatccaaaggtattcctaattttgccactcctcattttcgcttctctttaagggccttatagtatgttctaatttctcatttggtagtatgcaacattcaatatttctagctctaaagttccatcattaattatttctttttttctttttttttttctttttttgagacggagtcttgctctgtcgcccaggctggagtgcggtggtgtgacctcagctcactgcaacctccgcctc

SEQ ID NO: 61183 - DNA, 2355 bp, Homo sapiens
taatcccagcactttgggagaccaaggcgggtggatcacgaggtcaggagttcaagaccagcctggcctagatggtgaaatccccgtctctactaaaaatacaaaaattagccgggcatggtggcagacgcctgtaaccccagctacttggtaggctgaggcagagaattgcttgaacccaggaggcggaggttgcattgagccgagattgtgccactggactccagcctgggtgacagagtgagactccatctcaaaaaaaaaaaaaaagcaaaattgttggcatctctaagacagagcaagactccctctctaagagatagtagtgtctcccacttaattgaattcgttttgttttgtttgctttgctttgattcttgccacgtaaaatctgtgggtcttgacccagagatttgctcagacagttaagaaaaataataagatgtatttgtaaatttttacataatgaaaaatgagatgtatttgtaaaattttaaaataacctctttataaatacgtttataaatataaagaggtaggatgttttggctaattagcacattctgggtcatacacacacacacacaaacaggccaaacactctagatagtcaaataaattccccttttggtgattcagttcagtaatggtgattcagttcagtaactgcctatcctcatcaatgcttgtttgtgatgatgaaatagttgacaaccgggactttacaaaaatagctcctgaaaaaaattaaatattttattgcaatatatgttcatattttttttaacttttatgaaataacattgtgataggtgctttaagaaaaatatttttccagaagtggtttatagtataaactaagggcagtttttacattgtgatgtgtgggtggatggtcatatttagttaggttattaagaaatcatgaagtgttccctaacaagaaacttgcaaagctatttggcaggaagaaaatcattaacttctagtttatttattttttttctcatgctatacgcttaattaccaagtaaattcacttgcataccattaccttaattcaaaggagaagccagaatgtttatcattggtgggagtaaaatatacacagattctttaccatggtgaaatagaataatactgaattcccaatacagaaatactaatttcataagctaatattcctatcttttagctgacttctttctctcttcaggatatatttactatttattatttacctttgaatttttgatttgggggatttttacctattgccatcctactatcttaagtatcctgtacaatgaaatatcttagcaaggaaacacttttaaaacttcacaaatatccaatttcattcttaacatatgggggaagcagtaaaagaaaaagcacttcaccacgtagaagagaaagtgatcattttaattaagataatttcaattcattatcaacatttaatcctctgcaaacaagggaacacttactagcagtacttgaagacttgtgagttggaattgcatgttacttgaaagatctaattaagctaaattttggtgcacagcaggttgtacatgatttcatgtttatgtagcaaaatgcattgaaatgtattagtgttgaaacatacatgtaaaggtagttgtggaaattgttatattttccttgtgtgtcatttatttagagcataaaggttttttttattcagcctaactgaataaggctaaatgaatactgtaattgaaaatatattttaaatctttgtcatgagtttttttaaaaaaaactattgcaaattgtatcattcctgattacacagaactttgtgggtggttttaaataaattttatacttctattttgcacctgatagtctaatttttctttccttctaaaaatcacatttaaaagttttaatattcaataaaattcacacattttaactacaaaggactataagatttaatatttggagatgactaaatgtatgcatgtgctcaccataaaaccaaaatggctagcatttgtgaaatcctcattatgtgccagaaaccttacattttatgtaaattatgtaattcccatggtgattctattaaggactcttatcagcctcattacatagatctattctgaggcttgaagttattaagttcacagccctagtaattggcagagctgttactctactcatgtccttacttggctttataattgtttcaataaacttaatacttttccttaagtctgctaaatttaaatttaattctgaatgcagtttgccaatatattttactttttttactttttttttgagacagtctcacactgtcgcctgggctggagtacagtg

SEQ ID NO: 61184 - DNA, 1049 bp, Homo sapiens
tgtacccataacacattactagtatcttaagatattaaagaaatttcatgagaaaatagttttgtggtcaaagtttgaggaatgctgagttcctttactatacttaggactttcctaagcctttattatgccagtatggatattgtattagtaagaacactcatctaagggatcttgatgaaataggctaaaaataatttatagtttaattttagacctgactctcaagatgtacatgtatatcttctaacataatatgaaatttttaacattctgggttagttttaagtagtcatattcagtttttagatgatttcaaatcattaccttaatttgatgttgattttgttttatagccagctgttgcactgcctacaagccttagcctgtctactcctcagccaacagcacaaataactgtatcatatccaacaccaaggtccagtcaacagcaaacccagcctcagaagcagcgtgttttcacaggggtggttacaaaactacatgatacgtttggatttgtggatgaagatgtattctttcagcttaggtaaacttaatgaggtcttgtcacatggcttcttgcatttaccacaaaacacctgtttagttgtggcagaaattgtatgtagcccaggctggacacagttgtgcaatctcaagtcgactcactgcagcctctgcctcctgggttcaagcaattctcttgcctcagccttcggagtagctgggatgacaggcgtgcaccaccacactcggctaatttttgtatctttattagagaatgggatttcaccatgtcggccagattggtctttaaactcctgacctcaagtgagccacccgcctcagcttcccaaggtgctgggattacaggcgtgagacactgcgcctggccagtgtagctatgattttctttccttttttatttgagacagagcctcactcggttgccaaggctggagtgcagtggcgtgatcttggctcatcacaacctccgcctcctgggttcaagtgattctcctgcctcagcctcccgagtagctggg

SEQ ID NO: 61185 - DNA, 1032 bp, Homo sapiens
tttattattattattattatactttaagttttagggtacatgtgcacaatgtgcaggttagttacatatgtatacatgtgctatgctggtgtgctgcacacccatctactttttaaagagctttccaggcttccatttctgatatagtttactgtttatttttttttgagatatggtttactttaaagtactaactatgtaaatcattttggggagaaatctattttaattgtatttatatttaactttttttttctttttttttttacagtgctgtcaaagggaaaaccccccaagtaggtgacagagtattggttgaagctacttataatcctaatatgccttttaaatggaatgcacagagaattcaaacactaccaaatcaggtacagaaagtattgagttaggtattatagaagcttggtaaatgagtcttctaattcacaaagattttttttcttattctttcattttttaattgaagaatcagtcgcaaacccagccattactgaagactcctcctgctgtacttcagccaattgcaccacagacaacatttggtgttcagactcagccccagccccagtcactgctgcaggcacagatttcagcagcttctattacaccactattgcagactcaaccacagcccttattacagcagcctcagcaaaaaggtatctttgcttttgtttcaggcaaatgtataactttttagttgttgataatgtaactatgcttttaattacaaaaaaaggcagggatttcaagaaaacttgaagcctaaaaatcctgaataggacacatctacttccatagctatgtggaagtatttttttttctcttagtgataagaaattaaaagatacacctttgtggacttaaatatcaaaactattaaattacttattaaaccataccacatcaaatgaatttgctgggttttaagtttttttgcaaattgattgtttgaaactccagatgtgttctttttcgctctgtcgcccaggctggagtgcagtggtgcaatct

SEQ ID NO: 61186 - DNA, 1040 bp, Homo sapiens
tttagtcactctcagttatttaactttgttcctctaattttatcaggtaatgccttcgaactttgtttagacacgctaaacgtttttttcttttatcttttaaagctggtttattgcagcctcctgttcgtatagtttcacagccacaaccggcacgacgattagatcccccatcccgattttcaggaagaaatgacagaggggatcaagtgcctaacagaaaagatgatcgaaggtatattttctaaagtgtactgtggatggtggcaatggttgtacaacaatggaaacatagttaatgccactgaactatgcttataatataaaattttaaaatggtaaattttatgttatgtctattttactacaatttttaaaaagttaaacaaatatactgtggattcttgcttatattacctactctatttacttcattgaagagcttttccataatattagaaatattagtaattttagaaaaatttgctttcagtcgtgagagagagagagaaagacgtagatcgagagaaagatcacctcagaggaaacgttcccgggaaagatctccacgaagagagcgagagcgatcacctcggagagttcgacgtgttgttccacgttacacagttcagttttcaaagttttctttagattggtaggttattccccacccattgttttcttgagttactaatttcatataatttgatagaatatgtcacagaggtatttttcttgcaagattgatttcccgacagttagtgttcttcatataagggcagaaatgcaatttgaaataacttaattatctacaatgctgcattatttttatacccccatgaaggatatcgactggtattgaaaaaggcagcccctcaaggaaattcctctgtcataacgttattcccctaaagttagaatcagttaagatctagacttactgataacttgaagatcatgtatagtccattgtgtatgataaagcaataatagagtagtaaactgattaatttcaagtttagccctggcagtgtagtata

SEQ ID NO: 61187 - DNA, 4320 bp, Homo sapiens
atttttgtatttaattttgaatgtaagtatgcttgatctaggaacttactatagtaaaataaaagttataatttttctacactcaaaaacctgattgaggggcgtacagaaatactaatactctcattgctgttttgtatctattcaacatgaaccataattttcaagtaatccacagttccaactgaggaaaacctgcttttgtacagatcttttctggagctgagattcaagttatttcaaagcgtcttctgtaacaaaaagtatcaaaataaggataacactgagaatactatttattcaaagctttgcgtatataaatttgaacgtaatattttcatatgtctctatgcaaatctatagctcattagtaactgactttgtcttttttcagcttactttttactatatccagttatatttgctacagaattaaatgtttgtgtaaccttttttattaaggctatttattcactacttatgtctgtttttcagtcccagttgtgacatgatggaactaaggcgccgttatcaaaatttgtatatacctagtgacttttttgatgctcaatttacatgggtggatgctttccctttgtcaagaccatttcagctgggaaattactgcaatttttatgtaatgcacagagaagtagagtccttagaaaaaaatatggccattcttgatccaccagatgctgaccacttatacagtgcaaaggtttgtattcagctgtgatatgcagcttaaatttcttagcagttattcataataaaagggtatgtagaattatccttcagaaagtgtttgttaggtagacccgaatacctgttttcttcttaactgcttgatcctattttggttacataatttaatttaagctctctttgcctcatctcttgagctgtaaaactagttattctaacattttaaaccttattaaaaatgtgaagataaagttgatattaatgagatatttggaatgttgtatgacttctggtagcctcagataaaacttaatgttagatgaatgcactaaatgtcaatcttaagggaaacattcagtatattgtgtatagtctatagttttgtttaaagcattgtgtgactgaaaaagcatcccttcaaaagttaaaactaagtaattataaggtatctaggcctggcgtggtggctcacgcctgtaatcccagcactttgggaggctgaggtatctaatactgtttctgctatagtattacttcctatttttatttaaatttcagacatcttatatttaaagataattagtagtgcttctcattttttcacattactttagacttttgacaggattgaattatttgactataataggtaatgctgatggctagccctagtatggaagatttatatcataagtcatgtgctcttgctgaggacccacaagaacttcgagatggattccaacatcctgctagacttgttaaggtaaaaggacacatttgttttaactttagatgtattcactttgcttagctgtaactttgtacacataaaatctaaagccctacattttaatatttgttgattaatgagtaattttagtattaaggcacccagaatttaatgatgtagatgtttttctcattgcagattacaactatatcttatttgtacgctactagttcaacagtcattttgatgttttatatttgtaacatagtagaatattagtggtaataggattcagagtgtctttggatgttgttgaagtttgaattatagcttgtttctttaaaagaactctatctgaagaaatattttaaaaggatgagttatgatgtgtgtaaatcctattccattgctgaaatgcagtgtggaacacaatgaactgaactcttccttgactgacagataccagaggtagtaaaaatgatattggaaaggtttgtacctttccttctcaagtatcttattggtaatttgacagggtgcgtaatatatgtaaatgattctttgttttgaattagtttttagtgggcatgaaaggcaaggatgaagctatggccattggaggccactggtctccttcgttggatggaccagacccagaaaaagatccctctgtgttgattaagactgctattcgttgttgtaaggctctgacaggcattgatctaagtgtgtgcacacaatggtaagtactaattcatttcttgattagaagtgttttactgatagtttatgtagttgttcttatcgatcagccttttccccccggcttattttagcaaccctggtcaatgcaggtaatctcaaaggaaaatccccatttgtagctaaagtttatttggtgccaaaatgttttgggggaaaagggattaagaactaatcaaaataaactgaaaatttaaatgttttgttatgttgtactttggaagttggatgtatgttgaaaatacttttcatttcatgcatagctggagaagatcgtcaagagagaacttcatttcattataattcttttgttataaaatgatgtagttgcgattatttttgttcagccatattttctcttgaggcttatttgtcctgtgtattttagtgtatctcttgtgacttaatttgagaatattcttttttagcacatgaaatctgaacagctatccagcttcttcaggtattctctaaaatgcgggtagctctgtaatcaaacttgaaaatgccttgggggaacatattcttcctttaacttattaaatattgtacaaatgtaccaaaagaggaactatggcttctataatttttttttctttagaccaacctcaagttcttgcagcaaaatttctttacttgatgtgctacaagtgaactagggtctttaaaatgtattttagaattttttttccaacatgcttcttcccttgcaacaggtaccgttttgcagagattcgctaccatcgccctgaggagacccacaaggggcgtacagttccagctcatgtggagacagtggttttatttttcccggatgtttggcattgccttcccacccgctcagagtgggaaaccctctcccgaggatacaagcagcagctggtcgagaagcttcagggtgaacgcaaggaggctgatggagaacaggcactgaacgctaatccctttttctatttccgcttctcacaggcacaggaacacaggcacaaatgcacaccacacactacataataaacacacatggaggaacataactggtaacagcgactggtaatccagctttcagcagtatagttgtatgttcttttctcttaaaatttctgtcttattatcctaactttaagagtgctgagacctcaaaggaaaataagttgtgcttaaattgcacagaattttgtttttatcataggtctagttgctggaatctgggaccagttgttgaacaagattcagtattaagccattttaaacattttgccattttctaaaatttaaaaaattttctttttcatggtcatcagttctagtcatggatatttgaaattggacaaccacaagtctgagagatttgaaatttcaggctatgtggcaacgtctttggtacatttcaaaggtctgactaaatcagtctttgggtggcttgaaaattgaggcaagatcacacactgtgtggtttgtggagaccggcagtgtttgtgcatccctgatatcctttgtgttgtaatttatcacccttttgtgtttcacagatctggctttgattggctgatgagtgtctttgtgatcagttaaaagtggtagaatgtatgtacgtggacttgcctaaataataactttaggagaagacaatctgaaacatttgtgaccttgcacagatcagcaacagacttttaaaaataaattatttttattttaaggtttcataatagtaattacattcttaactttgtatgtcaggatgaagaagagaaggatgatggtgaagctaaagaaatttctacacctacccattggtctaaacttgatccaaagacaatgaaggtaactttgataaggatggattttatttatttttttcaattaaaaagttctttctgagatggagtctcgctctgtcgcccaggctggagtgtagtggcgcgatctcggctcacttcagcctctgcctcctgggttcagtagattctcttgcctcagcctcctgagtagctgggattacaggcaccctgccaccacgcctggctaatttttctagttttagtagagacaaggtttcagaatgttggccagtttggtctcgaactcctgacatcaggtgatccacctgcctcagtctccca

SEQ ID NO: 61188 - DNA, 1005 bp, Homo sapiens
tgttcccccaaggcattttcaagtttgattacagagctacccgcattttagagaatacctgaagaagctggatagctgttcagatttcatgtgctaaaaaagaatattctcaaattaagtcacaagagatacactaaaatacacaggacaaataagcctcaagagaaaatatggctgaacaaaaataatcgcaactacatcattttataacaaaagaattataatgaaatgaagttctctcttgacgatcttctccagctatgcatgaaatgaaaagtattttcaacatacatccaacttccaaagtacaacataacaaaacatttaaattttcagtttattttgattagttcttaatcccttttcccccaaaacattttggcaccaaataaactttagctacaaatggggattttcctttgagattacctgcattgaccagggttgctaaaataagccggggggaaaaggctgatcgataagaacaactacataaactatcagtaaaacacttctaatcaagaaatgaattagtacttaccattgtgtgcacacacttagatcaatgcctgtcagagccttacaacaacgaatagcagtcttaatcaacacagagggatctttttctgggtctggtccatccaacgaaggagaccagtggcctccaatggccatagcttcatccttgcctttcatgcccactaaaaactaattcaaaacaaagaatcatttacatatattacgcaccctgtcaaattaccaataagatacttgagaaggaaaggtacaaacctttccaatatcatttttactacctctggtatctgtcagtcaaggaagagttcagttcattgtgttccacactgcatttcagcaatggaataggatttacacacatcataactcatccttttaaaatatttcttcagatagagttcttttaaagaaacaagctataattcaaacttcaacaacatccaaagacactctgaatcctattaccac

SEQ ID NO: 61189 - DNA, 1133 bp, Homo sapiens
accacatttttaaaaagtcacacgaaaggctgggcgtggtggctcacgcctgtaatcccagcactttgggaggccaaggcaggctgatcacgaggtctggagttcgagaccagcctgaccaacatggtgaaaccccgtctctacaagtacaaaaattagttggatgtgattgtgcgcatctgtaatcccagctacttggggggctgagacaggagaattgcttgaacctgggaggcagagcttgtggtaagccgagatcacgccactgcactccagcctgggcgacagagtttggctctgtttcaaaaaaaacaaaaaacaaaaaaaaaaaaaacacacaaaatataattgttaattgtagctagtttgtttcctatttcaatatccgctgccccccgccccccgccaccttttttttttccgtgtttttctgctccatatattcaggtaaatgacctccgaaaagaattagaaagtcgagctcttagttccaaaggattaaaatcccagttaatagcccgattgacaaaacagcttaaagtagaggaacaaaaagaagaacagaaggagttagagaaatctgaaaaagaagaggatgaggatgatgataggaaatctgaagacgataaagaggtatgtactcaatctattattatactctatggtattaatattcatgtatagggtgttcttggaatacgtgagttaagattatgtgtgtgtaagcttttatttatttaatttaattaattaatttatttatttgagactgagtctcgttctgttgcccaggctggagtgcagtggagtgatctcagctcactgcaacctccgcatcccaggttcaagctattctcctgcctcagcctcccgagtagctgagattacaggcgcccgccactacgcctggctaattttttgtatttttagtagagacggggtttcaccatgttggcaggctagtctcgaactcctgaccttgtgattcgcctgcctcagcctcccaaagtgctgggattacaggcgtgagccaccgtgcccagctatttatttattttttgagatggagtttcgctcttgttgcctaggagggagtgcaatggcacgatcttggctcaccacaacctccacct

SEQ ID NO: 61190 - DNA, 1159 bp, Homo sapiens
tatgctttctttggacacattcatcagtaacacatgggtcttttggccttttcccacccatttgtatattggtttgtggggataccttgtcacttagttttgttatgaatgctatcagtttttgatttttatatctatattgctttgtctttttagtgtgaggtttcaggaagatctaaaacctatgctaccactactattttccgagaattttctaatttatataatctcaatatagataatttttccccctctttacaaggcagtttcttatgctgggaaatccaaaagagagttaggagccatcaaagcttactactcttagtgaatttgagctttcctcccttctcaacgcttatggtttgtataagtaccatgaagagtcatgggaattttgttccttttatttatgagatatatattcaatatatattcatcttgcacatgtatatacatcctacttgcagatttaaccttgacttgaaatttgaaatatttaggaagaagaaaggaaacgtcaagaggaaatagaacgccagcgtcgagaaagaagatatattttgcctgatgaaccggccatcattgtacatccaaattgggctgcaaaaagtggcaagtttgattgtagcatcatgtctttgagtgtcctattggactacagattagaggataataaagaacattcatttgaggtaatgttttaagtttgaaataagatccatataaggtccacacattatgactagttaatatatctctatctctgaaatcttttttctttgtttttcgcttttcgtggttttttttgttttgttttgtttttgtttttttttgagacagagtttcactctgttacccatgctggagtgcattggcatgatggtggctcactgcaacctctgtctcccgggttcaagcaattctcctacctcagcctcctgagtagctgggattacaggcacctgccaccacacccagctaatttttgcatttttagtagagacggggtttcaccatgttggccagcctggtctcgaactcctgacctcaggtgatctgcccgcctcagcctcccaaagtgttgagattacaggtgtgagccaccatgcccgtatctctgaaatctctttgaatgcctctttcattctttcttttttga

SEQ ID NO: 61191 - DNA, 1042 bp, Homo sapiens
tgaaaccctgtctctactaaaaatacaaaaaaattagccgggcgtggtggcgggcgcctgtagtcccagctacttagcaggctgaggcaggagaatggcgtgaacccgggaggtggagcttgctgtgagccaagatcgtgccgctgcactccagcctgggcgacagagcgagactccatctcaaaaaaaaaaaagtttgataagtttacataatcgttgtatgtggcaagtttttatttgctaaattactctgctagctttattatttctgttgaaatttggctaggttcatgttgatatctttttataggtttcattgtttgcggaacttttcaacgaaatgcttcaaagagattttggtgtccgtatatacaaatcattactgtctcttcctgagaaagaggacaaaaaagaaaaggataaaaaaagcaaaaaagatgagagaaaagataaaaaagaagaaagagatgatgaaactgatgaaccaaaacccaaacggagaaaatcaggcgatgataaagataaaaaagaagatagagatgaaaggaaggtctgtaataacaacctgctttagaagctttcagttactcttctaggttataaaggttgatgttgatttccatcagaatattagatgtaaaagccaaactgaaagattttactatattagaaaatcaagtctttgagaccatcacagctaacacagtgaaacctcgtctccactaaagatccaaaaaattagcctgacatgatggcacatgcctatagtcctagctattggggaggcagaggcaggagaattgcttaaacctgggaggtggaggttgcagtgagccaagcttgcaccactgcactccagcctgggtgacatagcgagactccatctcaaaaaaaaagataagaaattcagatcttcaaattaagccaatatgagcatctacagctagttttctaatactttattcttaaaatttttttttcctttttctgagacggagtcttgctctgttgaccaggcttgctgaagtgcagtggcgtaatc

SEQ ID NO: 61192 - DNA, 1048 bp, Homo sapiens
ggatgaggaagaaatgaccaaacgagatgacaaaagagatatcaacagatactgcaaggagaggccctctaaagataaggtgtttattgaatactgtattctttataatatggtgatatcttacatcatctaaacataacacagttgtgaagtttattagtccttatacatctttattaccactaagtaaaattctgtcagttgtttttttgtggctatgtcagataactagtatgtctgattcttttctctcatattcgtataccagataaactcattttagctaggatgaggcaaatatcttattagattattgctatcttatgcacagtctccgtttctcactttttgggggtaaaaaatttgaaatttgaatactatgttttctacttctccattttcttaggaaaaagaaaagactcaaatgatcacaattaacagagatctgttaatggcttttgtttattttgatcaaagtcattgtggttaccttcttgaaaaggatttggaagaaatactttatactcttggactacatctttctcgggctcaggtaatctatcttgtgaatatttaaaaggaaaacattttttaaaagttacctttccagtgaaaagttaatagaacctctgttgactttttgatatattaaagcaatataagggccaggcgtggtggctcacacctataatcccagcaggttgggaggctgaggcgggcagatcagttgaggccaggagtttaagaccagcttggccaacatggcgtagctccgtctctactaaaaatgcaaaaattagctgggtgtggtggcacacgcctgtaatcccagctactcgggaagctgagacaggagaatctcttgaacccaggaggtggaggttgcaatgagccaagatcacgccactgcactccagcctgggtgacagagtgagactccatctcaaaaaataaaaataaagcaatataacacaagccagttgtaaaacacttcccttctccctctccctctgtttctactccttaggactacaatatataaaattct

SEQ ID NO: 61193 - DNA, 1324 bp, Homo sapiens
ctttttaacaatgaagttttttttttcaaaagtaacttggatcttactcaattccatggatttccatcataagtgaaaattacagctgggcatagtggctcacacctgtaatcccagcactttgggaggcggaggagggtggatcacctgaggtcaggagttcaagaccagcctggctaacatggtgaaaccctgtctctccaaaaatacaaaaattggccaggcatgatggcgggtgcctgtaataccagctactctggaggctgaggtaggagaatcgcttgaacctgggaagtggaggttgtagtgagtcgagatcacaccactgcactccagtttgggcgacaagagcaagactctttctcaaaagaaagtgaaaattatatcatagtttttctaagagaatcaagaaatgtattttcatctctgtattttgtttacttgcatgcataacaggtaaagaagcttcttaataaagtagtgctccgtgaatcttgcttttaccggaaattaacagacacctcaaaagatgaagagaaccatgaagagtctgagtcattgcaggaagatatgctaggtctgagtaatattaagattttgctttttaataaatatactagtaattaaagaagaaaaataacttactaaaatatggtatattttatattataggaaacagattattacttccaacaccaacagtaaagcaggaatcaaaggatgtggaagaaaatgttggcctcattgtgtacaatggtgcaatggtagatgtaggaagcctcttgcaaaaattggaaaagagcgaaaaagtaagagctgaggtagaacagaagctgcagttactagaagaaaaaacaggtaagggtcagctttgaatatgttaatactttcagcaccctgctgggacacgtatatgtttatgtgtgtacatacatatatacgtacctgtgtacacatttgcatatgcataccagatattttcatcgaagtacataaggaactttttaaaattttttattatttatttgtttttaagacagggtctcactccgttacccaagtggagtgcagtggcacaatctcaacttactgcaaccactgcctcccggatccaagtgattctcccacctcagtctcccaagtagctgggattacaggcatgcgccaccatgcccagctattttttgtatttttagtagaaatggggtttcaccatgttggccaggatggtctcaaactcctgacctcaagggatcacccactttggcctcctatagtgttgggattacaggcaggagccaccatgctctgcagggacctttac

SEQ ID NO: 61194 - DNA, 2105 bp, Homo sapiens
ttcagaccgggcgcggtggctcatgcctgtaatctcagcactttcggaggccaaggtgggcggatcacgaagtcaggagattgagaccacagtaaaaccccgtctctactaaaaatataaaaaaactgcgagactctgtctcaaaaaaaaaaaaaaaatagagacggggtttcaccatctttcccaggctggtctccaactcctgggctaagcagcccacctatcttggcctctcagagtgctgagattacagtcatgagccaccacacctgccccattcactgcatttttagaccccatttattcttgggcagaattgaggtaaatgcttcgtcaccattaattttaagatactaaaattaatttattgttctttatcactagaaaaaagtataccaaactgaataccattgtactctaaaatcaaagtaacatttaagataatctaataaaatgtattttttccttctctattgtcttataggataatgtaaagaatgaagacaaagatcaaaaatccaaggagaatggtgccagtgtatgataaaatccatgtagtgatgaggaatggtgttaaataatgtaatatataaaaatcatgatataagaatgtttgaaggtgatgcatgtttgattttagtagtataaatgtattttagttcaaatgatgtataaagttttatgaatgtgagtttctgcttttgaaaattgcttgtaattcctagccttcaaattattaaacactccttgagtgaaataattttgcattgcaaagtgttttaggatgaactttgttatagttttaactccaataaagttcatcagtttaattgactgtagtatttaattaccaaatttcttttattaaaatgcctagaaatttttaatttatagaattattaggttttaaaatttttagttcatctgttaaaatttcagtcaaaatcataaaatagcatgatgcttaatttttgcaagttttttgaaactttttgttttttttactcatcaccaaaaaatcccctcttgatcagtctctaaaagcattcattaaaaattcagttcaggccgggcacggtggctcacacctgtaatcccaacactttgggaggccgaggcaggtggatcacctgaggttaggagttcgagaccagcctggccaacatggtgaaacccggtctctactaaaaatataaaaattagctgggcatggtggtgggtgcctgtaatcccagctacttgggaggctgaggcaggagaatcgcttgaacccaggaggcggaggttgcagtcactcaggatcatgcagctacactccagcctgggcgacaagagtgaaactccatctcaaaaagaaaaaaaaaaaaaatcagtttatttgaaagacagtatatcagaaagaaagaagcaatagagaactagtattgttctttatgggttagactttacataatattagttgtcctgatgtcaatgttactgctttcaattaatttttctactttcccagaatagcatctatattccttttaattttgagggtttaaaaaaaaatgcagtgtatgtcaaatttacagtttagtaccaagccagtagatgtcagtatgatgccttaaattaagtcttctttaattaaagatatttttttaaattaacctgtgtacttccttcagaattttagtggatacatgaggtgacttaactgtagaataaaaacggtagtaaatatgagtggttctcaacagagggtgaatttatcccttagaggacatttggcagtgtctaatgaggtttttttggtgtcacaactgggtgggtgctgctggcatctagttggtagaggccaaagatatcactaaacatcctttgttgcagaggatagccctctacaacaaggaattatccagccaaaaatgtcaatagtgtccagtttcagaaaccctgctctaaaggaatgtaaagttaaatgacattttgtcttccaagttttactagtgaaaacttaatggaatccattactggaatgtttcactgtcatataaatatatggtgtattagagttttgttttattttgttttgaaacggagtctcgctctgtcaccca

SEQ ID NO: 61195 - DNA, 1087 bp, Homo sapiens
tatacttgagattagtttgctgcaacagattaccctttgcaagggtcatgtaagagtttggaaaattgatatagcagttagtaatctaagcttcatgaaaattggtcatctcatgttattttccccattctaaagatgagaaaatgcaactaaagtaaaaaagttcaccttcgtgtcccccagataaatggtaaagggcttaatatttttcatcatctggcttcactaaaacctcagatccacttcctaattaaacctgccctcccagtctttttattaaagtgtgtttccaaatgcagctcattggttatctctagcctttttgtttgccttcaggcagagaaagagcagaatctactgttaacacgtaaagaattaatatttcatggccattcattttctttcttaaatagatggacatattgtaagccagtcctggccacacaaagaccacttgctgtttctggctataacataaatatttaattaaaggaaaaactactctgagccattcttttataaggcataaactatactagctttgggctacacttttgcaatttcccaaatccatctgttacttatcccagagtttttgccagcttggaaaacttaggaggcgtattcacctgggttttagaaatgtttccaggaggctgggtgtggtggtgcgcgcctgtaatcccagcactttgggaggccaaggcgggtggatcatgtggtcaggagttcgagaccagcctgaccaacatgttgaaacaccatctctactaaaaacacaaaaattagctgggcatggtggcaagtgcctgcagtcccagctactcaggaggctgaggcagaagaatcgcttgaacctgggaggtggaggttgcagtgagccaagatcatgccattgcactccaacctgggcaacagagcgagactccatttcaaaaaaaaaatgtttccaggagatgaatgtgcaatctttgagttgttatttctagaagagaaccatccaaccgtcactataagattctggatttgcagttaggcgtggtggcatgcacctgtagtcccagaacttgggaggctgaggcaggaa

SEQ ID NO: 61196 - DNA, 1211 bp, Homo sapiens
atgggcagactcaagctcccatcaccatggaatctgttctttctctcctgaagcagtgacgcttgccatttcgttttcattggccctcttagaagatgattaagaaaaaatgattgctttgaatatgtgttgcttctgtcaccccgtcccctgtgcaagaatcctggggaaagcgatcttaggtttacagacctcaataactagtctgtagaggcttaaggaaaagtgtcactgagacttgccaggatttgtcagtgatggagatcgtgtgggttgcattattaatagcctttactgtcagtattttcattcaatccgcaggtgtttattgaacctaatttgtaccatactctttgctgagtaccaaggaggttaaactaaataagtaaagaaatggtctctgctctcaaggagcctgtagaggagttgtagtctttcctcctcccagccccctgccctccaaaaaaaaaaaaaaaaaaaaaggaaaagaaaaaacatcctgaaacactcagaggatcacaaggtgctgaaaaaatgcccaggtaaaattattactggagacatttgacctggaaaaaagaaatcagctgaagaggctaaggtggcagtattcgaaggctgacattcgacaaaagaatgagacttattttgtatagccttagaaagcagaatctacctctctgaccttatcactaaggtaaacttgccatttcagctaacacttttattgtgctaaaatacacataacgtttatcattttaaccatttttaagtatatagctctgtgacattaagtatatttacatcgttttgcagctgtcaccatcatccatctccagaacttttcattgtcccagactgaaactctgtgcccattaaacactcacttctcattcctctctccttccactcccggcaactaccattctactttcgctctgtgaatttgactactgaagttacctagagtgtaagcagaaaaccaagcaggtattttaaaaaaggcttcttttgaaattcttgtcttttgcatcccaatcctgtccagcggtcaaggcctagtttatgtctttcctgacaacccgaatgtaccgttatctagtttcagtggctatcttcatcatttgattgacatttgttatgcatgtctatataaaattagttcatttttcctgtatgtatcccacatatttcccaaaagttcttgagga

SEQ ID NO: 61197 - DNA, 1341 bp, Homo sapiens
tgtaatcccagctactcgggatgctaaggcaggagaattgcttgaacccaggaggcagaggttgcagtgagccaagatcacgtcattgcacaccaatctgggcaacaagagcgaaactccgtctcaaaaaaaaaaaaaaaaattagccagccgttgtagctcgtgcctgtagacttagctactcaggagactgaggtgggaggatcacttgagccagggaggttgaggccacagtgaaccatggttgagctgctgcactccagcctgggagacagagtaagacctgtctcaaaaaaacaaaactgaagtgaatagtggtctggtattgaggtgaggataactttggttcggacgtgttgagatatggagctggtgcttagattcttagagttggaatgtaggtgaggaagggagtctggaagtacgtattgagccatgaaaatagtactaaaagtgaacatagagaacagatactcaaggagcatccactggaggaggaaggagaggaaccattgaagaagatatgtggtagaggtaagaagatagaggtaagaagggaatataaagtgtaactgaaaccaagtagacggagagtgccaagcattgtgggtctaaagtggaattatttatttaatcaccttgagatgttactgggcttagaccgagaggtctccttttgccttgcttcaacttctctctgtagtgcagggcccagaagcaattcaagccccaaggctgaatcgataaataatcttatttttctgtagaacctattggtttggaaagatgtggtctagtgtagttaactgcagatcatatgatgtaatgtgtaactgcaaagcattttcacacatattgttcaattctcacagcaattccaattttatggatgagaaaattatatgtgaaataactctaaaagttgtgtaagttatggtgaacattttggtggtagtagtttttactatcactaattactgctatctattttgaatatttgaccaggtaattcatttttttgagagtggccgagattacaggcgtgtaccacaacatgcagctaacttttgtatttttgtagagacggggtttccccatgttggccaggctggtcttgaactcctgacctcaggtgatccgcccaacctcgcccccccagagtgctgggattataggcgtgaaccaccacggctagccaccaggctaaagtcctaaattcccaaatcatttattgtgttctgtaaatatcacaacactggccactagtttgagattttaaaattgaagttgaaaaatagtgttttttaaaaaaattaactgaatttaaaacgtaaaaaaaaa

SEQ ID NO: 61198 - DNA, 1867 bp, Homo sapiens
gttgggttaccaaagtgctgggattacaggcgtgagccaccacggctggcccaaaggtttgcagttttaatggatatgcaattaaaaatctatcactagattttgtaaaactcctgtgccttttctgaccaaaaggagaacataaaaagcatagagaagtagctcttctttaattgcacttacttttacatcatccttttcaatattctgccttgtttttagctttaagatttatatgcattcgtcaaaagtttagactaattttttagtaatgcttgtttgtggtaggaataactgtgtcaccaggtggcatgtctttaggcagacatagaagaattatgattgtcattttcaaatgaatatattttttcctaatgctagtcgtaaagaagtattttaattaaatctcattttacaggtcgaggggtaacatatctctttcctattcaagttaagacctttggtcctgtatatgaaggaaaagatttaatagctcaagcacggacaggaacaggaaagacattctcttttgccatccccttaattgaaagactccaaagaaatcaagaaacaattaaaaaaagccgctcaccaaaggtaatcgttatagggggtaaaagctttaaatgttactctaacagaaagggaaagaaagttacacgagtcctaagttctagtacccccaaaatagaaaagttagcgctgtggcataaaacaaaaatatgttgtttttcacaaaaagaaatttcaagcaaagttaaagtgaagtagtttttgcatatgaatgtgatgtgtatggatccatagatgtctttgataatttcatgaattataaagccggtatatcttatttacagtttttatatttagttgacccttttcttctcttttcttcagtcctgacctttgcttttaaataaatgaattttctaaagaggtgttcatttatttgtcattcagtaaatgttcagcatcatttatttcagtgttacctttttttccctttagtatggaatacgtcatgaattttcatgtcatccttgtgcaggggtcatgctaatcttccctgtgtcattccaattttagcgtatgtgctgctgaagtgagcacacacagatggactttttaagaagagtattatagaaatgatactgctagtttatatattattggggtactagacatcttattttataaatgtaaaatcaaccaacagagaggactagtaaaatgtaagcctaaaatttgacctaaaaagctgtgtgcacttaaggtttgtaaaagtgaagaaaaaaatcagcatcataatatgaacaactgtatgactaaaagtaatttgttctttgtaagactcctgagtggtattataagagcaaattaacatacatacataaatataattaaatcataatagtcttggatcagctatcccaaatcaggttggctgtgttgacttacaggataaatatttttggagagttatgtttttcgggtgaaattaggaaaagactgaaataggacataggatataatctcaacactgctttttttttgttttgttttgttttttgttttttttaaagacagggtctctctctgttgcccaggatggagtacagtggggtgatcatggctcattgtagccatgaactcctgggctcaagcaattctctcttcctctcagtctctccagtaggtaggactgcaggcaggtgccaccacacttggctaattttttattttttgtagagttggggtctcattctgtagtccaggctggttttgaactcctggcctcaagtgatccttccaccttggcctcccaaggtgttgggattacaggtgtgagcctccacgcctggcccca

SEQ ID NO: 61199 - DNA, 1965 bp, Homo sapiens
tgtcccctgcgttctaacaaaactaaaataatttggtatctgttctgtccttgaaaaagaaagtatgatagcatcattttaactattttcttagctttctgtgctttattctatttttttatagtcagtagttagatttactaactcattttattgatttctttgttcattgttcctgcttaaattctcactttccttttgggttcagttctcttcatattgtcccccagttttgcaagttgaaagttttaataattgcaatgaagtctgtgtgttaaaaattcaccccaagttttacatttttcattatttttttgaagcttgggaggatttttaagagcgggctacatcgtgggaaattaagaaaacatttgaattctttttgtttatttaagattctgaagacaatcctcagactttacttttttctgcaacttgcccacagtgggtatacaaagttgcaaaaaaatacatgaaatccagatatgaacaggttgaccttgttggaaaaatgactcaaaaggctgcaactactgtggaagtaagtagctttctagcatgatagattttagcttttagttggtatttacttttgacatttgttgaagctaaatttaagttttgggtacctcttcatgcctaatcttccttttctgctcttagtaagacacctatatatttttatagtctgagactgagtagcagaatagaataaatagggggaaaaaaagcacgtgaataggcaagtcctaataggaaacacacaagcagccatagagacagatttgaagtgtttctttctttctctctttaaagccgctcaaaaacaaaaacaaaaaacaaaatatttacaacgtgacaaagaaggcgatttatattgactagaaaagaatagtgcggagataatttgttaaagctgaggtgaaaaaaagatagatcctcatcccattcccccaaaccaaaaaaatttctcaaagatttaaaaaattaagctgtaaaataacttaaagcagacgtaggtgaataaagagttttttgatttcaggaaagggaatgcttttctaacatagaagttgggctgagcatggtggctcacgcctgtaatcccagcactttgggaggccaaggcgggcagatcacttgaggtcaggagtgtgagaccagcctggccaatatggtgaaactctgtctctactaaaaatagaaaaattagccggcctggtggcgggcccctgtagtcccagctatttgggaggctgaggcatgagaatcacttgaacccaggaggtggaggttgcagtaagctgagattgcgccaccgtactccagcctgggtgacagagggagaccctgtctcaaaaaaaaaaaaaaaaaccacagaagtcagaagaagaatccataaaggaaaaggtttataattttgactccatgaaagttaaaccaatggtatgtttaaaaaaagaattagggccgggcgtggtggcttacgcctgtaatcccagcattttgggaggctgaggcaggcggataatgaggtcaggagatcgagaccatcctggctaacacggtgaaactccatttttactaaaaatacaaaaaattagccggtcatggtggcgggcgcctgtagttccagctactcgggaggctgaggcaggagaatggcgtgaatccgggaggtgaagcttgcagtgagccaagatcgcgccactgcactccagcttgggtgacagagcgagactctgtctcaaaaaaaaataaaagaaaaaaaaggctgggtgcggtggctcacgcctgtattctgaacactttgggaggctgaggcgggcagatcacgaggtcaggagatcgagaccatcctggccaacatggcgatacctcgtctctattaaaaatacaaaaactagctgggtgtggtgacccgcacctgtaatcccagctacttaggaggctaaggcaggagaa

SEQ ID NO: 61200 - DNA, 2862 bp, Homo sapiens
aaaaattagctgggcatagtggcaggcacctgtaatcccagctactcgggaggctgaggtaggagaatcgcttgaacctgggaggtagaggttgcagtgagccaagatcgctccattgcactccagcctgggcaataagagcaaaactctgtctaaaaaaaaaaaaaaatctgacagaatatttaccaaactcttagcagtgaattatttctaagtcactagtattagggaagcttttacattttatgttaaatattttctgtcatgtttgactttttttttttacagtaagcatgcattgttaaaatcatcaaagtaagatttaaaaacatgcaaaaggagcacagactagatgttgttgtgctatcagttgcaagtatgagctgtacacttaattttctccccctttctcaaatagaatgcccagtgtttacatggggacattgcacagtcacaaagagaaattacactaaaaggcttcagagaaggtagttttaaagttttggtggcaaccaatgtggctgcccgtggtttggacattcctgaagttgacctggtgattcaaagttctcctcctcaggtaggaaatgggatttgatttgggaaaaataagagcaattttataaattcccatttaatttacaacatattgcttgggatgtgaaaaatatgtcatctcttcttgctcttagccattttttgttagtgtgctattaaatttatcagattctgatacttttgcagatgattaactctattgtttgtatttgaagcatggagcaacaaaatcaggcagagaattacaaaaagttgccataaagaaacctgggatgaggtggattaaaaggttttaaatcatattgcctttaccccaaaatccacacatataaattgtttggaatgttgaaaagggcaacaggattgaaataaatatattattattaacattattatttggattccggaatgactgcaacttgctagatttttaaaaaatattaccttttataatctttaggatgttgagtcctatatccatcgctctggacgcacaggtagagctggacggacagggatttgtatatgtttttatcaaccaagagaaagaggtcaactaagatatgtggaacaaaaagcagtaagtagagttaaattatttcaggcttattgtctaaatggtgccttaaaagagagctcttcttatatttattcttacaagtaggtcttcataacttttctcagtttaagctgcatttggctgtgaagcctgtggagatctaaatttatattagcttcaagactttaatacagcttttattgtgaagacagtggagctgactttctcatcttttccttgaatttctctcttcatactaaaatcagaagtgcattgtgatttcagtacttcttagtgtaaatgggtgactaaaagattgtcttggtataatagttaagattcttttaagtatggtacaatagacagtttctaaagaaactgtacattttctgtggtctggattttttgtggtatttcacattttttcctatttttatatgtgtttttatatgcaatttcatatactttgtaaaatgagatagtgtaataaggaaaaaagctgatagatttaaacatctgttttgttttgtttttttttcaaatcaggcttgttttacaagtgaaattccatgattgtaactaaggggcaattcaaaaaattatttttctctttctgaaatttgtaattgatgatttatgagaaaaaaaagatcttggctgggtgcagtcactcacgcctgtaatcccagcactttgggaggcggagatgggcagatcacttgaggtcaggagtttgagaccagcctgcccaacatggtgaaaccccatctctactaaaaataccaaaattagctgggcatggtggtagacacctgtaatcccagctactatggaggctgaggcaggagaattgcttgagcccaggaggtggaggttgcagtgagccaagatcacgccactgcactccagcctgggcaacagagcaagactctgtgtcaaaacaaaaacaaaaacaaaaacaaaaaagataaaactgatcttttaatctgctagggctatgaaatctttaaatgcaagaaatagaaattcaacgaactattaaaatattaatttaggaattaattgtaaagacttccatttttctttaatgtaactctttcattttcagggaattacttttaaacgtgtaggtgttccttctacaatggatttagttaaatctaaaagcatggatgccatcaggtatgctttctgaacttgctgaataattgtttcttttgtattaggctattcatctgtaagctctcccagttcaaatagcagaaaattttaccaccagttttaccagcagacatttagttatattaaaatataaaacagtggctcatgcctgtaattccagcactttgggaggctgaggcgggcagctcatgaggtcaggagattgagaccatcctggctaacacggtgaaaccctatctctactaaaaaaatacaaaaaattagccaggcgtggtggtgggcgcctgtagtcccagctacttgggaggctggagcaggagaatggtgtgaacctggggggcggagcttgcagggaatcgagagtgcaccactgcattccagcctgggcgacagagcaagactctgtctcaaaaaaaaaaaaaaaaaaaaaaaaaaaatatatatatatatatatatatatatatatatataaaatgtggctgggcactgtggtgcacgcctgtaattccagcacttcgggaggctgaggtgggcagattgcttgagcttaggagtttgagact

SEQ ID NO: 61201 - DNA, 1055 bp, Homo sapiens
gcacctgtagtcccagctacttggaaggctgaggtgggaggattgcttgagcccgggaggttgaggctgcagtgagccaagatcgtgccagtgcgctccagactgggtgacagagcaaggctctatctcaaaaaaaaaaaattactccttctttttcccatttttcttcttatcttttattttttccctatgtcttgaccaagaatactatttttaaaccataggtctctggcttccgtttcttacgctgctgttgattttttccgaccatcagctcagagactgatagaagagaaaggtgcagtggatgcattggctgcagctttagcccacatttctggtgcatcaagctttgaaccacgatctttgatcacctctgataaggtagaaatctgtgagaaaattgtacatgagtgggaaaaggttaaaattgaacataggaaatattgtagtgaattattgtgctttttgtgcagaaaaaaactgttttgctctatgagaaactggtctccttattttcctctactccctaataaatccttttttgacaatcacctcttccaaatttttcaaacccacagaaaaactgaaagaataatgcagtaaccacatacgatccacctagattcaactgttaaaagtctgtatcatgtgctttatatccttttttagctctaatttgtaattaaaaaaaaaatgacatgtaataattgtacatatttatagggtatgtggtgatgtttcagtacatccgtacataccatgtataggtatcagatcaggatcattagcgtatccatcgtctaaacatttatcatttctttgttttaggaaccattcaatatcttccttcttgctttataactttataagtttttttttttttttttttgagattgagtcttgttctgttacccaggctggagtgcaattacgtgatcttggttcactgcaacctctccctcccgggttcaagcaattctcctgtctcaccctcctgagtagctgggactacaggcgcacgccaccatgcctggctaatttttgtattttta

SEQ ID NO: 61202 - DNA, 2030 bp, Homo sapiens
tatttagaatgttagaatttatttagaatgtatatttagaatgtatatttatagaatgtatttaattagtacatgtaattagtaatacatagtttaattttagaatgtataaactgagtatgaatttatgatctcgaaaattgaaaatatttttgcttattttctggttttcatttttgttccagatacgttaacagaatagatggcctttagctaatagatatgaaaaaggtgtcttcttgtacttaacatgtttgcttatggtttctattttgcatttatattaatcctgtaaattcccctaacaggcagagtggcatgattccgactggatactctcagtgccagccaaattacctgaaattgaagaatattatgatggaaacacatcttctaattccagacagaggagtggctggtcaagtggtcgatcaggccggtcaggccggtcaggtggtcgatctggcggccggtcaggtagacagagtcgacaaggaagtcgctcaggaagtcgacaagatggtagaagacgaagtgggaatagaaatcgatcaagaagtgggggccacaaacggagttttgactgagtatttgatagttaatctaccagtgtgagcttgcctatttctgcctaatcatgtacattatccaccaaaaattaggtcatcatagttgaggtatgtgtctgctatttgcaaagaagttggtcgtatttttttaaaaagtatttcacaagaatggaacaaatctacttatccagttatacctttgaataaaaaaacctccttttattgtctcttttcacttatgtgttaagaattttctcaatgtaatctcaaaaatttctttaaaaacttggcaatcaggccaggtgcggtggctcatggctgtaatcccagcactttgggaggctgtgttgggcggatcacttgaggtcaggagtttgaaaccagcctgaccaacatggtgaaaccccaactctattaaaaatacaaaaattagctggacatggtggtacatgcctgtaatcccagctactcgggaggccgaggcaggagaatcacttgaacccaggaggtagaggttgcagtgagccgagatcatgtcactgcactccagcctgggcaatagagtgagactctgtctcaaaacaaacaaacaaaacttggtagtcaagctaatcataacataagattacttgcattttacaaaatgtgatgtatttgtattcatataattcctcccataggttatgtgataaaaataagaaattcccttctacattaaagggctgtgtaaactgttgacatggttagttaggtgtatcattttagtctagacacagttaattaaaagagtgtgccaacagtgcatactcattaatttattccacagatatttattgaatttctactatgtttccatcactatgctaaccactggggagtatagttgtgaataaggcataatcactatccttaaggaacttagagtcaattattacagactaacaaataaaagctaagacagtggtaggtatggtatgctaaggacctacttggggtacacctgaccagttttagcagtcaggaaggccttttaaaagtgatacccaacagagaaataaagaagtatccatttagccacatgtatgtacaggtgggaagaggagtttagaagggagagggcttgcaggcagagagaacaacatatgcggacaccagaggcaaagaatagcatggtaagtctgaggtttccatatgatagagaacaggaataagagactggttcagtatttaacagggacagattttaaaggccttatgtacattgttaaggagtttaaagcttttcttgaagacagtgggtaatcatttaagggcttaaagtaaggagtaacatgatttgatttacattttagaaagaatgctggccacactgaagagactggattggagaaaagccagactggaggcctggagacctcttaagatgccataggagtaatctatggtagagatgctggtgat

SEQ ID NO: 61203 - DNA, 1062 bp, Homo sapiens
gcaaagcaccagattttcaggcttatggatgagacttcaaatatttactataattggatgctttaaagtttgttgatatttttcagtcaagcagattctttactatcagaatatttctgagccaggtatgatggcttgcacctgtaatcccagctgtccatcaggctgaggcaggaggatcacttgagcccaggagttcaaggctgcaagtgagttatgatcacaccactgtactccagcatgggcgacaaagcaagaccttgtctcttaaaaaatatacgtatttgagcctaactttgtagatgttgaccagaaggtagaattccttaattctgcaggaccagaagcatgagtagtatacttcagtatgtcagtatggctaatgttttaagaattgcagtgtgagataacacagttaatttgttcataggccgaggagtgaccttcctatttcctatacaagcaaagacattccatcatgtttacagcgggaaggacttaattgcacaggcacggacaggaactgggaagacattctcctttgccatccctttgattgagaaacttcatggggaactgcaagacaggaagagaggccgtgcccctcaggtaactgtcttaaatacaagggctctcagtcagcataggaaaaaccaccacttgggcattgtgtacataccctactattttttattgagttcttatagtcacccattctatttactgtggatctttatgtgaaagtaatccaggacaattcttttatatttaataattaatatatacagatcattctctgtatatttcaatattttaatctttcccacagttttgatcatctatataattaatgctatcatatttccttcaaaccattagatgtccctggggctcatagctttcgtcaagtgtctgaccatttttgcctagatggagaaagcatttttggtagaaaagcatgaatgggcggtggctcacacctgtaatcccagcactttgggagcccgaggtgggcggatcacgaggtcaggagatcgagaccatcctggctaacaacatgaa

SEQ ID NO: 61204 - DNA, 1034 bp, Homo sapiens
cagtttcatgttttatatatatatagatcaaattcatattgctctaggattcaaagccccttacattgttggctctaccttacttctctgattttgttctgcttcaaattttctctactgtagaggttaagactataggttttggatcccaattgcttgaaggctctgctccttcttagcctttggggtttagtcaagttatttatcctctaatacctagctcaaaaggttgcaagaattgaatcagaataatatatataaagaatttagtagagtctcagatctattagacaaaaatattagataatgttatcgtcatcatcagcgttagaccttgttcaagtcgttcttttcctggaatgctgttctttaaggactagattaagaaacaaatactacacagtaatttgaattcaattatttttctttatcaggtactggttcttgcacctacaagagagttggcaaatcaagtaagcaaagacttcagtgacatcacaaaaaagctgtcagtggcttgtttttatggtggaactccctatggaggtcaatgtgagtacattcaaaaagtgagggaggtataatgccacccattgttgactgctctgattggatttcttttcaccttgacatctggcttctctatataggatagtcgtttatggggattttcttttgccattgtttaaacatggtcaagaacatggtcctgcttgatgataggcaaatcctgtatatcgttcttaggacttttatctatttatatttatctaggggctacaaaagtaatttattattgaacccaaaaagacagtccatttgggctctaggaaataggaagtcagaattcaaggttcctcttgtctgtcaggaccttgggtctgtccctctttctgcatggttgcttctttcttgatgtaggcaggctttctttccttggggctcaagggccaaatgttagtctctactcttatattccattacttcccagttcaaggccttggagctttattattagagcagatgtataaatt

SEQ ID NO: 61205 - DNA, 1830 bp, Homo sapiens
cactgcaacctctgttgcccaggttcaagcgattctcctgcctcagcctcccgagtagctgggattacaggcgcccaccactgcgcctggttaatttttgtagttttagtaaagatggtgtttcaccatgttggccaggctggtcttaaactcctgatctcatgatccacccaccttggcctcccaaagtgctgggattacaggcgtgacccaccacgcccggctgcatatttcttttatgtcactttgtacactagactgtcacttcaaatatttactataattgggtgctttaaattttgttgatatttttcacttctaatgtttttcccactagattaggagtgccatgagtatctttatcattattacttagcatattactttgtacttgtaggtatttaacaaatattttagagtaacaatacagttaactgtggtaccccacacagataaaagtacttactaaaaacccagcaaatcttgtcattgttttttatagttgaacgcatgaggaatgggattgatatcctggttggaacaccaggtcgtatcaaagaccacatacagaatggcaaactagatctcaccaaacttaagcatgttgtcctggatgaagtggaccagatgttggatatgggatttgctgatcaagtggaagagattttaagtgtggcatacaagaaaggtaatccacaaattcaagaagctgataaaaaagaccaaaggaagggtggtaactctgtctcctgggttcaagtgactctcatgcctcagccaccctagtaactgggattacaggcacccaccaccacgcctggcctcgtatttttagtagagatggggttttgccatattgcccaggctggtctcaaactcccagccccaggtgatccgactgcctcaccctcccaaagtgctgggattagaggcatgagccactgcgcctggcctggtgactaagtagttttctaagagattaataaagccttgggaaattggaatggggctcattttatctagaaacttggattaaaaaaaaaaagtcattactctgggattaaagctggtgaggaaaaaaaaagtcatgatttatcatattaccacaatggggaaaacttggaaaagtaaagaaaaataccatcttctgtcatcttgatgtggtctgcttttggtgtattcctgatgttttgcattttattgtatatatgtgttgattatactctgactatacatataaaaattcagcaaaaatactgtatgaagtggttggccatgacttaattctaccatctgcctagtttgatttttattcaatataaatagttctgtttagccacttttatacagatagcttctcacctcaatatctggaattgttttttgtttttttttttgagacagggtctaaatctgtcacccaggctggagtgcagtggtgggatcttggctcattgcagcctccaccttccaggttgaagcaatcctccgagtagctgggactatagatgtgcgccaccatgcccagctaatttttctgttttttgtagagctgggtttcaccatgctggtcttgaactcttggactcaagtgatcttccctcccactttggcctcccagaatgctgggattacagatgtgctctaccgcggccgccctttttttatttttaagataggccctcaccctgtcactcaggctatagtacagtggcaccatcatagctcactgcatccctaaactcctgggcctcagcttcctgagtagcttagggctacaggcgtgcgccaccatgcctggctaatgtttttattattgatagagacagg

SEQ ID NO: 61206 - DNA, 1086 bp, Homo sapiens
ttgtcaaattctctccagaagggttctatcacacttctatttggaatgtttgagaatgtgatgtcactcttaagtagaattgaacaaacaaaaatagtagctggactcaatgattggacaagaattctaaattcataaaatattgagaatagaaatcttagaatagatttcgtttgtaattcaaaagcctaatggtcagaaagcaaaataactttaaagtactttcactattttaaggatcttttagataaattacctagcggtatttctttgcccattgggaaacctctgtcttccagttttgtgtcctcagtgcccgacttggcctcaggtggttgctggtgaacattgatggactgtggaagtattaggttaggtggaatactatgtaggcttgtttggattattcatactgactttttttttccccctcctcaaagattctgaagacaatccccaaacattgcttttttctgcaacttgccctcattgggtatttaatgttgccaagaaatacatgaaatctacatatgaacaggtggacctgattggtaaaaagactcagaaaacggcaataactgtggaggtaaattatttacttagttgccagaatataaaattgtatatatttttttcttgtctgttagtattaagactggcaaatgctctttttccagataaatactaaatccatgtgaaaagccaaggaaaaatatttctatttgagctgtatatgatatctgtgtttttatttttattttttgagatggagtctcgctctgtcaccaggctggagtgcagtggcgcaatctccgttcactgcaacctccacctcccaggttcaagtgattctcctgcctcagcctcctgagtggctgggactacaggcatgcgctaccacgcccagctaatttttgtatttttagtagagacagggtttcaccatgttggccaggatagtctcaatctcttgacctcgtgatctgcccatctcggcctcccaaagtgctgggattacaggtgtgagccaccacgcccggcccgatatctgtgtttttaaaatttcatcatctatggcctcatttc

SEQ ID NO: 61207 - DNA, 1021 bp, Homo sapiens
agcagagaaatctagtgctttgtgtttaagcttaaaagtgttgaagtttaaaatttcacctttgattctgataatctagatgaattaatttcactgaggaacagacctgtatattaatctactacagattgggtttttaagtaaatgaaaaggcaaaacatacagaaatttgttggttatttggtttcctgtagaaagctagggagtggcatttcctttcctgcattttcctggttgtcagaaaataaagaagttagatgctctttagagaaaggggagaggcatggggagatgggcagatcatgttgctttctgctttactggcttatttaggtttttttctgtcagtggtggctgcagacagctcttatcaggcttgagtagttgtttccaggagcaagacattagaacattagtgttgtgctcactgatcattgtgttgtgattttagtttccagcaaagctttactaaatagatgttttttttcttcttacataagcatctggctattaagtgccactggactcagagggcagcagttattggggatgtcatccgagtatatagtggtcatcaaggacgcactatcatcttttgtgaaaccaagaaagaagcccaggagctgtcccagaattcagctataaagcaggttggtccttccccttatgccagcaaaactggggatatcaacaaatcttcaccttgggcatatctgctcttggtctgattttcattcattcagtgaataccagtttagtttagtttagaaatgagaggaagctacttttttttttttttttttaattgaggcagagtctcattctgttacccaggctggagtgcagtggtgtgatctgggctctctgcctcctgagttcaagtgattctcccacctcagtctcccgagtagctgggattacaagtgagcaccaccattcctggttaattttgttttttctttatttttttgagagggggtctcgcttcttcgcccaggctggactgcaatggtgtgatctt

SEQ ID NO: 61208 - DNA, 1019 bp, Homo sapiens
ggaggctgagacagcaagatcacttgaacccggtaggcggaggttgcagtgagctgagatcatgccactgcactccagcctgagtgacagagtgagactctgtctcaaaagaaaaaaaaaagactagatatattgagttaaaatacattaagcttcttaaagaaatcttttcagtctgtctactggaagactgaaaattggaattacatatatgcctctaatggacaagcactatttagacaatgctctttgtaaatttgcctgcaggacagggaccattgttctagaagctttaaaaattgccagaggtctttaaattgaagtgctaagggaccttctccctcatgtccccaggtttataaccacaattgctagtgttcactgacctgcataggctactcaggtgtttgtctctcttttttggtttagtgttactcatgtattttacttcaataggatgtagagtcctacattcatcgatccgggcggacaggcagagctggaaggacgggggtgtgcatctgcttttatcagcacaaggaagaatatcagttagtacaagtggagcaaaaagcggtaaaactattcttacctttcattaagcaaatgttgagttctaaagtcagtctttggtttcttcaatttttatccactttaaaatatttttatttctagtgtgtggcaatgactgaaagcttattgttaggtacatatgttgtcctgtgataaaaggcccattctgaagtaactttgcatttgaaaacagtgattttgttttcatatgtttgaaaggaagttttcagacaatgataaatatgaaccagagataattaagattgaggggctgtaggaattgcttgaaaatcaaatgaatgagggtatgtcaaaaggataaaggggagaagagactaatttttcctccaggagaattggaatagtgtatgtagattcttgccccttcaggagcttcactcgtctccttcctcttgagtggactgcacttagggacttgctttcaa

SEQ ID NO: 61209 - DNA, 2944 bp, Homo sapiens
ttttctcatgctttttaaaaattgaatactaattaaagcacacaaaaacaaaacattctctcaacaggagaaatggcatgattcacgacgctggcagctctctgtggccacagagcaaccagaactggaaggaccacgggaaggatatggaggcttcaggggacagcgggaaggcagtcgaggcttcaggggacagcgggacggaaacagaagattcagaggacagcgggaaggcagtagaggcccgagaggacagcgatcaggaggtggcaacaaaagtaacagatcccaaaacaaaggccagaagcggagtttcagtaaagcatttggtcaataattagaaatagaagatttatatagcaaaaagagaatgatgtttggcaatatagaactgaacattatttttcatgcaaagttaaaagcacattgtgcctccttttgaccacttgccaagtccctgtctctttcagacacagacaagcttcatttaaattatttcatctgatcattatcatttataactttattgttacttcttcatcagtttttccttttgaaaggtgtatgaattcattacatttttattctaatgtattatctgtagattagaagataaaatcaagcatgtatctgcctatactttgtgagttcacctgtctttatactcaaaagtgtcccttaatagtgtccttccctgaaataaatacctaagggagtgtaacagtctctggaggaccactttgagcctttggaagttaaggtttcctcagccacctgccgaacagtttctcatgtggtcctattatttgtctactgagacttaatactgagcaatgttttgaaacaagatttcaaactaatctgggttgtaatacagtttataccagtgtatgctctagacttggaagatgtagtatgtttgatgtggattacctatacttatgttcgttttgatacatttttagcttctcattataaggtgattcatgctttagtgaattcttcatagatagtatatataaaagtacattttaatagaaagccagggttttaaggaatttcacatgtataaggtggctccatagctttatttgtaagtaggctggataaatggtgcttaaatggtaatgtactccacttcttcctattggaagattaacattatttaccaagaaggacttaagggagtagggggcgcagattagcattgctcaagagtatgtaaaaaaaaaaaaaaaaaaaaagaaccaaaccactggaaataatcaaatgcaaaaaggtaacaaattcataactggaaagcaaagagaagaacaagtatgatttggatgataaagcattgttttaatggtgaaaacttcacagatcactaatgtttctagaggttaacttcaagtgggcaagctggggtttttaggtagtcagtggcctagttcctaaagccacagtataggatctgttaaactgaatgtctgttgaaagtttgttttagctgcttggaggcttccttttaagacaaactgtatgtgattaagttgttttgagggaactgaagaacctgatgtagcccctggccagataactgcctgatttctcagatattatttctctgggaaacattctacatagcacaggagcttaagagtggcattatcttctcgccttaatttccagagattatttctgtactgagaatcctggaactactatgctaggaaatttaaagctgcatggtctgtcttgttttcatttaattattgtgaatacctagaatctttcttggtcctgatttctcttgcttaatccagtctttatctctaactgccccttatttgatcaccatgtactaggagctctgatagccagctcagctcctaatccttgaggcaacattctttttctatttgaacttcagttctgtccttgaatcccgactagatatttcttgccctctggtctcagaattctcttggcttttattccttgatccacttgccagttttatcactttacccttgttcctcatggcttcccatcaagccatgggtattaggtgacagtgtaatttattagattctggttttgcccaaatactgggcatgctttaataataactgaaccatttcattatttggataggcatgggtaccttatcaagcagattaaaaggatatggtacccgtcctttagaaaagaacagctaaaaccttgttgtggattatggatttagcctaaagaaaaataatctggcataaattaagagtaagagagaagattaatagaaatttcacttcacataacttaaaacatggctatttcaataaaggactaaagtttctcctggatcccagaattcaacctgtatttataaatgtataatgtatttagctactttttggtttaaatgaacttgttgggttagcttggtaaatgttataatttttactattttctacaaagaaaatattttctaatttaagttggagctatctgtgcagcagtttctctacagttgtgcataaatgtttttactataaaatgagctaatgtataaaatactgctgtataccataataaagatagtaatacttgattttagtggcttttgttttctaaaatgaaaatagcttgaaatatttattataaaaataataaaagctagatataaaaatctaaagagaaaaaaaaccagtcacccttatctaatattttagtgagcagtcttccacatgttcatttataaaattggaattatttgattttgtgtattgcttttcccccctcaacatgttgtgcacaattttgtacaggcttacatggacatttttgatgacatgttttcttgtatggatatgccactacacatttaaccagtactcgatgtccatgttggttatttctaatttttcaccattataaacaaccctaaagttaatatcctcac

SEQ ID NO: 61210 - DNA, 1854 bp, Homo sapiens
attacaggcgcctgccaccatgcctggctaattttttatatttttagtagagacagagtttcactatgttggccaggctggtcttcaactcctgacctcgtgatctgtccgccttggcctcccaaagtgctgggagtaatgtatcacatatatataatgtttcacaattctcaaagtacttttacatgtagcatttatcttattggaaggagtaactgtaaataaatttcagttcctcagaataaatgatatgtaagcagcttgtctatttaaatacttttttttccacatttcttgagtttttaatataatcggaagaaagaaagaagttttcaaaggtgtttaagattatgatacccttctaaaccaggctggaaagtaagagacttctcttctaaaaaactctgaagtttgctttaatattatttaacagcaggaggtgagtgtcctacttaaccataatttatttttttttccttcaggacaacataggagagcttgatcttgataaacagtctgaacttagagctttaaggaaaaaagaactagatgaggaggaaagcattcggaaaaaagctgtgcagtttggaaccggtgaactgtgtgatgccatctctgcagtagaagagaaagtgagctacttgagacctttagattttgaagaagccagagaacttttcttattgggtcagcactatgtctttgaggcaaaagagttctttcagattgatggttatgtcactgaccatattgaagttgtccaagaccacagtgctctgtttaaggtgcttgcattctttgaaactgacatggagagacggtgcaagatgcataaacgcagaatagccatgctagagcccctaactgtagacctgaatccacagtattatctgttggtcaacagacagatccagtttgaaattgcacatgcttactatgatatgatggatttgaaggttgccattgctgacaggctaagggatcctgattcacacattgtaaaaaaaataaataatcttaataagtcagcactgaagtactaccagctcttcttagactccctgagagacccaaataaagtattccctgagcatataggggaagatgttcttcgccctgccatgttagctaagtttcgagttgcccgtctctatggcaaaatcattactgcagatcccaagaaagagctggaaaatttggcaacatcattggaacattacaaatttattgttgattactgtgaaaagcatcctgaggccgcccaggaaatagaagttgagctagaacttagtaaagagatggttagtcttctcccaacaaaaatggagagattcagaaccaagatggccctgacttaatccttgtttttaaagaaaggaaatgtgcaatattgaagtgatctttttccctagtcagacaggcccaattccattgtgatgtttacctttatagccaggtgagtgcagtttgaacttgagatacagtcaactgagtgtttgctaggatcctaaggaacataaagttaattaaaaacttacacctaattatgtaaattgccttgttaaagacatgtgatttgtattttagatgcttgtttcctattaaaatacagacatttctaccctcagtttctaaatgtagactatttgttggctagtacttgatagattccttgtaagaaaaaatgctgggtaatgtacctggtaacaagcctgttaatatattaagattgaaaaagtaacttctatagttactccttctaaaatatttgacttcctaaattccccccacccaaaatctttcccttttgaaaatactaaaaactaagttatgttattataaagtgtaaaatgg

SEQ ID NO: 61211 - DNA, 1050 bp, Homo sapiens
ctgcactccagcctggatgacggagcaagactctgtctccaaaaaaaaaaaaaaaaaagtgttcaatgttttttagtatattcacagagtcatgcaaccatcactataattgcttctagaacattttcatcatcccccaaaagaaagccttcgttacgaattttaattagctgagattctgaactctgggggaattttgtattctagaaatattttttactaatatgctacagttgtatttgtcatgctggtgaaaagatgtggtctttcacctggatgctttctcattaagcattatttttctgtttagcttcctgtgtgagcaaacattttctcagcttgatactcagtgcatcagcggcttgcagaagagactgcctaggcctgctctgtccagtacggtagccacaagtcacttgtggctactgaacacttgaaatgtggcaaggccaaattgggacaggctgtgaatgcaaaatatacaagatttggaacccttagtatgaagaaaagaatgcaaaatatcccagtaataacttttacattgatgatatgttaaaggacaatatttgaatatgttaggttaaataaaattaatttcacctgtttctttttacttttaaaaatatggccgctggaacatttaaaactccctatgtggtttgctttgtgtttctattggacaaagttggtctagacagtacaaggtgtgaagacaccgccctctgctggagaagatgctggatttttatttcacctacaggaagagacgtctaagtagcaattagatgctaaactaatgctgcctcaggaaagaatcaaaagagaaagagtgaaaccaggccgggcgcggtggctcacgcctataatctcagcactttgggaggccaaggcgaggggatcacgaggtcaggagatcgagaccttcctggctaaccccgtctctattaaaactacaaaaaattagccgggcatggtggcacgtgcctgtaattccagctagtcgggaggctgaggcaggagaatagcttaaacccaggtggcggaggg

SEQ ID NO: 61212 - DNA, 1527 bp, Homo sapiens
tttttttctttctttcttttttgagacggagttttgctcttgttgcctaggctggagtgcaatggcgcgatcttggctcactgcaacttctgcctcctggattcaagtgattcccctgtctcagcctcccgagtagctggtatcacaggcgcatgccaccacgcccggctaatttttgtgtttttagtagagacagggtttcatcatattggtcaggctggtcttgaactcctgacctcaggtgatccgcccacctcagcctcccaaagtgctgggtttacaggcgtgagacaccatgcccggcctttgatgtagcatttgatatatgtttttatcatttccttatgaactcacagatttgcagtctatttaaccgtagttcataggtaattaaattcaaattataaaatgtagtgactgactaaacatgataattatgaccattttcattttatttcagagttttcttggaggcttttttggtccaatttgtgagatcgatattgttcttaatgatggggaaaccaggaaaatggcagaaatgaaaactgaagatggcaaagtagaaaaacactatctcttctatgacggagaatccgtttcaggaaaggtaaatcttctgtttgacaaaactatctaattgtaagatatcagaattagttatcaaagtggtctgtgctgtttcttaaatttgaataattttatgagggagagagatttttttttccctaaagttcagctaaaatatttgattgattagaagataatctttcctgcaaaggaaagattcttaccctggaaggctttcaagggaagagcctctaaatttcatgcaaaattttctgtttaagtctcctgtgtggttcatgaaaaaaaaaatattttttttttctgtttgtgattatgtgcttctgtctggtttcagacagtttcttcagatcggagctgtaattcacccaaagtttgtttttcctttaacattaagttagagattgagagtaattctctggtataactttctaaaggtttttttacattctttgtaacttacctctctgtactgctactattgtgtctgttgatcttatttctaggtactctgtagaggacttgagtacttttgggatgtgtctatgcatggtcagatatgtttatgacgccttctataaggtttcacttttttccccttttctttatccggtaatgtatacggttttttgttttgggttttttgggttttttgttttgttttgtttcgttttttaaatagggtctcactctgttgctcaagctggagtgcagtggtgtgatcatggcttactgcatgcggccttgtactcctggactcaggtgattctcccacctcatcctctctggtagctgggactacaggcacacaccaccacttcagctaattttttaatttttttgtagagatggggtttgtccatgttgcccaggctagtcttgaacttctgggctcaagcaacccacccacgtaggcctacaaaagtgctgggattacag

SEQ ID NO: 61213 - DNA, 1063 bp, Homo sapiens
taatctcaaacttctgggctcaagtgatcctcctgcctctgccttccaaagtgctggaatgacaggtgtgaggcactgtgtccagcctcagattcttacataactatatagaaaactggtttgcattatctgtatccagcagttctactcctagatacatactcaagagctcttttaagagcaattctagattttcagaaaaattgagcagaaagtagagttctgtgtactcccttcttcctcaccccagccccacatggattcactgttactaatcttgcattagagtgatacatttgttaaaattgttgaaccattattaccacattattattaactaaagtccatagtttacattagggtttactctgttgtacattttctgggttttgataaatgcataatgtcatgtatccatcattgtgatatcatatagaatagtttaaccaccctaaaaattccctgtgtttcattcacctagtcatgccgctctggcacctgcgctaccaccaccatccacacagtcttcggcaactactcatctttttactgtctataattttgtcttttctagaatgtcatgtagttggaatcatatagaatgtagcctttttagattggtttatttcatttagcaatattcttttaaggtttctccatatatctttgtgacttgattgctcatttatttttagtgccaaatcatattccattgtatggatgtaccaatgtttgtttatccgtttacctactatcttggttggttccaagttttgctcatttttctatctagttgactctttttctcttattgatgtgtaggattttttgtatgttcttgataaaggtgttttatatatctagatatggagtcctttgtctatgtatgtatcataaatatcttctcctaatttctggcttgactttgtagtctcttaatggtgtcttatgataaacagttcttaattttaatacactagatacataatgtttcctttttgtttatgcttttcatatctagtttaaaaaatctttgcctaccccttgggcacaaagatattct

SEQ ID NO: 61214 - DNA, 1057 bp, Homo sapiens
tattagtcatagaattaactgtttgaccagaaaacaaatatggatagttgaaggctgttcctttctttgagtctttttatagttctccacctattaaggattccttcttaacaaagcagactttatgttgatgtaaataagaggttcacccatgattgtgtataactaaattacaccttctctggtgctataacatcatcctgatttaggtatgtggtggtgtctcaaacttcataaatgaatacctgaaatatttatatattgcattcatctgaaaggaagctactagtaggcccactcataggattgttaacatctcttataatttcatgttttggcaggtaaacctagcctttaagcaacctggaaagaggctagaacaccaaggaattagaattgaatttgtaggtcaaattggtgagttttaaaatagtattatttctttttctttgataactgaatttgaagagggttggattttgcaccaaaataattgaattagagcttagctttgtagaaggaaggaattgattttgcataataaaagagaggatttactttataactatattaaattgtgtttctttgacttgtatgaaatgatatttgatatatcatttcatgatatatatgaaactaccagccttgaaaactaattcaagtaaattagttgacctactgaaattttcatctgcctgcatttttcaccatccttcttataattagcagcctcaccttcattcttcattttctaattacccatgccatttgtcttcctgatctagtgtgtgcctgtagccagactcacttgtgtcaacacacaattccatgtgagaaggaaaggtgtagtttcttcttgacttagatcaacttatgtacatttccatacatgattccagatgaatgcttgatttagtagggagttaaactatataaatctttctatactgaagattcagaagagaaaagaaaatatgtctttataatactgtctacataactaggcttaaaatctagctttctaagtttcagtgtacatttttaaagtatcagaatt

SEQ ID NO: 61215 - DNA, 2109 bp, Homo sapiens
tatatatctgttctgactgagagtgtacttacatgtctattctgactgagaggcaagttgtagtaattgatagttggttttagtctttttgtgttttgtaattttatgaaggtaatatatttgcctaactaaagcaaaatagaatttttgccttgtctaggggaagttcaaataattgctggtaatgtgtcaaatggcttcatattgggagagccccaactacatcaaaggaatgaactcatttttaaagaaattttcattgtgctatgccacttgaaatcttttatgcctacatgaagtataattataaaaaggataatggaattcagagcataggtctagtttattagagacaaactcaataattcttttggtaaaaatcgtttgtgtttgaagtagatgtctgggttttattgaaatggctattaaataattggtctttttgccttttaaaatttctcagaacttttcaatgacaagagtaatactcatgaatttgtaaacctagtgaaagaactagccttacctggagaactgactcagagcagaagttatgattttgaatttatgcaagttgaaaagccatatgaatcttacatcggtgccaatgtccgcttgaggtatgaatgtgtattataaactgtaaacagaatcaaaaccagaaagtaatgactactgttgatatcttatttgaacctctaattataattctgtattggaagatttaagatttttaaaaattctgtcacatactttggctaatgctgatttgaggtaatagagcgttctaacattatagagttagacaacattgttatgagacatttcagttatacacttccctggtatgaattgtcccttacgtacttcatttgtcatgtaaactgaatgaccttctaaatccactagtttcccagaaaatctcctttagtatatggttcagaagtaatctggagtaccagagaggctctgatacatctaaaatgacacaaatagtggatggcagaaaaggagtacgaacctagttttctaaactctcaattcagtgtcctttcccttcactaagtctgtatgcaggaagccagggatgcctcagagtccagggcatttcaggatattaatctgaatgcatcaggtccgagatcttgctttctctgtttaacttggcattatctatctggaactgggtttgacaacccaaatttcaaatagcagttccttaaagaagtgatctggagaggtttcttcaagtaggcttgatgacagccctccaaactcatctgtaaagtatttacactattcttaaaattgaactttgtattttttttcatgttgggggcattaaagaaaattggaactccttcgtgaagtaatgaagtaagttgatcccaaaggagttccagcaaggaggagaagcctgagttgcagttaatgtttgctgatttaaaacatgaaaatttatcacaggtgatttaactcatcgactctcttttaactttgtaggtattttcttaaagtgacaatagtgagaagactgacagatttggtaaaagagtatgatcttattgttcaccagcttgccacctatcctgatgttaacaactctattaagatggaagtgggcattgaagattgtctacatatagaatttgaatataataaatcaaagtaagtatcattcacagataagttgttcagagaaaattcaaaaattaacttttcaggtgtttgtcagttggtcaaagtaaggatagaattgacattaatctgatgttaacaaatcaacaggatctctgagctaaaagaaattttaggagtttggtctggtttccactcagtaaaggtgtcttttatgttctattcctgataaatctctgcttggccactttgtgtagaggatgtcaccatctcagaaggcagccagtccttctgaggatacaatttatcttactggcttgatattacctcatcctagccatctcttttcacatattttcacctttaccacttaatcactgttaatgtctccttgtatatcatttcttggggggagggggaaggtatatatgtttatatatgttgtatttttacaaaactggctcatatttt

SEQ ID NO: 61216 - DNA, 1049 bp, Homo sapiens
tgaatactattgttattccccatttcacagatgaagaacttaaacaatgagtaagtgatttttccaaggtcacacaaccagtaagtggttgagatctgaagccaggtattctgactctagaacagtagttctcgtctaggggcaacttcacctcacaatgaatgtttggtgttgtctggagatatttttggctgttacatttggagagtactactggtatctagtgggtagaggccagggttgctgctaaacatcctacaaaggataggaccctccccacaacaaagaattattcagcccaaaatatcagtactactgaggatgaaccctggtctttgttattttgcatctcatgaggatgtgaagcattagtgtcaactctatagtgcttagtcctacctgttatgtgactatatttaatcatctttagaattaagtagaaattccttttctttcaggtgaatcaattccaataaggctatttttagcaggatatgacccaactccaacaatgagagatgtgaacaaaaaattttcagtaaggtactttttgaatttagtgcttgttgatgaggaagaccggaggtacttcaaacagcaggtatggtgccacttgggctggtattatgttctgcggcagatctaaaaatacctcgaaagcactcttctaagcttcactgtactgagcgagtgggagtttctaaataaataaaaacactgtgggtatgatagataaagaagtagaggagaatagaatcctatgatagatccctccccaatcattctgcagtactccagaatgagctataatttttcagggcttttagttttctcttacaagttcttttgtttttgttttttaataaaaacaatacctgctgcttatttagaaaaaaataaggcaataaagaacaaagaatgaagtaaaggtcagcagaatttccaccaccattgcaactaatgtgtgtatgtgtgtttacatcatattatggatattgcttttttttttttcttactgtttttaattttttgtagagacagagtctcac

SEQ ID NO: 61217 - DNA, 2565 bp, Homo sapiens
aaagcttttggtgaattttgaatgaagatagtaattagaatggtcttttgtattctgaatcagattaataaacatgtagttaaatgtcagttgagtgttcaaagctaagttagaaattaccctgtcctaagtactgtgaaaaatacaaaaactaccttttataaacatgatctgtcctccatgttctcacattgtagatatctgggaaaaagaaaaataatataaactaacagaatacttaaataatagcttgacagtaatttagaagagacaaaacctattccagtattgccatcctaatgttgtataattaaacatacatgatttataactttgaaataaattacatgatttttacaatttcaaaatcaattgcatatcatggcactattggaggtaagtctgttatttcccatgtgcactcatttggatgtttaaattctgatatgttggggaaaaaaaaaagcctataatgacttcatgaagcaaataattttaggaatttagaagagggaagttctcaggatggattggttagggtaagagttaggtagagaaatcgagatttgaagactggggaagatgtagggcgagtttatttggattgcattggaggcagagagtaactccatttggccgatgggggaaaatggtcaagggagggaagagaataatgttggtaaattggataaaggttatagaggggcatgaatacctgtttggagatttatcctggaggcactgagaactactaaagagcaatccaagcaatgtgctggaggattaacctgctagtgataataaaggattagatagaaagggctctgcctctcttgcctctgaggaagctgttttaatatctaagtgacaagaacttgaatttggatgagggcaatgaacaattaaaggatggatttggggaattctttaaagtaacaataggacttcttgacagattggattggtggtggtggaatgcatgggtgctggtgataggagcactagaggtagaaggggcagtcaagattagagctggaagaaagtggaaaagaagttggaaaagaggagggcttttgtagggaagaatttaattttattatggttaaaattgaagtggcaatcaatagagataaggcatcatatcaaacattaatttgttaatatcttgcatttgtttactaggagataattttatggagaaaagctcctgaaaaactgaggaaacagagaacaaactttcaccagcgatttgaatctccagaatcacaggcatctgccgaacagcctgaaatgtgaactgaacaggagaaaaaaagaaaagcaaaaaactcctgtaacccttgagattaagttcagcaggttaaagatggttgcagctggagggggcggaaaaaggccaaaactccatatatgttagtcttcctttatcttacagcgcagcatttattttatgatataatgaaatgttcgttcatgtatatacatttttaaaagtgctttctttgaaacactggaactttgttaagctgcctttttttttttaacttcctactttgatgataagcactcagatatatatcagcgtaaacatgaaaaattttcatgtgagtaggctggtatttgtaattttgctttctttctgcataatgttgattataaatcctctcttttcaggctaatgattacctcttattctctacatgcaaaaaattaaatattttgtgttcaaataaaattagaaaacctgagtggcctcttgtgtcctgcagagatttaaaacatggcatctcaatatttttgagaactacatttgtttttaacatatgtgtttgagaaaagcatatggagtgtttcaccgcaggcacttctgagtaccattccatggcttccagaattttatcctctttgaggtcttctgtgctatgaatattagatttctttccccaagggattatgtggcaggtcattatggccttcttttttttggccatattaagtaacagttttgctatattccagtagtaccgttgtgtgttttctgcaatgtggagttgacttagcttggcattttagatttgttaaaactattttttccataaatactttgaaacatatttatatatttcaatttaaggaatctttttgccatgtgtatgcaaatattattttcttcatacattcattttcttttcaggggaaaattttgggatgggggactcaggaggacctgtgaagcatgtagttatctagatctgggtaatttcatgtttattaaactcgaactttggctagttaaactcatattgaaacttcatctagtctcttaattttttaacactaaattcaagtcatttgttttaagtctctaaaaaagaagattgcagtcatccattcatatgcatggggtctgatcgcaaatacactaaatgtggagtgtaggaaccaaaatgaaacctgctgtatggaaactactttcacttatggttcattggtttttgtaccaatattttttatgcacttcagtgcaagtcttgtcagttaaccttactttatgagtaagctaaa

SEQ ID NO: 61218 - DNA, 2565 bp, Homo sapiens
agcttattttttatctttttaattatttctttaggataggctcctgtaagtggagttcttgaggtccatagacatgaatgaacatttctactgcttgatgttggagtgaatttttgatcatgttttagggcagatgttttcaaatttaaaaacaaatagctgaacttggctgggtgcggtggctcacgcctgtaatcccagcactttgggaggccgaggctggccgattgcttgaggcaaggaattcaagaccagcttggccaacatggcgaaaccctgtctctactaaaaatataaaaattagccaggcgtggtggcgcatgcctgtaacccagctactccagaggctgaggcacaagaatcacttgagcctggaaaggagatattgcagtgaaccacagtgaaccgaggtcatgccactgcactccagcctgggcgacagagcaagactctgtctcatggaaaaaaaaaaaaaggctgaactctttttttaaacaaagagtatacattgaagcctgttatgtaaaatacatggaagtggatctgctcggggataaggagcttggagtttcttctgccctccaacccccaacctctgaggtacctcagcgattccatggagcctaatttgaaaaacacaagtatagggtctgtgttcagtacttagcatccaaatgccagcttctaatcctggctcatttcactctgatagagttgaaactttggccaaagcaatttaaaaggcctgagattaataaaaattggataatctttgcccattagaagttggtgattatttcaaggtttgcatcagagataatatttttgaaaatacttggtaaggttgtaaagcaatatgtaagccaacgtaaagtactttggctatgtaaaatgttgtatatttaattataaatctttaaaattaagaaacccagttttgcattgacaggactgtgtgctgaagaggttcatttgtgtggagaacctgctgctattgacctggtgatggagcttatgtacacaacgggggaggaagtggaggtattcgattagatgctttgttctccaggtggcatatcaaatagtccagagtacctaggcagtggcttcagaggccctagataatgccagcgtcagaacttaactaaaaagaaagcttcattttcttgtgatcaactagaccatatatatttgattgaacctcatgatctgaagttctgacagagtggtcatcacaccctaagtcttccaagagtacaggaaattcttcacttcttgacaaaaccttgtggggcttgagtagatctcttcgaattaaataaatcagtactcttagaagttggagacccagcaagtttgtcgttttcaaagtgttgtatgtcagatattggggcctttgatacacatctaattgccagacacagtttatattcctttttgaaattcttagagttggaagtaactggtttccttttaatcctgcttctctttttctttaccagagttctatagtaaaatgaattattattattattattattttttgagacaaggtctcactctgttacccaggctggagtgctgtggtgcaatcacaactcactgcagtctcagcctcctggactcaagtgatcctcccacttcagcctcccaaatagctgggactacaggtgtttgccaccatgcccatctaattttttattttttgagcagagggcatctcactgtgttaccaaggctggtctcgaactccagtgctcaagcaattctcccaccttggcctcccaaagtgctgggattataagcataagccaaggaaatagttttgaattagcctgttattttagttttgtgctcagttttcaaggagagatagtggaatatagtggaagaaattttggagtccattctgtgttttgccattcttagctttgcattctttagacaagtcacagaaggttagacttgcaaaatgtgcctcagacattaattttttattgggctcagttttactattttataaaatggaaatagcagttaataacctttctgaacttaacacattgccgtgaaaatgaaatatatgagaaaaagctttgaaaacaggtgaaacactctgtttcatcttattaatttagagatgccaatgagaagtgatggtaacacttataatatcaaaataaatgtttttctgtgttttcttttgaaaaacattggtacttatcagtttttagctactcttaactgcattacaatcttttcacttaattactagtcacaagaagttgagttgggtgtgtcattttgccatttcatgtctttattgtaggttcgagactataagaggcttacccccatttctgtgctggaccatgcactagaatctttagataaccttcggcctggggactgcattgtctgttttagcaagaatgatatttattctgtgagtcggcagattgaaattcggggattagaatcagctgttatatatggcagtctcccacctggtaattattgactttcctcgtgacaagatatgaaatctcctatctttgcaattta

SEQ ID NO: 61219 - DNA, 1009 bp, Homo sapiens
caccatgcttggctgattttttaaaaattttttgtagagatgggaatctccttttgttgcccaggctgatcttgaactactgtcctcaagtaatcctcccaccttggcctcccaaagtgttgggattacaggcatgagccactgcacctggccgtaaaatcttttttttttttttagacggagtcttgctctgtcgccaggctggagtgcagtggcgcgatctcggctcactgcaagctctgcctgctgggttcaagtgattctcatgcctcagcctcccgagtagctgggattacaggcacgcagcaccacacccagctaatttttgcatttttagtagagacggggtttcaccatgttgggcaggatggtctcaatctcctgacctcgtgatccgcccaccttggcctcccaaagtgctgggattacaggcatgagccaccacacccagcccataaaatcattttttgtacactgccagatcatcataggttttagaaatataactaaaatgtaagcaaaagactaatttctcagtggccataatctgtcatttttactaaatcatcaacttttctaattggtaataaatggtaaaatgatattttttctcttttactcaaattcttggcatttacttcatatggtgagagcttagcctgaatgggactttatcgtgcaataacttaagaaaatttgtcctttttgaaaaaaaaaaaatcagcttatgattgttttttcttttactaaaaggcagctggtcttcatccaactgctgagcagattgaaatgtttgcctaccatctccctgatgcaacactgtccaatctcattgtaagtggaaactccctttcacatctcccctaaaaatgttgatatgtcaggtgattactggttaacctcatgagcatgaatggatagtctgcctttgagaagttgctatttataaaatttattttacaagtgaaaattttttctcaaaatcttttgggactttagccctgaggaa

SEQ ID NO: 61220 - DNA, 1050 bp, Homo sapiens
aaaagcattggtatcacctgggagcttgttagaactaaggagtatcaggcccatgcctgacttgatcagattctgcattttaacaagatccctgggtgattcacttgtacattatcatttgagaagtcctgttctaggccagtgattctcaaaggaggggcatgtccctctccaggagtatatcagagtctattgaggtatagtgctgacccaccctcaggatgacatattcctccgatatgtgggggcagaaatcaaggttgagcaaaggcactgaagagagtttgcaaaaagaacatttagaatttatcaatgtcatgatgtaggtgtgccattgagagttgtccagtgactgcgataagagctgttgctataatgctaatgtgtctttttcccagctaccgatttatggatatgtttccagatgccagccttattcgagatctccagaaagaactagatggtattatccaagatggtgtgcacaatatcactaaattgattaaaatgtctgagacgcataagctgttgaatttggagggctttccatcagggagccagtcacgattgtcaggaaccttaaagagccaagctagaaggacacgcggcaccaaagctctagggagtaaagctactgagccacccagccccgatgcaggagagctgtcccttgcttccagattggtgcagcaaggactcctcactccagacatgctgaaacagctagaaaaagagtggatgacacaacaaactgaacacaacaaagaaaaaacagagtctgggactcatccaaaagggacgagaagaaagaagaaggaacctgattcggactagttttctgttcctgtttttttttttttatttaattttgcaaataaaaatttattttgaatcctttttcctcatatgcatttactccctcctctagtattgtggctatctggtactgggggatttttggtgtgtgtgtgtgtttgtgtgtgtgtttgtttgttttttctttttttgcacagaaaaatctctcttgatgactaaacttgtttttttttt

SEQ ID NO: 61221 - DNA, 1027 bp, Homo sapiens
ggccagagtgtgggagctggcacgatttgtgggaaagtgcgagaggtggtgtgaaaaggcttgaatttgagcccctgctctctaacgagagggcacagctctagcaggctgagccacagcctcctcttctgaaaaatgggtacctggtgtgttggttgctgcagctcatatggcttctagtgagatcacagatatgaacatgctgaacaccagaggcattcacactttattttttaaagttgatggaacttccaggggtggtggaccttcttgagtctcggcttctaaggcattctgctccagcctagccattgcctgggtcaatttctcctccctcctgtaagggcatctaagaatggggaggctgtgggtcacactgggcacatcccggggtcctgggaagcaggtcctgactccctgctctattgcctgcagcgatcggctggcccttctccaggtcaggaggattctgcagcagctgggcctggacagcacgtgtgaggacagcatcgtggtgaaggaggtgtgcggagccgtgtcccggcgggcggcccagctctgcggtgctggcctggccgctatagtggaaaaaaggagagaagaccaggggctagagcacctgaggatcactgtgggtgtggacggcaccctgtacaagctgcaccctcagtgagtgcccacaagaggcgtggcgggtggggctggggagggctggcggccaagtgtggacttggcatagcctcctgaactgcggcatgggaagatgcatccccgtccttttatgggaaaggagtgctgtgtggtcaagtcacctattcaatctgacagacaaggtgtgagccctggtgcctctgctacctggtaatacgatgtgggaatgttagccggcctctctaaaccccaggttcctcatccacaaaaggccagcactaataatccctaccacatagggctaaatgtgtgaggttgaaatgagttagcacatgtaaagtgcttcacacggggctcaagaaatgtaagttggctg

SEQ ID NO: 61222 - DNA, 1071 bp, Homo sapiens
tagactagccctaggggcttctcgtcccggcggagccgggcggtgcctcctgcctgcgcctcgcacctccccgcctggcacggcccacccgggcacggcgccgccacgcgtgaaggcccgcatcggctccctacgtgggggacgtgcaggatgatgcggggtcgggggggatttcgctgcgtcgcccgccccctttccggcgcaggagggagcggccgccgcgtccccgctccccggccgggacgccaccgccgggcgttgcagaggcgcgccgcaaccaatgggcgtggaggaggtgggtcggctggcggctgtcaccctccaggggacgggagcgcggagaccgggagcgcgcgagctgtcgccgcgccccgggccgagggggaggagccgggggaggaggaggaggaggagccgccgagcagccgccggaggaccacggctcgccagggctgcggaggaccgaccgtccccacgcctgccgccccgcgaccccgaccgccagcatgatcgccgcgcagctcctggcctattacttcacggagctgaaggatgaccaggtcaaaaaggtgagcccccgcccgcgccgccgctggtcctggccgcagccttgcgttccggcatccgctcgccgcctccgctgcctccatcctccggcgcccggccttctccgggccagcatcgagttggactgcagggcgcaaggaaagccttcgccttcgattctaccggcattgtcagtgtctctgtgtgtgtgcgtttttgggaggggggcaatcgggcggaagacccccgagaccgggctgcctgctgcagtgtccttgaaacgggccctggatgtcagataggcccccgggctgtgcggggaggtggccggtgggcccttccgcagggcctgttcgggagggtccgagcgccgtgggaggaggtgtgatcatggagatgctggggaggtgatcgagcagcaggcgggggtgctggctggaggccaggcctcccatatttggggttcctggcggagggtgtcgggtgccccggagaagctgtcgccgggctctcccagttgtttga

SEQ ID NO: 61223 - DNA, 1029 bp, Homo sapiens
atctttaaaaaaaaaaatgaaacagtgtaaatgtttcaagtagttttgttagaatctttcatttgccatttttttcaggcatattgcctcccagctttagttttctaccaatgggtcaatagcattttggtagatgccttttttttttttttttttttgagatggattctcgccttgttgcccaggctggagtgcagtggtgcaatctcagctcactgcaacctctgcctcctgggttcaagtgattctcctgcctcagcttcccaagtagctgggattacaggcatctgccaccacacccggctaattttttttgtatttttagtagagttggggtttcaccatgttggccaggctggtcttgaactcctgacctctcaagtgatccacccgcctcggcctcccatagtgctgggattacaagcgtgagccaccgtgcctggccggtagatgtatttttcaggcattgagatgaaaggagttaggggtacatgattatgtcacttagggatgggagggagggaaatgacacttgatgcttactttgtttctgcacattaaaatcctccccataaccctctgaagtggaggatttattatctccatcttaaaagtgagactcagagagattaagtaacttgtccaaagtcacacagctaataaatcggatttgaacccagctctctgtccacagccctgtgtactttccaccatgtgaggaaaatggaaatgcttaaggtgaagccccaaatgggaggttacgagccctggaatctagacccagctgccatttctaaactccccaacttagcttgaatcatgggtctgtttcctctcctagataatggagataatgatgtctttcctgcctacttcactgggctgcagtgacaggagaaagggaactagcattaaagcacctgcttcctgcgtggcacttggcatccacaagctcatttcacttctttctacacagttcaaatgggataatgtatgtgaaggtcctgtatctgaagggccagtgcacat

SEQ ID NO: 61224 - DNA, 1049 bp, Homo sapiens
tgaaggacaaacaattagtgatagccagtgacaacccagggtgcctaaggttaggagcctgggcagcttgaggagaacggggaactcaggaagaggagcaggttgggtcaggcctggtgaagggtgggagtagtttgactcggaggtgcagggcccatggcctggcacacaggcccggcacatgggtatgggagcccaggggctgtctccattcattgaggctgggtttaaggtttctgtgctctgggcctgccaccctgtgttctcagaagggtcctagccctttggccgccatttctgtctttctagaagtcttgcccatggacacctgccagtactactgtctcatgttaataataatagctgatgtttattgagcagttactgtgttctaagtgcttgtgtctcatttgaacttgtcctatatgttaggtcctatctatcatctcagtttttcagttgaggaaactgaaattcacacagctgttaagctctggggctaggattgaacccagttggctggctccagagcccttgttcgtagcctctctgtcattcccatcccagtgagagtgagccagccaattctcagagagagaaggaggcttgaggtgttcctgatactggaggaaacctacctccatcaagtacttgggggttgaagagcagcttccatgtcatatttgagggttggaaaggatcttagagatatcgggttcattttacaggccaggaactagggctcagagcatttgcaagcctgttctgggtgacatggatgacagcagttgaatgaccttccgccatgcgatgtgccagcgtgcgtgttcctgtgcctgtgggagctggctatctcagcgggtgggtgcctcaccttgccctgtcctccccctcgacctcactctccttccttctcatccccctccagattgacaagtatctctatgccatgcggctctccgatgaaactctcatagatatcatgactcgcttcaggaaggagatgaagaatggcctctcccgggattttaatccaacagccacagtca

SEQ ID NO: 61225 - DNA, 1021 bp, Homo sapiens
gtcagagctgacatgcagagacccagggcaggcactgggtggacctcagatgtagggctttgtctgagttgaaatgcggtgtgattttttatttctgcatagcagtgctgtttttgaaataggttaagaaactagagaaacatggggtgggaatttgtacttaattcagtacttccattcccctatagtcagaagtaagagactgggattgcttgaagctatttctgtctaaggactctggggtaggatagggtttcttttgcctactctgcgtatatggcagtggttggatgaagtttgcatgattgctgctttctggctgataacagcatgtggcagggggaggcagacagggcctacgccctgccaggaagcgggcatggtatgtggcttccccttaacatttgaatctcatgtgatacctgttgtctccctaaacagaaaagggagatttcattgccctggatcttggtgggtcttcctttcgaattctgcgggtgcaagtgaatcatgagaaaaaccagaatgttcacatggagtccgaggtttatgacaccccagagaacatcgtgcacggcagtggaagccaggtgggtccctgctccctccgggtcaccccgtcgggccagcatccccttggttacctccaggaaccaggcctcaaagcactggcatcccaagcccctggaagagggttgctggaaagagtccctcatagatgcatatgtaaaaggactcctgggcagaggatgtgacagcctgcatgggggccctgcttaaacagaggctctccgtctgggcaaactggtgtagtggaagtgggctgcttggactagcagagtctgggtttgaggagggaggctccgcagctctgttgggtaaatgcactcattccctgtggatcctggggtcggttccccagtgcaggtttagcagagccctgggtgaaaatgcccttttctcctggtcattggcctcacccacttactggaggccccggccttgtagggtatggctgtgg

SEQ ID NO: 61226 - DNA, 1026 bp, Homo sapiens
ctccagtgggctagaggctgtggaattgccctcagagtttctgaaattttcagagagcgtggcgtcgggcggggcgggaaggccactccacctggtggctggtggagatccgtgacctgtgtgttatgaaggcatagctggttttctattatttttccatttttctcagtacccagatgttgcatattagtgaccactgagaggccagttctgttgaaggctttgaattgcttcttaagagctgtacttgcccacagggtagcttttgaaaagtgactcttctctgcattcacacacagcatggcttttcagacagggccaccaggtcccaggagtacgagcactttgtttgggtagatgtattcctttctgtgtgtgtgggagggaatggtttatatttttctatgaaatgctaagcctgctttggggccccctgactgctctcatgtttccttcagctttttgatcatgttgctgagtgcctgggagatttcatggagaaaaggaagatcaaggacaagaagttacctgtgggattcacgttttcttttccttgccaacaatccaaaatagatgaggtaaggatgttctgggattatcgggctctgcagatgccccgggatggaaaagctaacaagcccttttctccacaacttttcccctttgttggcagaatggtttgcatgtctggtatttttaaagaaacatttgcagaagttagtgtggtatcatgatatagtgtttactttttcacttaaacttcagttatttatgtatttttggagacaaatcagggtatttttggccaccaggtagacagaagcatttattaatcttaggcaagcaaaggaaaataaagtagttttaatggtggtggagagaggtgggaaagctctttgccagaattgcatggtgtgatgtttacctggaaactgccctggttactgcgaatatgctcagggccctgtccctcaggtgccagggctgcctctccatagtggagctgatcagtggctccagccccag

SEQ ID NO: 61227 - DNA, 1883 bp, Homo sapiens
cctaataccacattataagccaccctcacacttagtggcttaaaacaaccacgctttattattgttcatgcatctgtgggtcagttggacagttctgctcatcagggccaggattggctgacctctgccggcctcattcctgcatctgcagtcagctgttgagtcagctgggaggcagatctcagacgcccttccccacatgtccagcagttggctgtcagctggggtgcaggggcccctggccctgtgtctcatccttcagtgggccacctggctgttcaagtggtggcagcaagggctgcgagggagaggggaagacttcaaagcctcctggaagcccaggctggggataggttcagctttgcctctgccacactctgttggcctgaacaatcctagggctgggctagatcccaggggaggagaaattgactccatgtttcagtgggaggaactgcagtcatgttgcaaagaaggattttgcacatgcagggaagggaatgatgcagctgtttttgcaaataccccacaccttgacataaattattattttttgtaggagattttcattgttgcagccctggtgaagtctgtgtattgtgacaggtggtttactcacatgctctcctcccagtgtggctccaagtctgtggtggtcagagatgtggtgcccactcttcctctgagtctgtgctgtgtcctaaagggaggagttgcagcttctcctctatgtttgctatggggttctccccttgaaagtctggagtcttggggttactggctgccaagaggcacttagctgtttttgacattctttacgcttttgactgcaacagagaatggtgacttcttggccctggatcttggaggaaccaatttccgtgtgctgctggtgaaaatccgtagtgggaaaaagagaacggtggaaatgcacaacaagatctacgccattcctattgaaatcatgcagggcactggggaagaggtgagattacaaaaccatagtgcatgtgcactgcacacacggccagtggcaccggcagtcacgtgatgaccaaaatccgccacggggtgcccacatggatttgtgtccttgtggcccagaagcaccagatgctttttgccatgcctggcttgtgacactctggtggctgagaagattctggaaaaggaggctcactctgcatgtgtgtggggtgtgttttcctacgtgtgtgtgtgtatacacactttggtccatgtgcactgataaaattaaaaccacagagagcacgggcgatcctttcttttcccctgcagctgtttgatcacattgtctcctgcatctctgacttcttggactacatggggatcaaaggccccaggatgcctctgggcttcacgttctcatttccctgccagcagacgagtctggacgcggtgagtctctgttcttagggctcagtgatcgggcagcactgagtcccctgtggcctgggtgggctggcccttgaggccttctccagcctcagtgtcattcctagatgacagtcacagtcacagtgggttgagccaggctttatttcacagcctgcagggcatactgagactcttctctcttcttttctctttgaaagcgtcaccttttctgggaaaccttctggtcctccaagcaaaaaaagaacctcatcctcttctgtgccccctgttcatttgattgttgccttgcttataacacttcttacacagttagttcttagtgtcttttgtttctgctagtggtagactccgtgagcaaggacctgtatccctgcacgccctagcacagtgtccaatcagaggagataataaatgtttgttcaatatatgagatgaatcagggtccaggatcagagcttgagcac

SEQ ID NO: 61228 - DNA, 1033 bp, Homo sapiens
tatacacatatatataggcatgtatatattgtatattcatgtgtgcatgatgttgtgtgtgtacgtatatatttcttcttctggtctgaatgttgcctaaacctctaccattgatgctccatctctttgctataaagccatcttctattaaaataaacataaccctgcctggacgggtgaacacattggctcttggttgaaagtcagctaagcaggtgccctctgggtgatgtggctcagactctccatttacatttcaaatttttccatttcaaaattgggaaagaaaaactattactttgttcatcacaaaaaacgtgccccctgcctgtggaacctcaggccccagaccccaggcccagttgcaagacccccaaatgcaaggccaccgctcctcattgccccctcgtgtgttccagggaccggcagcaatgcctgctacatggaggagatgaagaacgtggagatggtggagggggaccaggggcagatgtgcatcaacatggagtggggggcctttggggacaacgggtgtctggatgatatcaggacacactacgacagactggtggacgaatattccctaaatgctgggaaacaaaggtaaccccgcctggtggagaggacactcacagtcagggtgggggcagcacttggctgcattctgccacttgcagtggaagaagtttctaggaggagaggtctgaacagaggtttcaagactggaccccctggctcactcctgacctttgtcttttggacagcagagaaccagggaggacagacccccaacatggtacaagatggcccagggttgatgcctgtctaggggctgcctgtgactgttttttagcctggaggattctggccttccggtccccttgctgtgttcctttcccatcagaataacaagggggtggggtgagggtggctgggcggcaggttggtgtgaagcagaggccctgtcgcaatcgtcctttcctccgtgagcctcctgcaccacctagtggccttgtggagctttgcagctcag

SEQ ID NO: 61229 - DNA, 1117 bp, Homo sapiens
gggcccagtgctatgctatgctgtgctgtgccctggggactcagagctgaaaaagacacacatgccctgtcctcttggggctgtcactacagcagtggtggtgggaggcagtgagctcaggtgtgttgtgaaggaggagaatggtgaggtgtgtgggaacctgaaacaggcaggtagaacccaggatcaggaggaggacaggctctcggggaagtgaccttggggctgagagctatcaggcagctgaggagggagaccagtctagcaggtagacatgaatgctggtggttttgtttctgatgtgagagagtggaggactccctggtccttcctggtcctcccactctgcctctgcggcagagcacagggctgggcacatggctgttgatgatgcgcttgaggggcagtaggagacgcggagtgaccgtgagaccgaggggtgacagttctcctggccacttcccatagacaccccaggcccctcctcctgtctcaggtatgagaagatgatcagtggtatgtacctgggtgaaatcgtccgcaacatcttaatcgacttcaccaagaagggattcctcttccgagggcagatctctgagacgctgaagacccggggcatctttgagaccaagtttctctctcagatcgagaggtgagtgggcagtgtcttccctgccagcgcccacccttcagaggtcgcctggctggtggattgtgatgggggtggtagggaccctaggggacattttggccatttttgaggattttttttcctctggaatagcagaccctgggcatttgcatagtgaaatcttataattttattataaattacttttcttggcctggtgtggtggctcatgcctgtaatcccagcactttgggaggccgaggcaggcggatcatgaggtcaggagatttgagaccatcctggctaacatggtgaaacccgatctctactaaaaatacaaaaaattagctgggtgtggtggcatatgcctgtaatcccagctacttgggaggctgaggcaggagactcacttgaacccaggaggtggaggttgcagtgagctgagatcgcgccactgcactccagcctggcctggcaacagagcga

SEQ ID NO: 61230 - DNA, 1115 bp, Homo sapiens
agcatttgtcctttgtgactggcttaattcacttagcataatgtcttaaggttcatccgtattgtggcatgtgttagaatttccttatttttttatttttattttttgagacggagtttcactcttgttggccaggctggggtgcaatggtgcaaacttggctcgccataacctctgcctcctgggttcaagcgattctcctgcctcagcctcctgagtagctgggattacaggcgtgcgtcaccatgcacgcccggctaattttgtatttttagtagagatggggtttccccatgttgatcagggtggtctcaaactcccgacctcaggtaatctgcccaccttggcctcccagagtgctgggattacaggcatgagccaccacgcccggccataatttccttatttttaaggctgagtgatattccattgcatgcacacactgcattttgtttattcattcatccatccatggacacttggcttgcttccaccttttggatattgtgacaaatgctgctgtgaacacgggtgaccagtatctcctttcagtttgtgtgtgtgtgtgtacgcaccccaagtggacttgcgggatcatatggtaattccctgttcagttgtttgtggaaccaccatgttgttttccacagtggctgtaacattttacattcccaccagcagcccgtgaaagttctagtttctccacatcctcgccaacacttgttattttctgagttgagaatagccatcctaatgggtatgaagtggtatggaaagtcttttcaagcataatagcaaagaaagaaatcataaagaaaaatggccaaatatagctacatagtgtctgtaagtaaaaaaaaaaagtaatcaaacttaaaaggcaacggtaaactgaggaagacatttgtactgtgtatgacaagacgcctagcagggcatggtgggctttggcaggtctggtctacacctgctcttctccaccggctgtgtgctttgcaatactcaatttctcccagcctcagttgccttatctttaaaatgggaataatcatacattcattggttgtttgaggagtaagtaaggtaatgtatgtaaaatatatgttacatggtaa

SEQ ID NO: 61231 - DNA, 1083 bp, Homo sapiens
tcttagagtgatggactttttggggatgggtggtttggtcatttagtcactcatcaaacatgttctaggcatgagggcatctctgatcctccccgaagctctgcgcttccagaaggccatcccggtcaggtttgtaactttacgtagaagttacaagacattgctaacacagggactggtatctctgctggagtagcaccagcttcccagggcaggggccacaggctcccctagggaggtgggccggttgccaccttgtgtggggatagagggagcaagctgacctgaagtggcaccagaggccagggcccagatcccactggctctctggagctgcaggaaggcagaagtggggccagcatcactgtccttcagaaatgcatcctttaatttttatttttttggataggatatgccagggcgtgagaagtcttgttcctgatgagggagggtggcctgtggtgtgacagagcactggcctgggagctgggagacccgggtcgcagctgctgagtgagggctaatttgtggtgtgaccttgtgggagtgccagcctctctctcagcctcagattcccgtctgcaaaatcagggggttgggccagatcagcatccccccgctgattcctggtggtgcacaagatgattgtagctgggccatgggggaacatttaaacattttaatatgcatgtgggaagtgtgatgtgtattaaaaaaataattagtacctcaaacttgtgattgtgtagatcttgattagtttaggtcaggaccgtatttacttgagtaagaaaagccagtggggttttattaaaacatcgagttaataataatgcaagtagctggccaacctgaccacgtggagacgtgataggagaatggctggagtttgggagacactgggagttctcagtggttccttccagctcttttctgggaatgtaggcagtgtggcacctcttggtcaggtgcagacacttaacacagtctgtgtactgctgactgttagagaaggaagtggcttctcattatggtacagcatcttacagtttacaaaggagtttcaccacctcagggtctcct

SEQ ID NO: 61232 - DNA, 1011 bp, Homo sapiens
atatcccaccaagaggcagcccagccttggcttccatacctctctagtgacagggggttcactaccctctaggcagccatgccacactttgacagctctgacttgaaagtgtacagcctctccctgccccagggtgacccacataataaactgcctccgtctcctgacagggccccttcctgtcgtctgagcagggcctgggcgatgacggcagctcctctttcctgcttgcttccctcagttcaagtgctgtggcggggaggactaccgagattggagcaagaatcagtaccacgactgcagtgcccctggacccctggcctgtggggtgccctacacctgctgcatcaggaacacggtagacactgctcctgtggggactggggggctgtcggggaccccaggtggtataaatgttctcttttctctcttcccaacttgaagatgggtggtgtgggtggatggcagggaagtaggagttggtggcagagcggaggctttcctgattctcaagggctcctgaaagtggagcttctgggggtcgggggtagggagaccatgtctttcttagtggtgttggttaaaatctattgagcacctaccttgtgcaggcctgctctgggcactttggtggtatttactcatttagtattcacgacaaccctgtgaggtatgtactgttattttacccactttacagatgaggaaattgaggcactcaaaggctgggtgtcttgcccaaggttggcagggctgggatgaagtgcaggcagctgttgcctgagctacactctggagaactgtgcaggccaggtgagggcaggagggagaggtgcccaggccaggggagcttagcgggggtagctggctctgcagcattagtggaggcaggcaggacctgcaccttgggcatctccattggtctttggccttgaggtcctggtgatcatcagcagcagagtgcttggaagggggtctggtgacgtaaatgccatcctcttcctctcccca

SEQ ID NO: 61233 - DNA, 1048 bp, Homo sapiens
cccagccccgtgataagcactttatatgtgtatctcactttatgtccaaaacagccctaggaggtgggttctgtgatcatcacaacctattcattcattcattttctcagttaacaaatatgtattgagtacctctgcgtgccagttccttagcagcccacctaaggttgggctctgctcctaagtggcagagcaagatctggacccaggaaatgtgacaccagagggcacgctgggggctctgctgttgccctcctgagtcatcactggcgcctgcagcactcacggcagcgttcacttacatgtagagcagcggggctgggggggacggtcatgggctggaccaggaagtctcactctcttccctggtggttggagaaggagaccctgcggggcacaggtggtgatgggaagtgcccgcggcagcctgtgagttagggcctgcctggggaggggtttgatgaggtctagggcgtgaccacaggtttccctatgcctaaattaatcagtagtcgggagttctggagagcacctctcttcccaagaaggaagttttggcagcactctccgctggtggagcagtggtctatggaacggaagcatggccaggggccctgccctggacctcaggtaaaccacagctgaccctgtgccagctgtagtctgaagttttcctccccaagagccagcggcgcaggaacagccccaccccgacctctgagacggtgtgagcaaagcggtgctctggggcggtcatagcccgggagcgtgggcagcacacctttctctggggtcctgatctgctgctagtggaggggtggttctcccaggtaaaagtcatggaacctgcattcctacagttttttcacggggcatttcttggaggaggaggtggttatgatggagactcaagccagactgcctgggtcggaatctcagctccatccctgctggacggtgcaactctgtgcttcggttttcatctgtaaaatgggtaggataatagtgcctttttgagttagaaccattataaatattagctattata

SEQ ID NO: 61234 - DNA, 1025 bp, Homo sapiens
cagcgtggaggcggcaggcacgggatgctgcttgtgctaccccaattagggcccagcctgccatggcagctccaacaaggaccgtctgggatagcacctctcagtcaacatcgtggggctggacagggctgcggcccctctgcccacactcagtactgaccaaagccagggctgtgtgtgcctgtgtgtaggtcccacggcctctgcctccccagggagcagagcctgggcctcccctaagaggctttccccgaggcagctctggaatctgtgcccacctggggcctggggaacaaggccctcctttctccaggcctgggctacgggggagggagagcctgaggctctgctcagggcccatttcatctctggcagtgccttggcggtggtattcaaggcagttttgtagcacctgtaattggggagagggagtgtgcccctcggggcaggagggaagggcatctggggaagggcaggagggaagagctgtccatgcagccacgcccatggccaggttggcctcttctcagcctcccaggtgccttgagccctcttgcaagggcggctgcttccttgagcctagtttttttacgtgatttttgtaacattcatttttttgtacagataacaggagtttctgactaatcaaagctggtatttccccgcatgtcttattcttgcccttcccccaaccagtttgttaatcaaacaataaaaacatgttttttttttttttttttttttgcctttcctgtgtgctgttttgttggggcgggggtaaggaaggctgcaacctggatttggaaaccccttgtggatgcgaggatgaagggggtgcatggggtgaagatttggcatagcttgggatacaggtggggggttggggggaaagcctcagggccagaggtgaccacgcctattttaccgagaaccgagggaaacagcctgggccaggtacagcatgaggctccacctccaggaaatggggtggatggggtgggggaccagggaagcggagttgccca

SEQ ID NO: 61235 - DNA, 1032 bp, Homo sapiens
attcttatgggtggcatgggggattgctgagaaaggagggtgtgaccctgggtggctgtaggaagggcaggatgcagcctagagaggttgattcctggctggtgcgtcaacccaatgattcattcatctctctctgtcttcacattccagagcttcttcaacaggggccatggtgctcccccagggggtcctggcccccgccagcagcaggcaggtgccaggctgggtgctgctcagtcccccttcaatgacctcaaccggcagctggtgaacatgggctttccgcagtggcatcttggcaaccatgctgtggagccggtgacctccatcctgctcctcttcctgctcatgatgcttggtgttcgtggcctcctcctggttggccttgtctacctggtgtcccacctgagtcagcggtgacctctgagggctgataggggtgggtttgttgagagggacttgctgggccttggtgtgagagcaggcatatttggaggggatctggtggtgccttgaaggtatgatcagagaggggaccacaggtgtgtgtttcccctttgtgttaagcgtgaggcagagggagacgttagtccagcatttccaaagtgtgggtgggtccgttggttcccaagatacttttaggtggtatggggcctgcattaagtggcacaaaatcagagcaagaaagcgatgcccttcccaattctctcaatccttttatgccgagaagatctcagctggatgccaacatgttccgatgcctgtggaagacatgccgacgtctcctctgcctagggagcaggacttgggcttagggcaggtggaaaaaattccagacttttttagcactgtttttgttttaatggtatatttttattggctactttattgtttaggacaagtggtagtggcattctatttattgtgaccttttcaataaatagatttaagtaaaaatgagtccatataaagaaatgtatgaataatcgtacacctgcatgcagatccggaaaacatggtaaagagggattg

SEQ ID NO: 61236 - DNA, 1138 bp, Homo sapiens
ttgggaggtctagtgtggggcctgagattctgctttcctaagaggctcccaggtgttgcccatgctgcggggccagaggctgtaagcagcagggctaaaggggcacttgagagaggctgggtggagctgcaccacagagtcacttggaatgctttaagatattgtctggccccaccccaatcaattgaagcagactctgtgcttgcaccgggacacctgtgtgttttcttttttaatgccccactccctatctaccccaggtggtttgaatatgcagccaggattgagaaccactaggctagattatgggagatcattctccactttaaaattagagatctgtgaccacctaatttgctgtcacagtgggatggctggaaatgacttaacattgtgctcttcccaggagcagcttcatattcaccaagggttgggaggggagttttgcttggaaggaatgacaatggcggaactccagggggagaacaaaggactggccgcatcttgccgaaatggccatgctatgtgatcttgtctcagcaatttcatgccttgggcctccgtgtcttggccctgaccagcacaactcctgttttgttctgtctgttcagcccagaattcccagagggcttggagctttctactgatctggaaggttctcttcccctctcttctcttctgagtgaaaaaggcagctgggaggccccctgcccttctcccctccagtgatccgaagccatggctgagaatagtgggaatgaggtgctaatgcccccgtcttgagtagattttccccccacggcacacacatctggtttccattttcttctgcagcaggccccattgagcagagccttcctctttgaatctcctgaaaaatcatgtccagaggccaggttcagcccccaccctgaccccagtcctcaatgcagcaaaattcctttctcagggacccttggcccagtcttccccatggtccttgggaggcaggtggggccctcaccagaggggagagcaaaaggctggggtggtgtgggggacattagaggagtgctggctccctggagaactggggaagtaggaaggtttgggaacacctaaaaagaacaggaggagtgcatgagccaccaggaaaaat

SEQ ID NO: 61237 - DNA, 1033 bp, Homo sapiens
cttccagtgtaacaaagaaataaaaaaggaaaggaaaatctgacttccatatcaaagaggctgaatcattttcatgcagtagattggatgaccggcaccgatcttcactggccccgccagccaggccttgccacggcatcgtcatggtggagcctgtgtctctgcttcttgactctgggcagaagtgaaaatttactggctccttgggaagcttcctgtgtgcctgctttcctcttctgcttttatagctgccatgagaggagcatgtcctagctacttccttgtcctgggaggatgagagacacagtgtctctgggagcagaacgtccccagctgacccagagacctgcaacaagaagcagcctagggcctagccccttggccaagcccagcctggattagttgagccacagccagcctccttgagaataactgatttttgtgttaagccactgagtttgggatcatttgttatgcagcattattgaggcactagctagctgatatacctatcctgccagaagaccagggtaaagcagttagtaggtacacagcgtgggttgagggcttagtatttggttatcagttgaggcttcctggcaggcgtcattaaagaatactagagtattggccctggaggagcctctaaatgaattttggctgcagagacaatcccagagttgagctttgacttgtcctaggccacatgggggatttgtgcagagcctacactagcactcagggctagtggctcctcaagacagtaagctgactctccacttcctatggaccaggctgatgataaccatgtctccctctgcttcctccttggccatatgtgtgagtttcatgtcatcaagctggaattttgacaaatatgaggtggtggcaagggagaaggagcaggaaaaaggtttggccagagacaagactccaggtgcaagaagggatgttttgtctgtacccacatttcccttgggtgccaaatgccccgtgatgggacccccagcccagagcccaggcttcaggccag

SEQ ID NO: 61238 - DNA, 1091 bp, Homo sapiens
agaggggctcccgggccggcgggctggggccgccggacctgctcaccacgccccccaccctgggcgagtttgcataaataaacaaatccaagccgtcggccccgcgggaggtggaggaggagtgacgaggaggaggaggaggagggaggggggagggagagattagtttgggaagtagcacggattgctcatccgatccgtgccgccgcagggagtgtgtcaagttacagaggcgccggaatcggcccctgcgctcctcgccagccgccacgacccacctctgcccatggggccctccgtgtgcgccccttcgcccggggactgaaactgactggcccgggagacacgaggcgcccagaaggactgacagcgcggcaccaactgctctgcagacacttgaagggaaagactgggcggagagaaggagagccggtcagattcccctaactttcctggacttggaacgttcttcgaaataacttttttctcacctaggtgtaccccaattaccgctggttgtgctttttcggcacttcctctcctactgctaatttttccgtcctctttgccgggagcagcggaaagggacgttttccagcgatacaagccctttccccctgccccgcagtttggatagagccttttggcagcggctgtcgcctttatttattctatttatttatttattggttctcaagacgcgagaggatggtagcggagcgcacccacaaagcggcagccaccggtgcccgcggccctggggagttgggcgcgcccgggacggtggctctggtggcggcgcgggcggagcgcggcgcacggctgccgagtccagggtcgtgcgggctgctgacgctggccctctgctcgctggcactcagcctgctcgcccactttcggacggccgagctgcaggcccgggtgctgcgcctggaagcggagcgcggggagcagcaaatggagacggctattttgggacgagtcaatcaactgctggacgaggtctgtgctctttgttgctggcttttatccctccccgcggcgccccctcgcgcagcctccagactgttcagccggtgtccgcgggcgct

SEQ ID NO: 61239 - DNA, 1038 bp, Homo sapiens
ccatttcaggcaactggcctgctccacaaggaaggttgaccatcaccttggagagggccctgggtttaaggagcacccccaccccccacagccatagctctctatgcccctcatggggtggagggtcaggtaactggcgtgggtgaggccaaaatgaccacagctgctgggagaccaggtgctgcgcggctgctaaaatgctccaccatctgcccctggaagagccttttctctcaaggccctctggctctgcgtttcagaaattcctggggaattctccaaagttcatttcttccccatttcctcccaaaagcacttccagatccccagccctcctggacgctgctgataatgtgtttctcctagatccgctctgataacactggggtggtcggctgagatttgtagggaaataaaaataaggaaatggagggttccggaaaggccagaagagccctggactgggaatcagtcccagaccttgaaggactctgagcagattactctcctctctctgggctttggtttcctcgctgatataaaaaggtgaatgactgaaaaatcatttggcagtatctggtaaagtaaagaatcgtgtccaataaagcagctcccttcctaggcacttctgagagaaatgctcgtctgtgcgtaaaagaagaagagatgctcactgcaacactactgtagtaagaaaaaaggaaaagaaaagaaaagcctaaatatttgtcagcaggagtgtgcagagatatgttgtgcagtattaaattgcagtactttcatcaatgaaaatgcacacacagtaaacaggataaacgagaccttcagactcagcaattccagggctggatctcctcctctggagggaaaaaagcaaacgacaagagaatatttacaatataagtcatttatctaaagttaaaaacataaagacaacacaatacaatcttcaacaactatatgcatagatagtaaacacgtaaagaaatgatggaaatggtaaacatcaaattcagcagggaggagggactgggtaga

SEQ ID NO: 61240 - DNA, 1241 bp, Homo sapiens
gaaaacccaactcccgtcctgcccctgccaattttcatcaaacaggcctgcattgggacagccctgggtttccaagcagatgcttcccctgatgctgtgttcaatgcctggcagctctaagatgctggggagctgatggctttgcaaaatctagcagtgccttgatgtcactagttgctctcccatgtgggccacttggctgtgcccattaccctggccaggcaccaaaggatggagtcactccaaggcattaccaagtccccacagtacagatggagagagagaggcccagggagattcatgaccatccagggccatgttgtgggcaggtgatggcggtgagaccggcattcagtctcctgactccccatcctggggtcttcctaacagagcacaccatatctcatgctgatcctgctgaggtactgcccgtactaccacattttgagagaggaggaagacacctggactccgcccatgcacctgctgcttcctcaggaggaacctgtttcttgcagcagggagaactatgaagattgtcccagccccctcaggtgggctaagcagcccgcaagcagggctgtcaggagagggtcacaacagccatccagggtggggacattctgcctgagacctccctgctgatgtctgtcacgcactgcctcagcttcctgctgaggccactaccgttctccgccggggtttgacccacctcttccgagcaaggcggccatgcttccccaaaatggacacatagggatggacccccatgaagaattctggggtagcattctgggtcgtgccctttttcaaccactttttgtatgttcgttcattcaacaaacacttaacaatgcctactgtgtgagtcactgtgctgggctgtggctctctaaagatgaataaagtatactcattgtcctctgaggaaggaaaacttcatttttttaagcatttattatctaccaggcctgatgcaaagctctgatgatacagagatgaataactcatttcctcccgctgagaagccaacagtttcctatgttagaaagctggagaaattccagtgatgagaactaaaacaaacatgagggtttaagggagaaaggtttgctgtaggaggattcattttttcattccttcattcattcaatcgacatttactgagtgctcattatgcggcagacatagacacagtgctaagcatggtaactataacaccgcactttgtctttataaca

SEQ ID NO: 61241 - DNA, 1059 bp, Homo sapiens
cacacgcacacatggcacttgtctagctagctcagccacccttgacagcactttgagctcatcattcagcagcatctgccttcctctcagagctgacattctgccctggccttcacccctccatgtcattctgaaaccgggactagggaatttgaggcagctcaacctttcagggtcagggatgctgagttcacacagcacgcatgttgctcgtgtccccctcctctgttttcacagtcccattctcgggcaggtcactgttcagcagttgcagggtgtgcggccagatgggtatttgcggagggggagctggaaagcatcctgggctgggccggggagagactcaggcctgggcagccttgctaagtctcccctctctccctgtgtctccctgtttcccgccactccaatggatcctgttcttctcgcttccccggcctggggtcccaccaccctgtctccccggaaccccatgtcctgtgttctcactgacacctcttctcctttccctcctgctgcttccccctactacctgcccttcccaacccattctgaatgctccctccttgcccctgtgccctctgtgttgactctgctgatcccctcgtggccctccacgtcccctggcatccctctcctgtcccatggggccggcctcctgctcctggccccctgccagctccttccctttggttcctctctttcccgctcctcttctccatacctccctgcccctcgctccctctcccccttcctctctccccgcaggggtcccccggagacgctgggctgtccatcattggtccccgcggcccccctgtaagttgtttttgctcttcctcggggtgttggggggatgggtgagttgatgaaaagggcttttaggctggggatgaggggacagcgagggcggctgtgcccctgggtggggaggccaccgcatgtgatgtggtcagcccagccaggcctcgggtgccgatgttgatgttaaggaaagtggcctggctaaatatacctaaattacagtcccttgggagggttctgagggacctgccctct

SEQ ID NO: 61242 - DNA, 1041 bp, Homo sapiens
atccacatccagggcttgtcagaagcatccccactcctaggtctcatgaggcactgaggagaagacccttccccttcatgctggactcttgcctcccaacccttctgtctctgccagaccaccctctctgctcttctccggtagcctcttctcatggaatctggaggggctgtgaggccatcatgccccatcaccgcctctctgggtcactggaaggttcccattgcttccactgctcccaacctgtcactgagtcttttcagtaggtgccactggagccactagccttgcaaagccaacagcccatggctggtctgggcaccctttcctctgttctggcctttactctgctgggacccttatcttgccactaactctccactgcctccaagtccaccaaaggtcagagggctggcactgggaactatgaccagcagcaggcagcctgccacgaaggacttgaggtcattccttgggaggctataaatgcctatcccactgccccagcctcactgggacagcagatatcttgacccccagtgatcaccatgatcaggcagaagtttatttcccctctgaatcttgagatgaagtgatttttcatctttgggcagtgcagcaatatttcacatctctagtttagaaagttcatttattccaccttattcagttcttaccatggctcagtggttagaactcatcctgattgtctaaatgagagagactttgcccaaggttgcacagctagtaaacagccatgctggaatttgaaaccaggcctcatcaagccctgtggccagtctgtctttgcaccctggtgcagaagttgaatatctgctcaggggactcaccccaggctaagctaactgcacagaccaaccctcccaacctccacctactaatggtttctttgggatgtggagggctgtccccctacctcccttctattgcccatcagtcctctcttttattctctcctccatgctctgctctctgcttggagtaaggcctacggaggaggcactaacacgaagggtggct

SEQ ID NO: 61243 - DNA, 1037 bp, Homo sapiens
gctctgtgacctgtaattggggccctcctgcaagttcacatagctgaggacaggggcccacacagctgccaccagggcagggtcctcagagctcaacatgaaccggacagccatcccagcctccagacaagacattctcaccgacatccttgcaggctgacaggccccgagtctggtcctctcctcatgctttctcatttcttcctccagggagaacggggcatgccagggatgccaggcaagcatggagccaaggtacctcccccttccccacatcccaggcagccccaaggcccctcccccagtgcccatccctctctcctcagctctggggacactctggagtcccagctctttgggcctccttctgcctgccctggttctcccagctgcagcattgtggtctctcatcagtgccccctgatgcgggcggcctcctcctgggcatccctgggtcataaaaagccatctcaggtaccactagctccactgcagtcctaagacccaagtggagagtaggggcccccaaaaatcacctccacttgagatttgctaaggggcactttgggcatcatctatctctcaaagtgaaatgatatcaggtgatgtgaaaacagggttttcatatcagctttcacaaagctgatatgaaaacagggttcactccagccactccccagtccatgagggcagaggtgcacagagctgactgtgagggtaatgccaaccaaacactgggggcgactgtccctggtgaaatcagcccctttactttgtcatctattctgcacccctctcccgtggctttccattctcctgccgtctcccttcccatctcctcctcctcctcctcctttcatattccaacgaagctcccccttccaccccagggaccccctcccagccccatctagtgccccacagtccccactgtgcctcccaggagaggccaggagccatgcaggtggttgggaagcccagggagccccgcagactgagctacacaaagccccttcctcagggtccattctcgtggc

SEQ ID NO: 61244 - DNA, 1031 bp, Homo sapiens
ggccagtttcccgactcaggagacctgagttgtgctctgtcatctgtatccttgggaaagccactcactgttgcagagtctccgtctcctcatctctaaactggcgataataatgttttccctggatacctcactggattgttgggaaagagatgaagacatggtttagagctgcctctttggaaagtgtacagaagccctatacccgggagaggctgcatgtacagaaacggggccttcgcccagtccactaggctgctaacttgacttaggggccttctctgggtctcaggggtttccatctgtgaaatgggtgccatcctagacacctacccttggagcaagggagccacatcctgtgcaggccacagttggtcacactcagcaagaccaccttgagctccactaacagaaatcattgtcagtctgtagggtctagatggcccaactggggagaggagaacatggtggccagagcagacccagagtggcaggattgcctaatccagctgggctcctgaggtttacagtgaagccagagggctgggtgtcaaggttgcctgcaggcagccacagatgagggtcctcctgggggccaccagcctagtgggtgcctgacactgtgacgaggctgccctaatcccaagcctgccgacccagcctgggagcaggcagggagggtcctcttaacaagcagctacttcatttgagtgtaaacaggagttgcatcttccttggctcacggtatgatggcctctaggagcaccaacctagttcgacggtgctagaatcttggtctcagaattctcctctaggaagtggaaagagcctcagaggtcaaccagtcccaagtctgacccagtgcaggactcctcactcaaccggcacaggcaggcagctcactgcctccagacctgtccactgcaccatggggcagccccaggatggagggagcattcctggatatggtgtggaagctcccttgtcagcctccccgagttgacccctcagagcctctggcctctggagcc

SEQ ID NO: 61245 - DNA, 1112 bp, Homo sapiens
ccctgagcccctaggtgaaagaaactggtggcgaccttagctccctgaagggaggaaaccaagttcacctctctgtgaatcccctttgtggtcactagagggcactctctttctctgctgcctttggaggcctgattgttgtaaccactgcattgtcccagattggacttaaggtgtgaatgagtagtcttgaagctctctggttgcttctccaagacattgcagctcttggtagtggctgttcttcccctgctaagcacaaccatttctgtctcctaaccattggcagcaactttaaagaggaaatttttttaggggtcaagggttcagaggtcttatgacacctctgacctgcttttgtggcgctttaactaggtctaagtggagcttggcaggaggacgaggccagcctccagggatggattctggggaggcatctctcttgagtgttgagcttttccttcttgggttagggggtgctttaggtatccaggcaggtaggtggtcagcgttggcctggggtcttggtggtttcaccacttttacccaacccagtgcactagtgagattctggcatcttagtacaggggagcttgttcatctcattgtaagtgtgactctgctgccactggaacaggactggattcgttgagcacagattcttgaacatgttggagtctccggtccctttatgaggatgaaccttgagacaatggtggtggggggttggtgagaagacttggagtgacaggcaaggtggagggagacggtatggggcagcatagtggctgccaccattgctggggaccaaggcgggtcttctggattagttagcaagcagatggcctctgtctgcctgggcagccctgtgctctggggagccatggttgaatggggcgatcacatgcaagggcacagtcctatgatgtcagactgctctaacaatggcaaatgccaaggccagtgtgaatcaatgaaaactcattgttggtaggaactctgggagcccaggagagatttggctgcaggtcacatgtgtggtggcatgaagctctgccagcttaaatgcaaggggagtggtagagtggtgaggagcacagcccctaggggag

SEQ ID NO: 61246 - DNA, 1064 bp, Homo sapiens
cccttggctcacatgaccacaaccacaactccccagccttggggagaggcaccattcgggcccagatgacccggtcacactgtcacccatggggtactggctcattctttgcaggtatccaggtggacaacgctaggcatgtgtcctgctgtgccagagcacgcagccacaggcactggaatgagagaggaactgcaggagacaaacggccttaagacccagtgccttacaatttacaaagaactttcaccaacatgctcagtgggcagggctgggtgcacctctggctccctgggcaggcagttctcaccaggaggtgccgcaagtcccccaaaacagacagcatgtctttctcctctgcaagccctctgtggcccctgtccatagggctggcctttccctggtccctcctgcaatgtgcctgcttctcctgttccatcactggattgtttcttctcgcctggttgtcctggtctgctgggcgttagtatggactcacagctactgtgcaaactctttgaccacgtgtctttttacttctcatctccctgtactgcatttgacacacagccaagattcaagtggagaggcttgggggcaggggcctgaagtcaggagcccggggtgcagtccagtgatagggtggggtcctggctgagtactatggcagcaacaaccgtgtggggagacaatgtgtttacacacacggggctaaacctcggggggctgcaacccactgggcagggcagtgtgggctccgaaaccaggcccagccttttttttttctgtgaccactaggtggcctgaagtgatgtgtgtgaccctgcctcagttacggcaaggaccttccccatcccctgggcttcccagccacagctgtctcctctctacttgttttccttgactctgacttttaaacttctctttacacacatttctattttattacatagattcttgtgactttgaatcctttgtggcagtaggtaaagtgtcataagtaaatgaataaccccaggactggaacaaaagaggtttctttgcccatttacccaggatattca

SEQ ID NO: 61247 - DNA, 1161 bp, Homo sapiens
ctgggtcctgaggcactcacatagggttcttcaaatatgcgtggtgttgattgtcagtgcccatagcccccagcctgtccacaccaggctgctgaccatagtatgagggagaagtcttctgcagaacctggcgaccccagagcggcattccactgggtggtagtaatcccagagcatagtggtctctgtgggcctcccatggccctggccacacatgcagcctcttggtgctgaccaaagggacccctcctgtgcagaatacctgtgccttcaaccacagtttttctccaataatccataactactttagtctgttacaccagactccaccaagcacaaaatcatcccgtggcctctttggttgataatctaaaaagggggctccacggaattttaattagtctataattttgagagctttctttataagaaagagtatagaatctcatatcatatttcagcaatttagtaaaaatagcattttgctgggaaaagaatactaaggggaggtgcctggttcccttgttcttaatacttcctttctgcccaactgaacactgcaaacttccacggcagcccaggatgatcttgcctgtttattaaagcaattggattttatacatttgatactttagctcttttgtttaaactttttttcttgttatttggtgtacaatatttaaatgtacagtattttatctccataattagcttaattatagaacagagtttctcttccttctcatagtcttcagataattcagaaatgtttaaatcttcgcacccactttatatatgttgtgctgtttctaacttcatatatgtaaatactttttgacatactttggtgtttcaagttctgtctctacttttattgtgatcattatcaccatgattctgttatcattcttaatgttggattttttttctggtgcactctatttttttaatcaccttggatattttgaaagtatgttagctatttgtgtacgtagacataggaaagtgctgtgcttaaattaagctgtaagctctctgatagacagatattgaccttaaaatttggtcctcttaaatgctatctatatggttttcttccaattaacaggtgctatttcaacaaaacttgtttctctgctgaactactctgtcctttccgct

SEQ ID NO: 61248 - DNA, 1010 bp, Homo sapiens
ctgcgcagccccccacccatcgccccgtgcccatcggcggccgggcgcctccgtcctcccgctcctgcgcccgaaactccgcattcccaggagacctccgcttcctccgggtccagcctcgcctggggcccgctgctgaacctcgcatccctcctccttcccctctcagtaccctcgacgcccccggcccctcgctggccgcaggaatttgaccacttctttagcagccccccctttatcgcccaaggaagcaagttgggcagctggatttaagaatttgtttttgcagagggtgggtcggctatcgagggtgcgcccgcaggggctcgggggagaggcagaggtggttctctccggcccctgcactgccccggcggcgcgttttgtttccagaccccggagcaccctaaacaataatgccatcgccatggcgggctcacctggtgctgcgccgcctgctcccggcgcccggtgccctctgcgcgcccctccacgggcgcaggtttggcccacgcggcgccggtgccgggcaggactctttgcctttctttgggttctatctgtgcgtgtcaatggcggcaagcggcagttctctgggccgcggatagtagcggggggaggaggaggagggagaagggattgctccttctccacataaccacctctaggaggagttgctcagcctcatcccccgccagcccaggctccgcgacgggtccggggctttcggtggggcttgatgagctattgtccttcaggagtattaatggtgaaaccgcgcggcctccgcgtacttggccgatctgcgagacgagccgagggccactcgctaacatgaggctttccccagaactgggcacaaacgcgctatggtcgcgatccagtctcctgttagctggatccacctttggtgggagaaggtggcgtgggcgttcatctggcagctctggggagagtcttcgaaggggaaagcgaaaaatgccaccttctatatttttgtgtccttaaat

SEQ ID NO: 61249 - DNA, 1012 bp, Homo sapiens
ctattattattttaatacagtacttagggtaacacaccaaaatacagtcaaactctattaggtgggaagctaagatttttttcataccctttaaaatatatttcaatgtatagttaatatatttatattgaatcccctcatttcctacctagttttgttttatttcatctcaatgtattctcccaaaggattattctgaactgacaaagatgcttcattgcagtgtctccatcacttttcataatatttgcaatataaaatattctgaagcacaataccacagattagggaaatatcatagaggataaaaatgaataaattgaataaatttcagcaattttaaaacagtacatgagtccattagggatgacactgtgaatttcatgttcatgaaaacaatgtttaaagttttttttaaatttcaattccatcattaaaagctctaagatctcttatttctagatttaaaataatgtatgatgaaagcattttgatttgcatacttctgaagagaatgatctcgaaagagtgctttaaaaataagccgtctcgtgagtctagatcctttgtcaaggtgattcatcggtgtgaccgaaccccacctgtgacaccctggcctataattatagctcccaatcctcaaattactgactgctgtctctttttcaaagcctcgttgtagaagcttgactgtagaaaaaaatggtcatttaagtcaggatgctgttgtatgttctcacccataagtggaagctaaactgtaagggtacaaaggcatcagaatgacataatagactttgggtactcaggggaaaggtgggaagagggtgagggataaaagactacaaatcaggttcagtacaccaaaatctcacaaatcaccactgaagaacttactcatgtaaccaaataccaccaataaaaaatttaacaaaaactaaataaataaataaataaatcaggatgctggagctgtctaatggcccaccttgctggctggcagagggtttgt

SEQ ID NO: 61250 - DNA, 1056 bp, Homo sapiens
ataaaatctaacctgtcggtgttgttatgggcttaaaagccaaacctagaaataaattctgaaacaacagagtctgaatacgccctcttccccagcacacacaagaccaacgatgtgcttcccgttgctgtgctcctgggggttcgggggaacgagccaggagccctacattctccctcttcctctctgagtctggagttttacctccctgtttctcaccgttaacattcttgaaatgctctgatccactctacgagtaattataagactgtataccttggtctttctgctatgaaaggacaggtacattgcagattcagggtttgtctggtttcctctatagcccacgtgcatctgggaaaatggggccacctgaacagagccacgtggcctccagggattgcccacatggtgtctctgaggacaccaagagctgcgtccagccatattctctccaaacatgtaaacttagtgtattgtagtccttaagctttgcctaatcagagggaaattgtcttagagcagaaattgtttccttcaggctaatacttaaatgtaaacatttaatattagcctgaagaaaacaaattttcaccttgcaatggttctttttagacagtaggcctacaccgagactccaattaccaggatgtggataaaaacccattcaagtttttgactcctgacttcccaagacggaatagagttggaggaaagggtggcccgggaaagaaggaagttcagggttataatttatcataactccaggcataatccagcacaggctttggggagaggtggtctttagaaagcagggtcttctctggagtggccccagaggctcagcacttcctcccgtcggtgggctctggtagatgtaacatgtcagctccataagcccctccttgcttcccctagggattcctggatgtgctctaattcttactgtccgtgtccagggacctcacagccctgagtccccaggagggcctgggagataggtgcctggctgcttaaattccgcacaagacctgaaaagatgggtttggcaggcat

SEQ ID NO: 61251 - DNA, 1028 bp, Homo sapiens
aatttgatgtaaaaagactcccttttacaaaatgaatatcaaatcccccattctccctgcagtttattttcttcaggagcttagatatttatatattgcattcgcttaaagcaagacatatcttttgcaggactggtctaggagggccacttacttgattgtgggttctccgccttccatgctgatcacctgtccttcctataccctcttctctcccctaaagtctgcagaagttgattttagccaagcaggccagttgcaaccctgtcaccacccacagtagccttgagccagccaaaaggcaatttggagcatccctccccagcctgcgagggggacccaggggagggtggggacctgggagcaggcagcctcctttgcgtgtcctcattacctgccaggtactcaatgactgccgccatgtagacaggggcgcccacgctgatccggtacttgaacgtccctttcttcagataacgcatcagcctccccactggaaagatgacacctgccctagctgaacgggacagcttggacattttcttcttcccactccggcccgacatcttgcttcagtttccctctcagcttgctgacacagtggcctcccggcactaacacaatgctaaaaaggaaagaagacagagttgaggaagggtagttggcaaacatcttgggcacagtggcatggcccttgggcaccactgtgacacctctgactgccctggggaggcagctgaaatctggctgctactgcaggtgcaggaggcacggagtcaggcatggggtctctgaagggcatgggcaagcccacccacaaacatccctcccccaccaaagcagcctgacctcaagaggaaaggccacagaaaactgtcactgaatagggaggtctcggtcctgtggtcagctgaacaatgatccccaaagatgtcaatttcctcatccccagaacctgtgactgttatcttatatgacagagactttgcagatgggattaagctaagggtcttgagatggggaggttt

SEQ ID NO: 61252 - DNA, 1052 bp, Homo sapiens
gggaatcccagtgtgtgagcgacaggccttcttctattgacttacaatattctagaaggacctacgtgtggggacacagttttccaaactgaggaaaatgttgcaataaaagaatatgttgtaagaaagacactggatcttttatttttttcctttcattttctttttcttaaaaaaacaaaatgaaaccaaaaaaaagcctgaatcaaaacctttttaggagtagttacagatattatagggatgggggcggggggcactaaaacaaaagagaaaagcaccagtgagatgtctttcccattttcttctctccgccacggaacacgcacaccaacagagcccaggccactttttgccctcttcccttggaaaaaggaggaacagaagatttaagaattttgaaaggatttttttcttgtgtgaatgtgtgtaaaagtcaatgctataaatctaaaacgaggtctgtttttttaaaaaagttctaaaacaacaggaggaaaacacatggaaagaaacccctcgcggagacctgcttccttacagatggaggctcttttggaggagagtgtgaagggcagagggctccctgcgccggcaggacctgcccggccaccctccactcccctgccatcacccctcctctctccttttaaaaagcaaaaccccactcttgggactcgggtcgtcctccgatccctgctggaaagtgcggcggctacttggcgtcgagcttggccatctcctgcacgtagatgccgatgctctcgctgtcgaagagcaggaagtacacgttcttcagcgaggacgcgctcgagtcatcaaagtgggctgagatggctttgagggtcacctgggccgcagtctgtttgggaaagcagtttctgtgccaaagcaaaagaagagccgatgtcattttggtccctgggacccatgggagcatgaagtgcctttgtttttactgggtggggccttgctgtgtgcagggctagtccatgcatgatctcctttgaccctagccaaagggacagcctgggggtggcaggtggggcatg

SEQ ID NO: 61253 - DNA, 1050 bp, Homo sapiens
tggtgcatgcctgtaatcccagctactcgggaggttgaggcaggagaatggcttgaacccaggaggtggaggttgcagcgagccaagatcacaccattgcactccagcctgggcaacaagagcaaaactctgtctcaaaaaaacaaacaaaaaaaaatcagggtctcacccaccttcctaaagcgatttcacatttccggccctgagtctgaaggcctcgggaaggatcggcactctgggaggtgcagccccaggcggttcagtgaggttctggttgtttctgtgtctctgcttgcaggtgcactgacgttcctcctgtccatggggagaaatgacggtgtgggccaaatcagtggcttctatgtgggccggctcatggttcggctgaccaagagccgggacctgttcgtctctacgagctggaaaaccatgaggcagtctccaccttgatggagaggccaggcgggagaactaccgcagcaggtgggcgtacggactgcttggcgcatggcacccgcctggcaagtgctagaactaatgctattcttctggaataagatgccaatgatgtggtggctagaaatgcaacttgtataaaacaaaaatgggagagagagaggtattaaacaaataccccccttagaggatactttctgggtttggaaggtgtgcttgctgtggtactgggtgagcggctcatgtgtgctggctgcatggtgctggggaggccacagccagcccttcctctgcacctgcctcctctgggatgtgcatgtgtgtgtacgtgcttgtggtcatgacgcgtgccatttagagctctcagagcagggcagattgctgggctctggtggccagtgtctgtctgtgagggcaggaaggagagctgcacattgagaacaaaggagggacctgaggtggagagaggcccagcaccccaaatctctgccatcacacggtcggggagcccatacattctgcaacaaccagggacttcacaggagccttgttttcaatttgctaacaggtgcataatccctgtgctccttaagc

SEQ ID NO: 61254 - DNA, 1467 bp, Homo sapiens
ttataatattttatcctgtagcctctcattggtggcagtttccattgattgatggagtgtcacacaggtggaggtttgcacagcactactgctatgttagaacatacaactgggcatccactaattccatacgtgcattttcatctcctacagggtgtgtggctggaaatgcagctccatggcttaagcccttgctttaggtgtctggccaagtagatcatggccaagcagaggggagttcactgttttctggggccaggcaagaaccgacactggcagagccaaagagagtcggcatgtccaagagtattgggcaaggggctgccaaagaggcagggtgaaatctgctggagagtcactggcctccctattccacaagtaagcgtggcaggggtcagtagaggagagagaagagagagagagcagattgcaggagaggcctcaggcagcctgaagaggaaaagtgcctcccctccctggccctgctctggtctgggtgtcccctcaggccccaggcccttcacagggaaccccagataagcaatttgccttccttgggtgaggcaagagtttgccctttcggggaagcaggttgatgatactaggggcctgggggtcaagggcttggctcctttggtcaactcattgcccctgaggtccactctggggtcactagactttctttccctggaggaaaccccatgaagggcccggagcaggcttgtatgtccacctgattgtcaaagctgccctggcatggcaggctgtctgtctgtcggcccctgtcacctgtcctctaagcctctccaccttctgccacaggtgccctgaactctacctgcctcctcccttcctgccactgggcctctggcccaagttgtttcctctgctaggaaggccccctgatctcagctctttttcagggctctaggctgtcctttttgagtgtccctgggtgctccagtgtgacctgacgcacagtggactcccctgtccctatccccggccagctgcgtagcccctctcaggggccatgcccagctaacttggaagtggggctttctgggtgttttcttgacctcatccctggctgacagccccaagggtaagacccagcacagagggttgcacgctgccaggggctggtgaaacacacgccacccacggcctgcctcatcactgcctacattctcaggccctgcgcagctcctggtgtgcactgctacctctggctgggcctgtgggccctcctgggtcctggtccctaggagacattcccttctggcccagttggcagattcagcctgaggtacgcttgggattagctctagacaacccttctgagggcttagaggagccagggtggccctgcctgccggggggttgtcttgggtcctaatctctacgagggctcagcctcctcatctgtgaaatgggtatgttcaagcctcaatgctttggggacca

SEQ ID NO: 61255 - DNA, 1050 bp, Homo sapiens
tcctcccactttgtttggtgttgggaatgttactgagcgtctctgggcctcagttataccacctaaaatggagataatgccagtgcctagtttatagggtcgtgaagactaaataaagtgatgtccacaaaacactaacaccaaacctggcccacagtgctcactaagtgtcaggttgattattcaggtacaggaagctttagagaagtagcacagtttgtcaaccacctttggagataccacagaatggttacatgacttgcccagagttgcctgctggtcgattcagggctgatacccagatcttctgacttttactgtcactctcagctccttgatttctcccaagtactgaggagtcagaaagctagcctgtcatttgtttcccttgctcccaggagtgtggccatctggggccgtgtggtatttgccactcaggagacatgtccctatgacatagcagtggtgagcctggaggaggacctggatgatgtccccatccctgtgcccgctgagcacttccatgaaggtaaaggacgaagggcgcagcctgaaggagggcccctctgagctagggtgggcctcaggaaggagaatcagtgttgggcattctcatgaagtcagggtagcattggtcaaggtccttggaggcctgcctccctttttgtgctggtggggcacatggagtgccctgggaaggataatgctgcacgccctttccccgagtgcctgcagcaatgtagtgtgaggatgctgggcctttggggttccttaacacttcaggctggtcagagaggcatgtggcactttcaaggctccaggggcacgatttgggtaaaaggctttgtgatgctgccacataagtactgatgttgcactccatggaggcagtgtgatacagtgatgaagggtccaggggctctggatgggcatctttcctatgccacctattagtcccatgtccttggacaggctagttaactatcctctgcctcattttccacgtctttgaaatggggctaatgcatcctatttctgggtgttgtgagg

SEQ ID NO: 61256 - DNA, 3974 bp, Homo sapiens
cccttcctactttattcctctcaatgcctgagagagttcttcgcacacaatgggacttggtgaatacttggggaattcctgtagtcatctttgaggctctgtagccagagcattcattcttataggactttgctgagggacatcctgaggatagtttgtggctgagcagattagctcaaaagttaatattggggcagttctgctgccttgtaaataaatagaataaagttgcaactgtttcgaggcacttaggagatttttacttaatgtcatgggtgttatgtaatgtcaaggtgaatctttaatcactcaggtataaagttgatcagattttcactttacattaatgccttaaaagattagtggaagtcagaattttcattatctggtgggcttttgtagattcctcacttaattcttttttttctttttttcttttttttcaatctttaggctttaatgactgatgaaacaatatccaatgtgccaatccttatcttgggtaacaaaattgacagaacagatgcaatcagtgaagaaaaactccgtgagatatttgggctttatggacagaccacaggaaaggtaagagaaaaatatttgggttacatataaaggacattaacagtttttaaaacatgatgtttcgctatctagattacccttttcttttaaaggcttaaacaggcttaggattagttttactgtgagtattttgtaagctcactagaggcaggagtgtgttctttttaacgttttaaatgggattcattcatcaggtatttgaggaagaaggaaatggtagaaaaggcagatttactcttctaagagtttatgattatctttcaaatttgattctgagaaattgcttttgaaatagccctttttagccagaaaataattttttttttggactggagtttgcaggttatgaagaaaaataatcatttcaatcactttccaagcattgaaatcaaagcacttgattatcctcattgcttcttgctgagagaggtaggactgttggccgcattttgcagaggaagaaacagagagtgatttgttcaggtctacacagcaagtcagtgataaaaccagaaaaagaacttgagtcttccaaatcaatagtttttactgtcttcaattggaaggaggactcttgtagaaaagcaggcttgagagagagaaaatctagatcagataaagttaagcaggaatcttactgttctttttagcttggggttttggcatatttagtttttaaatatcttccttttctgtgataactttctgacttttttacatggttccttagtctcacctcttcttgattatcggtttctttatagaaatacttcctttctttcatttaatttctcctcttttgcatcagtattaaatacacatgaattcttcatttcttcagtgccacctgttatgagtgtttatttctgcatgcttttgttaatgagaatgtccttatttttaaacagtcccagacctcttttctgcatcagagggcatgctggttccataagtcccagtggcttttttcttggtttgctgccataactttacagataaatattgggtgttcaaagcaaatgctcttcagagagagaaaggctgggaatagaactgtgctgcttattctatcctgaaaacacgaagcctggggaagtcatctatatggccttgaccacatttctgtaattaatacctacttaggtttgcttttaaggaatggataaaatgattgtaatgatcgtcctttcaatcttttccaccacagagatgctaacaggcctttcttggttttgcctcctttaggggaatgtgaccctgaaggagctgaatgctcgccccatggaagtgttcatgtgcagtgtgctcaagaggcaaggttacggcgagggtttccgctggctctcccagtatattgactgatgtttggacggtgaaaataaaagagttttacttctctggactgatcctattcacagcttcctcatgaacttttctaatagaacaaggaaagctctccaaccatgtctggcgttgagaagccaagagtctctgtcaactctctcattgcccagtggtgacatgtgctcttctccacactgttgggaggtaatgctgccccacgtgctggtgcaggtcagtatcctgggacttggaagctggcaggatttgccgggtaaagctgtatgccatcatggggcacctgaaaagaaaaacacgtctcaccactgtggttgattcaaaagaaagtgattctattttttaaagaaagcgttgttaatgtaattggtatccctcctaactttttgagttcacaatttacttggtccagagttttctattcttttttttttttaaactaatgaatgacatttagatacttcataaaattatgaacagatatggaggccagagctcatttgggtaaacttactcctgctgagttagcaggttggtgagagaagctcccctgagctcacctgtctctctgactgccttggagtaggtggcataaccttgtgcacagagaactagaaaaggggcagaaccccggccttgcagttgtggcaggtttccactgtggtaagctaggttcattcctcatcaaggaatgtgtagcagattgttcactgtggaggagttaattatagaatgggttattgttgttattcttactcatgaagttacagattttagccagtctttgcttttatacttttgtgaaatttaatttctctctatagcaccttcctttttcgttttcagttatcaaaagtgactttgacctcataaaagagttgagaacatctctcgtgtcacatactgcaggtgcatcagttacttttgcacagattctagggggacatttttctgaataggaagacaggacaaagttaacagcttaagggctcttaattctgtgagttgaggacttaaaagtattgtagcatttgtttggatccatgaaaaatgtattcagtgggctttaaaatttccatttgcagaatttggtctctcaggctgtttgggagctcttttttttacattttttctcctttgacacctattttattggtgtttaaagtaaaggttaacatctgtagcttttccaggtttttttttttttttttttttttttggtatgaaattgtctttctccattgcagaaataagctagggaaacactaacccaaaaactttctgtagagctgttcctttggaggcagcatcacttattggcagtaaagactcagtataaaagcaccggcatccctacttgggtgatggggattaattttatagcattccattttcctagtgccacatgtgaaattggattttgatgatcttaatctatattctacccttataataaaagatcaaaagatatatctcctatgaacagattggagataggagatgaaaagttgggaggatgtctttattctaatgtgagggtagggaaaatgtggataacattactggggtgagggaggcattgttctttagttggagttctcattcttattctccagtactgacttgtggggaaagcatactttttcactgccaggtactgaatgcagaggctcagtgaagtatatatgtgggaagtgcatgcatttcgtttattagcaaacatagctggattaagacaaagttgttggtttggaaaggggttaaagccttaagtgaacaaatctagctaacagtgaatgaactaggtaatataacttgcatatttttaatttcctttggttaaaggtcccccatacttctctgttcggagacatgagaagtatgattacttcagtgttagttttcttaattttttttttcccctatttgtcccttgtcactttgttgcaagctagaaatctgtgggttatacatagggcagctctttgtgaaagtggtttattccactggagaaaggggattgaaaatca

SEQ ID NO: 61257 - DNA, 1053 bp, Homo sapiens
taatttgtatcctgatgttttaactcagaggttgcaaactagacttggccccaggggcaaggcaagtcatttaagtgagtaaaattggctgactgtaagacagcagggaaattttgtcaagcaaaagtgttcagacatcatctgaaggggcagccactgcttagttcctgctgataattgtcacgtggataagtaggcatgggattgccagatgttgcagtttttcaaaaaaagcggaaactctgattttcaaatttacaaaaatcaggttcagctcatggaccatcagtttgcatcctctgttctgaattaatactggccagaacttggagaaatccatagagtctaatcttactgaaacccgaccaagatttgtccattttatagaccattaggttattcattttcacaatgtatattttttactcatgcaactacaaactttgttttttagcacgtcgcgtttggaaaaattatctcccagcaattaatgggattgtctttctggtggactgtgcagatcattctcgcctcgtggaatccaaagttgagcttaatgtatgttttgtcctttaatgtgtattttaatgtatattttgttcttttttggcctctatttttttttaaggaatatagctcagtagtgccaataattagtcattccagttaacatttggcaaaaagacctagttgcaggaggaaaatgttttaaatctaagacattgcttttcaatgtcctgaggaaactcagctcaaacttaaataaattaactgttgtttctatcatacagtgattatatggccaagtttgctcaggatactcctcatttatgcctgttgtcccagcataattaatagtattctgtttcacgtgtcatgaacagtaattctgttttttttttttttttttttttttttttgacggagtcttgctctgttgcccaggttggagtgcagtggcgcaatcttggcttactgcaacctccacctcctgggttcgagggattcttctgcttcagcctcccgagtagctgggactacaggcacgtgcca

SEQ ID NO: 61258 - DNA, 1049 bp, Homo sapiens
tgagaccctgtctcgaaattaaaaaaaaaagtttgaaaatcacactatgcaattagcatgaagtgtaaggaagcccaaaagaaaacacctgcatttgctgtagagaaattttgtatgtatgcctgttaattttcaggtaattcatagtaggattcattaaagcaagtatattagtctttgttatatgttaggtgtatttttgattctcaacaggaattctaatttgtttttcttttctctgaatacagtggataagtggttccatcaccagaaaaactaatgagatttctctggaatacaagctgatattgctacatcgtgttcatctggatgtattagaagtaaaagtagtagcttttcaaagctttaaatttgtagaactcatctaactaaagtaaattctgctgtgactaatccaatatactcagaatgttatccatctaaagcatttttcatatctcaactaagataacttttagcacatgcttaaatatcaaagcagttgtcatttggaagtcacttgtgaatagatgtgcaaggggagcacatattggatgtatatgttaccatatgttaggaaataaaattattttgctgaaacttggcttaggatatttttattttaatctgaagccaacattaagtaggtatgggtattttttggtgtttgttttctgttgatagtcttataattcaaatttataattattagacgaagaaatcgcttatatttatagtactcttgatactatgctctagtacataagtcctagcataccattctaaagcaaaagtttttaaatttatatcatattagcagaaagcacaatgttgctcaccctttgaagttatatattaatagttatttttttacttcttcagtcaactaattggacgcttaagtcatttatattatattctaagttatcagctgaacaaaccagtttgaatgccagcccatcttcttactagctctgtaatcttaagtcagtttaccaaccactcaacttcagttccttcatctgtgaaacagacattattcatgtaat

SEQ ID NO: 61259 - DNA, 1049 bp, Homo sapiens
tctttttcagtatcttgtacacttctcataggaattatctacatttgccaaactggttgtttcattatgtagccaccagctgtttgcccttacctaacagagattactattgtactgattgttctctgtacttagtgtcagagctattcagagatactagatgattttctttcaatgtatatgtgtatggcttctcttctcaacaaggggcttcgctccaatgttatcttgaacttccgtgataagtcattccacagctctttcaaaataagtacttggaatttttgttgagtgtataattatttgtgcatcttgaaatctgcttattctcttctttctttttaaaaaaatcattctcactgtcatcttatgcttcttctcttcttagatatcaatgatgtcaaacggctgaaacctggctacttagaagctactgtggactggtttagaaggtataaggttcctgatggaaaaccagaaaatgagtttgcgtttaatgcagaatttaaagataaggtaatatgtcattcagaactgtagctttaggctcatttgtattgagactcataatttaaccatattgttaccatctaaagattcacaaaacagaagtctggaaacataacacagtcttggtgtttatttattcactttaatattctcttccatttttagaataaggaaatgattcagaagagacaaagtatcaggctttggggaaatgttgataataggaaaataatacctttttatcattgtaatgcaaacctcttcaaattataggactttgccattgatattattaaaagcactcatgaccattggaaagcattagtgactaagaaaacgaatggaaaaggaatcagttggtaagtgtaaacactttgcatgtttaacacacaaagcagaccagcttgcagaaaaggttttaataatcataagacactgtactgttactttcacttagaaaagagatacaaggctgggtgcggtggctcacacctgtcattccagcactttgggaagccaaggtggatggattgcttgag

SEQ ID NO: 61260 - DNA, 1039 bp, Homo sapiens
gttatcattttgttttttaagtcataaagtttttgagtcatcgtatgacttgcttaactcatgacttttataaaataaaaggtaaagcatattaagatacgtatttgagactatggaggacttattcttcagtataatcaatgacagtgcaaaaaacattgattaccctgagctatgtactggtttccctatgacctagaagaaaataggacctataagtcctgttttcaactttaataggactgatgaaacatttactcatttaggtttttaaaatttgcttaaaggaacaatcttcaggtaaattctcaagaacttggcctctttcttatttcctgttagccaagtaaaactgtcttctagagtgtggttctgtaatgttgtcctgactttggctattgactctcaggtatgtgcaagaggtgaaataattggcgtgaaagttctaggcatattggctatgattgacgaaggggaaaccgactggaaagtcattgccattaatgtggatgatcctgatgcagccaattataatggtaagaaaatttgaaaagtctgaagtctttctaattaattcataagcaccaccatacttaacctataatgacagaattgtaagcccttaccttcaaactgttaaaggatggaggaacaaagcactggacaagcattatttctatgactgcacttgtaattaactaagtaaactttctccttcattccaggaaagaaaaaatctggtaggttcttactgtttttttggtcctttccttccccacataccagcactcagttggtatgtttatttattttaaaacatttaattgagatattcacatatcaaagagtcaccattgtaaaatgtacaattcagtggtttttagtatattcactaagttgtacaaccatcaccactctctaattgcagaacatttcatcagcccagaggaaatcctgtatccatgggcaatcactccctgtcccccttccctcagtccctgatgactgcagatctactttgtgcctatggatttgccta

SEQ ID NO: 61261 - DNA, 1023 bp, Homo sapiens
atatttataacatattttatatcacaaactcttaacagtaatcactttttttgtgtaataaatacccaagtatttgaataattttaaattctgtgaaggaaaactaaaattggataatatttattttgcccttttaataaaaattgtggtatttttattactcaaacattagaatttattccagctaattttagtctttgctttctagaattagtaaatgttctttttcccttcttgatagttcctttatacctcacataacctttcacttaatggccgattatggaaacaccttagttcaattataaaagtgttagggataaaatatatcattaaagtggaattagggaacataggtaccataattcatttcctcagatccttatttgaatagtatttcacatccaaatatgcaaagatttgaaattttcttatttcagattgctacaaaggaccctttaaaccctattaaacaagatgtgaaaaaaggaaaacttcgctatgttgcgaatttgttcccgtataaaggatatatctggaactatggtgccatccctcaggtatgtcttcatgcaactgctgacaatgtactttttagcttactaaatattaatttactgctattagtaaaaaaggtttgaatacctgtggagagttttttctatggtagattttgaaaacataagaagggataattaactcagaatgcttccttaaataacttattttcaagataaactaaatatttacaatgtttaaattcagatttgaacgtttattctttcctgaaatatttcttcttttttggactggttataagctatataaattctctacagactgagttgcaagtctgttcagtcaagaaagagtgtatggtagtagtcaaaagcactgatttttggcaccagacagaccagagttcaaatcccaagatggccaattcctagcttacctaacttgcctccctttctttctccttgagacgtccatatcgcctccctgagctattcacagtatgta

SEQ ID NO: 61262 - DNA, 1018 bp, Homo sapiens
atatttttaaattgtagggatgtcctttgctctgggtcaattttaggatcaaatataaaagcacctatagctcagagtatcttctaacataaaacttctgagataccagaaattttccaaaacatggtataaacagtatgaaacactgggtagataaaagctttctctaaatcttaaagtgctcaaatatcatgacctgattttttagttttagaaatcagatatttttctattccatatcttaaactttcatgttaaattctagttctgacaatgtagggttctatttttttcaggtgattgttgggagcgtatagaagcatatataaatatggaatatgtgtttcttttttccccttctgaaagaaagtcaagcctctaatcaaatagattgatgcttcagaaacttaacagaatattatctgcaatttggcataaatgcatttttcttggggaagtttccacgctcaaaattattagtcattgcaaaacagaaaagtttgacaactggaaatgcagacccttttgcttgattttgtaaagacaggaaaataaacagattatgcttagaatatctgttttcaaaatttagtcatcataaagcttatctgaaaagaaaaaatagcaaaaatagcagctttttctttctttttctttttttttttaagacagggtctcactctgtcacccatgcagtgctgtgatcttggctcactgcaggctccatctcctgggctcgagcaatcctcccacctcagtctcctgagtagctgggactacaggcacacaccaccgtacctggctaatttttttgtattggtagagacaggctttcgctggtctcgaactcctgagctcaaacagtccacccacctcagctcccaaagtgctgggattacaggtgtgcgctcccacacccagccagcagcttattcttaattatgacatgacaaattaagttattgctctacacaggtacatatggtagtgtgtagtagcaaatacaggcatttgtttg

SEQ ID NO: 61263 - DNA, 1046 bp, Homo sapiens
tgtactgtatttagcaacttaacacaaggacaaatatcttattctttttctacctttcagtttttttccttcagtaaggaagtttgattcacattgagtacaaaggtttttgagttgtaagagttacataggttattgactttctttagctagatgtcaatatacaacacgaacatcactttgcagtgcacgtctagaataatagtaattttgttcttgtgtgtgctgtcttactgtttttctgggcctgactattagatagaaatagacacattcattgcacttctaccaggaagtttgctgcagttctgtactgcctgaaattccaatttttacattgcttcccaggagccttcctgggtaagactccaattagaggcaatggagcaaacagccctaggccaattatgtgccacaaatacaggagggacttctaattggcatgtgtttttcctgtgggagtgtcagagtggtatttattcagaaactcgaatttgttacatctgatttcctgggagttgatataaactgcagaatccttccctcttcaattggccccattgggttggcttgaattatctgcttgttgtataatagcatgtatatcatactgtagcatctcagaccattttgagcaatgaagaggtataaaatgatgaccctaagtttattgataataccctggcatacaggtatgctacaggtaggaaaacattttcttgacatagagctattttcccagtgttctaagtgactgtattcctaccaaggaccagaatgatcatagatgttttggtacctactcttattgctgcttcaggttactccaaaataggaaacaggctacattttggtgtcctgttaagtgtgttcacttagattactctcagacactgaagccttataagggactggttgtgtctataaagtggattactcaaaggaagactctgcccttggcacgccctgtcccagctcaaaagcacaagttcttatgactctggattttaccagtagtctagacctcagtggaccttgggcagaag

SEQ ID NO: 61264 - DNA, 1015 bp, Homo sapiens
aggtattttctgagcccctgcgggtttgaggccttgtttttagtgctgagagccagttgctgccctgagaagagaagacaacctccatctatttattgcttcctgagaactgacctggatgcggccctctgcagggcccagtcttcagtcctgtggtccctggactggtgggaacctgaactaggagtcctgggagagctgtggtgggaatatgggctggcactgctgcagggcaagaacattcatgtaggagcccgaggaccagcaggctgggaatggggagcaagtcacgtcagctctgtcattccccacagttaacaaattggcggggtgggaagtcctgagtgctccgtccctctagcatcactcctgagctgcgggagaggtggcccagagaacagcagagtcagttacacctgcagctcttgtctaaagtgattagatggccaccctcaccactgtccagtccagcagcagcctggctgccttgtcatggcctcctgggggcagaaggcgatgtggaccacgggatttgtagccagccagctcccaggccaacgcccaaagccctgatgacctggttcttctgaggccctcaacctggcatcttagggtatggtcaggcaacagggtgaccagctgtcctggtttcccaggacatggaactttcaatgctaaaactgggacagtacccagcaagtggggatggttggtcccctaccaggagagggcctggggctcttgcttcccgagaacgcctgtggcttgaagaaccttgactgcttggtcctcaggtatctacctcccaccttctcctcatctgtggagcaagccaactcagtgccccagaccccacctgatctgcatctttgtttgcatctccagagacacctgaggccccagagcttgaggcaaagccaggccgtccaaatcctgtgtgccgtggacgagtggccactttactactcctaaggctaagatgttgagagctcagaccactgctcagagcagtaat

SEQ ID NO: 61265 - DNA, 1056 bp, Homo sapiens
gctattactggccttcagtagggtggttcagagaatgccacagaccctggagaggccagctctgtggcagacgtggaaacagcaagccgagaccccggcagtgccgctcccactaggcctggagtcgtggggatgtgttccggggctgggctgcagtgggtcttcctgccatgcccagcaagcctgtggcagcagcatgacagggggacccccccatcctcagaagtactagccactgtgtgggccactggccttcccaggtgagggacagaggagacacgggagtccagagtagggagggtccttagcaagctcctgttcagcctcctctggagaaactggggaaggatcagtggtcttcagtagcggatggggagaaggggtgacagcagctctgagccaccatttctcaagtgggaatatcttgacaactgaggttgtgatctcttagcccgggcttcagtccttactgaatcgctcagtgaaacttgcctgtcattgttatcttctgggggccgggggccagtgcaaggagaccaggttctggccttggccttgcccctctgcgttgtgtgttgaagtgtatgggctctgggatcaggaactgtcctgcctccaccacttactggcgtggcaaccttgggcatcaagaaactgagaatcaagttttcttacctgagaaatgggtcattgtgaggaactgtctagcatagggcctcaaacatcagttcccagaagcagcctgctttgctgggcccatttagacaaaggtgctacacctccttgcgccttgatttcctcctgtgtccaatggagtttgatgccccatgaaataaaagccaagtgcgaggggtctttcttactctgggtgatcaggggcagaggggatggcatctgtacccctgcccacgctgctggctgtgccgctggggaatggctgcaacagaactcctgaatatgaagatgtgcaagagtccaaggaattagcccttttcttcccagccattattaatagggaaaatgggggccctgcttgaaagaagagactcaagaact

SEQ ID NO: 61266 - DNA, 1579 bp, Homo sapiens
acgtcctaaggaagaacagtgaaagtaggggcacggctggtgtgtacccaagcatggggactccagttcctcctcccatcagccctgggctgtgctcctccaccacctgctgcccttgcttcctgccccccagctctcctccctgcacagggccctgtgggcgcccggcttctctcactagattcagcttcagcccacactatatctggccccatctcttggtactgcctcagccgggttcccagcagagggactcccccggcccagctgccttcccacacaggtccctgcacaggtcgctggccagctttcagagcagctgctctcggagcaggaacccacccacattgggtcagctgtggttggccaggggagaaggggcacatgacactgaaagaatgtggctgcccctggtggctccttgagcagggagggccatggagagtggtgtcccctaaatggagtgtggggagccccgagggggagaggccgcccatcctgacctgccccgtcagggcccggagttgaggctttgtctgagggaggagccagcacctcctgacccctcgctgaggcccaggcttctgctgggagagccttccattccaaagtcagcagcaggcagcctcagctggagtgacaggtggcaggccccgggcagcggtaggagggtgacccctcctctagcacaaataaacatggaatcagccctgtgcggggctccctctgtggcctagggcttcctctgtgccttcctggcccaggcagggtgagagccacagcgggcagtcactgtggtctcggggtggccccctcctcatcctgttctctctccttccctgcacgtggcagagctccacctggaggggaacttcctacaccgcctccccagcgaggtcagtgccctgcagcacctcaaggccattgacctgtcccggaaccagttccaggacttccctgagcagcttaccgccctgccggcgctggagaccatcaacctggaggagaacgagatcgtaggtgagtgggcctggcccacctggccctgggctgctgcacgaggcgctcatgggccacaggactctggagtcgaccttcacaggtgggaggagaagcttgggctttctgtctgagatgcctgagcaaaggacatggggcctgggaaggtagacattttgaggccctgttgcctaccgggtgctgggtgggacacttgctttccctggcaggtagacggccttggctttcaccacagtgcagctctgaactagccaggccactgtaggccacaagctctccctctccagttctcacctaccagcctaggcggtctcagacccttcggctctggccctctgtgtactttttcctccctgagtcccctggcttcacagagacctcttcacaggagtgagcagggcccactagacagccatgttcagcacagcctctctatgccttccagaacaaacacgctgctccctgtcagcccagcctgccagggccctcaccaccagggaaccaggggtctgataggtgccttctgcaaacagcaaaccccaggaggttgggttctgct

SEQ ID NO: 61267 - DNA, 1979 bp, Homo sapiens
agcgtgacaggactaggaagaagatcaaaccataaagtctgtgtgaattgcctgttttcaaagaagtagactattgtaaagcagtctttagactgcatctgcgctgtcgagtctttgatgattctaaagggacttgtggattctgcaggatctcaaaggcactgctatgaatgccagtcatctttgtgccggcagacacgattctggctagtaggctgtggtaacagagatggtgctaacacaaatccttaggttcagggtgcaagggagggacaggtgtgagttaatgcctatgaggagggctcctggaagagggagggcagggtctgaagcctggtcctggggagacaggtgggagggcaaggaggctggaagggggcatggaggtggggtctgtgtgagtctgggacaagttctcgggcagctgtggctgataactctggtttgtttttgttctttggctgcagacctggccgagtgcaagctggtctcctttcccattggcatctacaaggtcctgcggaatgtctctggccagatccacctcatcaccctggctaacaacgagcttaagtccctcaccagcaagttcatgaccacattcagtcagctccgaggtaggccctggtcagctccagccaggagggcatggccagctctcatcgttcaggctctgaccctgtctggggagtgccaccagagctggtccctggtcagcgacacccatgaaatcattcccatgggttgactttgaaaatggacctgtgttctccctgcagcttggaactctctaggtcacttctgcctctagctggctgtgaagcagattgaacaaggatcaagggtgtggttcctggagtgattctcttgttctgaacagaccagcagggtgtttgggtcctgaggccctgggagttgttatttcccagtagtcttgaatgagcccccttctcaccttccaatctagtgttgttctcctgtgttgctctctcagttcaggagtgacagatgccagggatgttggcattttcttttctttttttttttttgagatggaatcttgctgtatcgcccaggctggagtgcagcggtgtgatctcggctcactgcagcctccacctcccaggttcaagcgattctcctgcctcagcctcccaagtagctgggattacaggtgtgtgccaccacacctgggtcattttaatatttttaatagaggtggggttttaccatgttggccaagctggtctcaaactcctgacctcaggtgatctgcccgcctcagtctcccaaagcgctgggattacaggtatgagccaccatgcctggccgatgttggcattttctctgctgggcatattcagagcatgtggttgtaggtgcttgccatcaaggtggcaggagtccagcaggtgagcctcgtagatgctctagaaatggttcctctggatggacaagcagtgtggcctgactgctgcagtgcctgccctcttctccagagagcagtctctccatccttctacgagaggtcactgctgctcagtgacccatgtgacagagctgtggcatgggcgcctgttgtacgtttgtgaacgagtggagtgggagaattgcggagggcacaggaagcctaggggggcagatcctgcttcatcccagactcacatggaccccaactccatgccccccttccagcctccttgcgctctcacctgcctgccctggagaccaggcttcagagcctgccctctgtcttccaggagccttcctcacaggcattaactcacacctgtctctcccttgcaccttgaacttaaggatttgtaacagcaccatctctgttgccacagcctcctagccagaattgtgtctgctggtacaaagacgaccagcattcatagcagtgcccttgagactttgaagaatccacaagtccctttggaatcatcaaagactcaacagcgaagatgcagtttaaa

SEQ ID NO: 61268 - DNA, 2353 bp, Homo sapiens
atgtgtgcatgtgcatgtatgtcacccatggaatgcaggcaccactgtagaggcctggagcacagtcctgccttggggatgatcttgcagataggcaggcagaattggagttaggtacatggagaggaatttcacaggcaggtaggggtgtgtgtgtgtgtgtgtctgtctgtctgtctcacaaaggagcgcttccttccatggtagttactgccttagcaaagtcacagagactggaaaggcagtcagaggcagagaggtggtccaggaagtggagagacactcagccttcaggatgagcttgatcactgcctcttccaggaagccctccgccttccctcatccaccctttgctccctttctcctctgtagcaccccttcagcatctgtagagcacagggaccctgtggttgtttgcttccccctgccctgccccagagcccagcgcagtgtcaggcactttgtaaacgtgtggaagtgtttgctgagcttagctaaggcgagaggcatttcctctatcagcaggctcgctgaagattgtcattggtgttggagggaagcctttggaaggagccttaagctagtgagctgatgactgtgagccctcagtgaaggaattccggaatcctgtactggtcagtaatatggttgtttaaggctctctaccactgagactgcggttcagagctaggctttgagtcacatgggcctggatttgaatctctactctgccacccactcacctggtactgtagcagattgcttaacctctcagagcctcagtttcttcatctataaaatgggaatggtaattgtgtctacctcatcaaggtagttaagagtaattggaatgtctgtaaggtgtttggcacatagggagctcaataaatggcagctattatttttaatttttgctcattcccaaaagctggtggcgagacctaagcccttccccttgcaaatgcactttctacaggtgtcagccagccacgtctgtgctgggtgttcttctcactgccttccaatggagggttcagtgcaaatcgacagatgtctgtggtgagtaacctacccctgcttcaaaatgtcacagggggctgggcatggtggctcatgcctgtaatctcagcactttgggaggccgaagcaggtggatcgcttggggccaggagttcaagaccagcctggccaacatactaaaacatactaaaaattcaaaaaattagctggtgtggtggtatacacatgtaatcccagctacttgggaggctgaggcaggagaatcgcctgaacccaggagatggaggttgcagtgagtcaagatctcgccactgcacctccagcttgggtgatggagcaaggttccatctcaaaaaaaaaaaaaaaaggcttcacaggggatagggacacagcagctccacttcattcagatgtggcaagagtggagaggccgcaggggagggaaaacaattctcaccggggcgttggggaagctgcttaggggatgggtgctgtttgagagaggatgtttcaggaggcagcggtgaggagacaggcactccaggcagtggcaggggtgtgcctgagttggaggagaggccctgcccagttaccacagcagcactggggcaggtggtgagggatggtgcctggcaggcggagagcctggaaggctgtgttgaggagcccctgaacttcaacctctgtggactggagattgcaaggtcaagtgggccagtggacaggtgggcatttctgtgagctgaagagtgggcaccctgcatcaggtgaagtgtgcagggcggctagggcagggcatgctgcgaccagctcccctgcactgcctgggagccatacccaccaaggaacccaagcagttctctggccaccctgccagaccactgccatgcctgggattggaaccttgatttctgacaccagagcctgggccctgtctccaccatgcagccctggggtgggggcacatgtttggtgattgccagggtcatgactgctgtgaagctctagtcaagttgggagagcctttagccatggcgatcttgcctgaagctcaagactttcatgtggaggggactgggtcttaaagttgtggttgaataacagggatcctttgcatctgtgcattggccagagaagaagcaaaatttccaacctggccatagtaggcacctgtaatcctgacccttaggaaatggagctgaccaggcttatacactctaagggggctgggtctaagcagttagcatgtattgagtacctgctgtatactagttgcttgggggctcccaggaatgtgtgtagtagagtcctggacctgagaccagcccaccac

SEQ ID NO: 61269 - DNA, 1028 bp, Homo sapiens
gagccagcggtagggccagcttgcacacatggctccggaggctccggttgcccatccgagcccctgccaggctctaacgttcccaactgacaacaccagtaactaaatataggagcagatggtggggacgggctgtcgcagcggctcctttgcagaggtctccggactgcagataaggtagagttattgatggtaagggctggagtcagggggccaggtcagggtttaagcaaaaatcacccctcccccagccagcctgagtccaggtgaaaccaggttatagggacaggagggctgtattgccagctcccccaaagcaggacaacgtttttgtctggcattgaatttattacatccaaacttcctctctacacctgtttgattacctactggtaatgccttggtgtgggaaacatgtaatggttcgcaaagtcctttcccaaaagttacatatcagttacttcccacaataatccggtgaggaaggtggtatttccattttacaaatgggactgctcacaacactgttaactttgcaaaactatggattaggctgccttcctcaaaaaacttctcttagttcgctacacagaagcagaggacagccttgtaagagggctgcagttcccttcctcagtaatctgggagcccattggctccctgtctctctctctcctgaatctctttgtgcacctgctgctcacccctgtcccttccccctggccatgccatgtgccttcatgcccccctaggcctggccctgtagccttactactatcaggctcatcctgcctcccagtgggaagcttgttctagcccatacccagtctctgcccctttactcccacagtgggggccttatggaaggtgtccaggagacgtttgctggatttaaacatttcaccggaccaggatgctcactctgaggaatggggttgagggtgtgtggagagggccatgctttgaggatgtaggcagtgtgagtatgagcttcgaccctgtgctgaagtgtctctgggatttggagt

SEQ ID NO: 61270 - DNA, 1091 bp, Homo sapiens
ttgggacagaatttcataaaggtcattggatgggtttggaaaaaaggagaaagcaggaagaagggaaaataatccactgggagtgaaagtgaactataccaaaataaagagtattgggggtgaagggagctgcttttttttttctttctttctttgagacagagtttcactcttgttgcccaggctggagtgcaatggcgccatcttggctcaccgcaacctccgcctcctgggttcaagtgattctcctgcctcagcctcctgagtagctgggattacgggcgcccaccaccacgcgtggctgatttttgtatttttagtagagatggggttttaccatgttggccaggctggtctcgaactcctgacctcaagtgatccgcccacctcggcctcccagagtgctgggattgaaccaccatgcccagccctgtttcttttgttaagataaaaattgtctttgttggtttattagcacttcagagatttgatggttgtgcacagtgaatgtggtttggccaccacctgtctccctgaagaatacagagttaggcagcttttagtttcctctgggttatttgccatagagcttttcaggagtctgtctcttcatccagagtctccatgaagaacagatgtttaaaactgaagttcattcatgaatgttctataactcagtcaataaaacatagaccttgttctaccttcctaagttgaaagaataaaaagcagagaaaacactttctttgttaagtcctttctgttttttcctttcttattttcccttatgggggtgggagagagaaagacaggcttagacttcttttctgagtgcattagaagcacttgctgcttgttcatcttgtatctgtttctcatcttttggtgggcccttatgtgagacatagctggagaattgtcaagaattcctagtagaaattgaagttacatgccaaatgctttgtttctttttttaattcaatgtctaggcttgaaggataccttcctcctcgtggtccctgctgccctagcagtgttggtttgtatgtatgtatttataagatattttgtaagcatcttttttcttagtt

SEQ ID NO: 61271 - DNA, 1145 bp, Homo sapiens
aaaaggggctgtttattttttctcatacttgtttattctttcatttaaaactttttttttcttaaagatgttaatgttagggcctaggtcacatataaataagacatagccctgacataagaaactcagagtctataaagagagacagatggataaacaggagtcctgtaatacatgatgtgtgtaagatggagaggaagaaccttttaaaaaagtgaggggtgggggtggcttcataaaggaagtgatggttggagctgagtcttgaaggatcaacaggagtgtccctggcagaagagaaagggcattccagatggcagaagagcctgtttacaggcagagaggttagagattatgctttcaacttgaattgtaaaatccttaaaagttaggattacatgggatttaaattaaattcctgggtggtattatatgttgataaccccttaaattgtttcaaactctttttaaccctgttttccaggaactcgaatcatttatgacagaaagtttctgttggatcgtcgcaattctcccatggctcagaccccaccctgccacctgcccaatatcccaggagtcactagccctggcaccttaattgaagactccaaagtagaagtaaacaatttgaacaacttgaacaatcacgacaggaaacatgcagttggtaagagaatggcgatgttggagacctagagcgtggctcttggaatttgaatgtctgtttgctgtaggttgagaagctattgattcttcagttttgttttttgttttttgttttttttgagacacagtctcattctgtcactgaggctggagtgcagtggcacaatctcagcacactgcaacctccgcctcctgggttcaagcgtttctcctgcctcagcctcccgagtagcggggattacaggcgcctgccaccacgcctggcaaatttttgtattttttagtagagacggggtttcgccatgttgcttaggctgttcttgaactcctgacctcaggtgatccacctgcctcagcctcccaaagtgctaggattacaggtgtgagccactgtgcctggccaattcttcagttaataactaatgttcagttatatgtctctaaggtttccctcctcccccaaaggtttcttgaaa

SEQ ID NO: 61272 - DNA, 7872 bp, Homo sapiens
cctcctccaacacattctttttttctttatcactgtagaagcagaatggtgcggtaggagtggccagctcctgaaatattcctcagggactgcacttggtgacccctagatgggggccagcattccgctttgtcatatttcagatgagttttttaatggacaaagtgttagtttggagcagggccaaagtccaaagcctccagaagaatgtgctcccctgagagatggcaaagagctccccaagagctgctgtttagtcatcctgaagacaaagggacaatggggatgttttcacttgtgtccttttccccaaaacttctccccatgggtgatgggactgccattcttatttttcagattaagaccagccaaagcaaagcagagtaattgttttaaggcagcagagagtgggacaatttgaattactttttgtctctcatttagagggaatgacagttaaaactgttatgcttctttgtgtacgtgctaaactcttcattttattggtcctaactaggggatgatgctcagttcgagatggacatctgactctcctgcaaggattagaagaaaagcagcaacactgatacttgtgtgcacctgatttggccaataggatcaacagtgaaaagacagaagaggcaataccagcagtccccattacagtctccacctccccgtcttcctctgggtgccaaatgatgggaagatgagcttcatctgaccatttcttctccctgtctcctgttccccttcccagttaaacaggttagattgaaggcccttgctgtatttctgtagagctaagcagcccttagaggaaaacagttcaactctgactttcctagttgtttttttattgagagccaccctcataccctgtaattttgtcccaaatcaaatatcaacctaccaacaactgcctggctgggaagtctggggaagggatacagagcttggtgggcctaacaccattcatattccttaccctctgtctctcctccctgtatcccacctatggttcagtgttgcaagagtctgggcttggggtctttaaaaccagcagggggaaatgataaaaagagagctgctttcccttttaccttgaggtattcgtccctcgggacagagcacagcttgtgcaactctggtagcgttaccctgtgacactgttttgaggtccacttcctttctttcctctgggaggaatgtcttctgtctttggtattatagttcatcttcccattcttttacttagtgcatttgtgcagatatttttaactctgtacatcagaagagagcccttggtaaccagttttgctcttcttctgccactcctccctgcttgcatctcgttgctggcagagtcctcttgtacttcaagaaagcaaagtgattttgtctgctcctagagcaggtccataccaagtaatagaggcactttagcttccacttggtgggtaaggcctgatcatagtattctgtcagataatgcctaagaatgaccgctgaagaacgttgacccatttgagtacccggtctcagtcgtcatttttaagtccagtgagcattgtggtagttgttcttagattgcagtttcttatgttttgagtttgaagttgattttcagaatgttcttagaaaagaactgcatttttttcctttgtggatctgctttgtttggctgctgggatagataagcatgggcttaaaaaatgtgttcctcccagttttcttgcctttcctgttgtactctgaatttctctccctacctccctcactttcttcctctctccttcctttccttcctttttctctaccaggccatttttcaaatttacatcaaagatacctgaagtgttggtatctgagaatatctgtcactcctcttatctgagaagtgaccttttatttttaagatgactacagacctatttttagatatgttttcagtacaattttgaacagcaactttttaattaaacatcttccagtgttaggaagttgagaaacgttcataggcaagtctgctgttctatgtcaccatcttttgtctcccctagtcccccaggagctctttcctttcccctctagttttgggtgtgcatgtttggagtttgtagtgggtggtttgtaaaactggaccattctgccttgctatgggttgttcaagaaagcctcattcttttctgtgaccctttcgcttttgcattcaccctccttcccacctacctgtcctggggctgttgagcagcataataatcccgggagaatgattcccctcatagaaagacaaaagcatccatcccctcatagttaagtagccactggtgtcctgggaatttctggttggatttggtgccctgaacttttttattaagaaatcagatcccagggtgagagtaacaggccatttggccaagaaagaaacctgtttgtttttcttttgaactatgaaaagaccctgtttgtgaatatattttagaaagagaggaaggatgtctgcagaactttgttctgttttctgccacaaaaatgtgaatagttcagagtgaaaaccttttgtgatggttgatgtctcaggaataagctggatctccaatgttttggggatgctttgagtctcaaaaaaaattgataatcagaaaagtaatttttgtttgtttgtttaatgtatccctgttctgtttttaattaaactccaagtctcattttacatattcttggaaaaacctaagttgctctgtaatttacataagaagcatgctcaggacctctttgtaccccggggagcctgattctttgggaatgaagcttttcattcttcatacactggccttggcatcctgtggaatttgacccaactagcagctagtcagtctgtcagtgagcagaagagtgaactcttcttgatctttattgctatgtgtgaaaacttggcttcctcactgaacggtgaggaatggatttaaagcatgagctttagtagtatcaagatgccattttcctttttcttgctgtcttggggagcttctgcatgtgaccccctaatcagaaggcatgtttttagtatttcttgggagtgtcagctgtataatgcagcagctgttcaatcccttacccttctctgcaaggacttccttacagcttggtgcagttctttcccagaggccaccactactagacagtctttcttttatcttatggagataaattggcatttaaaaaataatttcacaaggcatgagataaactttcaatagatgatacctttgtgtcatgcctcatggaattatttttagaacaagccagagtccattgagtggtttacctctgcatgtttggagggaacctcacagatgaaacccttaatgaataatgtgtccggggttttttagagagaaggagcactcttaagttaccactttgagacagctcttaacatcttagtgaccatttgtagttttctttttatgaggaacccatgcttctatacttgggcggacaatcgagcttaatgagaagtgacttcccttcaaattccaacagcagacatgcattgtcatgattctgtcttctttttagtgtggtttattgagttcagcagttctcatattctgtttaaataggtacagcattttcaagggcacagatacagagaagctggctttctaggtattgggcttccaagccaagagttttgtccttccacctgtattagttatctattgctgtgtaaaaaattaccctaaatttagtatgttaaaatagtaaacattatctgtcagtttctgtgggttaagaatttgggagtagtttaacatgatggttctggcccatggtatcatgaagttacagtcaagattgaacaggggctgcagtcagctggagctggagaaaccacttccaagttctctctttgtggccgttggcaggatgcctcagtttcttcccatgtgggtctctgcgtagggcagcatgagtgtcctcacaccatgacacctggcttctccctgagcagctgattccagagatcatggggcagggccaggagaaagctgcagtgccttttaagacatagtcttggaaaggacacaccgtcacttcttatcctagttgttagaagcaagccactaagttcagcctgcactcaaggagagaggaattacacatacctctaccccaatggagcagtagcaaagaatttatggacatatcttaaaagcaccacaccccaactggggatgaaagtaggtcaacagggaggtaggtttaatctagataagctgaaagatagattgctatcaaaaacagttctccaagatgtgcatagccaaactgggatagaaggcaaactccccaaagctacctgctggttttgagaggggtggtaagacatggcaattcccaggagtagtagaaaataatatgcctgactaccaacagctcaagtatgcttatttgcacatcctagacttggtgtctgtaagactcagttaccacttttattttcctgtagctaggagttagcaaaaggaactggggccttccagccgagccactaaacctgtcttatttggaatggggattgtccagcaaagggagcaaacatgaattagatgttaagctattgagctgaagaaaagaaagcagttcacatttaggtgaaatagatgatgttatcaggaagccaggttcccaccagagtcggtgcttggtacctggtctctccagtctcaacagactcaggtcaggtctctcacccaggaagcaaccactcaataaaatagagaacatctgagaattacaaatgtctatgcttgattgctcctctaaatccagtgcataggttaaccctgcatgcccatttcttcctgggcttcttgatggcaatgtgttcttaaataactggtcttgtgttcatgctaaagacaaacttacatgaagtttttcagtttaagacattctagtgaatggctgctatgtgtttctggcactcattcctaaccaagtctttagagatttcagatgaccttaaagatgcaatatctttttctttctttctttctttctttttttctgagacaagagttgcgccctgtcgcccaggctggggtgctggagtgcagtggtgcgatctcagctcactgcagcctctgcttcccaggttcaagtgtttctcctgcctcagccttccgagtagctgggattacaggcatgtaccactatgcctggctaatttttatttctatatttttagtagagatggggtttcatcatgtttgccaggctggtctcgaactcctggcctcaagtgatccgcccacctcagcctcccaaagtgctgggattacaggcgcgagccaccgcgcctggccaaagatgcaaattcttgtttggatttatgctctgcctcttcccagcattttcttatctgtagccctgcttgcttgagagtatacttggataagaagtattgctgttgagggagctataagaaaaggattcttcttccagaagtaaagaactcatctttagagtacctttaaatgaattttgtttttctttcttattttgaggtggattggtcttctctttttttgggtttccagctcactgggactctcagaccttacctttccagctcaaacaccattagttaaattccttcattctcattagaatgcagcctgctgagtatgtgggtttcactgccggagtccatcatttagccagtatacatagaggaactgcttcgaatcaaggcaactggtgaagggcttagcatgttggcagcaatatcccagagattgaatctgtttgcattttcctcatctaggataacagctgcttgaagccagggctcttagccctttgcattccccttgagcgaggaagccacactgcctttctgtgtctggttcagagctcttccttcttggcatgttttctggactacatgcacatgggcagctatagattaatctgcaaaacctagtcacttacctacccataatatctgggaaggtgtggtatttgttttaaagaaacattgtttctttgggagggcagtttctgtctggactttgaggtggacttagttatccctacagttctttaactctcagcttttaataaaagatgaaatcagatattgatgcagttgggtcacaattctttagaatgcttctaccccagggccgcttcctgttcctagtcatggttttccagtttagtagtggagtttcttgaggctaacttacagaaatttctaactgaaaactttaagagttattgatacttgttttttcagtcagtcacttacatcacctagcctactctctggaatttaaatttatttctctaggctggtcctggaagttgataaccttttggcaaagcttagatttaggagaaggcttgagtccctgttcagcgggtctgtggattctctttgcttatggctctctgcctgcagccctggcagaccatactgtatgtcatggatacccagtggaaatattactgagatgaaacacatttccaagggtatttaaactctcactctgccacctttctaagggtgggaggctggcagagatgctgcaatgcttgataatcatttggccacactgaaatttccaaagggagctcttgccggtgcttaaaaccaaaactcctggacacttagaaaattccatgaatctagcacaaaatatccattcttgcccaagtgtatcccctttctctccagcttaatcttttttttttttttttttttaaagcccaggccaagggtacttttaactggaaactggggaggagggaagaacactagcagggagctaagaggcaggttgctgggtaagccatcctgctcctacctggtgcctgtatctacattgctgagtgctgtgcgccagtgcctttccttcatctgcagatggagcccatctctttccacctgggtgaggagaccctctgctactccaggggtaaaccttaaagaaggtgtcttgaagagcccagaggacactcacgtgctaaggtgtccattttatgcatctttaaaatattttatttaaaaaaaaaaatagccctgccctgtcttagtgccactaacggcccagttccatccattctgaatggaaaagcggagactgccagcactttccttggtcttccctttgtctcccatgatgtgttgttccctcatccctcccatccatttcactgtgtgtggatggatagcagagggtaccacgcagtccttgaggcagtcctgtgtgattccatgatcagttgtttttgtattttaactattcttccaaaccagcagatgtttggaaattaaggaaaaaattaaattctcatcaatggttgctgttatagttaaatcagtaaagatcttgagtatcaacttggtgttttaattttttaaaaatttctggtgaaatcctgctaaggttatttcacatttcaggagtttcagctggtgggggagatgggcagaggtaagaggcagttggctctttatctgtcagttctccacacttgcggagcatgcactttgtcaatgtggacctgtgtatgcaaaggagatggtgggactctcagggagcatgaccctggtcctgtgctcaggagcttgcaggtgaacatgtatatgctgggctgacggcacccaagcatgtccttctcttaagtgccagccctgaggaagcccaaacaacttttcctttctcagaagaggggctgcctgtgcccctgggagcactggttagatgcccatcatgcctgttacctcaaaccaagctgtgctgcatgagcgtcagattccctgctgttaactaatccagcgggtttcatgta

SEQ ID NO: 61273 - DNA, 1083 bp, Homo sapiens
ctaccttggagaattgtgtcctgtctgaacctgggatgttttctgttgttttgatacaggatcttgctgtcaaccagactggagtgcagtggcacaatcatggctcactgcagtcttgccatcctggactcaagcaatcctcctacttcagcctcccaagtagctgggactgcaagcatgcaccatcatacccaactaattttttagattgttttttgtcaagacagggtctcgccatgttgccaaggctggtctccaacttctcggctcaagctcttgtcctgtgttggcctcacaatgtgttgagattacagctgtgagccactgcacctggcctgaacctagggttttaagagcactcaagagttattttaacttgctctcaagaagtgccaagtcagttgtgagtggtaaaaattggacacattacactccttggctgaggaagtgggtgggcctggcagtaggtaagcctggagaaattagaaacattgtaagaaacagaaacacgggatccatagagatgtggggagtggctgtgaccctgggatagcacccctaacctggggtttatctccgtctttaagtcttccttttcggtccggcgcggtggctcatgcctgtaatcccagcactttgggaggctgaggcgggcggatcacgaggtgtggagtttgagaccagcctgaccaacgtggtgaaaccccgtctctactaaaaatataaaaattagccaggcatggtagcacgtgcctgtaatcccagctactcaggaggctgaggcaggagaatcacttgaacccaggaagcgggggttacagtgagccgaggtcgcaccactgcactccagcctgggcaacagagcaagattcagtctcaaaaaaaaaaaagtcttcattagcagtaagatccttacctatcctaattgcctttagggcagagtaaaggatgtaggaaagcgcttttaaggttttggtcccatcttcccttaaagagatcctttagtccttctataggttccatgagtaggtggtagctgcagtgctcaaacctgttccattcctaaacttacacacttggagg

SEQ ID NO: 61274 - DNA, 1799 bp, Homo sapiens
aatacaaaaattagccaggcatggtggcatgtacctgtagtcccagctactcaggaggctgaggtgggaggatcacctgagcccaggaggttgaggatgcagtgagctgtgatcacaccactgcactccagcctgggcaacagagcaagaccatctcaaaaaagaaaaaaaaaatggtattccctttagactagaataataggagaacataaaaattagctaccacttaaaaaaaaaaatagctactactctacccagatacatgtaattttttgaatctgtttaaaggctgttttcacaaaacaagcacagagctaaaggtagtttagacattagagttcatgatatattggcaagctaattcctttatgaaaataattttctgctatttttgcactcaggaactgactttaactccgtaacttttttactctttacccagaaatactattctgacctgcccatcaggatgtgaattgacacacccttcctttcctttacagagtctgctgaaacgttaccagccccaccgagtcccttccacttgttgtgccccagtgaagaccaagccgctgagcatgctgtatgtggataatggcagagtgctcctagatcaccataaagacatgatcgtggaagaatgtgggtgcctctgatgacatcctggagggagactggatttgcctgcactctggaaggctgggaaactcctggaagacatgataaccatctaatccagtaaggagaaacagagaggggcaaagttgctctgcccaccagaactgaagaggaggggctgcccactctgtaaatgaagggctcagtggagtctggccaagcacagaggctgctgtcaggaagagggaggaagaagcctgtgcagggggctggctggatgttctctttactgaaaagacagtggcaaggaaaagcacaagtgcatgagttctttactggattttttaaaaacctgtgaaccccccgaaactgtatgtgaaagttgagacatatgtgcatgtattttggaggtgggatgaagtcacctatagctttcatgtattctccaaagtagtctgtgtgtgacctgtccccctccccaaagattaaggatcactgtatagattaaaaagagtccgtcaatctcattgcctcaggctgggttgggggagccccacagctttctggctggccagtggcaatctactggccttgtccagaggctcactggagtggttctctgctaatgagctgtacaacaataaagccattgtctagttctcctgggccagctggtgcctgtgaaggcagaggcaggaactcatccaagaggaccggccatgttgggttacagaagacatccctgcgtcagtctgcttcggcagacacagcctgagtttgttaaagttggtgacaatccacctcagtctctcaatgtgtgctattaatgaggcctctgagcttcctatccagcagtggtgaaggccttgccctgggtggcaagatacttgctctatggtcacagctcagccactggaagctgtgcgacctcaggtgagcaattcactgtccagtctccacttgtaaaaggaacgctggtgaatcctaatgcattcatattaaatgtctgttgtcaggctcagaagagccatgagctttaagctgtagactgaataggaagagctaccttatccctacctccctctaaagcttataaagcttgctaaacccagtccctgccacatgcccttaatctaacctttatcggctcttttgttactcagggttctaagacagactta

SEQ ID NO: 61275 - DNA, 1115 bp, Homo sapiens
tcccgggttcaaatgattctcgagtggctgggattacaggcgcaaaccaccacgcccagctaattttgtatttttagtagagacagggtttctccatgttggtcagacttcatgtatgggaggagacaggggagggggagatgcaactcatcacatttttactgactgtcctctggctgtgcaagttatcttggaagggggactggaagaacagtaattcggagtctgggcttggcagttgggcaaatccaggtttactcttggctctgccaccttccaagaatgacaccttggtcagatcttttaaccacactgagcctcagttttcctcatctctaaaagggactcgaaaatcttaccaactcatagagttggggtgagaattcgaaggtaattctatataaggtaaggcctccagcaagagctatggtggttgtgacactgactgaggctgggggaggccctcactcaccctccttccttcttggttttctcctacccagatgtggcagtggatgggcagaactggacgtttgcttttgacttctccttcctgagccaacaagaggatctggcatgggctgagctccggctgcagctgtccagccctgtggacctccccactgagggctcacttgccattgagattttccaccagccaaagcccgacacagagcaggcttcagacagctgcttagagcggtttcagatggacctattcactgtcactttgtcccaggtcaccttttccttgggcagcatggttttggaggtgaccaggcctctctccaagtggctgaagcaccctggggccctggagaagcagatgtccagggtagctggagagtgctggccgcggccccccacaccgcctgccaccaatgtgctccttatgctctactccaacctctcgcaggagcagaggcagctgggtgggtccaccttgctgtgggaagccgagagctcctggcgggcccaggagggacagctgtcctgggagtggggcaagaggcaccgtcgacatcacttgccagacagaagtcaactgtgtcggaaggtcaagttccaggtggacttcaacctgatcggatggggctcctggatcatctacccca

SEQ ID NO: 61276 - DNA, 1064 bp, Homo sapiens
aggagccctagatcccgtccctggaactaggtcctccgccagctttgcgggcctcctccgcaccaggctcaggtctcgcccatccccagcaggaggtctctctgccccccaccctccggaggggggttatatgatcttaaagcttccccagagggaggaaaggtgggggcggggcggctgctgaggcccaggatataagggctggaggtgctgctttcaggcctggccagcccaccatgcacgcccactgcctgcccttccttctgcacgcctggtgggccctactccaggcgggtgctgcgacggtggccactgcgctcctgcgtacgcgggggcagccctcgtcgccatcccctctggcgtacatgctgagcctctaccgcgacccgctgccgagggcagacatcatccgcagcctacaggcagaaggtaggcagtgccgcgtgccgcgccctgctgggcacccccggggcgcctccgccgcgtccagccagcggactcgggaagtgctgtgggttgggggctgcggctccgagccgggtttgcagccgcccgggcgtcccgagcccagggcctagctctgcgggtgtctccgcgtcagcaggctcggggtgcagcgttggtggctgggggcgtatccacggccgagtcgggaagggattctagcgttcagggtgtgtcctcgacggggaccattgtctctgggttttggtttgggattgcgcggagcgcagcgcggaagggtgggagcttctaatctccagtcttgtgaagttgcttatcccggagcctgggtctgcgcatctgtaggataggtgtaataaataacacctcgcctatcagactgtggaaagcgcgagatgacaatgcgcgcgaaacgctcagcgcagtacccggcacagccacagtcaacggtcgttggtattactgtaatggtttggtcttggcgatttttttttctttctgcgagtgagggtgaatgggtcccggggtgtgacgtcgggagtatcggcagctgagctggtaacatcggggattcgggctcacggcccggagatcaggga

SEQ ID NO: 61277 - DNA, 1133 bp, Homo sapiens
gtcccagggcctggcagggaagggaggggaaggattccagagtggacagagatcccatgggcagataggggaggagtccaaggcaaattgcctggaggaggaacctgaactcagcctccaaacacccctctgccctggcaggttcagggctaggtcatggtgtgagcttgggtggcaacagtaatgacaggaacagcagtcatcagtaagtacttgctgagtgccaagcaccttttatcctccagactttcccaggaagcaagaactgctctttgcatcattttacaaatgaggagacttggagcaatgtggtaacttgtagcataggggtcacatggtggtaaagttgctgtggctagatccaagcccaggtctgccctgcttaaagcccttgtctttaggattgcacacagaagggggctgaaaaagtgggagtgctggatgctggagatggggcagtgggcctggaagggcggatggccagggcagacaggggatccgtctgtgttgggattcaggcgtcacggatgagtttgcctgaggctcagagaccactgggctcagggcgaaatcacaggccacaagactcccaccctgaagggtgcacatgatccctgttcttggcagtaaggtggtcacaaggagcaaggccagcccatgtcctgatgttgtccactcctcaggtccagtgtccctcagctgtggcagatgtcagggaagagtggggagtagagaagagcagcaagggcctgtttcccatctttgatcaagattcatctttgctggtttgaacccagctcctctgctttccagcgagtcatttgtgcctgtcaggaaatcatttttggcttgagtgttccctggagggaatctggggttcccacagctcatgtttttgcccaggaactgaacttgggagctctctcccaagagcaccagcaccttgcttgggctgatggggcagtggatggccacaggcgagtctgtcggggcgtgagtaacaggttactcatattctttgcagcagcagcttgtctggttttggacggttgcaggtgctttgtgtgtgtgctacacgtacacacacatacacacatgctcacttataaagccacactcactcccactagaca

SEQ ID NO: 61278 - DNA, 1076 bp, Homo sapiens
accagcgtggcatcttgatgtgggttcctgagctttcttggccctgggttcagtatgaggtgcaggggctccgaaggtagattaaactctgtccctgccaggaggtgagtgaggtacatgcagacaccatgtctggttctgtgatggggtctgtgctagttatggttggagcctgagggagggaatggctggcctggggtgtgtgtgatacttcacgtgggctttgagggatggccaggagtttgcaaaggaggagggcaaggcttccccagcagaaagagcagcgtggcagaggtgtgacagcccttgtgaagcgttttgtgtatttcccataactggcatgtgggctgactttggctttaaggggtgcccctgcctgggctgaagctggggcactgatgagagaggcaggtggggtgtctgggtcatctgcacacccatggaaggcagtagagaacatctttgggaactgggtgtgtcactgccaatgctttgggctcccagggagctggggctttcagaaattccccaaggagagaggatgtggtgctgtgagggctgtgggtaccctgggaaacggccaacaggctgggctggggcccatgggaggggagaggggtgggtgccctgagatgacctgggaccctgccagcttctgcatcctgctgagccccaggcccttcctctctgtgggctgtgccggcctctgtctggccttcccagaatggaggcctgggacgctgggacatttttcgaagattctgtttggaaagcacagaagggacttctcctccccttttccttttcctggaatggagaatctcctgaaggagttaacccctttcctgctggtcacagagtggcccatggatgtgtccccggctttttttaggatcactgttttattgttgccctttctgttacacgggatgtatacatcaggtgctgaaaggtacaacacattctgcaactgagtgccaccttccatgattgaacaggcaaagaaagtacactgaacatcagcatctggcaatatattttttgtttgtttgttttttttgagatggagtctcact

SEQ ID NO: 61279 - DNA, 1105 bp, Homo sapiens
cataggtgcataccaccacactggctaattgttacatttgtatgttttgtgtgtgcgtgtgtgtgtgtgtgtgtgtgtgtgtgtgtgtgtgtgtgtggtgtatgtatgtgttcgtagagatgaggtctcaccatcttgcccaggctagctttttattgttttaaaaaaattttccctgttttgtttatccaagtggctcctttgtgccaagcacaggccaggccctgaggatgccagtgaaggccagcaccaggtcctgcctggtgggtccccagggagacccctgtggtgggaaggcacggaggggaggataaggaagcctcctgatgcagggagtgggctggacaagaagattgagccagtcaggaagatgtggaatgagtgattggggggctggtgtgtggccctcaaacttcgctgctccacggaagaaacagcagcatcttttctgtcgctggaggaaaactggctgggccagaccatttgagagacggcccagccttgttgtttatggaatatgtcaaggatcttcaaaggcaacatttctgccatcaacagactgcaaaacaccctgctcccaccccctggtccagtaagatgctcctcggctttcttattatttttgttattgatgttgattatttgccaaggcctgttgatggtgcccattctagggactgtgaggaggtgcactggctggagtttagggcatgggagttggggagcagcaggttggagaagggctgggccagcccagcgtgctcctggactgccacatgctgcgccctgagtccagctgatatgcttaaggtagaatctgcctcctcagaagcagggtcactggccccagctggacgtgcccagtgatgcgcatgagcacgaggtgccatagagagtgaggagcaggagaaccctgtcccaacgccaccacccactgttcttgtgactgtgggcaggtctccggccacccgtggaccccagtttcctcctttgtaaaatgaaagggtcagacttgggtctcaaaggtacttctggctctcaactctaagatacacgtgggtgcccagggtgggtttcgactctgtatggcgtgtgtgtgtgtgtg

SEQ ID NO: 61280 - DNA, 1010 bp, Homo sapiens
gtgtccgttgggaaagctggggtggcttcagtggaggaatgagggagtggcaggtgaagtgcaggaagagccagctgcggaaacggaggctgggctctgtcttgtactgtagagaactctctggcctgttttttcacctgcttgatgggacagttgccctgtgcttctcccttcctcataaggttgtcctgaagttccaatgtgaaatgcacttggtaaagtggcatttggaatctacaactattgtgggctgaatcctgttagtagggctgccccacagaaggaacatcagacccagagtggggaggtgaggcatgtacttaggaaacaccaggccaccggggtcagggccaggctgggtggagcacaggctgagtgctgcttggcttggagcaggaggcccattcatttccactggatgttgatggatgtactgaagggggtgagggtggcctggcgtgcctggttgtgggacccacaagggtgagggcagggaagggccttaggtcctgggaggaccttgagggccttgagcagctctgtggggcagctctggaacttctctctaggagggcacaggttgggtctgggggcaggaagcgctgcagcttcttctgagcgtgcagccagtacaccagctctgctcctggctgttggacacacagggctttcaggaaacattgattttgcacaaagaattcagccgctgaaatgtctgaaaaccacccatctatctcgtccagatggaaataagcgtgggctgtgccgaactcttggaaagtcagggctggaggaaaacttctagtggggcttttttttcctgttcaacactacggggcagctgggatctggatttgcctaaaatattggggatgtgtggggcaaattcatggtgttgagatgagggtgcctaagggggtacttgagtgctgggcaaaggagtttagactggaggccacagtggtgggtgggatggagacagatgcccagaatccaggtcatggttctcc

SEQ ID NO: 61281 - DNA, 1004 bp, Homo sapiens
gcaggtggatcatgaggtcaggagttcgagaccagcctggccaacatggtgaaaccccatctctactaaaaatacaaaaattagccgggtgtggtggcgggtgcctgtagtcccagctactcgggaggctgaggcagaagaatcacttgaacctgggaggcggaggttgcagtgagctgagatcgcgccattgcactccagcctggagacagagcgagactccgtctcaaaagagaaaaaaaaaaggcattgaatccaccgtgaggacagagccctcatggcctaatcacacctcttaaaggcctcttaatactattataatggcaattaaattccaacatgagttttggaggggccattcaaaccatagcagtactgttagcctgttagtcacatggccccaggtcgctgcaagggaggtggggaatgcagtcttggctctgggcagctgtgtgctcagctggctgtccctgcttctgggggatgaaggcattgtgagatttttgattaaatctgggccatttccaggctgaaaagctggaccagagcttcagggcttgagtctctcacagagagatttcccaatggggacatcagtcctgccttgggaccagaaagccacatgctgtaggccaggaagggggaagcaggggctgagcccgagggagaaaggctttagaggtgttagcagacagctcagtggcagtggttagaattagggaggcagcgacctcttcttagtgtggtcagagcatgccaagaaagtgtggtctgtgtctgggctgctgaggcccgagggcaagggccaagctcattcataggacagtggccaagaagcggggactgaaaggcttgggaaaagtaaggaagctctgcaggttctgggacacaagtgaacacggtaagcagtggaaggcccaccccaggacagggttagactgggagcactgtctccttgtagcccacaagaggccagggcagggcccaagtacagtgtggaagtc

SEQ ID NO: 61282 - DNA, 1146 bp, Homo sapiens
aggcaggggaggagaggcggaggtgtcaggccgagcccagccctgtggggacgggccctgatgcctggccttggcctgaagctgtggccagctgttgccttctgcagacccttctgtgtcctgcccatcctctccctcgggagagctgccctgagcccttgttctccaggctgttcccacacatgtctttttggcccaggttgctgggaggggtctgggaaagtttgatgagggccgtttggggcctgccagggctggtgaggtggagagaaggttccgctctgcccttggccagtgagggggccactgcagagctccctcccctctttgagctgcctatttttctgtttgggaacatagaggctcattccctccacccttgccaaaaagagagagaaagagagggagaaattagggtgtggagcaccatggagatggggctcttttaaacacaaggtgtgtgtgttaacgaagctgtcacgaggctcctgggagttttcaagggtgacaggcgtgagtggggttgggggtgggaggatctttccagactggagagggatgggtggctgtttgagaaggttctgggagggccgatgagtctggagttgttctctctgagagtccctgaatgggaggtggctctagggtaggagcctgagtgcatggtccagaggaggcctggggaacacccacctggggatcagagctctggttcaggacctggggaagaaaggacagtgagctcagccttcagactgacctgacctcagcttcatgctgaccccatgaccctaccttccacttcttgaggtgatgctgctgcttatgggagggctggggggagtgtggatggttgggagcagacagtccctactgatgtggagcagcttgtgcctggttgagggcagctgggaaggttgccatgctctaaggatgcttattgtccaaggatgcttattgtcctggtgcttctgcagagtcgaggggttgggggctggcagggcagcttgccccgatccccagtcctggaccatcagtatgtggggccagtggccacggagctcccagaaagttccttgagcctctgtccctcctgtctgtcgccctctgtccatgtggaattcccagccccctcccttctctgca

SEQ ID NO: 61283 - DNA, 1061 bp, Homo sapiens
ctccatctgcagaaaatacccctgagccatctgagtgaccttcctgtggctctcccctgccagggccgctacttcctggtgcgggatgtcactgagaagatggatgtgctgggcaccgtgggaagctgtggggcccccaacttccggcaggtgcagggtgggctcactgtgttcggcatgggacagcccagcctctcagggttcaggcgggtcctccagaaactccagaaggacggacatagggtaagtatgccacttcccaggcagaagccaggtccccaaagccagggagaggggcaccttggaggggcagctttagaggcgctggaggggcctgctgcatgctggagaggtggggtagtggcctggaccaggccctgcctgccaggatggtcactgctgttggtctggttgggaaattctggtgaatgttgattgcatgtcctgagtggatggcggggcacaaggtcagaagccttcatagaccctacttgggagcctcagaggaagcagggggcgtgaccgggtgacaggaggagccagctcataatttgacagcttgctgaatggtgatcacagctaacacttaagtcctgatgttagccctgtgatggagtggcagtttgtctcccattttgcagaggaggaaacaggcccagagaagctaagtgacttgctcaaggtcacacagctcatgagtggtaccccaagacccaaacccaggcagctgaattcccaagtgcctgctttcaaggactgttcttacctgtcggatgttgaggcagggttttgcgtgtccctaggacacaggctgagggtctgctgcgattgtaggcttcttgagtgcagctgcatctgaattgaccccggagttaaggtggaaaggctttgagtgagacagaatggggtgggggtgtgggctgtgtgcaggtcccatcttcccatcttgatgataagttcctcaaggggaccatctgcccacacatttccctctgcctgtatggtgctcagtgaatgaatgattgcgtggtcatggggcattcatttcttcagctgatgtt

SEQ ID NO: 61284 - DNA, 1082 bp, Homo sapiens
ccgctagcaatcgcttcccctcccccaccatctggcagccactgatctttctgcctctgtggatttgcatggtctggccatttcgtataagtggaatcatacaccatgtggtcctttgtgtctggcttctttcacttagcataatgtttgaaggtttatccgtgttgtagcatgtattattactgcatttgtatggctgaataatattccattgtatagacatatcccattatgtctgtctgtttatcagctgatggacatttggtttgttgtagaactttttggctattatgaataatgttgctgtgaaaattcatgtacaagtttttgtgtgaacgtatgttttcatttctcttggttatatacctaggagtggaattgctggatcatatggtaattctgtgtttaaccttttcaggttaaccaccgtgagttggtggctgagtggggatgagaggcaacgatcttcactcccagcccacgctcctccccagaccatgttgtccttgacccaaggatctcatccatgttgccccagtgggctgcagggagatgtgcggagtctctagaaaggcagcggcccctaccaccccttctctctaatggtgacttctggaaattggcagctgggtctcacctgtggtatcagctgtttatttaaacttctgccctctggtttcaaaccagaagtcccaggtggcctccagcagggtctgtggttctttgctcagagccgggtgctgtccatgcagagggtgccatcagcctggtcagatcccccacagcctctggatgtaaatggacctgagctcaggcttgggtagggctttatcccctccatcggcttaatttgcccgggaatgttctaggaccagtccacatttggcccatctgaagttttccaaaatcccaagagtccacttgggatcctgaaattcaacagcatgtgtctgcttggcttcctgcccctcactccccagagcccccaaatggtgaatttccttttcctggccccctgccggcttcagcagtcaacttatactttagtaataagcagtgaagaacacagctcctgtgatatg

SEQ ID NO: 61285 - DNA, 1053 bp, Homo sapiens
gggctcaagtcatcctctcgcctcagcctcccaaagtgctgggattacaggtgtgagccaccatacctggctgctgagaccgctcatctctcttccttcccattgtagggcaagctggtatttccattctccaggaggactttcctgctttattcaacaacaaacatccattgagcagctatggtttctaagtgtgcaccactgggcttagaattgttgatgggcttgaggggattaatctcaactccagcaccaccgcctccttcaccccctgggtaatcccgagaccctgacttggtgcctgctgctctcattgtcccgattgtggttgttaccagaggtccttgtttctgctgcaagatccacctctgaaaccctgactccaggaccctgcctggcacaagtaggggctccacaaatgtctttctagtgagtggatggagggaaggttgagtaaatcattgcataaataaataggaaaacctgactctacctttattattaactattagtcttccaggacagagcgttcttctgcagcaagcaaaagagccctgggtcaggggttggaagccctggctgcagccctggctctgccagtaactccctgtggaaccttgggcaagtcactttggcctgctggacccctgtttttccatctgtcacctggagttgttacccttgctctgtgtgctttgagggatggtggtgaggaccagtctggggcccatggcaggtgggatggggtgtggggtgtgcagggtggctgggctgccaggcaggctctatgggctacatgcggacacagtgggcctcttgaggaacgagactgtgtcctctcagcattgaatctctgtgcctggcctagaggtgctgctgaacagcgtctgttgaactcacagcatgcagagtggcccacggcaccaggtcaagtcccttcacactttgaaattacttaacaaaatatgatgtcacctttggaaaatgggttactggtagggattgagggcaattttgtccttccaggggttaggtacagaaaagcgtcctgta

SEQ ID NO: 61286 - DNA, 1043 bp, Homo sapiens
agcaggagccccaaggagtgctagctgagggtggttgctggggtggtcctcatggacagtgaggtgtgcaagggtgcactgagggtggtgggaggggatcacctgggttccaggccatccttgctgagcatctttgagcctgccttccggtgggagcagaaaaggccagaccctgctgagttagaggctgctgggatccactgtttccacacagcgggaaggctgctgggaacaggtggcagagaagtgccatgtttgcgttgagccttgcagctcttccagctggggactggtgcttgctgaaacccaggagctgaacagtgaggaggctgtccaccttgcttggctcactgggaccaggaaagcctgtctttggttaggctcgtgtacttctgcaggaaaaaaaaaaaaggatgtgtcattggtcatgatatttgaaaaggggaggaggccgaagttgttcccatttatccagtattggaaaatatttgacccccttggctgaattcttttgcagaactactgtgtgtctgttcactaccttttcaggtttattgtttttatttttgcatgaattaagacgttttaatttctttgcagacaaggtctagatgcggagtcagagatgggactgaatggggagggatcctttgtgttctcatggttggctctgactttcagctgtgttgggaccactggctgatcacatcacctctctgcctcagtttccccatctgtaaaatgggagaataatacttgcctacctacctcacaggggtgttgtgaggattcatttgtgattttttttttttttgtacagagcttttaagcattaaaaacagctaaatgtgagtgcacctggctgctaatatgtctttagtgtcagacagacgttctagaactggtacaacaggctgaggtccctgccccttcagagtaagggtgggcaggcagagtgagttgagagcacctgttcttggcacttccagctctagagcaggcgggtttttgcagacacgcatccccagttttgcctcaccctc

SEQ ID NO: 61287 - DNA, 1055 bp, Homo sapiens
gatgcacgcggcttctgctgcccacagtttcgtgcttacagcctggctgcctccttggctggcccagaaggggtatgccagcaaagcgtacatctcctgttcccctcctggctcaccccttgccatgggactgtcacgcctgtgtggttggaagtgctattactcttctccgtgtggtggacaatggttgctttgtgggttgtaggttgatcactttgcttttgagtggaaaagaattgatggctgaagggcatggggagatggaagtagtgagagcaagactatgcatggagctccggcccagctcctaggaagccatgtgggcaggaggcagaggctgggttccacttctgatggcatcacctccctaaccgcactgctggcatcacatccctgaccgcgctggtggcatcacatccctgactgcgctggtggcatcacatccctgaccacactgctggcatcacatccctgaccatgctggtggcatcacatccctgaccacactgctggcatcacatccctgaccatgctggtggcatcacatccctgaccacactgctggcatcacatccctgatggcggcagtggcatttttttgtagagacagggtctcactatgttgcccaggctggtttcaaaatcttggcctcggccgggcgcggtggctcacgcctgtaatcccagcactttgggaggctgaggcgggtggatcatgaggtcaggagatcgagaccatcctggctaacacggtgaaaccccgtctctactaaaaatacaaaataattagaagggtgtggtggcgggtgcctgtagtcccagctactcaggaggctgaggcagaagaatggcatgaacccaggaggtggagtttgcagtgagccgagatcgcaccactgcgctccagcctgggcaatagagcgagactccacctcaaaaaaaaaaaaaaaaatcttggcctcaagtgagcctcctaccttggcctcccaaagcactaggattacaggcataagccaccgtgcctatgcccggtcaagattaggcttttaaatgta

SEQ ID NO: 61288 - DNA, 1614 bp, Homo sapiens
agcagggctgagggcgaatggcgaagggccagggttctcagatgcgcccacacgtggagtcccctggagggcttgtgaaagcacagcgctgagccccagcctgagtttctgatgcaatagggctgggtggtgctggaggatgtgcattgccagcaagcttccaggtgacgctgctgctgctgcgtgtggggacatcactttgagatctgctgctctaggggattttacttcctcttccatgtagtcagggctgactctcccgtcaggtggctctgtagcccccaccctgagaaaaagctttatagtgggtccagcaggggcaggggtggagggcgggcagtcagtgggtaagtgggagggggggccacctgactgacaggcatccccacgttgcttccatccttgtccttgtgctgtgtgtgcagcggagccctgcacgggagacaggtctgtcttctgccagatggaagtgctcgatcgctactgctccattcccggctaccaccggctctgctgtgtgtcctgcatcaagaaggcctcgggccccaaccctggcccagaccctggcccaacctcactgccccccttctccactcctggaagccccttaccaggaccccaggaccctgcagatgctgcagagcctcctggaaagccaacgggatcagaggaccatcagcatggccgagccacacagctcccaggagctctggatacaagctccccagggacccagcatccctttgcccctgagacaccaatccctggagcatcctggagcatctcccctaccacccccggggggctgccttggggctggactcagacacctacgccagtccctgaggacaaagggcaacctggagaagacctgagacatcccggcaccagcctccctgctgcctccccggtgacatgagctgtgccctgccatcccactggcacgtttacactctgtgtactgccccgtgactcccagctcagaggacacacatagcagggcaggcgcaagcacagacttcattttaaatcattcgccttcttctcgtttggggctgtgatgctctttaccccacaaagcggggtgggaggaagacaaagatcagggaaagccctaatcggagatacctcagcaagctgcccccggcgggactgaccctctcagggcccctgttggtctcccctgccaagaccagggtcaactattgctccctcctcacagaccctgggcctgggcaggtctgaatcccggctggtctgtagctagaagctgtcagggctgcctgccttcccggaactgtgaggacccctgtggaggccctgcatatttggcccctctccccagaaaggcaaagcagggccagggtaggtgggggactgttcacagccaggccgagaggaggggggcctgggaatgtggcatgaggcttcccagctgcagggctggagggggtggaacacaaggtgatcgcaggcccagctcctggaagccaagagctccatgcagttccaccagctgaggccaggcagcagaggccagtttgtctttgctggccagaagatggtgctcatggccatactctggccttgcagatgtcactagtgttacttcta

SEQ ID NO: 61289 - DNA, 1019 bp, Homo sapiens
cacccaggctctgccacttgttaactgtaggactttggacaagttgtttcacctgcatgtgtgtagatatgtactgcatataaagcacatagaacaattcacactgtgctcatcaccagcttttacctaagtcgctgcctctgtgcccagcacacacaaaaatagaaactcaataattggcaacagtgatccttctaaggaggcctacacgttccccgacctctgctctaccctacccagagtcctgtgtgtctcagctccaggaggggcagagtcctttctcaggatgccccaactgccatctgcccttcagttctctagaacataaaaggaccagggaagccccacgtggaggtagcacttgggctttcccatgggagtggggagtagggatggttccgtgcagcccatctctctcttggcatcagtgaccccaaccaagcacaggcctcccactgctaggaaagcagaactgtcctctctcagggaagacggttttatttagtaagagttttcacggtagggaatcaggtactgctgtgaaggtggtggagacagaaacacccctgaacccttggggctgctcttgagcaaggcaggtgcaagtgttagggcccctcagctctctgccctcggcttcgatgtcttcttctctgtgttctggcttgaatgcatctggaggacttgagcttctccaatgtactctagtgggaggagagacagcaggcaggagaggaccgggaaggtggggcccccacctgggagctgcaggtggatgtgtgagtgctgaggggaaggtctgagtcaagcccagctcctgctctcagctctgctggtgaccgaggagggaatccaacctgagaggaatggagcgaatggaatccaacctctcttctttcaacatccaagtaacaaatatcaatgagatgcctactctgtgcctctctgccaggcactctggacctttgatggtctaatcagggagaataatatacattgaggatgtgtttccttttctc

SEQ ID NO: 61290 - DNA, 1009 bp, Homo sapiens
gcctactgcattcttgtttatctagtctgtaaatgttaatacacaattgatgggaacaaagcaaccttagttctttttgagtatgaaaaggaccctgttaagggcagaatttaaaatatttgtagtagttaattctcaggttaaaatcataatcttctagaatgctttagattctaagtggctattgtagtaacactttatactcaatattgggggaccatgttttttggaggctttcactgaagcatttaattccattcttttgaattcgttttgacagatgggtctaaaaaggaatagatcaattctgtattgaattccagtcttaatggcaccgagtctttgagacaattgaggcaaattggaaattctgttttcacattcttctgaaaggggatgcctttcagaagtgtcctgaagggcgctggggagggcaaatatgaggatgccagggtaagtctgctccctgtctggctgtgttgggccagagtggaagaaagcctaagactctgttacccagccctttctgaaaatgttttcaaatgctttcccaacaatcacgaccacaagagtcaacagtctgtttggatgactgaaaacacacaggtttacgatctgtaaagatagtaggtaagtgatttaatcttgttgtataggtaggccagagggcactcgcagccttctgattgatttaatagattgttgaagattaagagttgacttaacatctctcttagaaaactgagaaatagctcattactaaggtgtgttttattaccaccgtctgtaagaaaatacaacataggcatgggaatcaaactacttaaagcctcttccagctcctttgtgactgggaaggttacttttccttgttgcttattgaagagaaaaggaaaatgtttatcattggataattcaggttcactgaatatttaatgagtgtttattatctgcagtcattttcttattaccttatctcatttaatattcacaacaaccctgtgagtgg

SEQ ID NO: 61291 - DNA, 1598 bp, Homo sapiens
aaggagaatgtttgctttgcaacacttaaaatataaaataatttagtatcaagctcattacagaaccagtttgctgactactggggtagagaataggaaagattcaaatagagaagagaaatgacattgatattgggggtattagtgtgagttaagagagtgggacagtgattctagcagtcatatagaaattttagggctgaagtgacgatctagcttaaccctcttactgtataaaataggcacaagattgaaaatagtctcaaagtccactagctgttaagtggcagtggagtgctgctggagtgactggtacagaagccttgagggctgtagatgataataagattattgctgaagaagggcaagatccggaatgaccttgcccttgaaaaatgagagttgaagtacaaactaagaacagacttcttttctctctctaaatgtaatgtttttatttttcacttgtatttctagaaggcctttgagccctacttagagattttggaagtatactccacaaaagccaagaattatgtaaatggacattgcaccaagtatgagccctggcagctaattgcatggagtgtcgtgtggaccctgctgatagtctggggatatgagtttgtcttccagccagagagtaagtatgctgtctcctctgtaaaggtatagtggtgtgtcactagcctcaaactaattgctgagagataggactaatttattgccttttggttgtttttttgtttgtttgtttgtttttgagacggagtctccatctgttgctaggctggagtgcactggcctgatcttggctcactgcaacctctgcctcccaggttcaagtgattctcctacctcggcctcccgagtagctgggactacaggcacacgccaccacgcccagctaatttttgtatttttagtggagatggggtttcaccatgttggtcaggatggtcttgatctcttgacctcgtgatccacccacctcggcctcccaaagtgctgggattacaagcgtgagccaccgtgcccggccctggtttggttcttatttttaaaatctgtttaaatgtaaagcagtactttgtcttctgattggtcaagttataacaggactcttgtataactaatactccttacattgattttttttggatttgtagttcacgtaaaaacgcctcagaattagtcattgtaaggatccacagaaatctcagtatggtttaaacctttggtaccagtttcttccctagaacataattatgtcacctggagttcccagagcaggaatttattgctttcattttgtgctatccttttcagtaaagattaggtgaaattggaacagcacttacatggtgaccatttgagtgcttgctatgtgccaggcactgccatcaggctgtggggatatctgcacaagtagtacaggatctctctcctcttggagttgaactggtatcaggggatcgtatactttgagcttcctagaagtgactcagtgccagatcaacatggggaagaagaggccacttctcagggtgcagaagatgagcagtctcagtgatctgcttctgaatcttccacctttg

SEQ ID NO: 61292 - DNA, 2338 bp, Homo sapiens
ttcagtctgtgtcttagttacctggttttgtcccaggtgtttacagaatgtggactctagggagagttagaaagagagggatgcagctgaagcaaaaacagctagcagagatgcaaggcatgatgtgatagatacaaaaagggggtgcagacacatcccgtggttgttgagtgaagagggagctccttctggccaggaaagtgggaatttccagatctcctaggaatgcagtagaagttcatattcagttcacaccttggataaaagccaggcttagattcttatagactcaaacagaaaattcctgtggtgcatttgaagcagtatagaatcctgggaatcctggactgaaaatacaaagacttcagttaaatctttgctctatcactgattttatctgtggccttgagcaagttttgatgctttgatcttgcattgccttttatgtcactcgtagatggtatataatgccttctgtgccagcctcagaatgctgttgtcagagtcagtcgagatacattgattgtgaatgcatcagaaggtctattagtctatttagatgccatgtatttatgattattatgatcgacaggatttgtattccctatttgttctatgtactgcctgacagagtggactctggcatctgtgatttttcaaacttttttttctttttgttgagacagggtctcactgtgttgcccaggctggtctcaccctcctgtgctcaagcagtcctcccacctcggcctcccacagtgctgggattagaggtgtgagccactgtgcctggccagcatccacaattttgagggcatttgtaggtccagaaaatgttagaatctgtgttggatgagaggctggacatagatccaagaaaaacaaaactaaaaacaggctgcccattagtcttgggggaaggaagagaaatgttgaacatctagaaaccttaggaaggtcaagaattctggaacacgtatatcatttgacctagtagttctgcttctgggagtttatcctgtaggtgtacttgtagtttatcctgtaggtgtgcagtatggtgtgtgttacaaggttatttcagcatgatttgtaatagcaaatattagaagcaacctatatatccatcattaaggggcaggttaaataaattttggcacatccataaaatggaatactctgcagctataaaaatgaatgaggatgcactgatctttaagataatactcctaagtggaaaaacaaggtctactacagtgctagagtgtgctactttttgtgcaaaaaaagggagacaaataagaatatagctttactgttgcacgtgtatgcataaggaaactcaggggggtagcatgagggttggggggatacgtttgagagagggaagcttcactgctttactgtgtgtgttatgtgtttgtatttttaaaattttgaaccatgtaaatatagtacttattcacaaacttaaatttaaaagtttttttaaaattttttaaacgaaagaaactctttgcaattggaaggcaagtgaggtggaagacacattgaatggttgctatatgccaggtcatatccatggaaatttatttgaataagagaaccatttgtttcttttaggtttatggtcaaggtttaaaaagaaatgttttaagctcaccaggaagatgcccattattggtcgtaaggtaagtagaatctgtgtatgtcattttttcccctcttgataatcatacctctttctttctatttactaaacctaatattctcaaagtggaggggtgattttgtctcttacctccaggggacacttggcagcatttggagacatttttggtggtcacagcttggatggaggggtgctcttggcatgtaatggatcgtgtccagaaatgctgctaaacactaaacatcctacagtgtacagggcagcccccccccacccaccaaacacagaattatctggctggaaatgtcaaaatggccaaggttgagaaccctgacttaaccctttctccaatgtaactggccaaaggagagatgagaagcctgttaaggaagtaagaatttgagaaaacctgactgtattgttaggtgctttggaacaacatgcagctggctgactttaggtatttatctaggagttgggtgcttacatggtttaggtcaggggtcggcaaatgttttctataaagggctagatatgaaacattttgggctctgtaggccatatcatttctgttgcaactcctcacctctgcccttgcagagggacagcagcaagaggttcaggaatgagcctggctatattccagtgaaactttctttacgaatt

SEQ ID NO: 61293 - DNA, 1046 bp, Homo sapiens
ccacctcctgggttcaagtgattctcatgcctcagcctcccaagtagctgggattacaaatgcctgctaccatgcctggctaatttttgtatttttagtagagatggggtttcaccatgttggccaggctggtctcgaactcctgacctgtaatgatctgcccacctcggcttcctgaagagctgtgataataggtgtaagccaccgcgaccggctgagtgcatcttgacctttagagagaagcttcgcttttcaaatttttaagaggctattgtacatgccagaaagtagctgatcagtcagaatatcaccatatatctttaggaaaaatgttagtttagttacttgtgcggtgcctagcattgagcagttgcttgactgtcataataattctgctgtctctactgtactcttgcatctggataactttgtctttcttacctttggagattcaagacaagttgaacaagaccaaggatgatattagcaagaacatgtcattcctgaaagtggacaaagagtatgtgaaagctttaccctcccagggtctgagctcatctgctgttttggagaaacttaaggagtacagctctatgggtatgatgcttggcatatacatgctctctacttccttaaagagacaggttttgtcattgtttaatgttcacataggttaagaataactcatcattggttaatacatgtttaggagggcctactctctgtttcacaggttgaatttcctatttttaaaattatgtttagattcatccttcatccataaagcaagcaaatctcagagacagtggaacttggcttttatttccttttgtaagcatgaataaaacaaatatatttgtgtttaagaagagagaatataagatatgtaatacaaatgaaatacagatccatgtaaaaatgtgaaatctgcataaaggcacaaaagaaaataagtcactataattccactatcaaagataaacagatggtgtctatctttatgcatgtagctataggtagagctgtctatatagtttacatctatc

SEQ ID NO: 61294 - DNA, 1049 bp, Homo sapiens
attatcagattgcctttattgtagctaaatgctattaatatctttttcacattgctgataataatgatttttcatctttattttattgtgctaactctattgaacttttttcttgatttgctataagaatgctgttgggtttccactcaacatttttttcttttgtatccagaggagtttcttcctgtttcttctttatcagaacctgtcttcccagagattcttgcttactgaccagtgaccttacctttctctgcagacgccttctggcaagaggggagagcctctggaacagtgtacagtggggaggagaagctcactgagctccttgtgaaggtgagtgtccagttcttgagggaagcctgtgaggtctgtgccagtttacatgacctcctttttttcccttacttttgtaattagaaaaattacttaaggaaagcttattggtacaataaaaccataaaagtttctcttcacccaaacataggcgaatatgtataatattatcaaagacatcttcagtctgtaaaatagtaaaatgttatttatgttttcagtctttgcagatgtcctgtctagaaggcagattactagggaaggtagtcctgtcagatgagatttttgtggtgagacagattttgtttgataagaagagataagatagggaaactctttcataattttctcaaatcatgtgacccaagatgagcagtggtctcatgtatacttcaaataattctcattcttagcttcttccatttctaatcaaatttatttttattttattttattatttttacagacaaagtctcactctgtcacacaggctggagtggagtggtgtaatcatggctcacttcagccttgacctctttggctcaagtgatcctcccacctcagcctcctgagtagttgggactacaggcgtgcatcatgacacccagctaatttttgtatttttttgttggagatggggtctcactctgttgcccaggttggtcttcaactcccagcctcaagtgatcctcctgccttggcctctgaaagtg

SEQ ID NO: 61295 - DNA, 1065 bp, Homo sapiens
tgcagtcgataacaacagctgctttgtgccagacactctactaagtgcttcacatgcattatgttatttaattattgctagaacactagaagatagctaccataacaacttctgcgtatgaagaaacaaccttagattatgtgacctacacagctgaaagtaataggcaaagcttagacttcctcctgggtcggtttggtgttatagtctgcgcttttaaccatatttatacttctttcctcatcacattgtaaaattatttatttacatgtctgtctcctctgctatgttttgatcttttggttgaggaatatatcttatctttttttccagtttatattgttgtgcctaatacttagaaactgttgtttagtgcatgattctttgtcctgtatagtgtaatagttttgatttcacatctgcttgcatttttttgcaggcttatggagattttgcatggagtaaccccctgcatccagatatcttcccaggactacgcaagatagaggcagaaatcgtgaggatagcttgttccctgttcaatgggggaccagattcgtgtggatgtgtaagtatatgcaaggggcatccaatagccttattttttaggttaaaatagaagagtttttaataaatattaattatattttaaaaaataaaaaatattaaaaatattttactacacaagaaatatttgatcattgtagaaaggtcattttactacacaaggaatatttgatcattgtagaaagatcctaattaactgcagttttaaatgttacttgtaattttgtaacctagacaatgtcaacattttggtatatattcttctagatatttttattttcacctttttattttgaaaaactttgaacctacattgagttgctaggatggcttaaagaacaccttagattcactaaatgtaaatatgttgccatatctgctctctacactctttccctccctacccgcttcttccctcatcccccacctgcatacctaccattcccctatttatctgtgtatacttttgttgttccatccagcagtgtttttagtgta

SEQ ID NO: 61296 - DNA, 1022 bp, Homo sapiens
ttagcttgtttccttctgtgttgggtttttattttgcatgctacatactaccttttcccctgccttttagtttgtttgcatagtttccttgccattttctctcatcttggggtggcattctccagacattgttcttatgcactgtgggtgcttcctgtctgagaccatttggctggggacaaagctcagccaaagctttgttctatctgtattagaataaccaggtctattctgagattctcttcaaagttacctatcagagttcactctcttatttggaagagataatataccctttgagctctgattatttaattcactgaagtcttcactctaaagagccaatcctgatgttctctcttcattttgctcatttctccctagcagccatgtttaccactcactcatgagaagaagaagaaaataaggaaaccccctcagcttgcctctgcagatttgggggtataaaggaaaattctcaggattttgctgactttgcggtacagtttcaagggctgattagaaactagtgttttgcttacttctgctctctgctgtttcactgtttcttttttttttttgattgccaatatttgaagtttattgcctagattatctctctttccttgtttggttgttgttattgtagattttgactcttttctctccctgcactcaccctttttttttttcttcccatcttactcctgaagtccaggcctaggggttttttgcattgctgcaattaaaccatatctctattattttgatcttcagcacgtgtgagggatcagaagaaggatagagtctgattcccaggctcttctaatatttagacttttataaaataactaatcagcactggtattgtctttttccctctcccactctgtctcccccactcctcccttagcttcttacttctctctctggatgagctgcttctagtgaagaaagagttcactgttcagaggtgggaagccagaagataaaaccaaatggctgggcagtctttaggttat

SEQ ID NO: 61297 - DNA, 1332 bp, Homo sapiens
gtcaaaagtccactggtgtttgcataacaatgatgttttgactagttattggactaaaagtaggacacatgaagcaggtgactaggaatttggaaatattattgcttaggtcattactggaccttacgaagagattgttgcactggtgacttggactttgctggtccctccccgactcttcacagctggcttgacgactcttgtgacattctgaggttttatgctaaaccacaggacatgctgctgatttgcagagctgacctcagctgtaagcactttgtcttctgcagcgtagaaatgtagtgacctacaagtgtcccatgcccaagttgggtgcattattttttggtgatggtcacatgtttcataaagacttcctgagtcaaaaaatgacttttctcagttcatcttccatataactcctggccacagggattttgtatccaatggtatttttgttctatgtgtggatattattttagcaaagttcagtggtcactttctctgattccatcttgtattaagctacactaaatatgaaaacgtagaaagttttacttcttatcaacagatgctaatgtatgacattgagtgaaacactttaattcctcaagggctcagttttctcacctgtaaattgaaaaaacctttcaaagattgtatgaatcttcagagatggtaagtctaagaagttgtccaactagtttagtattgtggctttttgtttgttttggaatgattcattctcatatattattttttaaaaaaatagccaggtggctatgacatgcctgtgttggtcaaggtttactgagagtcaagtcaggcattaagaaatgtgaaggccaggtgcagtggctcacacctgtaatcccagctctttgggaggctgaggtgggcagatcacttgaggccaggagcttgagaccagcctggccaacatggtgaaaccccgtctctgctaaaaatacaaaaattaggtgggcatggtggtgggcgcctgtaatccgagctactcgggtaactatggcaggagaatcgcttgaaccaggaggcaaaggctgcagtgagccgagatcatgccatggcactccagcctgggcaacagagtgagactctgtctcaaaaaaaaaaaaaaaatggattgagggtttgttaggtgtcagccactatgtcaggtgctaggaatttgtcatgaacagactggtccctactttcatgaatttatagtccagtgagggaaataagatgaataaaaagacccctacgtctttttgtttgaactctggtaaagaaatgtgtttatcagaggggctaggccaaactttagga

SEQ ID NO: 61298 - DNA, 1144 bp, Homo sapiens
tgcacctttggtcccagctacacaggaggcttaaggcaagaggactgcttgaacagcccaggaatttgaggttacagtgagctatgatcacaccactgcactctagcctgggtgacagagcaagaccctgtctcaaataaataagcaaacaaataaataaaaattagatatatataaaaggtcctcctatagctctgatagggccatttattaagacctgctataccatttcttgctttagggattacatatgactttttagaactgtggagatgggcagattacttttccagaaatttttttagtacatctttcatgcctcagaagcatctaggggaatataattgggagttgggtagacaggttcgaagtcagtgattgagtcattagatctagatggggtttgggccttggaattccatttttattgttccatctatgattctgatctcagtaagaaccactgatccagtgtagccctcttcttttttgaagatgagaagactaaagcccaaagggttagattgcattcattataaggaagactttgaatgattaaagagatagtgaccaggggattgtatgtgactgaatttactttttcttccttcatttatttttttgttttaagactggaaaatatcaaaggcatctttgtttttgggaatccccaattgtcagtcattgctctgggatcccgtgattttgacatctaccgactatcaaacctgatgactgctaaggggtggaacttgaaccagttgcagttcccacccaggtaagcttgaagaagcctctttcccttattttgctccatgattttggaagaacttgggtggtacagtaacctgaagtatagagtttgactgctagaggctagcacgttagtagcaactgtagtatataaaggatttctctcttgccacctggaattattagatacaaagaacaagaccattagctttaaactctggcagaattaggtgacagcctcctagaccagtggttggtcatgaggtttttctctcagtctctagcctttctactctccaatccatcttgtacacagccatcaaattgctcttataaaatacttgttacctggctaatatttagttcaagatcttcctgggggtctctaatc

SEQ ID NO: 61299 - DNA, 3721 bp, Homo sapiens
tgatctctgcatcacccaccccttagggttgctgaagtctcaaatgagatacactataaagtaccttgtaagttagagacttctgtataaaagcagctggtggtagtgtccatttgaaaagaaaattttgtcacaggaaagatagtaaacatgttttttctggaattttcttaggctagtccctttatgcagaaaggcagactggaaagtccctgtgaaaaattgactatgccagctgtttttctgatagaatgatgggatgccttaggtggaaatggggtagggcagtgcacatgcgaagctaggactcggggagaaggggctcattgctgcagttttattcttgcttttggacctggcctcactaataatgtctctttctttggatttgtagggtgccatctatggcatggcccagacaactgttgacaggaatatggttgcagaattgtcctcagtcttcttggacagcttgtacagcaccgacactgtcacccagggcagccagatgaatggttctccaaaaccccactgaacttggaccctttctagtctcaaggggattccagccttcagaaggttcttgggatatggaacaggccgtgcacaactttgacatctggtcttgctccatagagcacaactcaagatagaccatgagacagcttgagcctcaggattcttgttcttcctcttatcttccttttgtggtttttaatttgaagaccccagagaattccattacataatgattttgcccttgttataaatgttaccctaggaattgttttaaccatttccttttctaaactctctagctttcaactttacttaaacattgtgtggtagctctgacctgtcctgattctttagagaagctggggtacagtttatgagatagctagagcttctttgttatctcaggcaggaggcgtttacataacagatgtttcctcagctgggtgtgaggtatactctaagcaggaggctttttcagccttctctctcttttttttttttttttttttttttgagatggaattttgctcttttgcccagtctggagtgcagtggcatgatctcagctcactgcaacctccacccactgggttcaagcgattcttctgcctcagcctcccgagtagctgggattaccggcacccaccaccacgcctggctaatttttcaattttctttttcagtagagacgggttcaccgtgttggccaggctggtcttgaactcctgacctcaggtgatacccgcccccccgcctcagcctcccaaagtgctgggattacaggcgtgagccaccgtgcctggccctgtctctcttaagagtaggttcattgtctgtcttagagtcacttctattgcaactcattttctttttccagggcacagatcgaccaagctgccgttccctattctgcaggacaggactattctagcatacctgcttcgtccacccaggcagggtttggggtggtctcttctgtgcctgcagtccccatttgacacttggttgccaccatctttggagattattgtttggaatgatgcttccattggctttttcttgttaccatggactaggaagaaaacatggtttccaaataatctgggagcttttggccatggtgccgccttcctgaattggcagtggtcagagcacacctgaaccctatcctgggctggtgatgagcagaaatcagacctttttctatgcttttttgaatatcagagtaggatgaacacccagattcaaatatgtcaccaaagttggtggtggtccttccctgcacccttgcgttaagccattatgtaatgaaaatgtgtttgcttgaaggaacagctcaaagcaccttcacaagttgccttgacttaccctaggtgggtgtgaaagagcacccgtagcaaggaaaattttctctattagtgtgttcttctgcctcttcccccttgattcagctttcagaggtactatggcagttttgcctcaggtgctgaacatttctcagccctggctaaaagggagcagcacagggagagaaacaggataggaaagcagaatggcgagcagcctatggcccagggcctgtaatcccttcccaagactagctgctcagggtggtgcagggacaggaccagaccctgcgcctatttcctgccttctttcccctatagggaactctgtaggctgagccactgtcctgctcttatgacattatatcttgtgcctttctcctcagcagtgagcagtgagctactcctggcccaggccctaggggaaatggatcagtctttgaggtttctatttggggaggggagtacttaagatgagtcaaaagacactttcctctgttccattccccatctcagggactcctgaatattcagcctctccaggctggtgtcttctagtttcccccactgggaatgctggctgggagagccatgactaccagacttttcctcaggctccttggcatgttagtctgaattgttcttgagcactgtactactgacccaacaactgtgactagctggccacgccattcagggctggtgtggcatttatgtgtgtgtgtgtgtgtgtgtgtgtttttcctgtttgcccagcagtgcattgtgggttccaagagtgggtagtgtgtgtatgtgtgtgtgtcagagggagacctggcaggcacctctttgagagtagctgtggtcagagctgtttggtcagtgcattatgttgaatgaggtccaggaacccagagccacccagcagacaccactgtggcttgccagctgccaagatggagaagcatgtgcccctgtagagcgtctccccagaaccagaccccgagccactcgcttcctctgtgctgtgacaacattggtgccaggggagatggtgtttttcaaagggacctactgtagccactttaatttacaattaagagccttagtttgacttaacacttttgtaggcttttcattgtgtatttttgtgtatgtgtgcatatagcagctactctgtagcagaggtgggtagagacacttaatagtatcatgtcgcatgcagatgtcacatcggcctctgcaaaaactgtactgtcttgtttctgcattagacttaagtagtcatgtgaatatactgctatgtcacttttaatattacgagttttatacttggaaaatggtacttgcttcttttaaatctctgtcttctctaacctcccccttcccatttcaatgctcccttcctaatttcagcaataatctcaaaaagcaattaaatagttaaatgaccctaattgtaattactgtggatggttgcattcatttgattacttgggcacacacgagatgacaaatggggcagtggccatgcttgaatgggctcctggtgagagattgccccctggtggtgaaacaatcgtgtgtgcccactgataccaagaccaatgaaagagacacagttaagcagcaatccatctcatttccaggcacttcaataggtcgctgattggtccttgcaccagcagtggtagtcgtacctatttcagagaggtctgaaattcaggttcttagtttgccagggacaggccctatcttatatttttttccatcttcatcatccacttctgcttacagtttgctgcttacaataacttaatgatggattgagttatctgggtggtctctagccatctgggcagtgtggttctgtc

SEQ ID NO: 61300 - DNA, 1034 bp, Homo sapiens
ctcactgtcaggccattaagctgctagtcacacggccagattccatggctttggaaatgttactgtatttgtgcaatgttgttttgagtcatagttgctcgcagggtcggcgggctgcccctgattgtggctgctgtgtttggggaggggagcaggagatggagctggggaaagcctcctatgaagtcccaggggactcaagagtcccaccgcacctgctagacagtggggcaggagtagccacaggcactcgtttgcatgagctgacctttgaggaaagtgtgtatgggaagaagaaatcccaagcatggttgtgggtggacagagatagggtgaggggtctagggagctggggacctgagatgagagtcggccccttccccccagctcagggctgcatcagactctgtagtccagcatgtgactttccttcctttccttgaatatgtcttgtcttcttcccctgccaggtctctgcacatctctttctactgccacgtcacctggggtcatccgtccatctcagtgtgccacactgcccagatgaggtcaggcccctgttaattgccacccctggagtgactttgtgccatgactttgtggggccaggctccctttgtggttgtcagtcccatgagagttggactgtggttgacagttcatggctgggcccctctacctggcacagagcagaccctcaaagagtgtttgccaaaggaaaagatgaaccgagggaagtgcggtcacactggagggcctttggagacaggagatatgggggtccctgctttaggtccctggtggtccagcatggcctgacccagggagagaagcatcccccagcccacttctgtccagaacacagagggcctcatgatgcaaagaggactgaagggttgacctgggaagggatcagacctgggacccctactcctttctcatgagggtacacatgaggcctgggcatgagcacataggagaggtccctcccttaccctccctgggccccccacatcttcctggggtggggcgga

SEQ ID NO: 61301 - DNA, 1004 bp, Homo sapiens
ctacagacaggggagccaaaagtgagagtcctatgtttaatcagaggagaaagctgacatggccaagccaaatgaaggcgcaaagccagatttccttaatttgggggagcgaaaattgggccgcctccacgtccagccattctccagcggccgggtttttcaaaacgctgcgcccagcgtctcgcgaggaccctccccccgggtcccccagctctgccgcggccgcgcccagatggccgtcggatcccccctcaaggtccccctgtcggctccgccctcggtcgcccaggccccgccccggccgcgcgcggtcccctcggttggcgaactcactccggcgagcgagcggcggcgctcggcattgtggcaggcggctggggccggctagggcgccggagccgcacgcagccgcggggctccgagaggcgcgcactggggctgggactgcgcggcgccgccgctgcgagcgccactgagcggtcgcgcaacttcggaggcacagcgccggagccaggcgagcgctcagagacccggagccagaggggcgcgccggagcctcgttcgagagccggcgccaggcacccaccgcgctccgagtgccaggcggccctccgcgcagcgtggcttccgctgcccccacggaaggcacgggctggcgctgccgggcgccggggaggacggcgaggaggaggcggcggcggcggagacggcggcggcgagactggggccagggagacagccctgggggagaggcgcccgaaccaggccgcgggagcatgggggcccggagcggagctcggggcgcgctgctgctggcactgctgctctgctgggacccgaggctgagccaagcaggtaggaagcgatcgggtctgggggcgcggggctaggggacccttgcgcctcactctgtcctgaagttgaggtggtctttcgtcgcatcgatgcgcgcaggaaaagcggcaagggcgcccaagttagaatgtagattttactgcctccca

SEQ ID NO: 61302 - DNA, 1280 bp, Homo sapiens
aagtccctaaccctcctctctcgccgtggatgaatacgtttctcgctcgtcctgtagctggacccggcgtcgctggctgggctgcgtcttctcggggaggctgtggactgaatggagccagcctctctctggtacccgaacccaagcaagtgggctggccacggctgccgggcggctcggctccggagccaggtggggacggggcctcctgcacggagtcctctctgagttgaggctgagaatggagcaggaaaactggagcagaaagtggacgagatgacgcagccctccccacctcctacctcctgctgcgaagttgacatccgcccttcccccctccatagccaaagattcctcattctggaattagtgattcccacggccaggagtgagggcttggctttagcacattccccacttttttttttttttctggtgcaagtcctgtgcagtagagttacaacactcaaccatttgatccaagttaattatgatttgggcagactctggtatttaaagcagtgttttgaagttggaaggtaatgatggggatggggaaggcaggctgctgaatgtccaaccttgttttaaagggtgcagttagacgtgggaggtgcttggttggggtgctggtttctggttggagggggtttgaggagatgattgaagggtagggtgaagtctctgtaaatggcacatgggcagggttgtgtcttgggaagctgcttttgtaccagcaggacagtgggatcaggaataaatacttaggttaccaggaatgaggggctgctgtaggagaaagacaagactggttggcctatagttctctgggtgggtgggcttggccaagaaggctgggggtggcctgcatttcctgcttaacaaagcatccagcccccaccttccccagaagaaaccccaggcccagggctttgatggatttgggcacgaatggtgcccagtcagaaatggcctctaatacccggctttgatttctcaccagcgagcagaagcggtgttggaattgtgctcattacttagtgcggcagtagctgcctgcccaccagcctggagaggggccaactggtggggtcggcctgcagccttctcattgcccagaatgtgtggcccttagaaacctgccttcaggagggagaacatgtcccttcctcccacacaatcttgtttttctctaatgccacaggcacagagcatcattctttcagaatgttctttgggtttttccattggatccttcacaagctccatttcactgatgg

SEQ ID NO: 61303 - DNA, 1111 bp, Homo sapiens
ttttccatcttagcggcctgattagcatcgccgccgcttgtggggctggattctaccctctcctgcgtcccccacccccagtccccatctccacctccctccccagccgagctaaatcggtctgcggagccccgggagctctaacgccaccgcctagcgagtgagtgcacggagccgccctccttctcacctcccagaacaggctgcccccagtgcttgcaacttaccccttcgcggcgctgcacggctcggctcacttctccaagaaggcaggcttgtgggtgtgagagtatgtattaaggagtgtgtggggggtgagaatgtgtattaagcaggtgggcggaggtgggagtttgcagggaggggagggtgggtgtggtgttgcactggggtgtcaggtgtgtgtgggggcgaggcatggactgggtgtgtgccggaggatggatgtgtgtttgaggagggttgtgccttttgtaactcaggaggtgtgatgtataggctgtgtctgtgtttgggtgtgtgtggggtgggcaatgtcacatgggcacacttgtggtgtgtttgtgtataaataggtatgtgtaatgtggagacagtgagtcaccaccaggcatgggaagctccatccattgtattccgttggggattccacttcaggatgggacccaggccatttgcccatcagcacttaagagacctcattttgccccacacctgcactgtgagcagggtttggcctgagtgccaggttctgctgttggaagggcagaggacagcttcccctgctgagtgcagatgggataggcctgcctgcaggtgggtcctggtgctccagggggaggaaggttggcagagatggaccctaagccagcccagcagcttgggctactgcccccaggaagatcagagtcccagacctggagtcttctgcagtcaactcccagcttccccagagcatgggagcggctgtggtttggagatctgctctctgacctgggtcagcttatgcttcagcctgtctcccccaaagggagtgagttctcctctagagtttgctggagaaggggccagcagagcttgagtgggtgggatccccagtggagaaccccat

SEQ ID NO: 61304 - DNA, 1125 bp, Homo sapiens
ctagcacttctgtgagccatttggcaggggtaggggtggggagatcctttgtcatcaccacctctgggaacccccagctgctctctttccacacacacctctccccggggccttagctgcgggtgcagaagagtgcatggcattgccaattggaattctaaggaggttaacacggcctcccagcattgtcactgactaacttggtgacgttgggcagctcacctaactggactgtacctccattttctcatctgtaaaatgggggtaataataacatcatcctcagaattgccttgagagtctcatgagctgatgtatggtaaagcccttagcacagtgcccggcacacagtgatcactcagggcctgttggcatgcagcctgccccggagagagcctagcaatgcatcatcatcttcctccacgggagtgaaagctgggaggtcaggaccaggagtctcagctgctcctggctgaggagttagtagactctggctcttgattttcatttgctgtgagaccctaggcaagtgcctttccctctctgggttctgattgtttggtttcccttcccatctgtaagtccggagtggggcagaggtggaaggatgatccatacaggatgtggggtttttgtctggttctatctgaagaggctccagcagtcagaaagaaacagaggtagccgaggtccagaaccacttgtgtttacagaggcccctctggaaagtcagtatattgactggaatgcccttgcacgcattatgcagccctgggtgtctctctcaccgaagccataaatcaccctctgggaactcggtccctttttcctgctccataagcatttcctgcttcagaaactgagaaccccagatgccaagcagggcccaggaggtagagaagggccccactggcagaggcagcctgggcatgtgcgagaaggggcctgtggtccccccccttgtcacccactccgaagctcaagtgcgccctgctgagggtgttagagacagactttgcaggcctggcccccgtgtcatgcatagcttcatttctcagaggcagggggaggccaatcttgggggttggggaatgaggactcctgtctccatgtagggtatcagaa

SEQ ID NO: 61305 - DNA, 1008 bp, Homo sapiens
gaggattgggaaaactggattcttttttttctttttttggaaataaaaaactggattctaatcctagccatgtagctaatctgctttgtgacattgggccagtccttttccctctctgagcttcctctgtccaaatgaagaggttctgccctggaatcagaaaacctggattcaagtcctggccccatcactaactgcaatttcatgagcctccatctcctcactataaactgggcccccaattggttgtggggacattaaaggaaatgggcatggtcagtgaaggtcggttttctttcctttccacccagaaggaaatccacaaattgctggatcctgccttctagtgggattttggattgctggatcccaaatccacagagcccgccttctttctttctgatattgccttcttgacatgggcatattagacataaggtacagtagggttatcctacagacttctgagataccttccagccttcaaagcccatcgctgtaaagcaccgtggatacagttcaggaagtcctgtggggtgacttggtaatcgtctgagggttatcagcgaggggagagcctgccttgttatacacatttgggagagcctgccttgttagacacatttggaaagagcactggactaggagtctggaatctccagctctaaggccaaatctgtctctgtgtgatacgcaaatctcacccaccttctttgagcctcagtttacccatcagcaaaaggaacaaaagaagttgaatgccaggtagggccaagtgagaaaacacccagagaggtgcttcagaaactgttctccaaacccacgggggtcgctgatctgaggcagcaggaggcctgcagaacagtccctggactatgcggtgcatcctgggaactgctgcctgtgtggcagggatgagagggcccacgtgcccatttccctggcacctcccatgcctggctggccacagctgttgagctaagtgacaagagttttagccacttctca

SEQ ID NO: 61306 - DNA, 1023 bp, Homo sapiens
tccctggatgtgtcacagacttgtaccatggctggaacacacaggttgtttatatggagagcagccaggaacagggatttggggtgtggctgggggtaaagacaatgggcttgacagcagcaagccacctccatggtgaagtcattgtcccatttaaccctgtcagagcagagatgctacagcaaggcaaatcacttcctctctctgagcctcagtttccctgtctgttaaatgagggggttggactagtgaaccataggattccttatatgaaagctatataagctgtgcatcgtaaagtccccttagcccagcagcctatagaatttcctgaggggcagaaggtgccattgtgacacccactggcctcttccaagcatttcctgctgggcaccctaaaaatacagtaggggtgaggtgggggttggcgagagtatgggctcggccattgctagagtcgtcatttcacacatcagcaaacgtgcctctggagggagtgctctcgcactgagcttggcgtggctggctccttgtcatccaggtctcggctccaatggcccctccccagagagtcctttcctggccccctgcctcttttactcttcttccagcacttcttgccatctggaatggttgtttgaatacagacttatgtgttgactccccagcctgggagcgcagggctgtgtacgctcagcaatgtaccctaaatgctcagaacggtgcccagcacacggtgggcccttgtgaacaggtgcttagcaaacgaaaaaccacaatcgtacgtaaaaatcttaagagttttttttttttaatgcacatgcctggcctttaccctaaaggttctggtttagggactgtgggccaggtttgggcatatgaattttgacaaaacaccccaggtgattctgtggcacacttatgttaaaaagagactagcttggtcattctcaaccttagctggacaatgggatcacctggcacctaggtcccacccagagatcctgacttaattggtcttgg

SEQ ID NO: 61307 - DNA, 1125 bp, Homo sapiens
gtcctcccaaccactctgtgagatgggcatgattaccttgctcgtggagaggaagaaaccaaagctcagggagcttgagtgccttgtacacaaagctgcgaccttactccaggatttctgccagctgtgtctgcacctgatgggggacttgtgggcaggtcgctgtccctctgaatgtggtctgcagtatttctacttccacagcacttgtccattctgatggcctaaatgccaagagaacagggatcaaggaccagtgtgccctgtgaccttgagcaaggttgtttctgcctcagacctcaattttcccaaaggtaaagcaagagttggactgggtggtcttccaggaaggtaggacccctcggcttttcgttgcaggttttcaagtgtgtcctagcaccgaggagatgaggatcctgaggtggccccatcccggggtcctgaggtggccccatcacggggtccacagtacaaggtcaatgcacttgtaataaatattgagccaaccaatgctgagccgcatccctagcctctgaataaataaaatgttgcccagaataacagcccggaagatgctggcggcttcagccagctctcacctttgcctctcccactggccaagcctgtcacccgtccctatactcccttgtctcccccttccctctgcctccccactccacggtccatcactctagctccagaggtggccaccgtcccagcctggctttagtttctagctctgcagcctgcatctccctctcccagcccctcagctgccacagcagttaatgaggaccaacccctacagatggcagctgggagacaggccagccaggttctggtggggctggggtggggcacagggaactggaggtggggcacaggggagtgtgcctttaatccccagcaccagacagaagcctttccttctttgtcaggacccttgctggcatttcctcctgcagcccatccctgggagatgaactggtccaactcctgcaggaggccagcccactctaactgctcttggctgaggccgccaggagattagaaacagggtccacaaaggaacctggtcccagggtgctccaggccacacaggcacacttgatttgatgcttctct

SEQ ID NO: 61308 - DNA, 1045 bp, Homo sapiens
gggagactcatcctaaaagctgggttgaggggacaggatttggcatccagatcccctccccagcaggccagatagattcccactggtctcctggcccagaaggagaggccagcccttcccacccccagcgcccaggggggcccctcctcccccggcctggctgcaatgccgggcccctattgcaggactcgctgccgctgcctctgactctgcctctgcctctgcctctgcctctgacagacatcccgccccagaagataaggatcctgtctggcgccggagtgctttttttcctccttctttccaaatctgttccctgattatctgcagacagcccctcgctaggggagccaccagggaaggggcccagaccacagagaaagacaggaggggtgggactaacaggcctgcagccaccagcccttctgaacccctctgggggcttgatggtcatttgctgagcccccactgtagccagagccctgaactcagcagagagctgaggactggtttccctgggtgggactgacccacttcagcgggaagaagagggtatgtggactggaggttgtgccagcgtgggctgggatggggacagagggtggggttccttccgtggtcagcgttcctcagccttgggcctggagagcacccagaggggatgtggtagaggcttcagccagccagacggccacatcctgtgggagacattggcccttcccaggccagacggtgggaggacacttagggactggtaggggggtcctagggggttcccggagcccagcctccagccctgaggactgagcttagagaatggccagggctggtgtggcctcttggcctcaacctgaaaaggaagggcagctccccaccaactgggcttcagaccaggcaccattgtggaattccagccttagagtgcccaagccgctgagagccctagagagcacctggtcgcatctgggccatctatagacagagggacccatgtggaaggcaaagggatcatccccacctcgcccactggcatgtcaggagcctg

SEQ ID NO: 61309 - DNA, 1076 bp, Homo sapiens
tctccagctcagaggagtgagctccacggctgggatgtggaaggcttcctggaggaggtggaggtgtagatgggggctccagggtattcagaggtttggagaagaggcaggaagcacaggtggtgggcaaacaggcctgcctgggcggagggtagctaggatcccaggctgggtgtggaatagcaaaggccacagagcctgtgagcagaggcccactctggggaccaagtgcacgttccctaatgacccctgtttgcctggtcaccaagactcgtgtttatgtggaaaagctctggcaacagcatgggttcaaatactaccctccctgcttccaaaccacgtgttcctggacagtttagcccatgtgagcctcgtcttcaaccacaaagtggaattaatagcaatctaccccataacgtctccatgaggtttaaatgagattttagagagagagccgtctcactcagtgcttgggcatttttggagttggttagcctgggtctgaaactcggctctgcctcttactgaccatgtgcccttggggtcacctcttaagacctcagttctctcatctgtaaagtgggggtaagagcagtgagacgtcaataagtaaatacacgggaagtcctcagcacaaagctggcaatcctgagtgcattaactattattatgcaaggtgttcctgcagcacctagtgtgaaggaggtgcggtgaagtccgtattggaagcctcctgcctccatctccagcctgtggcctctataggatcgggaaggaggtagttttactgggagcagaagtggtctttactaggactttgtaagtcctttattctgtctcaagaaatatttgatgctcaccttaaggcaagtggaaatggtaaaacctcagccagtccatttccctcattggtgatgagccaggtgagcctgggggaagaggtgtggtacctggagctggggaagatgaggaaggtggggagaggctcctgtcaggcaggtaattggggatcaaggggcttcctgtgtcttcccacagaaggggacgggagacaaggcagcttccactgagtcgcc

SEQ ID NO: 61310 - DNA, 1048 bp, Homo sapiens
tttaagaaaagcttttcaaaacctcgttcccacgaggaatcagagttcaggaaataatcccaattctattcactattgtccccgggctcccttctctgacctcctctcccccaaccctggggaccacttttgaaaagatttctttttatcctacatgacgtgtgctctctccataacaccatctctctgggagctagggcttagagctgggagccccttagagctttgctaccagcatcacctggaagcttgttaggaattcgaggcctcagcactgtcccagaccacaatcagtctgcgttttgacaagatcccaaggtattcgcacctacattcgcgtttaccgtgagcctagctctgtcttattgatggggtaatggaggctgagtctggcaggggggacccttctatcaggtcttctttagcagaatcccagtagggcctggtggtacagactgagaggccctgagccctcagagcttggggtctgaactgtccttctgggtgggctggcggggagaggcagcccagctagtctctgatgtggggaggcaaaggggtggattcatccagagaatatgccacctcatccctggtagccagcatggccacagactaggtcccatgccagcctcgccgtgccacatggccactaggtttgggccagtcctagatctgctctgtgggctcctgtgagtccctgctccacccacagctgccctctggagatgggtctggccctccctgtctattctgtaggcactctgggtgctcaggtggggtgccacaagctggtgtcctcccgttccattgtgacccggcttgtcatcctgcctcctgtgaaaatagagcaaatcgtatcagctctgttggtctcagggcagtcccaaggacacggggctgtgacttactggtgatacaccgccagcaccctcctcatttctgggcgtcatggctccctcctctctgtatctgagcgagggtgtgcggaaggcctggcacacctggctggaggtggaggtgggggcggccccgagagaactgaagc

SEQ ID NO: 61311 - DNA, 1925 bp, Homo sapiens
gttcacctgatgccaggtgcacaggagctaaggcattacttatcctctaggctagggactgttagcccattttacaggcggagaaaccaaggccagggagacaaaatcacctgcctgaaggccccacagctatcgatgccgagactctatcctgcggatgttgggctctttccactgagtaaggttccctcactctctagtgccacatggggtgccctcagtctgggccagggcagggcagatgcagggccccccactcccctcctaggatacaggaatctgtattgcctcaggcttgtctctgcccacctgctggccaagtccaggacagaaagagagggctcacaaattgggagactctgggctgaagacctggtggtctcagccatttttgtttcttgagggtcccaagaccacccattcctcctccaagcccagccctgtagctcctccaggaagcctggccccttcctgagctgtgtggccagctctctatgcttcttctggaacctccactccagagcacctgagagcagcaggacaagccgtggtcttgggcagcgtcctttcagaggaggaaggtccagagaggggaagggacttgtccaaggtcacacagctagcgacatcccaagcagccctgctggagctcttcagagaaaggacaggaggagccaagggtgagcttggccaagctggcacccacttgcctccagagtcaccaaggtccccaccctgccccaacattgccttttcccgaggagttgattcccaacccagcagaggagctgccagatgggtaaagaccctcctgctgaagaactgagcatcccaatcccctcttgtcctccccgcccagtggccagccaggtactgccctgtccaggaggcagctgacaggcaacagggaagagctgagcctcagggcaggcagcccgtgtgaggccacgtgagcccaatgtcaccagggtcccatcgggtgaactgggatagaatggcccagcctttcctcatgggcagggtggagggaggtgaagtatggccattcattagaaaagtaatgactgggccgggtgcagtggctcacacctataatcccagcactttgggaggccaatgcaataggattgcctgaggtcaggagttcaagaccagcctggccaacatggcaaaacccttctctactgaaaatacaaaaactagccaggtgtggtggtgtgtgcctgtaattccagctactcaggaggctgaggcaggagaatcatttgaacccgggaggcagaggttgtagtgagccgatatgccactgccctatagcctgggtgatatagcgagactccatctcaaaaaaaaaaaaaaaaggaaaagagaaaaataataatgactaatcttggacttgggcagcccttcatagtttatgaagcacttctgcatctataagagaatgtgttctgttcacccattcaaagactaagaaaccgaggctcagagaggcaaagtggctagcccagtcacacagccagttagactgtggggaggacttcagcctacacaaggtcagcgtgagtttactgaacgctgcagtcaggccctgtgcttgatacattcacatacatgactctgtttaccataacgacagccctgggagattcctgtggattgtcccattttatagaggaggaaatatagacccgtgacttgcccaggccccacagggagggagtgtggagttcggtagctcagccatagccaggctcagccaggtcagtgggcgtgggtccctgcccaacttgctgagggtctcaagggtgtattctgcccacctcctgagtttggggtagatagcccaggggactggataggggcagctcggagtctgcccatcgtggctgtgggaacactgcctgctggggacagtgcctgga

SEQ ID NO: 61312 - DNA, 1037 bp, Homo sapiens
cctggtcccttcctttaaccagccccataaaaagggagtggggcaggagggagtctggctgcagactttgtaatttggcttggaggtggctcctgttcgttctaaccaggctgtaattacggctggcacccgacaccccctcattaccggagcctggaaggaggactctaattatagcatactgggtccgggctggagtgggttgggggagggagaccacagtggaggcctgtgtaggcagagagagactctgagctggctggggggatggggcagggccaggattgtgggggggctgtcctgggctcctcatttgtcttgctttcagagtcatcgttgggagggatggggcatagatcgaatccaggccacttccttggggagaacaggacccagaggagcccgcccgggagactcattcattcatgcacgaaggatttattaagcatctactgtgtgccaggctggcactgggttacagcagtgggtaaacaggtgccatccagccagaaatgatgttcaaggagaaagcacattaaagccatcttgctgctggaaatatctgaagaagtccacattgatggcaaatggccaccatcatgagccttgattaccctctagtcaccccagtcactcccctgaaccccctgggcctcacttggcacagcagggccccaggaccctcccccagaaccctgtcagactgttggctgcccacgcaggttaaatgtgtggctgtcactgagcctctgccctgggaccacacagtcgatgggggcacagacattaaaggaaatacacaaataagtatataacttgaaaaggtaatgagggtaataaggaaaagagatgccagacgaagagccagggccctggtttaggtgggagtggtgcagtcagggctctctggggaagtgaactttaaggtgatacctggagaaggaacagggtttagccaggtaggggtgggaaggcagcattccaggtgtctccatggaggcttgcagcctgggcatcctacgttctgaggtgtcccc

SEQ ID NO: 61313 - DNA, 1704 bp, Homo sapiens
ttggccgggtgcagtggctcacgcctgtaatcccagcactttgggaagccaaggcaggtggatcacctgaggtcaggagttcgagaccagcctgggcaacatggtgaaaccccgtgtctactaaagacacaaaaattagctgggcgtggtggtatgtgcctgtaatctcagatacttgggaggctgatgcaggagaacccaggaggcggaggttgcagtgagctgagatcatgccgctgcactccagcctgggtgacagaatgagactctgcggaagggagggagggagggagggagggagggagggtgggaggcagggagggagggagggaagactggtgagtccatgaagttagagggttctgggtagcttaggactttctccagggtcacagagaagccgcaggaggctgtacaccactagagggcagggtttctctcttatgagatcactctggtgttaagaggaaagtggattttaggggcaaaaggaaaggtagggagcccagagagaggaagggtccaggcgggaagacctgggcttggagactgcagcgggtggtgggggtggtcgtgcagtgtgaggcacatcttccaggttcatctagcagcaccaggtccctccagcagcacggactggaagtggggtgaaggaaagggagccaccaggcatcctcccagatgggacctgaacaactgggtgcttggcggagtctaagattgcagctcaaactcaccccatgccaaccctgggtcagggagaggtgacctataaaatagcaggtctgagtcacaggtggggagcctgccattgccttagggggacagcagcattaacaaaggcccaccctgagaaaggcactgtggtcccagcctgggtggggctctcagggtgtccccagagatagctgtggatgtaacctggctgggcatgtgtgtgtctgagggggcttgccacctgtcactgagtggggggccaggctggccccaggccttactcctggatctcggtttgggaggggcaggtccacagagcaagggaagccaagtgctggagtcaggaagctgagaccccgtcccctccagcaagctagggagctcctgagaggacagaacaatagctgtccctgctgggttttggtggctgtgacctcgaacacgccctttcactcttctgcctcgttttcgcatctgtaaaatggaacagcttcgcagggtcattgtgttgacaataatgtgcgctgtctcgttggaacacacaggattttcagtgccaggtggtgggaatatgcttattatctgcaggagcatggatgaaagggctttgagctccttgtctgggagaagaaggggaaacagaatatcccctcctcagggcccaggcctccatcacagtgaccccatcggacctgaaacttggaaaaggaaccaaaaattagccccaagactgagccaaaggaacccaaagccagaggaagggtctggagggagggccttgggggtggaagtcagggtggccagtgacccagtgactctagtgccctttccagctctgtaagcagcgtggcccccatagccaggcccgggctcatcccagcactgcacctgccctggggcctcgaccccagcctcccatccacttcttcacctgcctcacagtccttcgagggagacgtttcacaggagcagatggacacccccttc

SEQ ID NO: 61314 - DNA, 1051 bp, Homo sapiens
cggtgagcccgccccacttgcctgggcaccccaggacaccccaggcccagaggcacaggcctagctccatgtgagacttcacacagccatggtgcccccttggattagcatttccccaagtgctggccacatgtcccagcctgactttgggaccatctccactgcattggacagcaccgagtgccctgtgagccctcactcccttttccactttccatctttctgcttctgttagggagcaagttcccgtcaggtgggggttcttgagccctcccaaacacctgctaatctccctgtttaacaaagagggcaggtctctgcctcacagccctggcaccccacggcaccgacccagaattcaatgcaatcgttatttttacagttcccttctgtttgtggaaagtgatactggtttccattcacaataatgatatggcatttcctgtgttgaaataaattgttttaggttaaaaagaaaaagttgatagtattaagtaaataaccatccaagtggtgctgggatgtagaccaaatctggagggaaagaggagagcagctgaaactgggaaactcgaggaagcctggggtcccttccttctcggatatgtggggagctctcggtactcccagaggaggaggcagagccctggggctccccacatctcccagaactgggcctgcccccagggtgccctcgagtctaagtgaggggctcttgctcacttgtcaccaggtccctgttgatagtgcaggagccctcggggtgaaaagcccttcctggggcttaagacaggcagatgggacccccccttcagtcacctgacagagccagcctaccccagactcagggggctcccgagtagccttcctgggttttgttttgtttttcccgtctctttctggatcctttgctttctccttcttcagctctgtttatttccctgcctctccctgctcatttctctctctctcttttccctatgtgcctgttttgcttctttctttttctcttcatccccctctctctgtctcactctctgtctccctgaca

SEQ ID NO: 61315 - DNA, 1062 bp, Homo sapiens
ccaccttctgttttgtgtgccagagccgggacagccattctctccccagcatggggagcagaaggtgcttgtcccgagcccacagccggctgcccaggctgactagatgctctgatctctgaccccttattctgccctgggctgctggtgagatggaggcagaggctttgagggttagccccttctccctgaccctctagcctgggctcttctgccctccaagctgagggttctcagtgtcagcatgtcagccccaggccaaggtttcagagctccccggcctcagggacagcctgttgctcctgactgttaagacacaccgtggccacagaccctattcatactgacagtcctcctattcctctcatcctctgtgcagcccctctgctcccctacccccgcacatgtgctgtgttctctcccttgggttgtatgtttgtgcctacgctgtttttctttaccctgggtttgtgtctgtgtgtgtaaatcgtgcactgggctatatcgtgttgatgaccttatacatctatctgtaccctctttgtccacctgccaggtgcatctggctgttcattggcatggggttatgtggatatcatgtggatttctctgtgtggcacacatgtgttctgggttcctcatttccttccatggtgtgtatgcatgcatgtgtgttggcacattgctctgttctgcacacataactatgtgtgcacatgtctctgcgtgcacatgctcctgtatgccatgctcttacagtcgatggggcgtggacggagtggagcaagtggtcagcctgcagcactgagtgtgcccactggcgtagccgcgagtgcatggcgcccccaccccagaacggaggccgtgactgcagcgggacgctgctcgactctaagaactgcacagatgggctgtgcatgcaaagtgagtcacagggaaggtggggccctgggggtggggactctggagccatgtaagggtcccccaaacccggccccatgcctcagtgcccagcctgcagcacggcagtcctcagggcctctgtccccccaccacatccat

SEQ ID NO: 61316 - DNA, 1047 bp, Homo sapiens
tcctcagcggtactggctacatttgagttgttcaggagccatatgtgactagtggctgcatacgggacagtgcagccataggattttctaccactgtagaaagctccaccagacaaccctacttcagaccctgccactttgaccttgaggcttcccgcctggccatgtttgcctgggggaggaaagtgtagccgtgggttgcctccctgggcccatccttcttcccacatgctcacctcttctccaccgcattgttgtgcatctcattccacttcttcagctccccgtccctccacttcccaccctcagagcatggaatggaagaagagttcagaacagctacttacaaagataacagagccagaagaccttatctacatacaaagataacagagccaggacctttggtcctctggaaattgctacagactcagaggtttcagccccagcactcacagggcaaattatgtagccccagtgactctgagccacagaccctgtctcatcagcagcaagcaatgaattaacacatggcatgaacatgtttgttcttttgtttctcatgccacaactaggagggcagtaaggcagggacttcgagcccattttaccgatagagaggttcaaggctagcccgaggttgccagcctgtgtaggcagggctcagactggaactcagcaccgggccggttggccctgggccctgccctttccagggacccagggcctccctgattgccccagggcctggtctctgctgccccttatgtggtcctcctgtccccgcagtgctggaggcctcaggggatgcggcgctgtatgcggggctcgtggtggccatcttcgtggtcgtggcaatcctcatggcggtgggggtggtggtgtaccgccgcaactgccgtgacttcgacacagacatcactgactcatctgctgccctgactggtggtttccaccccgtcaactttaagacggcaaggcccagtaagaacccgaggatgtctggggtggttggcagaggcaggatacccagagggctctggtggt

SEQ ID NO: 61317 - DNA, 1031 bp, Homo sapiens
gcactggatacaggtctggacccaggtctgccactaacttggcatgtggccatgagcaagccactccccttttctagacttcactttccacctgtacaagagggtgcatgtggattagactgtggctgggcctccttggggcttcctaaccatgaggctgcatctgcatttgcctggggccttaggtaagcatggtgcaccccctgaggcctgaagggtggccatgcaggccttgcccttgggaaccgacccttcaagggagaagcccctgcctgaacagtgggagtctgtccagaggaggtgggagtgactcaaggctcaatgagctcacagtccaaggggagggaggctggagggcagatgcccagcactgtgcccctctcactcttggcccccacccttgcagacacctgctggctccctggacactctctgctctgcccctggcagcactgtcaccacccagctgggaccttatgccttcaagatcccactgtccatccgccagaagatatgcaacagcctagatgcccccaactcacggggcaatgactggcggatgttagcacagaagctctctatggaccggtgagtatcccaaaccacagcccatccccatctgccttcgtcctcaaggtctcacaggggcaggcagggcaggcagcctgacagccacgaccatctcccagaccagctgcccttttgccaccatttgtggcaaatcagcaactcaggattggatatgcaaagttcaagaatactgctcccttgaggagcatcatgctcagagcactggtccttgagccaggcagactctcagaccctgctcttttcccattgtgtggggataatgctccacctgcccatctcaccgaacagcaggagactcaaagccagggcatcagcttggtgccatcattgtcagcacctggtatctaggacagagaatgtgctgcgagatgcttgctgactgaccaagatacactttggtgtcaaaactcctttggagaacctcaaatgctggataagtg

SEQ ID NO: 61318 - DNA, 1172 bp, Homo sapiens
gtttctcctccaattcagacccaagaggtagcccccgagggcatgtacctggtgggaagcagctcaggtacccttgggggttgcagggcccttacgcaggtatttctctctctctcctctctggggtgcgtgtgtgcgtgcgcgtgtgcgtgcctatgcttttctctgtgggcacatcaggatgcccctcggagagcatgtgcacgtgtccccacctgagcgagcgtgtgtgtgtgctcctctgcgtcccaggtttggacgtctagggtttggtgtgcctgtcttctgccctccctgagcccacagggtcagtcaatgtatcttctacgtgcctctccctctgccttctctcacagtgcccccggctccagagctcaggggtaggggttctcctgagggtgcaggggatccttctcatctcctggaccctccagggcactctggtccctattccccagctcctaggcagctgagccgggtcccttaggggaggtgaccaggagctttggtgcagggagctcttggtggggcaaagggctggacccctgccaggtctgtggacatggttatatgcccgggagaggggggtgcagggccccagggatggcccccaatcccacctctgtttattctgtaaactgcaacctataaataacctttagcattcctattgtaacaaaattaatttttatgaaataaattatatttcctagtctaataaaatccgggttgcatttggctgtcttcctgttggtaattgggaatgactccgttgctcttctcaaaattccatggaaggtggaggtgtcactgtcagttcagagctatctgacccccaggagatgagcaagcccaactgcctcattttatagaagggaaaactggttcagagaggggtaaggacttccctagagtcacacagcaaggaggagcctgtggtccatctggatcccggtccttgtgcatccggatctgttcaggagtttgtcatgtgagtctgccaggggctaggtaatggttgagagggatgacacagagatgaagccccagcatccctgtccgtctctgaggagttcagaagggggtatccccaagggtgctgaggctgtgaggtcagttcagaaacctcacctaggatatatgactattgtgcaggctgaaagggagtgatg

SEQ ID NO: 61319 - DNA, 1025 bp, Homo sapiens
gagattcgttggaacctgggaggcagaggctgcagtgagccatgatcgtggcactgcactccagcctgggcaacagagcaagactctgtctcaaaaaaaaaaaaaaaagaaaagaaaataccccacatcccacgtgttccactcacccaattctaattcattctgaggggcctgggcacaagcattttaagttctctagataaggctaatgtgtagccagataagaaccgtgatccaagccaggtgtggtcgcgtgtgcctgtagttccagctactcaggaggctgaggtgggagaacagaacagtgagcttgagcccaggagttcgagttcagacttggcaacatagtgaaacaccagtctcaaaacaaaaaggactatgattcaagtaaaatgttaccacatagggagaaaaagcagctgtcctctgcctccactagagtacccattaacccattaaacaggcaaaggctacatcatgagagacttaggtgagccttctgggagaacttcctgccatgcaagtcgagttgtcaaacctggcagtgaaggggacagtttcccccttggagaattagggccacatcctgtgggaagtctaaggagttggcctagtctacctcgagtgtggggttcctcatgggactccctacaaatgtaggtggttggagggttcggtgcttgtctaacggaaatgctctgggcttgagctccacccgcaagcccacagttccacgccagccagtggtggcccctggaagagcctttgccctttctcttggtaatgctcccctttgctgggccagggggccaagggatatagttaggagatgggggctccacagccaccctcctcttccttccaatttcccaggctcctggaaaaggagtgatagggccaactgggctcaacatgggcatcctacacctggggtggcacaaagcaagagcaagtgaaactgggagagcagaagagaggcagtcctgaggccctgacccagctgggtaacctctctgtgctgtgtc

SEQ ID NO: 61320 - DNA, 1026 bp, Homo sapiens
tcacctaggccgagcgcccgctcgcccgcccgggcttcccgggagcgttacctcgctctgcctgaggcgcggggcggacgagacgctgggggccccatccccctgcgcgcccctctgcgggacggctggcggcctggcggggcactgctctgtctcgcacctggggcctcttccgcgggcttcctccctgcccctttgggggattcgtagagttgccacagcagccggtgccatgacatcggcagagggcagcttcgccagcactgaaatattcatgccctgagcgcccggcggggctcggcgccgctcccgggggtccgggcggggccgggcgggagctcgggggtcctggcggcctgaggggtgggggagcgccgagcgcgggcgggcgggcgggggccgggcgaggcgggaggtgagggagggagctgcgggaggcggggtctggacggcgggggccgagcggggcgggggccgagcggggcgggggaagcaagggaaagttgatcgcggacttgagcggcggcggcggctcgggagagagggacgcgggctgcaggcgcgatgcttggctagaggacgcgtccgacggcggccggacgctgaggtggtcggggctagtcagcccggcctgggcatggagcgcggggtggcagagcctctggacgtttggggcgcgcccagtccgagcccccggcgcgcctgaagttgcgagcggcgagcggcgagcggcgagcggcccgcggagacccaggagctgccggcacgccgcggatgagccttcgcgccggcgggaagacgcggcggtggccagggccagagcaggcggcccgcgggggccgatccggcggagagcagagcccgaggcgaggcgaggcgcggcgccgctgcacacacgcacacggtacccggagccacgcaccgcctcttccctcctcgcttccctctccttcccctcgccgttcgcccgccgcgcggcggggaagttggtggtgaccgcggctgccgaaccacttgttcccagcg

SEQ ID NO: 61321 - DNA, 1050 bp, Homo sapiens
gtgccggccagtgcatttgcccacaagcccatgtagctactgggcacttgaagtgcggctagtctgaattgagatgtgctgtcaataaaacacataggattttgaagacctagtgtgcaaaaaaaggtgataaaatatctcactggtagtgttttatattgatgacatgttgaaatgataatattttggatatactgggtgaaatacaacatattattaaaattaatgttatctatttcttttttgtggctactagagaatttaaaatcccccatgtgcccatattctatttctgttggtggctgtgttctagagttaggtggcctcggcttagcttctgccactgaccagctgcataaccttctaagcatccgttttccaatctgtaaaatggagataacagcctctgcctcacaggcctgtgggggtttagtgagctgagccgagtcagcactcagaagagcacctgatctcgtagctaaggcactgagcagcgtggactcttcattcccacccacagttgaccgagggccttccctgggccaggagctgtgctaatgtcctgagaagtggtggagaccagggcaccatcttcgccctgggaacctgcagtttggtcaggagacagacctatgcagcggcagctttaatacctcggtggaactctgtgaagaggaggcacaagatatgctgatgttgacatgcagtgatggctccctgggggcctgttagactgttttatctacttctgtgtgtgttcaaaaatatccatgataagaagggagaaaagatccttgggagggggtgcctcatccactcaacgcagggtggggagactccatgaggagagatcacaaaagccaggcattgcaggaggagtaggaatttgccggaaagaggggcggacaggcagaaagaacagtgtgtacagagactctgcagtaggagaggagccacattcatgcatctgcagtagctcagcgtggccgggcagagtgcacaggggaggcggggtgggggcgggggtccggtgctgaggccgcagaggga

SEQ ID NO: 61322 - DNA, 1810 bp, Homo sapiens
tcctccagctaggctccagcccatctccaccgccagccccaccccacagctggttctgctgctgtcctggggaaatgtgggcctgcttctcaaggcccgagctggtgtgtagcctaactcaggcaaggaggttctgcctgggagttagtgtgcaggctgctagcaggacgctgggtgccgggtgcaggtagatgaagggtcctgagccctgcctgcgtgggtactcatctgcaaactgctgcaggcatctgctgctctggactcgtgccttagaagttcccaaaactctgatggccacgtgttccctgtttttaagtgagatcctgtcctgggtcttcagcatctggtgccatccagctgacctaggacaagagaacaggtcctgttttggggtgatatctgatacattgatgggccgggaacggagtttttcatccgaagactaaactcagcttcctctctcctaccaggctgtcgagcattgcaaacgccatgtgtggaactaggaggaggaatattccatcttggcagaaaccacagcattggtttttttctacttgtgtgtctgggggaatgaacgcacagatctgtttgactttgttataaaaatagggctcccccacctcccccatttctgtgtcctttattgtagcattgctgtctgcaagggagcccctagcccctggcagacatagctgcttcagtgccccttttctctctgctagatggatgttgatgcactggaggtcttttagcctgcccttgcatggcgcctgctggaggaggagagagctctgctggcatgagccacagtttcttgactggaggccatcaaccctcttggttgaggccttgttctgagccctgacatgtgcttgggcactggtgggcctgggcttctgaggtggcctcctgccctgatcagggaccctccccgctttcctgggcctctcagttgaacaaagcagcaaaacaaaggcagttttatatgaaagattagaagcctggaataatcaggctttttaaatgatgtaattcccactgtaatagcatagggattttggaagcagctgctggtggcttgggacatcagtggggccaagggttctctgtccctggttcaactgtgatttggctttcccgtgtctttcctggtgatgccttgtttggggttctgtgggtttgggtgggaagagggccatctgcctgaatgtaacctgctagctctccgaaggccctgcgggcctggcttgtgtgagcgtgtggacagtggtggccgcgctgtgcctgctcgtgttgcctacatgtccctggctgttgaggcgctgcttcagcctgcacccctcccttgtctcatagatgctccttttgaccttttcaaataaatatggatggcgagctcctaggcctctggcttcctggtagagggcggcatgccgaagggtctgctgggtgtggattggatgctggggtgtgggggttggaagctgtctgtggcccacttgggcacccacgcttctgtccacttctggttgccaggagacagcaagcaaagccagcaggacatgaagttgctattaaatggacttcgtgatttttgttttgcactaaagtttctgtgatttaacaataaaattctgttagccagatctgggcctaatgtttctgtgacccttcagctggaagagtttgttcctctctgatgagctctgagcccatgacacctttggggcccagcactcccatgacccatcttggccagagaatgaaagcaaagtggataaaggaagatcccacctcatcctcccca

SEQ ID NO: 61323 - DNA, 2635 bp, Homo sapiens
gaagtgtgttcaacattctgtcttctagatagtggaccgatagtgagcccctcactttgcttttggtccttcatcctcctccccaaaatgaaccctgaatgatgaaatgattgtaaccgaacacatcatcaggacagctcttcggggtggggaagggactttctgtctcctgaactgtgaattcctgggttttgttttggtggggttagggggaggtgggggtggtagaggattggggaagggggtgaatgtaaaaatagggaattaacttggatattagaagccacacgccatttggaattcaggaggcagtggcccttgatgtgctaacccaccctggtctctgtgtcccctttcctttaggggagcaagaccaagggctgtgagtcccagcattgaaagtactctccttctactctttccacagaagcacgaggtcccagcaaagtctgatgtttactgtgaggtgtgtgaattcctggtgaaggaggtgaccaagctgattgacaacaacaagactgaggtatgctgtcctcctggcagagggagggcctctcctgcccccccgagcctgaatgtcccagtgggaaagtcccacaggagagagggcttggcccagccttgacatgtgtacagccatgtccccatctcgtggaaggcaatcctcaccagtgggacctctaggctggcgggggtccggggaggtggacaccattgccctgctttgtagtttggtagttttttgtgggtggaaacggcacccaccattgactcatttcctggccatgttagtattttcagaatgtcccccaacccttgtccggcctcccgtcttctcacacgatcctctcgtgtgtttcagaaagaaatactcgacgcttttgacaaaatgtgctcgaagctgccgaagtccctgtcggaagagtgccaggaggtggtggacacgtacggcagctccatcctgtccatcctgctggaggaggtcagccctgagctggtgtgcagcatgctgcacctctgctctggcacgcggctgcctgcactgaccggtgagcgctgggtgtggtgcgggagaggatggtgcccctcttgggtctgggagggccctgccagcgttgagcccgctgccctcttatgtagttcacgtgactcagccaaaggacggtggcttctgcgaagtgtgcaagaagctggtgggttatttggatcgcaacctggagaaaaacagcaccaagcaggagatcctggctgctcttgagaaaggctgcagcttcctgccagacccttaccagaagcaggtacgccccgggctgggctgcggtaggccagcatggcagaacctgatgaagtatgccaaggctggggtacattttgatggaaaaccagctgtttctgcctccgggcatggagtccaatgaagttttacttggaggtgatttgttggcttaagatgagccactgggggaagcaacctgaagtagagaggccaaatgtagatagggtgtctggaaagggaggccccaggacccagtgggctgggaatgccaggagctctcagggaacagtgtatccagggcctgcctggccttttgtgccccactatgctcggacacccccagagctggacctgtgtccccactttcctttatagtgtgatcagtttgtggcagagtacgagcccgtgctgatcgagatcctggtggaggtgatggatccttccttcgtgtgcttggtgagcctcactgggtggtgtggtcctctcgggcagctgtaacctggggggctgcagagacccggaagggttgctctgagacttggccgtggggtggagtctctgggttctgctgcgggagagccaagaaggtagggagccagccccccaagccccatcgctttcctcagcaaccctgatgttctgaaagagcgtggtggagctgtgatcctagctccttctggaaactgttttcttagttttgaaagcgatacatcgggcagctctcattctccccctttcttctttccttttctcaccatatagaaaattggagcctgcccctcggcccataagcccttgttgggaactgagaagtgtatatggggcccaagctactggtgccagaacacagagacagcagcccagtgcaatgtgagtagctcagcagacagtgtcaccagcctgtcttgccctggggtagcctgtgtgagaatcctgctttaatgggaacccagtgatcaactctccaccctgcttttatgttatcagaaagctgaggcccagagaggtggttaggcttactcatggtcccctagaaaagacagggtgaactacactcttgtagtgaagggtggggtggattttatttatttattttttttagtatttttttgcttctgctttgttgcttttgtcttcatttcccttgtgacagtgtcagacttgtacaaggtcactccagggattgtacaaggtctgtgggattcattgcccagagctttgcccaggtcctgtcccccgggaacatgtttgcccttgctgaagccgggcccgagtcctcactcaaggccctgagaactggcccctgcccagcagccctagggcactgtggccctggcctggcctggcagccaccagttg

SEQ ID NO: 61324 - DNA, 1494 bp, Homo sapiens
tttatttatttatttatttttcattcttaaggtgtggcagagacagggtatttgggatatacttttcagactcccccggtcttattaattctcgaaccttcttgatattaaaacaagatgagccatagtcatggtctagctcttttcccttaacaggtcctgtttttagcacttttgttcctgctgctttagggtttggtgctggaaggcaaatgcactcaggctcagagctagttgctggttgcatttatttccacaatatacagagtctatacacttgtctcactcttggccatcagagtgtcatggtcaggatgtctagactatctagtgctctgtgtttggtgtctaaatggtgaaaggggatcaatctggagaccttgtggcttaaaatgattcatccatttggcgggttgggttttcatgtgcactgtgtgcagcttgaacatagaatgtggttttttaaaaagccagcatttccccttaatgcatcattttaaatggtcctgccgctgaaaaatctggtgtggttttatttctaacacatttggctttctgttagtttatgggcatggtagttccccctctagaaaaaagcatagcttagttcctacctagagtgacctgaaaagacacattctagaacagaccaggtgtccttggagatgtggaaggtgctggggagtctccctcgtggtggccctggatggagactctgtttgatgttccttaggagctttgtgtggtctcctccccgagatgtaactggcacatatgcactgcttcagacacgagccctttaacatggaaactggaatctgccccgttgtgggagggggagagggaggtagccttgacctgggcccagggtgctgtccagctccctgtcctctggctggattgggactgaggagcagtgggcgtaggcttgctgctgactggttgttctgtgctctcttcagcaacccaaggagatctgtgcgctggttgggttctgtgatgaggtgaaagagatgcccatgcagactctggtccccgccaaagtggcctccaagaatgtcatccctgccctggaactggtggagcccattaaggtacctggtgtcactttgtgtcctggtcagggctgtgcaatgccacactactccctgctgtgtcacatcacatcttacgagtcacttgtttctttcggttccctgcctggctcctaaaggtctttgagtttgtgatcactggtttatcctatcccctatactaatgcagcccccgaccctgagttcttttgaaaacattttatttccttggttgtaaaccctaatgttcgtgggatcattagcctgtgtattttcagcatgccattcaaaggtgactttgcagtgcctggcttcagcctcaccttctcacatgcactgtctgggtccttccccatcctgtggccctgacagactggatgttcccagcacacccctcagagtgtacggaagcctcactggg

SEQ ID NO: 61325 - DNA, 1061 bp, Homo sapiens
cctgtgtcttgttctgtggtgctgctggtcactaacctgtgggaaagccttgtgggcccggggccagtgtgggctcctgagtatggagacccttcatcaagcattttctggggctcttgctacacagtgttttgagtgtgatttagtgtgtaagacctggagatggtgcacacagagcaggacagcccccaaatggtctatccctgcagggccaggaaagctttcagggcccccttgtccgcaagatagcaggaacaaggtaggttgctaagatctgattgcaagagcatttcccctgaacctcttgggacatccttacacctggttaactgcttgattgttgttttaatttttcttaactgttgtgtcctttcctttctcttattttcacctccgatttcctgtttttttgttcaacagcaggatcaggtatgtgtcggggaatctgcttgcagtagtggtctgctgcttcctctagttactttgctttttttttttttgggtatggcatgattagctctgacagatacaaggaatggttacgagaggcaggctccctctctgttaataggctggggagggcttctgcatctctcccctgtaattcagcccttgaggttttgggggtctcatctccccttcggggtccagtaaaatgaagccagcagagccttgtgctctggtcacagtccacatacagcatacgtacatgcaggccaccagtgtgacaatggggaaccatgggtggcccaggaggtgcctcagcctccttcaacgtaggccagttaggaagtccagtgtaggtctggcttccccagggcaccttgtgtctgtcacaacgcaagtaggcattgcatgtctttagtgctgtttttcataaacacagaaatgcttctgctgcatgagcaaacatttgcagacagccagcagactgttcctggctgttggatccagagaattggaaacaatctcttgattgtggcttctgcccctctgggtaacagggtcctttgggatctagagccacatcagatggcatgctacaagaaccaaatgcccag

SEQ ID NO: 61326 - DNA, 1013 bp, Homo sapiens
gagtctactggaagtatctagattgtctgaaaataagcagttaaaaatcattataacttgactctactggatttaagctttataatgccatctgagattgtgtaaatggctttgaaaggtaagctccagttcctaagcagtgtatctcctagctgccttctctccaaattgccactgaatagttgctgtgtgatcctggggcacgtgaggttataagataaaggagacaggagggtggaatctttaaggtcccttaagaaacattttcaaaacgtcttttgcacacatttcctataaatgatagagtaaccaaattgtcattttcatcttattaaagctggcccagagcagacattcataaaattctactttagaaacttgcttgatagtcaccagttgacactgttggaaatgctggggggtttttgttggttgggttttggtgcattgttgcagtgatttgtttagcaatctgtttctctctcctcagtgcaagaactatatcagccagtattctgaaattgctatccagatgatgatgcacatggtaggtggcacggaggccccttgttagcatttttctttgtttttcaggtttcgtcatttctaggaattttgaaaattatatggtttagtttcccttttttaccttagagtgctgaattgggctaaatcgacccctctggctaggagactctccacttgcaatctcagtacctcccctgttacgggagaggcaggctgaagcatcttgatcccaggactgccctggtggcttcctggcaatttgtttgcctctgcccgttcaggccagccatcaggtttctaggtctggctttaaccctgggatctgtagaagtcaagtgctctctaactaagccaggcctgagaatggctgtgttgccacctgagtcgggggaatactgcctcccggagtttgtcccgtgcatggcagcagcgtccgctgaagctgctgcttgagctggtaactcctgagctggctttggatgcat

SEQ ID NO: 61327 - DNA, 1125 bp, Homo sapiens
ttttatttttgagacagggtctcgttctgtcacccaagctggagtgcagtggtgtgatcatggttcactgcagcctcaacctctgaggcttaagtgatcctcccaccttagcctcctaagtagctgggagtacaaatgcacaccaccacacctggctaatttttgtattttttgttttgccatgttgctcagactggtctcaaactcctgggttcaagcgatctgcctgcctcggcttcccaaagtgctgggattacaggtgtgagccactgtgcctggccaacctttttatttatactaaaccccctttttataccatactgttactataatgaacacttaatcgattttaagcctatcagtaatttgagagcctgtaaagcatcttaggaactggtcagcaagtgccccctaatgctgcagccctgagtatataaggacgttttcctaggaatttgagtcctcttaagttgcaaacctaactgcctcttctgtaggataatggggacgtttgccaggactgcattcagatggtgactgacatccagactgctgtacggaccaactccacctttgtccaggccttggtggaacatgtcaaggaggagtgtgaccgcctgggccctggcatggccgacatagtgagccttgtgtccttgtgcattggggatgttctgggcctgggagttgggctgtggaggctggagtagggcgttcagacaacatccttctcttttttcccagaaagcagcttgaataggtagtgcagacttgaatctattttggttaatggcatctggatatgtaacaaaactgggaacaaaaagtaggagactgtttctgggaagattttgtttcctgccaggcaccctgtgtattaggaacactgtagaaatactttttgcccccattttttttttttttttttgagactgagtgttgctctgttgcccaggctggagtgcagtggcgtgatctcagctcactgcaacctctacctcatgggttccagggattctcctgccttagcctcccgagtagctgggattacaggtgtgtgcaatcacgcccagctaatttttgtatttttagtagagatggggtttcaccgtgtttgtcaggctg

SEQ ID NO: 61328 - DNA, 2216 bp, Homo sapiens
gtgccaatcagaagattggctttggtgtggtcttgccttgttaacatgcctgggaggcaggggatgcgcaggtgaacggttcagtgtgggtgtgccttcagaggtgggtggggcgtttgtttctctgtcccacccacctctctgccatactgatgtgactctgatttcacctgagcctcagtttcctcagaggtgttgtgagcattgatgtgaaattgacctgtgccacatggggtgctgtgtgggtatgagcaaaggttctgtgtcctgtaactcacagtgtgttctggtgagtcacacctcttccctccctgccgtgccccagcgctgctcatgcagggtggagaaccaggatgtgacaggagcgcggtcatgatcatatccctggttagagagaatagcgaaaaggccatggggagttccagctgtgtggggtgtgaatttgtgtcctgcaaatacaaatttctcgtattctttctcttagaaatcccttccctgcgacatatgcaaagacgttgtcaccgcagctggtgatatgctgaaggacaatgccactgaggtgagcggcggtgagtggggatggtgcttgagccacgggcacgtgcactggttcctaagagagctgtgattccgggtgtctaaagaggaatggtgtaggcctgagggtggcaaatgtcttccacaaaggatcaaggagaaaagattttagggtatatgagccgtatactgtccctgtcacacagtctctttttaaaaatgtaaaaagaatgtaaacaccattccttgagttctgggttgtacagaaataagctgaagggcctactttgctgaccccgggactaaatgcccaaagttaattgagatgttgtattgcatgccactaatacctaggtccattttggccatctctgcttagaattccctgtgcctgcgagactgcaggtccagggattttcattttgaatgctcatgtctgcttttgcctgattgacctaatagagccataggtaacatggccaagtccttttccctgagggctggctgttttccaggcttggtttttctgggagctattgagggcctcttgccttcagcccatttatttccagggaggaaagcctatcgtgattctgaccctggtgtcctctcgtaggaggagatccttgtttacttggagaagacctgtgactggcttccgaaaccgaacatgtctgcttcatgcaaggagatagtggactcctacctccctgtcatcctggacatcattaaaggagaaatggtaagtgatggggaataggcttttccttgaaggtgcttctggggcccaggagaggcagtggcccagagtagattgattaaaatggaaagtctgttcttagctctggaattcctcaacagcattttgctacaatttgacatccagaatagctcctttggcacagcaggccactctgtatgtaacttgccctggggttagcgagggtgcggctgctggggactggtcggactgctgaaggaatgtaaaccggcataaccttcagagatgtgagttggatacatcatgtccaatctttaactgacccctttgagcaggcacaaaacctcacttctgtgaatttatttctgtgaacttataatcaaggaataattcagggaatgtattggggtctttcattcatcaagtatgtattgtacacagacacaaaccctgtgtcacagactgggtttttagcaaagaacacggagctagctttgtggaatttggaaaggccttgacaaagaagaggtgtttaagtaactgaagagggccagtggggcaggactttcccaagacaggaccaaggttctggtgaggaaggcaggggttgtgtcatacacagcctcctaggccatcttcaaggattgcaagtgcagccttggagtgtcatgattgtaagggcatttgtcaaagggtttggtctaggtctaggtcccattgagggaagctgcaagtccggaagctgacaggaccctcaggaggtcattgctttgtgagtgagatgtgatgtggacagtggaaatggcagatgcagattctcttttggaggattaaatggactggacttgctcatgagggggatgtataggagaggaagagctataaatgtctccctggtttctgagaagataaaggtggagttatttgctaaaatggagctagttgggcaggatagaat

SEQ ID NO: 61329 - DNA, 1075 bp, Homo sapiens
caccttggcctcccaaagtgctgggattataggcgtgagccaccgtgcccagcctgtttttcttttttaaaaaaacccttcattctacagttgttatccattttacagaagtcaaaatcttccctgtatttgaatttgttagtcttttctcctatggtttcttttgttacttatggaaacattttaaggttatgatgataccttattacttatggaaacattttaaggttaaagttctgatactccctgatactgtttaaaggtagctagagaggatgaacgtgaaccagatacatgagtcccttctagccctgtgacagacaagccagcttcttgaccgggacaggcgtgtatctgtgtggctggtgtcccatacagcttggtgaggggctgagtagcagagtccagctcaaggacagtcgccctcagccctggggaaataagtcaggtcgacctggtttgctacaaaatgggccacctcctcacgttggttttcattttagctctagccggcccggtccttggactgaaagaatgcaccaggggctcggcagtgtggtgccagaatgtgaagacggcgtccgactgcggggcagtgaagcactgcctgcagaccgtttggaacaagccaacagtggtgagtgccgctgccctccagtcccagccgcagcactcctcttgggtccccttagaacagctgtaactcactgccatattgacagagcactttttcttgccttgttttgtttacttctcactgtgactctgtgtgggaggcaggacctattggtgaatgtacccattttacagcagaggagatggaggctcagagaggttaaggtttcactctcctgaggctacctggtttcttgtggcagacaggatgaggtcccccatgcctgcggctccaggtgcctgccccatgctgcctctgggcctctgtgcagatcccacttctcaccttagataagaggccagtgggttggcagtgcccattcccaccactgggcacatgggcgcggctctatccttggtcactcactccaaaaagtaaatgctgagcttttcaggtact

SEQ ID NO: 61330 - DNA, 1038 bp, Homo sapiens
gggacaagatgataatgtggagtggaagtttcacattatctcattgctgacagtagccgtacgaccttgggcaagttgcttaaactctcccgtatttcatcatttgtaaagtggcattactcatctatttcactgggttgctgtttagctttaataaattaggttaatacagaaaagggcttagttagtattctttgttgctgtaccactaataaaagtaatgtattgtcaatatctttgtccccaacagcacagcggcctattttctgcccttgattttgtgatttcctttggcgtctttaatttcaaaggacgttgtgactttaacaaaattaaattgacttattaaaaacatacatgctgggtataattagtgagtcaggaaaacaagccagggtaggtagacagcagttaggagggagttggcaggcagttcatagtctaggtagccaaactaggtttagctgccaggggatcttgacatcagagcagcccagcagatcagagctggttcctggtaacccgaatgcttgggtctagatctgttgtcactaatcctggacctgaggttgtctgttccagccccctagttcggtttccccattcgtaaatggaggcgagctgtttagagtagataatagatggacgtgggaagccaggtcagtcagtagaatggagtatagagtacaaggtttgtccctgccactgctgtccccaggccctccccaaacagcctggtagcagctcccttagaagcttgcagaggtacatcccatgtgtgagttccttctgccttttttctttttaacacaaatagtagtatattctactgactgttttgcttgttgctccttaaattgtgaaacatttgaaaagtggaaaagtgattatcataaacatgtgtacgcaacacccaggttaagaaatggaacctgataacccagctgcccccgtagagagccaccttcctggacttgtttttcctccccgttaggtctttttccttccatacatgtgactggaagcttcagcagtgtg

SEQ ID NO: 61331 - DNA, 1022 bp, Homo sapiens
gctactacaatgggctaatttttttgtatttttttttttgtagagatggggtttcaccacgttgcccaggctagtcttgaaccctccgcccgcctcggcctcccaagtgttgggattacaggcgtcagccaccgcggccggccaacaatgtggagatttaaaaggtattttacatatataatctctgacctattcaattagtagggcttttcttttatgacctttcccttccctttctccaagttcttcctcactcctccccatagcccttcctttcgcccctcccattgccccctcctattggcctccccttcgcgcaggcgccctcagaggcgctgagtcagggcgctgttgagctcgggcaggcccggatggggcggggttagcgcctgcgctctggacggctttggggcagggcagatttatatctgcgggggatcagctgacgctccgcattgcagactgcggagtcagacggcgctatgtacgccctcttcctcctggccagcctcctgggcgcgggtaagccctgggaccctcatcctggggaggaggtgcctcgcagcgtccatctgccccagaatgggctgtgccgggcctggcccctctgctccccctgccctagttggcaagggggcgcgcgcactgcgcaggcgcgttcgctggctttctctggctttctctgggcggctgggggctgcggggggcgggctgcgaaaatgcccccgggaggacggcccaggccctgggcagcatctccttcggggctcgagtgggttcctgcgcggctggggccccgaggccttccctcaggctgcgcttcccactgtgggggtgggtgagtcttgtagggtgaccccttgggcagctgtgttgtgcctgtgctgggcgcacgtgatcgaggtgggctggagccccgtcccgcaggacactttggccgttggcttcagttgcctgtttgtaagggtagcgaagctgcaggaagcacatgtgtatcatctatattgacgtttgcatatgta

SEQ ID NO: 61332 - DNA, 1008 bp, Homo sapiens
ctctgataagatgctcgccatgcttctcccatgctggacttgggccacgtccttgggcatgaatcttggtctatgtccaggtcggttctgaatgagccagcagactcctcccggggctgcccggctacatggttgagggcatcctggacaccagcttcagccacagctcctgaccaggcaggtgcagtgaagccgggaggtgtaggtcagttcctacctctccaacctgaggtcctgcacttcctgcagctgttggaagggatcgtatccaatgggagcaagaaagtgtgctcccccacagccccactcaggcataaagggccgaggggcagccaggcctgtcctggctagggctggctcagagtctgtggcagccccacccctgccaggctggcccttagccccaagatccacctatggcactcgcccctttacagctacgtggacatccactgacactcaggtgacacacctttgcctgcttctactcagtcttggcagcagttggacaaaaggaaatcaaagatcggttctttcttgggagaggaagagcaagctggagccctggggtgctcagatgctcttgggagtaacatagccccatagccccggggctatactgggtgcaggggggtggaggtggtgggggagctgcagccaggcattcattcacttcccgttctttcattcctgctcttcttttgctcactgactcattcagcagcctctgggctgggcgtttactctcctgtcaggcaacacactcctgattgggtggccttggccttcccaagctgtctctggctgtccccaagtgaaacggaatctgggctggacaggccaccggatggacaagctcttctcatctaaaaccaaggcagttgacattgtgggctaaatgataagaacaaaattaaaaaataaaaaccaggcaggctggcataggagctccatttccctgccctactgtgccagtggcctgggggctcccctgccgcctctctccac

SEQ ID NO: 61333 - DNA, 1104 bp, Homo sapiens
atgctacaaaggttattcttttccgtgcacaggcctttgatgtgtgaggtcaagggagaaactgatggaggtgggatggatgaacccgatggttcattagcattttaaatgacctattaaagagaccttcagtgtctctggggcacagtctgtctggagagtgggtctggggtcctggctgctaaccagggccgagatcctcaaaagtctggtggagagacatcctctgcattcctcgtgtacagacaagggtgttctgaccacctgtctctccgcaggacaagggtgtcccccacctgaagacggcaagctgggtcctgagtgatgcccctcagctgagtgtccaaggctggcccgaggagcccccacggccccacctttccccatggagaaaggactcactttgccccaggactgccgggactttgtgcacagcctgaagatgagaagcaaatacgcccttttcttggtttttgtggtgatagtttttgtcttcatcgaaaaggaaaataaaatcatatcaaggtgagggttgcaagcccaagtcttcatcttcctttcaaggtggggtgggtggggacagggaggtaactgcagggctctctgtggacctgcaaatgcattccttcaacgagccatccccaggccccttctatgtcccaggcagtggctcctgcacacgtcctcatgactgcacaggggtgagacttgggctctggactcaaacagcctgggttggagcccccccatgttggccctctacagctgtgaaaggttagacaagatacttaacatttctgagtcttcggttcctcttttgtaaaacatggctaataatgggaccagcattgttgtaaagattaaatgagaaaatgtaaaagcatttagcccactgcctggcacatagttggtgtccagtatttgctggctgtgactattactgttaatttacctcctggccttgcattagcagcacatcccctatagaagtcttgatgtcactgagcccatggaaaggcaaggtcctagtatggatactctgatgggcaaggctgccaatgtgcagctgccaagttgtgtactgctcaactccaggggcatgtc

SEQ ID NO: 61334 - DNA, 1063 bp, Homo sapiens
ccacctccatccaaggctcttcctaggggccctgctaatgtggacagtagactttatccctccttcttactctgggccaagacctcccactccgccctctgaggatggtaccaagaatgggcctttgggacttctcaggacattgacaatgtgcacactgcaggttgacttaatttatttattttttgaaaagaagagacagaaaataccttattatctgcagggactcaaagctgtacccaaatcaagaaagacaaaataacaatagaaaccattcacacactccgttcatgcatggacaccagaagacgattcagaacacaagaggagaatgagctggagcgccagcaccacgatggccccaggacgttgtttaagatctgagatcccttggtttctctcttgttgatctgagatgctacatcagggcccttgctgctgtattacctctgcccgggtgtttgagacaggtcacaagcgcgtggatgtttcctggaagtgtattcccctggggctcagcgatgctctgggaacccttggggtttggggaaggacagtgtggtgtgactattggcttgaaacgttatggatatggttggagtcacccatgtggatatgattttcagcttggagctgggatggagaagatggaagcactggtggccgggcctctttttccagcgaggccagccctggcttctcctctgttccagcttgtctgccagaagccttcccctgcaaggtgcccacctgcccggagacagagggagcagctgaggcctctctccactggccgccagcctccctagcacaaggggaccattcagcaatgagtgtttactcatgttctttcttgttgatgagttctgcggcccagcatatagaaatggctcagaacgttccaggccttggtgagacacagcagcgtccaatgctcacaggctgtccccactctgcctgttcccatcttcccctcgggacctgtttataaattgaggaatggatgagggccctggagggtccttgggagtagttagtggagggcaggattctcaggtcccca

SEQ ID NO: 61335 - DNA, 1049 bp, Homo sapiens
agccagatctcaagggctgatacctgaggcaaggagagctaaggggagagaaattggggctgagtggaagcagatgcctgcacaagccaagtgtgtcttattgatctgtacaagctgatagaaggaccatctgctgaaatccagggctcctgagttggtgggtttgcttgtgaagcttctaggacaaggcgcagccagatggaagggagagggtccagggcttcctaaatgcagccgcatcacctgtcaactcgctgcagtttcagagacagtggaagctgctctttacctcaaaagcacaaagcagaattggcaacttcacttgtctcaagagctccaagatcctttggtctcgtgtcctttggcaccccgtaactggactggggacaaatttgttacgtgtttccaaggctacagacatggcgccatcctcacaggcctagctcatgtcatggatcaggtgctttgctggggggatacaatgacccatgtggtctgcgtcttctgccattggcttgaactgggcaccccctgaagtctccatctcagctgtatattctagtccaaattttcctggctcccctgctccctcccaggtcctgcacactgtctttttgccaacacctcagccctgtttgctatttcatgtctgcatggtacgagacaccccttcacggcatacactgccatggtatgtacatatgcatccacgtgtgtgtatgtgtagcatgtagctcattctgctcagcctctggcgccgttccacattgctcccagccccattgctgtcactgtcgtcccagatgtccttgccatggccacagacaatctgccgtctcctggaaacgctggggctgcccttcagagagctggcagccccagcagtcagggcctgctttgcagaatagaatgtgaacccaactcctgatggcctacttgacttatttaattaaagatgaaatcatgcaatgagcaaaacctgcagcgtgtctctgccttttcctttgcatttgttctcagcagcaattgggtcataatttttttttttt

SEQ ID NO: 61336 - DNA, 1041 bp, Homo sapiens
agcgtctgttggactttacagaagagcctcatcctgtctgcccctcactctgccctggaatcaacatcttccgagtccttcttgggggaaatagcagagccccacttaactccataaactgcttcccattccgcagcccagttctgattgttgaggtgtcgcgtcgttccaggtcccccagtcccctctttctcctgtcctctctctgtccttcacctccccactccagccccggctcagttcagggaaatgctgttccacatcagccctctgctctctgaggcagccgcgcctctgactcggagctacttgaaacttctgctcttgctaggattggagtctacctatctcttccatttgtcccagctggagttctggaactttcctcctcggggtgggggtgggggttgttaaggatgctggggggcctggggaaggaaggagttcagaggaagggtgtcccctgtcctcttgatgtcaccctccgctcctgggacacgtgctctctctgtctctgggtcttctggctgtgcacgtttgtgtgtccttgtaaatatgttttaggaagaaagcaaaagggactgaactagcctctggtaggattgcaggggtccagccttgcctgtttccgaagcccccacactgcctttcgccctactgagactggtcccctcaaaaggtagacaaaacagcagctccctgtggagctgaagggcggcctcaaagtggctttttgttagacaaggttaaggtttcctcatgagcaaggttgcagatcggtccttcctcagctccttgatttgtgaccttgaccaaggggcctgccacccagcccctccagtgccctctcctcgatgcctcgctccttcctgcccccactcccctggcttaggcaggtaggggaattagggccatgctggaagaagcttaaccatgtgttcaaagaacggtttcttgcttgcttggtcctggaactccccttggctgccccaggcctccttggcccatgggtgctgggggaggtggatgtcagatctggta

SEQ ID NO: 61337 - DNA, 1076 bp, Homo sapiens
atgcgagggcccctgcccctgccccacggagcaggctgccacctccaccgccgatggcaaaccaggtgaggacagtgctgggccaccaggctaggggtgctgaagggccacctggcacctccttcagggctctagggtggtagaagaggtgtgcagagcaagagggaagtggcaaaaatgcagaaagcttgagggagctgtgaggtcagaggcccagattaacacagagcaggaggcgtgggctcagccctcgtttctcccctgggtgcctggaaggtgggcagagggagggactcagccacaaggaacctgggctgtgtgtttttcatgccaggaaggagtgggtggtgggaaatgggagaggactcgagaggaagcccccgatttccaccttcccttctgctgctgcctcccggacccctgcccagcctcctggcctgtagggcaggatcccagactgagatcgagcctgctgctccactgcacattcgccctccatgccttctctctgttctgcagagacttgcaccggtcaggacctggctgacctgggagatcggctgcgggactggttccagctccttcatgagaactccaagcagaatggctcagccagcagtgtagccggcccggccagcggtaggaagcttgctgctctgcctggaggagggagggaaatagggaaggggctgaggacacaggtgtatgctgggccagtctgcccttgttccttcctgccagactctgggccctacaatctgggccccaaaagaaccttcaccccaaagaagtcggcttccaccagagcaggagggataccagttagctagtaggaagaacttaacatgggtggagggagcttaaaccctgacatgggtagcccagggaaagcaggaattcttttccctgcagggctttcagaacgggttttgaatggttcaggcatagtcctatgtggaggtggaaggaaggacctttcgccgttctcgagtttctcaatcccatggttagattccaagctgcccagacccagaatagagggctggggctgatggcgaggcggagagatggagggc

SEQ ID NO: 61338 - DNA, 1031 bp, Homo sapiens
atatcgtgtgtttaggaacaccaagaaggcaagtagcaagtagccacaaaggggctccctcctgaccacccctccctgcttcccaccccacacacctaaaccactgcgagtgtggggatgcgctgcgccgacgtctgtgggtaagtgtgggtgtgtgagaagaacccaaaagtgggtcaggatggatttcataattggggtttgggtcctttgccagataaagtgactaaaaacaaaacaaaacatataacaacaacaacaacaattggggtttgagaatgggagggtgggcctttccctgacctcccctccaccccaccttctaactggagctggagcagtgtcagcagagtgatgggctcttgaacacccagcgagactccaagcctgggaagagagggagagaagagccctctttgcctggagaggctgtcatatgctactccagtctagcagcagcctgagaggatgggaagccagcaccctcccgtccccttctcaaaaaggtcagaaggctacctggagcacagaagagctctgtcctaccctaagccccaagggccagagagagtgctctgctcatcttcccagtgaggggacagaactagctgtgtgaccttgcagcagccacttcacctttctgggccttgattttcctggtggtttagtggggaggtgaaaccaaatcatctgcagaggctttagcatgctgtcactccaggaagagcctggcaatggcctggccacccacatgtataccctgcttatcctaccacaccaccgccacaggctgggcagcaggtctttgggtttaaggaagagattctcttttttctccagagaaagtacctgtgaccagattaggggagggtgtatattagctggagaccaagaaacctgagaaatggggcctaatggcatcttggggcaagcaccaggctgaggacacacgtatcatctctcttagcgtgggctgctgtaacaagataccagagatggggtggcttaaacaacagagatttattttgtcc

SEQ ID NO: 61339 - DNA, 1011 bp, Homo sapiens
tgcaaaggtcccctcaggcatcgttggggacatgtgtcacaagcctttcttggggccaggtatggtggctaatgcctgtaatctccgtgctttgggaggctgagatgggaggattgcctgagtttaggagttgaggccatgattgcactactgcaatccaaggcactccagcctgggcaacaaagcgagagaccctatctctaaaaaacaaccaaggctttcttgggattgtactgacattttaagaaagagcaattcctacatcctaacagaggaaggtacgctctttactctttgacgctccttattcaggcactatggctgcattttcctgggatgaattctgatgtcattttgggtcctgccttataaatgtggtaatcacaaagtccagtccctcttggagtatgtatggttcatccctcactctgacacacttttgaaagcttttgtaaagtacaggatcatagcaaaaagtatttattttaggtcgctggcttgaatccaagtctaataaaggtatttgataagtaatcacttgtacttgttctgttggcagtagaagtgtcccttgggttgttctgtgtgtgtgtgcatgctctgtgtccctcagtggtttgtctgaatcacttgtgagtcaggagccttatcttctatttattttagtcagcgctcctaacaaatggcgttgattagatatatgttacgtcaaatttaaccctggtgcaacaaagccgagatccctgcatggtcagtcactggaagtcagaagcagcctggtcagactctgtgagtcagggtgtggccatggggcgtttgctataagttcttggtcatatctggtcagtagatgaatttcggatttgacttttcagaacctctttctctggtgcatttgtcaggggagactttagaattaatcagagagaagagctggctgttcttttctcactcccacccccatccctcctctcctggatcattattcagagtaaacactgaaaagaaaaa

SEQ ID NO: 61340 - DNA, 1051 bp, Homo sapiens
tcacaatgaattactttgctttttgttgttgttaatttggttaagaaagaaaatagactgaatggggaaagaaatctttaggaatggctcaaagccaactgggttttcatggaattaaaactgaagccttgtgtgttggtacaagtcaggtgtgaggtgctttgacatctgtaagagtggggtgatggcagagagcctgttgggtggccgtatgagcagtgtggagctcttaccttgctatagaatttctctcattctggaaagtaagttttcaatttaactgcttttccctgaaatcttctgaaccaccccagtgatgatatgaatgtagctccctctggtgttgacaaggacttgctatatcagtaatacccttattaattcaagcccaatcacttttagagctggacctagctaggttcttggagaccatttagtccaattccccactttaatctctgacatgaaatctactaaggtaaagtgacttgccagaggtaccgctagttagtagcagaatctgaatcagaaaagaaagactcaaaactcacaaattgagcattattttctgctgcctcccgtaaagatgcccagtgtttaggtagagaccattagatatttgaagttgggcatatctgcctgatctgggataatggccaattaaagcttgtttcattaatggtggggcagtgagtgtgccaattagtctaaaaccgtagctagttaataattagatttttgtatcgaatataatatcaacactaacagaaatacttattgactatataccatctgccagactatgtgccttaaagatgaaacagtcattatgatacaatccctgccttctaggagcttccagtccgtgaggggtacagatagttaatagacaattagaatataaaaaccatggggtgagttatggacaagtgcctttgaccacagatagttatgatgacgtatcctttagtatagtatttaatattttactccttaatcactagttccagaaaaataatctttcacctatgttcaatcaagagaattagct

SEQ ID NO: 61341 - DNA, 1080 bp, Homo sapiens
gtgcaaaactgatttacttctgagaagagactacttcttaaaaaaacaaaaagggtacttctgttaaatctctggtaagtaaatcagtaaattggatcatcgaattttttcttgctctttgaccttagtctttgtgcttggtgtacttagaaaaaatgtccataaataatggcatttctaacctgaaccttttatggtgtagtggtcccaaattaaaatatgaaaggaaaacactgaaaaatgaacagacctgtacatagtgtgctgtagtttaatttgatggtttttaaaatgggagtattgaaataaatgtggctatgttggaatttgatttaaactgtggagctgtatggctatattgaagaaatgagtagttgagtattcattttaaatttgggggtagttttttaatttgaaggatgctatgagaccaaaaacaggagttttgtttcaatttttcagtgaaaggctcttgtagctctatagattttgaatgaattattcagtgtttagtaaattcggaagctccggctgtgtccctggtgactttcctttgtgagatgtaggacacagaccgtgcactggctctgagtacggagtctgacaaatgtgcagctcttcttcagtcacagcagcaccctcctgtgcctcagtgtttccagcaggcctgacgtcaaaccaaagaagtttaaagggactagaaagaggagagaaaatacgcgtgaacaaacattaatgcctgattattgcctcacgtgtcatcagttggaaagtaatttgcttactggtgtcccagatgtaattgtttggccactaagacaaagagtgtttatcgggcaaaccatcggatttctatcctgctctttcatctccctcttgataaatctcaggggtgggttgaaacagtttgtgtttctgctcataaagcaggctttggatcctgtttcattgtttctaattttttttcttcttagtaccccatctaattccaagtatttgaggtagttaagagtgaggacatgtatacaaaagaaatgttacagtcagagatttagaaaccataaggatggtatagggaga

SEQ ID NO: 61342 - DNA, 1053 bp, Homo sapiens
ccccaggaaattcctgttacttcactctttgcttctccctgctgggtggaaggtcaataccattagaactttcaggcgccagcctgggtggccaacctaatggagtaagatagttccagctccaagtaatggcaagcttggagcagggcccagtgtaattaaacccctgcagtaaagaatttgatgttcgttggtcttcattcatctcagtgaatgggcttggggcaggaatatgatgatatattccgagcaaagaaaaacagtggctctagagatttatgccgttgccttgaaggttgtttggttccaaattaaatttagataattcagtaagagaaaagtttctcttggtagatggcattgtgaggtagggcagaatttagagcgtttctccattcattaaaagactgtccagtggagttacttgtaaattatatagtctacagtagagttaaggattatttgaacccttatgactcataattccaaaaaggactttcgatcgtgtgacccttaggtgtcctgtctgtaccttgtcttgctccattgccttctgtgtgttttgtttcccagtacttggtgttttggtgttttcttggcaagtaaactcaagttgactagagtgctaggctcccaaagggtaaggcagggaaagcaaagttgtagaacttcctttttctagctgggtattagagcaaatttatgcaagagaaagttgaagaataaagagaaagaaaaaggaagaaagagcaatggaatatcaaagtgactgagatagtaagctgggaattttaaaccattaggccattttccccttatgtttcctagtcatttccaggtctagaaaggtacttgtgtgcactttcaggcctttagaattgagtctggctctactagttaagtcttgatttggcatgctagtgacagggcatttctttccctcatttttctctctctagtcactatattttatatataaaaaaatataagaaatatatatataatataaaaatattgtatataacatatataaaaatataaaatataatatat

SEQ ID NO: 61343 - DNA, 1095 bp, Homo sapiens
catcagaaacgtgagaggaaccagggtctgtctttgggaataaatgtaagttgagtagatgccttgctaactagtgctttcaagtaactatggaggaatagtgaagtttttagaagagtaggctgaaggattctttgtgctcatctaaggtaagtggggtggtgcatcctttagtgaggggagatgctcttcactcctctttaatgggtaaagatctttagacaatgcatgagaagttcttttctctggtcagtataaaagcccatgcttgaatgtttgtccacgttttaagaacctctccactttcttgtaattatgtatgaataaatagaatttataagccaggagaaacaaaacccttttttctaaagcttatacagcttaacacagtatttcgttaataacacatagtgacttgcaaatcaaagtcagcttttctgaacattcttaaagaataatggaaatgactcagcagagcctaatttagcttccagtgctgctttaaaagggagagcaaagatggcatttgtctagtgctgcacagtcatgtaaaaaggaagagggggaagcttgtatttattccatactactgtgtgccagagacttcatatgtgtttcatctgcagagcaaacctgagacagaagtattgtctgttttatagatgatgaaattaagcttcatagcaactgagtaactcacctagggtcatgctgctgataggtggcagaatttgaacataggcctgtctggttgcacagccaaatgctcttttcatcactttgccttatttgaataacttctttagatgaatgaacttcatatcacctgcccagaaacagttctacaagatttggccataaaaaaagaaagaaaatacaacgagtataggggaagcatgcatattttctctttttctttgcatagaatatcagaaagtgaattggtagatccctcacacataatctattttgttagcagataattatttaggttttgtgggaacatgtaaaaagtttgtaggtcctttgacttacaggtaaaccaggccacctcccttattttacagaggaggaagccgaggctagagaagtgac

SEQ ID NO: 61344 - DNA, 1016 bp, Homo sapiens
cttatcgtcatccaaattgcagtgttttggttcagttggaaaatcaaggttacagtttgcgttcacagaatgaaatttcccagcagtgttctgtgattgtcagagtgatgtaatttgatatattaaaaatcaacaattttttcctcagctttgttttttagactgaaaatgatttggagttttggtgaacctttatattttgacactacaggagccagccacaaggccaaatgtgtcagctgccagtgtttgcttgacatacaggagaacattaaggaactctcaggttgggaggagggaagtgttgaccaggacatcagacggaggtttcttgtttttgtttttttaaacactatttttaaactcttaagtagagggactattttaatattctaggtatagaataaatagcttttataacagtcttagttctaaatgaagcagaacccgtctttgtaaacactgagaactagaccctgaatgtacaagcagggaaaagaatagacaagtttacttggtttatcagaagccataaaacctttagagcagattaaaaccttttctccttttgtttgtagatggctctgagagattcctctgcgaatctgtttttagctatcaagtggcatccacgcttaaacaggtgaaacatggtaagcacatgagtgttgcgtacttgactgtgagaataaatttgctagggggtggatgaggctgtgacaaaaatccccaaactcagcaaggctattttagtggacttcctaaattaaagaacattctaggtcttaatctagtcataatgtccacattgaggcttaaggttggggccgagtgcagtggctcacgtttgtaatcccagcactttgggaggctgaggcgggtggatcacttgaggtcaggagtttgagaccagcctggccaacatggtgaaactgcatctctacaaagaaaaaattagtcaggcatggtggcgcatacctgtagtcccagctacttgggaggctgaggtgggaaga

SEQ ID NO: 61345 - DNA, 2522 bp, Homo sapiens
cggggcccggccgctgtcaccgggcaggagagaacgttgcttacgtgcgcccggagtccattggccaaggcgggccacactcccgggtctggattgggtcgtggcgcagagaaggcgtggcctcgccgcgctagtccttataggctgctccgcgctggtgctagggcgcagcaggccaagggggaggtgcgagcgtggacctgggacgggtctgggcggctctcggtggttggcacgggttcgcacacccattcaagcggcaggacgcacttgtcttagcagttctcgctgaccgcgctagctggtgagtgtcccttctgtgtgtgggtcctagagctcgcggtctggtctggtctggtccccagactgacgcctggtcggtccccctcttgtcttacagcggcttctacgctccggcactctgagttcatcagcaaacgccctggcgtctgtcctcaccatgcctagcctttgggaccgcttctcgtcgtcgtccacctcctcttcgccctcgtccttgccccgaactcccaccccagatcggccgccgcgctcagcctgggggtcggcgacccgggaggaggggtttgaccgctccacgagcctggagagctcggactgcgagtccctggacagcagcaacagtggcttcgggccggaggaaggtgagcggtgggcgggtgccgacgcgactcgaggggccgggaaggtggggaagccccggtgctggaaggggtcagagccgccttggcttcctatcccatcgggacccagattgcttgggggcagggggaattggagtataaggtgagtgaggcggaaactgaggcacggagtgggaaggagcgttggtttcttaaggaaacagcacctcccccgcctgtgcgtttcgttttgaagccgctctaataccccttcctgtgtgctctcctttccagacacggcttacctggatggggtgtcgttgcccgacttcgagctgctcagtgaccctgaggatgaacacttgtgtgccaacctgatgcagctgctgcaggagagcctggcccaggcgcggctgggctctcgacgccctgcgcgcctgctgatgcctagccagttggtaagccaggtgggcaaagaactactgcgcctggcctacagcgagccgtgcggcctgcggggggcgctgctggacgtctgcgtggagcagggcaagagctgccacagcgtgggccagctggcactcgaccccagcctggtgcccaccttccagctgaccctcgtgctgcgcctggactcacgactctggcccaagatccaggggctgtttagctccgccaactctcccttcctccctggcttcagccagtccctgacgctgagcactggcttccgagtcatcaagaagaagctgtacagctcggaacagctgctcattgaggagtgttgaacttcaacctgagggggccgacagtgccctccaagacagagacgactgaacttttggggtggagactagaggcaggagctgagggactgattcctgtggttggaaaactgaggcagccacctaaggtggaggtgggggaatagtgtttcccaggaagctcattgagttgtgtgcgggtggctgtgcattggggacacatacccctcagtactgtagcatgaaacaaaggcttaggggccaacaaggcttccagctggatgtgtgtgtagcatgtaccttattatttttgttactgacagttaacagtggtgtgacatccagagagcagctgggctgctcccgccccagcccggcccagggtgaaggaagaggcacgtgctcctcagagcagccggagggaggggggaggtcggaggtcgtggaggtggtttgtgtatcttactggtctgaagggaccaagtgtgtttgttgtttgttttgtatcttgtttttctgatcggagcatcactactgacctgttgtaggcagctatcttacagacgcatgaatgtaagagtaggaaggggtgggtgtcagggatcacttgggatctttgacacttgaaaaattacacctggcagctgcgtttaagccttcccccatcgtgtactgcagagttgagctggcaggggaggggctgagagggtgggggctggaacccctccccgggaggagtgccatctgggtcttccatctagaactgtttacatgaagataagatactcactgttcatgaatacacttgatgttcaagtattaagacctatgcaatattttttacttttctaataaacatgtttgttaaaacagttggttgagtctctcatcagtaccatgaagtgaaaaggagggagatgggtgctagtgaaaggcaggtctcatcaggccctggggtccacctgtgtgttcctccatccctttccgggactgcctgccagcctggtgacagaggtatgtgtaccgtgtgccatctgtgccaagaacccttggccctgtgctggctgaagctactaggagaacacactggaaacccctgaaggtagggggtgag

SEQ ID NO: 61346 - DNA, 1204 bp, Homo sapiens
catccggccttgcccaggcatctcgcctgcggtctgaggaagggaacagaaggtcatgagttcagggtcagacgcagccgctcagcacaggaggggtggaggggaaatgagagttgctggtagcaggctccctccttctgcagcccggcgaatgggggcgctgggctctgttcccagcgtttgccagaggtggccacttcagccaagcccagagaagtgtgggcagaagcagtgaaggttcttctctgtgtgggtgccctgcccaccccctcctttgcctgtgtcctcccggcctggatccatggctgactctgcctggaggccatttgtgcctgcctctgtgctgccgcaggagggcaggccgcaagtggggttggtgggggtcgagcgggcagcacggtgcagcggtgcagtggcaaggggggctacttgtgtggcataagctagaggagccggtgccgcctgaatgccgagctaactgttgccactctcctccccagactatgaaatccctggagaatttttggtgacatgcactgagccaaggtgatggactgtatatttgaggaaagacaaacaaagaaacaaaattaaaatggaattggaggccgaacgctgcacagctgccctctctctcacccagtaaatgcagaaagctcttaggacagacagaaaacctgccatggggctgcttccctccctcgcagggctggcggaggctccgcatcgcctctctcctaggatacagaaaccatggcaacgaaagtagaatgtaaaactcgcagcagatatcagtgggaagggctgggggagggggcacccagctgcctttcctccctcacaggagccaccaccagccacctctcaggagaagccagaggccctggccaaagataggaggaagaaagagaactctccatagaatgtaatttatagatgcgtgtatatgtatatatatctatttatatgtaaataggcatatatgaagatatatatatatatagtctactttttaaactctgcagggatttggttaagttgttgagctgatttcttccatgttttagaaaatgaggcctgtttggggaaggtaccctggtgatgtttttgctagacattagctgtagctgacagcataaggagagtcgcatcagagcttttcacagccccccgaaaccccagcctggttttgatggcagcagta

SEQ ID NO: 61347 - DNA, 1063 bp, Homo sapiens
tcctctcagctctacctcaggtgcctctccaccgcagctctgttctcttctatcgaattcccttccttttctaagtctgccagctttactgagaaggtaacattaagctgttctgtctctttttgtgacattgcctgtcagcctctgtgccatgagggatgtaagcatgaagctgtcacatcccccaggccagaagagagaccctacttgccagcaactggaaatctttaatttccaactcaagcagaaagcttctatgtgacccagggcacccccattctcctttgggctctctttctgtactgtagggaaattagagtggctgattccctgtaactgccctgaaaagcttccagaatcttctctgagaggtacaagagagagcctgtcccatctcctggctagtgctcctgctcatctctggtagttgaataactggttattttgcccttaggatctgccaggctcagcctgggccaccagaacttccagaggaactgaaataataaagagcttcttgaaaagctctaggaaacagcatactgcctcctcctcctgccccgccttgaccaatatctcttcatctttcggtttctcttgccatccccttggtagctggcatggacctggtatctgggatggcctgaaatctcatggttactactggttccagagtctgctgagcgctgagtctttgccttcctgagccttggagctcccccgctacccagccctcctcctccccagcccccaccacaggttccctcacttccctggccagcccacttctgtggccagacacttcatcagccttgaaccttcactctctgtcagactcggcacaggtgcttacacacattatcccatttcatcctccgccaccgtgacgaaaccagggttcagagagatttcatagatcagccagggtcacactgctaggaatggcagagctgagatttgaatctgggcctttctgaatttgatgtctcttctatgcttttgcttgcatccctgtccccgatccccaccccatcagacacgtgcagcccaggatagcagcgta

SEQ ID NO: 61348 - DNA, 1036 bp, Homo sapiens
gcatgggaaaaggacaagttaagagttgaaaagggaaggatcgagagcatgggcagaggatggtcttggagaggtggaagggcagagaggggagagtcacgagagaggggaggctcagagcaaccttgaaaggatgagggacctcacactgttggcctttgcagcaaaaagggatgtgagggggcttgaaactcctgctgcaggaggtgggacaaggaggcactgagttaaactgcaaagcagtagctgggccctaagctgggaggtcacagactagagatggtggagccagtcagtccctttctgggagtttctgtccagtagctggcagcctggtaagccattggctttgactcaggctttgtaacaaatgtggaaggtgccagatttcccagggagctcacgagagcatttgtaggcctcagtttccccagcatacaaagagaggattggctgggatgatcctgaggttccttgcagctcaggctatccaatgttctgtgaaatggttgactctgggctaagtcatgaaggccaagctgggaaggccagcccacaggaaaaggagacggattgctgagggattctgcattcagagtccaggagtgagagatgttctggtgctggcgaggtccggggtggggttgtacccttcaagtcagtcaaccttcatgagccccactgtgcacttagcccccttccattcactgtatttcacagaatcttatttacccctcagagcactcctatgagagcagagatcgtctctccactcaggaaccagctaacctggcaaggccacatggctagccagcaaagacccagagctgtccatctccaatcccaggcccttttctgactcactgtgagcaccgtaggtacacagagcccagaaactcagctactcacttactaacaaagtcacggtcagagacaacactgtatatttgctgggcattgggctgagttttttgctggcattcactcatttcctcttttagcctgtatgatggagatagagttttgcacagatgag

SEQ ID NO: 61349 - DNA, 1048 bp, Homo sapiens
gattacaggcgtgagccactgcacccgacattttcttaaatatttttgatctgcagctggttgaatccatgggtgtggaacctacacatatgaaggaccaactggacccacctcatagggttgtgagactaaatctacataaagcacttaactttgtggctgtcatgtggtgaacgattagtcaatgtcagctgcttctattatgaagttgataatttaaacaaaatttagtgtggctcaagtatttattcacccaaaagcaataggtactgtgctaggcacagggttccaccctcaagaagctcagagtctaatgggggagaaagataagtgtagaagcagttccagttgggtgtgataagtgctaattagaataagaggttctaggagcttaaaagtggaggccctaatttataccagtggttgggaaagagtgaggccagagtagagacaggaatactttttatctggcttctgctgtgagtctcagctgtcttcattttttcccaaaaggttagaaccttcagaaattggcaccttctaggccctggcactgtctcttccttggctattttagaggttacaaaccagtctttaggcataatttagcacagaattttccaaacagcattgtgaagaacactgtatactgcaatatgatgatggttctgtggatttaaaaagaaaaaaaaaagtattccatggttcaaataagtttggaaaatgccagagttatatagaatttcttcttgcagcactcctgctgccaactttttaatatatgaaggtgcattattaatctctggaagagggatatagtttccaaatttgatttactccagaccatcttttaataacttacagagttaatgttccttggaataatttgaaagatccaggcaggtggccactgcagatttactgtattagaacatagtccagttcctccagagtaaaaaatgtcacatttcttttttttctttttctttttttcattttttctgtttgcccctcctaccatttgaaaaaaacatcaaatttaattaag

SEQ ID NO: 61350 - DNA, 1048 bp, Homo sapiens
actaaaaatacaaaaattaaccaggcgtgatggtgtgcacctgtaatcctagctactcaggaggctgaggcaggagaattgcttgaacgtaggaggcggaggttgcagtcagctgagatcatgccattacgctccagcttgggtgacagagtgaaactccatctcaaaaaaaaagaagaaatattttcattaagatattcagccatcactgtaagctttctcagattttacgtgtgagagggaagcaactagccagtttgcctttctcagggtagaattcaagagttttgttcccctgctgtttatgaatttgatattccttgactaatgtattcagtttctgttctagacatgagcatgaatttctgatttgcagatgtgaatcactgcctatgcatatcgtgctgctttttgttacaggtcctgccttaccttgctgtctctcctcttgcagggtctgacatttcaggaggtggagaacttctttactttcctaaagaacattaatgatgtggacactgcattgagtttttaccatatggctggagcatctcttgataaaggtaatgaaactcaaaaagtgtttttttgaaggtatgaacattggatctgtaatctcttaggtgactgcccctcctgaacagtaaaagataagtttttcttggcatccttgaaatggtgttttgatttgttgacattgtatgagccttgcatttcaccctgagatgccaagttcagtgaatatattttcttgtgctaaggccgtagtctgggcaggtgcctatctttaaatgactaaccttgaaaataagcatctaagctgaggcacagggcatgaagctgcagaacttcccctatctgagccagagtcattatatatacaatgtgaagctaaagtcactatacaacttaagttgcgtctttgatgagaaggaatgctttagtttatttcttatattaagactttttttaagacaatatgactctgagaataacaccccgctcctttggcttacttcatagaaattcagttacagtttgtacaagc

SEQ ID NO: 61351 - DNA, 1379 bp, Homo sapiens
attttttagaagagtaatcaatattattatctttaaagcaaaattaggaatgcttccattcataagatatcaggatatcgggatattgctgagtctgggtctgatcagtaaatgttatccatctgttccgttaaccataaacatctagaggctaggaatacctaacttcctgggaatgcagcccagcaagtcccagcctcatctttcctagaccttactcaagatgctgttgctctggcttgactgtctctgacaatagtaagtggcagatctgggataagaacctatatcttctgtttcttagtttttgcagatcttactgagaattgtacctcaaaaatatagtcccagtcatcagctattttctgccatcaaacacagctgatcattccgtgttccacgtcaaaatactttccattgaccctaggaacattctttctgtttccctcccagtttgaacgccatgaccctgtggatgggagaattactgagaggcagtttggtggcatgctacttgcctacagtggggtgcagtccaagaagctgaccgccatgcagaggcagctcaagaagcacttcaaagaaggaaaggtaggtagctttggctggaggaagaagagaaaccgtggtaatgtatggttattatttaatatgaaggtattaacataatgatgagagtatttcatgaaccaatgattacacctaattcatttctggtacctgaggtccgtagggagaaaagaaataagcaatgggtgaggaagaggagagcgtccagaatcatcccaggtttcttgttcaggaaagggtggcaccaactgaaattgagaattttaaaggagagaccggtttagatgggaaaataaagaattcagtcatgggctggtcatggttcaagaccagcctggccaacatggtgaaaccccatctctactaaaaatacaaaaattagctgggcatggtggcgcgtgcccataatcccagctactcagaggctgaggcacaagaatcacttgaaaccaggaggcagaggttgcagtgagccaagattatgccactgaactccagcctgggcaacagagtgagacttcatctcaaaaaaaaaaaagaatacctaaagagagtagtgaaatcaaagtcaaggaaatagaaggttcaagaactgaggggtctaccatgtcacatataacagcgaggatccagtaagctaaaggtggtaacatccattggttttggtgaaatggcagtaattggtgacctttgagagggctgtttcattagagtagtctagttggaaggcatccctattcgatgaaaagtacagaagcagagaaaggagagaggtggaagaggaggctctggaaagtgggaaatcacat

SEQ ID NO: 61352 - DNA, 1049 bp, Homo sapiens
aatttttagcaatttcatgtggaaacatgaactgcatagattggttggaatattaaatagcagttaattctgccagagtttaaggcttattcatattgatcaaggtctgaaggaaagataaccaacaagttttatgtaatttaaaatgctctgcgagttgatggaaagcacttagtataggctctggtacataataagtgctatgtaaatgtttgccgttataaatgttagaatatggattgttctttaaccatctagagaatttttctaagtaaggaagatggcccatttaggccttctttgttttggaactgaattattatttcccactttctccatctctccatacctaatgacatacatttaagctggttaaaaaaaaaaaagttaagtgaactggatttactcaagattattccttccacaaggggaatgtgattaaattagaggtaaatgcccccattctattccaaattcccaagcactcagagaagttaaagtcagtactggaggactttttaaaacaaactgagctgatgatctgctgttttgttctaaggatttaatcatcgtcattgattgatattgaggaatatgttttaatattttatgtttccttgtttaaaataaagaaactgtaggtcaatatttaattactttcttatctaatgaggaaagattcccaagaatataagccaatgaaagaagttgtaggctgggcacggtgcctcacgcctgtaatcccagcactttgggaggctgaagcgggtggatcacctgatgtcaggagttcgagaccagcctgaccaacatggtgaaacgctgtctttactaaaaatacaaaaaaattagccaggcgtggtggcaggcgcctgtagtcccagctactctggaggctgaggcaggagaatggtgtgaacctgggaggcggagcttgcagtgaactgagattgcaccattgcactccagcctgggcgacagagcaagactccatctcaaaaaaaaaaaaaaaatacaaaaatacaaaaattagctgggcatggtggcat

SEQ ID NO: 61353 - DNA, 2121 bp, Homo sapiens
tagagacagggtttcaccatgttggccacactggtctcaaactcctgacctcatgtgatctgcccgcctcagcctcccaaagtgctgggatttcaggtatgagtcaccatgcccagattaaaaaattttttaaattagctggtcatggtggcaaatgcctgtagtcccagctccctggaggctgaggcaggaagatcgcttgagcccaggaggtcgaggctacgtgagccatgataacaccactgcactccagcctgggtgacggagtgagaccctatctaaaacaaccaaaacaaaacgaacaaacaaagcttaattgtctagcaagggacagctaaacttataattaaccaataggttacagcactgtaaaagaaatcttgcaaattttctccctggctgttttttacaattgttatcattaaaggacttcatggttttcctgttcttaagggggaaaatattttctttttttttcctttatgaaaggagaatgacagtgatacagtgtggcccattagatcctttgccattcacctgcctgtgtttggactgttctcactttgtgtattaaagcttccttaagctacatgtttctgagcctcagtctcccaatctttattgcatttttcctaatgcttgtcagtcaacttaatctgaattctaatttctatatattgtgttccaatctctagctctccttttctaaaaaatgggcactttccaatgtaatgtttagtgtattaaaaaatattaacttggccaggtgcggtggctcacacctgtaattgcagcactttgggaggccaaggtgggcggatgacttgaggtcaggagttccagaacagcctggccaacatggtgaaaccctgtctctactaaaaatacagaaattagctgggcatggtggtgggcacctgtaatcccagctactcaggaggctgagtcaggagaatcacttgaaccaggaggcggaggttgcagtgagcctcggcaagagagcaagactttgtctcaaaaaaaaaaaaaaaaaaaaaaaatatatatatatatatatatacacacacatatacacacacacagacacacacacacacacacacacacacacatatatataaactttttccatggtgcccaatgtgaatgagctcatcacctatgcaatggctttctgaatggtgagaattaaaatggatgataagattaagccaatcaaagaaggggtgggtcatcagaaaaagtgagatcaactgggatttgagctctggagactgaagaataatgtgttactaattttacagatggtgtcctcaaaatgtaggtttttagtgtaggcagaaatttgagaatatgcaacttcataatttagctcagttcatccaggtaaaagcagatataaccttaactgttttatcgttctaatataatagacctctgttcctctcagttaaactctccagcttttgtggagcatagcaagacttttcatgatagattcattgaacatggccattttcctaactgaggcacaattgattttttcatatctttttttttaacttctgcctgtacaccaatgattttttcgtatattgcatctgtgaaattgttcctatagaaaacttcaagtagtaactatttttaacagcattgcctcctggttataaactagcagtttaacatataattgcttacctaggttttctttttcttctttttattaggaatatatatgtatacttacagtcagtctgtaattatgggcttgttaagtcattcatagaaacagtaatatacaattttgtcatgactataatcatgccaataatatatatctgtatagagtaattttaaaaccctctagcctatattatgatcttggtgttgtcctattatctcttcaaatcccaggtccctctaggcagtagctattatgcctacttcaaaggttattatgagactcaaatgagagagtgaatcggaagcattttgtacattattatccctcaacctatttgtgccccatacatagtaacttcaggccttatagtttgtccctactgctcctgtttccgtaaacctttgcagaaatctggtttttacgggcaaaaagaggtt

SEQ ID NO: 61354 - DNA, 1029 bp, Homo sapiens
tatcctctaaattcatttaacagcacagaaatgaatatttgtcaagtctcttttatttctcattatttttcttattattggatgccttttctccctccccacccataatctctgtatctgttttgtatcaatctaccacacattaacatgaatgtgtttttttattaaagctacatgactaatgaaatataaactagttcagtcatttctaagcatgagagagtgggagagagagagagagctgtgcaaaataaaaacaaaagtacattctaggttacaagctatctttttaaataaataaaagtgcattctagggaaatagagcaaccaatgcaaagaaggaaggaaaaagatggtgcttttgggaaacaaaaacaaaatgcagtagccaggtcatgaagtattttgaatggtgcaccacggatatttggacactttatcctaaaacctgtagggaaccattgaaaggtataaagtgagaagtggcataatcagatttggatttttagaaagatcactctagcaacactgtaaagtatggattaacaaagagggaaaataggtagttattgcagttgtctaaggagaaaatcataaggtagtcttaggaaaggggagagagaaaagggagtcgatttggcaattggcagtttggcaattggtatgaaagagtagaattcagttaatcccattcactgagatagagaacacaggaggagaagtaggtttgcttaaagaaatgctgagttctctcttggacattttgggtttgaagtattcatgagacacctcaatagctttctctacaggcaattggatatatgaatttggcaatcagtgatgtgggtggaattagagatacggtattattagcatataggagttggttgatacattgggaattgatgagctcactcaaggacagtgtataatttacttgaagcaaaaaagaaagtgagggacagagtgctatccttatatttaagttgtacagaataaagtaaatgagccaagatgggccagagatca

SEQ ID NO: 61355 - DNA, 1049 bp, Homo sapiens
cctatggtaacattggttttgttaagcattgtttcacttaaagtctcagtttcctagaacctagtgaagacttactgtatactaaaaggtcagtaagtgtttgccatgttgaaaagttttacagcttccctactccttttttctttttttttcttaactaaatactgtataggatttttttttcaatacctttacatgaagcaaacacagcttccctattctaacttccttgcacagctggatagataacttctctgtctagtgaaaagctcaaggctaagtaagtatcaggaaaggttaagtgcttagacttcaaagggttttttcttcatcgcatacagaggaatgtgacacatcagcctagaaaatcacttgaaaagatttcaacaataatagaagcaaaagacattatctggtcagctctcaataaaccagaaaattagtcataaattaatcgtaatacctcagtttctaaatattctagttagcgacgttttccttttgtctagttgtacgtagagggctctatcttcagaataaccacagtactcttgttttttgccagttaccttgccacagtaaactgtagcagatcatggagttcaaaatataacttcacagaatgaagaaaatgtatgtccaatagcatttaagtattatgcttccagagctttatttggaaatggtaacattactatttttaccctatggaaaacagatacttctgaggcagtgaattttattttgttcactgatttatattgggtatttttatatgtaaaatatactagatatgttacaacaaatacacacacacacacacaaaggcatagtgcttacctttgtgaagtttgcattcttataggaatgttccaatatactcctcagagtatagaagaaagaagtagacctcatctaacaatgtttgtgtgagagttagtatgtaccagggttcaagtcatatgccttgccttcctagtatgcatatatacccagactggtcttctttgggagtatttgtaacataatctgggaatgtaagtgattta

SEQ ID NO: 61356 - DNA, 1041 bp, Homo sapiens
agccttgctggaggaattcaagaaaagtctcacaatcttcttatgaaattttaaaacccttttgttgttgttgttctttttttttttaattttattttcgggttcttaacatgtagtatttcatattatttaggaaaacttgccgattgccattaagtagatcacactgataacgaataaagagctctttttagccattgcagagataatatgtaatgataataagcttatagtaaccatcctatgtaatttcattgtcttaggattttcaaacactagcaagactgagttcaatatgaattttaagtctgtttggagaatatacattacatttctaagtgttttttctttatgttcagaatttattcgagtagaaacatgggtcgcctgactagattgtccctagaagtctgccagaaactgcagcttaactgcctccctcctattttaatggagactaactaccctttgactgtctatggaccagaaattcccagggcatgggcttgtctaagaactatgcgaaatgccagcattctggctctaccttatgtcttaggcagctttacccccaggtcggccctaaggttaaattgtcctagagttgtgcacattccccaaaactgtatgaggtaaagtctttcctaagcttagaccactcccagaggtctaaagaactccaagaaactgaaataaagattagggttgattacctctttgaagaggcaattttcctcctctcgtttcactaccaaattcatagtgttcccaaaaccatttgtatgccaggattaactattggaattgacccttaaatttaattgactatatagtattggtgagagcataaattattggcaaaaccttttcagcgtcttgatggtgtttaccagacactttcaaattttggtccagcaattccttttctacatgtttaggctaataaaataatcacatgtataatgatgttgacggtcaaaaaataaactagaaagaactcaggccaggcatggtgactcacacctgtaatcctagcacttc

SEQ ID NO: 61357 - DNA, 1013 bp, Homo sapiens
tctttgttcccaggaaatctatgctgaggtacttaagcataaagtggcatgatgtctccaatttactttcaaagtggcatgttgaaaaaatacaaggcaaattgtgtaatatgtaaactgttggtgaattggtaaaaaatatataatagtactttatactaatctttcaacttttctgtgagtttgaagttatgtcaaactcaaattttgttaccaacaaaattagatttgcccttatgttaccttctcagcatcagcatggcccggatgattgttagaaaaataatgttaggtttgcttctttggcttaacttcctcatttcactctatccttagacttttgtctgtttctcaacctgtggcttccactatgttatttattttaattatagcaatttccccataagcttattacatcattattattaaatattagcttctatacacatttattgttatggctggtaatggtcagcctttggggacctattctcattttgtgtattttttcctgttcacatagtttacctttgcagtatcttgggtaacgtaaaaaatgcaaatttttttcttttattttgagaaatttaaatattaacttcctggtggagggctttgctgttctagttctcatccagtagctttttttgtctgaaatttctgttcagtctcttggtagaagatcaagtgtagtatgagatctaaccttaataacatactggactatactcatttttgttgtcaactcaaagaagtaatctctaaatgctatcaagcaggactatgccttctgtgagccgcaaaagaagtcagcaaagttcttctaagtagaagcgccatcaaaacctactactgtgtaattgttattcacctgtggactttaacctgtccatagctactgtttcttatgaacaagtaaatatctagtagaggctattttgaatgagtttattgagaagatcatacaaactgacttcacgatgattcgtgtggtacttgtattttcagttggt

SEQ ID NO: 61358 - DNA, 1054 bp, Homo sapiens
ctgttcttcagatgcagtttattaatgctgtgaaatacttagactgctgtgaggagtatccataatgtctctttccagtctctgagttccaccactactaaagtttgttaatctaacccatgtgtttgattattcaagttgagaaaataaataataatgtaatcattaagtgtgccaaaggagggtgtagtttacttagttgtctcaaatattcagactcctattaaaatatctttacatccatttttattttagattatgttgtgtttgaatttgggatcaatgaacccatttgatttatcattgttgatttgaaaacataaacatgactaaccattgcatttcttacaccttcatctttagctttttcatcataaaacaagattcaaaaatcactttgctatcagagaactttcttcagttccaggccaacttcttttttcttatattttagcacattctagcatgcttaaggtcacataaataaagttctataagagtatactaaacaagttatttctccttctcttctggtaaaatgagttctcaacttagcctgaccatctatttataatctttggttgtagagaatgtgtgaggatagtcctttatttgcatatttgtttttggcatgatgtattttttaaaattctaaacttgaatgaaaaacttcaccaattacagattaatctaacatttattaattaaaaattataaagaacattacactcttgaagtgatgcacatttcaaaatgattgaaatatgcatttgagtaagtgaaagccttaaaaaaaaagtgcacctgtatcattggcttggactttcctcttcaacttcaagttaacttagtggatacaagctaagccccaaggtaaatattttatggtagtgaactacttcaaaaatattcagtcctgattaacattttccagaaattgtgaacaatatagatacccagtgtgttcctgtgcagttgatacaatgtaacatataatgattcatgacatgggctctggagtctcctgccacttaatagtattgtcacctttggc

SEQ ID NO: 61359 - DNA, 1050 bp, Homo sapiens
accaacatggtgaaaccctaactctactaaagatacaaaaattagctgggcttggtggcaggcgcctgtaatcccagctacttgggaggctgaggcaggagattcacttgaacccgggaggcggaggtgcagtgagccaagattgtgccactgcactccagcctggtcaacagagtgagactctgtcttaaaaaaaaaagaatgtaattaatttgcaaaagtgaattgaggaacaaattcaacatttcatatcctttcacacctgctggaattttgttttatttttagttacagattttgccatcttccttctttcccatccaaagttctttaaattatttttaaaacatttactcagttttagctcctctttcaaattagcaactttagttcttttttatataccataaccctaaaaaaaaaaatctggctttggtatctgaaatattttccaaggcatttccattttgagtatctcagtactctgtttggcagctgtgtgtaaatggttagtagatgttataaagtatgctgaattggtatgaaaaacatagtcttgtggattgctgaacttctttatgtgtaatagagtgggatgaagagtgtggactttggatatagacagtcctgtatttaaatataggctctcccacataactgatgggtaaccttgagcaagagaccagttaacctctctgtcagttacattctcagtaaaattgggacaataggtaaagtatctagctctacaaattatagctgttttgcatgactttgagccctttactcagtttaagaaaggagttctctgctatcatatatatgattttctttcttcgtttacttgaaaagctgcagactagtataccctctgcgtaattgttctctccacagtcctttccttcccagtttaattagctataaaaatctcctgtgctatctctgtaatgagcaactagcccgggttaaataccgagtccattaactaaagagaggcccccagtttgatttcacatgtctcagttgtcctgtgttcacagtgattcatct

SEQ ID NO: 61360 - DNA, 1032 bp, Homo sapiens
gcttttgttttaatgtaatatgtcatagattctttctaaatgcaccttcctgtgttgaatccttcttgtgaaaagaaaaaaaaaaaaaaaaaaaaaaagcaccttcccctagtatccatgtattctgctaacaatttgtcaatacagtcatttcatgaatttggattatttatttaatgaaaactatattttttctttgtttcatttatcatcttttatgattttaccatctagttggcatataaaacaaagcaattatttctaagtggaggctttattttacattattgttaaatatttctttcatgtaatcatttagttgctctcttttatttgcatgatttatttcaagtggtttgtagccttctttattttcccattttctcttaccccttttttccttcagcaaaccaaagatagaaattatattttgtatttcctgtttctattgcatgtaatagacaactttctccacatcaaacatcaccatgtttttttataaagtcacagaataaaatttcttggtatagatgaaattgttccttaagcaaggaataccaatttccgcaacgttggattcagtccccttatgtcttctaaaagctatagtttatacactattttcaagcaataaaattgtctattgaaaccaattgttcattatcatcataccaccatgtatttcttttttagagaatagatttgttattctttcctacctattgattcccctttcccccaacctctccctgaacgtttcagaaatactgcctctgaattgagtttttccattatttgtaactacagtcccctcagaaccttgacagtctctcaaacttggaagaaaaaatttatgtgtattttatttccacctcctttatgttatctacaagaatatttgtttacatggaacaagaaaacattttacatcaaataaaaatgaaatattatccacatttatctgtaaagagataaaagtatagtcaaaaccaagaaagggaagtattgattatagtgtttataacagacaat

SEQ ID NO: 61361 - DNA, 1025 bp, Homo sapiens
aatatttgtggttttgtgactggtttatttcacttagcataacgccctcaagattcatccacgttgtagcttgtgacaggatttcctttccttttaaagctgaaaaatattccattatctgtatataccacattttgtttattcatctgccaatggacttttgagttgtttccacctttcagctattgtgcatagtgctgctgtgaacatggatgtgcaaatatttatttgagaccctttcatttctttgggatatataaccagagatcatgtggaagttctattttatattttttgaggaacttcttcatgtagaatatttgacaaatttcattgctgttgctctgctaagctgtatctgtttgcttatttgtctagtatgatggacgttcaagattaatctagatttcttttttgcatatccagggcccatgcagaatctccaccatgtgtagacaacctaaaaagtgacatcggtgataaagggaagaataaagatgaaggggatgtttgtaaccatgagaaaaagactgcagatcttgcccctcacccagaagagaaaaagaagaaacgttctggattcagagacagaaaagtatgaaacatagtcttataagttgatcagaagtatatcttaaagtagaataatgcagttcaatctttttaatcatatgtttcagatggttcatcttcactttcaagttatcacttctttgctattttctatcatgttctaagccaaaagtactcttggaatgtgaggttaaaggaggtagttaaaaggatctaggaccaataaccatgattagcatattttttcttagttctttcagttcaactgcctaaggtgattctttttttctggatcttcctgatgctaaatgttatcatatatgttaagttgagtctttgtggtatttctgatatcgggttgtagagacagaataaaatctctttggaaacataacttctagaagaccaagtaactttgaggacagcacaaacttcaaatgactatcaagatt

SEQ ID NO: 61362 - DNA, 1047 bp, Homo sapiens
ttgccaacatggtgaaaccctgtctctactaaaaaaacaaaaattagccaggtgtggttgtcgtgtgcctgtaatcccagctacccaggaggctgagacaggagaatcgcttgaacccgggaggtggaggttgcagtgagccgagattgcgccactgtactccagcctgggtgatagggcaagactcagtctcaaaaaaaaaaaaaaaaaaaaaaagaataagaacttcccagtaattatcttggatgctgaattagttggctattgatggggcaacaaacaacacccaaatctttgcagcttacagttacacacatttatttctcaccagcattctacaggtcagctgtgctcagctggctcagctgggcttgacagtggtttattccaggctgaagtctgttcattatggatgccagtttgaaggatcagtgtctctttgggacatggtcttccctcgatggagtgcaggaacacaagaaaactaacagcagcacctcctaaaagcacttcatggaactggtccacattccattggttagagcaagacatatggcaagacatacgccaaaaacttaaagagaaggaaatttatgacctggcattcatatgcagaaggggaagaaaaaagtagaaaagtaattttgcctaagggatgggggatggaagagtaagtatttattgaacagtaatatgcactaatacagatgtttcagatttaaaacaaaacattaaaagaatttttttttaagtgaagtttgaactatagagaatctggtagggaggagggcttccaaggacctgggtgtgaaaaatatttaataaaaacttcaaagcagtgtcagcattataaggtagggggcagcaaagtctcccctcctaggttgaagtctccctacctaactccgagacattgaagtatggaattagtcctccctaggttcaaattctagatctatcacttcctacctttgtactcttgagcaagttatattttagatctgtaaaatatgggtaccagttatcttttttcatttcagctctaaa

SEQ ID NO: 61363 - DNA, 1056 bp, Homo sapiens
taagtagagatggggtttcaccatgttggtcagtctggtctcgaactcctgacctcaggtgatctgctagccaaagtgctgggattataggcgtgagccactgcgcccatccaaaaccactttattttgaacgtggtatgtaaaataaattaccataattataactaattgctattactgggtgttaactttaaaattataattaacactagttttgtatctttatgccttattctggtggttcatcattaaaacaatttttttttctgtagaaacggggtctcactatgttgcccagggtggtctcaatctcctgggttcaagcattccgcctgccttggcttcccaaaatatggggattacaggcatgagccaccatgcctggccaatcatgctttaagagcacgatagagtggatacctgtagataagatacctgtgggtaaaacaggtaacagaatgtcagttgaaaaagcaaaaaaaggtagctgtggaattggacaactgtgagaagtgattgacattaaatataattaataacctgtcgttgaaaagttaaatattgccacatcgtgggagaggtgttttagttctgtttatgaggcaagaaatggctagaagtagactcagcttttttcccccaaactaacagggtgatcaattttttgcagatcataaatgtttcctagactaatattaagttcaagatgggttttactatgagaaaattgaaactttagtgtaatatttgaaaaagatatcctcaacagttaaggatacaaataatgcttgcatttctcttcaaagtgatttaatgttgcttatttaaaacttgaagtgcttggccaggtgcagtggctcatgcctgtaatcccagtactttgggaggctgaggcaggagaatcacttgaggtcaggagttcgaaaccagcctgggcaacgtggtgaaaccctgtctctactaaaaatacaaaaaattagccaggcatggtagcacactcctgtaatcccagctgcttgggaggctgaggcatgagaattgcctgaacccgggagg

SEQ ID NO: 61364 - DNA, 1032 bp, Homo sapiens
ggctacttctcgggtctggcgggatacctgtctctccctgatgcgctcagcttttggagaggagtccgtagtcttgcttgcctcccgtcctccactttccttcaccccaacccgtcccttctcccgtcccgggagaacttctcccagtgccgggttcgcaacttggcgccgacgcccccctcctcacaggcgactgggacactctggtagccttgactggctctcctggaatttgtggatgtggttagaagtgggtgcgggagttcacagatggatttctaatacggagaaatattaaccactgaatcgaaataagtggaaaatcagtgaggactcaaaggagaaatacaaagtgcaggctactcggactgttcagtttttatcttttccagcgccttcccgttttcattacgttctccctgttttgttttcaccgtcgcattctggccggccataggctgttttgagaaagagctagatgttattgactctatgtgaatgttgggagaacagtttaaaacaaactgttcttcaagttgccttctctgtaatcttatggttgatggtttctttaccttccaattttccatgtcttaaaaaatacggtggccattagtaaatataagtagaataaatatcttatagctaagggactagagtaaaatattttatttttcctgtggtaccttagaaacgcccattttcttcctatttatcaataaatgtttctatctcacttgtttgggtggcttctttgatatgcctttgtttatattagaacatccctttggggcacgtagggaagtgatcgagcagtataagaaaggagtttgcatttcatgaggtgaaacaagttcggtgtggatagctgtaggagagtttaggtttcattggaccatatgacaaataataaacgtcagtatcttgagacaaaggtgttggccagaatgacccacctactgtgtttctggtgtggaccaggtaatgagctttttgaatattgccttatcctaaaaactttagaacccattg

SEQ ID NO: 61365 - DNA, 1156 bp, Homo sapiens
aaggcacgggacttgaacctctccccgactcgcccccaatcgcgttccctcccttcttcgttcttaacagccctgccccaaggctccctgaacggagccagatggaagttgtcccctttccctcctcctccgggcgggttggggagttctgagttgccgcggccgccttgtgtgtgccaggagagtggcagtgccatgctgctgggagctgccccggagagcagcccaggaccccggcggggccgcccctcgtcctctctcgtccccgaggggtcgggcaggaaggaaaatcaaactttattcccctctgtgacttcctctgtgtgtgtgcatggggaaccggctccctcgagatggatgctgcattgcttcaggaggcaagcttcatcctcttgggtccttaaaggtgcttttgggggtcctttcgagggctactgtataagcgtgttcacgcgtgcctgaagcgggaagggtggtcagcaggcacaggagaagcgaatatggtaagttgttgacagaggcagagatttggtggttgtattaaccagttgttgctgggtttcattggctggcagaaaaagaggatttctgtttgaacactcttgggtgagtgtgtgtgtgtgtgtgtgtgtgtgtgagagagagagagacagagtgtgagagagatttcttttttcaattgcaagagatgaatttggcatggagttcttaacctaacaagtcaggaggtttccttcccttggactttctagacctatatgtgttggtctctggccagctctgagggaaagaatgtaggttttatttgctggggctgagttgtatagtgtgattattggaggatcactgcaaacagcttgataggagaaactacaatagtaccttcaaccctcaataaacacatcgcctgccttgttctgatcataactcttaagaggaaactgaactggagctcttcggagaggatactcctaaggccaatgacagcatcaaaatcgagtgcctgaaagatctatgaaaagacctaatgctctgcaaaagcaaggttgtattgttattattagtcataggtatggaccctatcctcattcttgtgagaagattgtacctctttttatttggcatactggcatattgctttgctgaagcttttggg

SEQ ID NO: 61366 - DNA, 1066 bp, Homo sapiens
aaaaatgaagtgctgaatttgtaactgaaagcacaattaaaacgaagtgttatttctaaagggcaggaatgttatgggaatggtgacttgtacatgaatttagaattgtaagattttgaaaaaaattgaacctgattatttaaagtgtataaacattttatttttctacaattcttctgaagccatcatgtatacagctgtttccataggatagtctgtgattctttacaagaaattccatttaaaagatattgaggccctaaaaagagagagacttggccaaggttacgttagctaatacgtaagttttaggactcccactcatctgagatattctcacctcttattgtgttcttttcattgtaaagtgcaaatgctcctttacatctctctcctcccttataaaatttactattgtccattatgaaagtattgctatttcaaaaccccatgaatgggaattctcctgtaagtaggtgttgatttgagtacatatattaggtgaatatgggagcaaacaacttaccagaaagaatagatgttctggtaaaggtccctgagagacactaaggttgaatcttgcttgggagacatcctgtgtatgtgcagcagatggcagtctgcattggaatggatcacaagtccagtttgtgccacttttgttccgctgtatggtatggtaaattacaaccaggggggcataaccagttacagcactgcctaattttttaagtgagaaattcatcttttccaagtttcgagaatgagtccaaagcaatacagtagctcagctagttggtaagtgcaattatgaagttataaacttagtttgtctcttcccccttctccattagtatgtcattcaactgagtaaataagagtaaaggtacaggggcttattcaatatttttagcaccatctagtgtaatttttttccttctctccggcttgtgactgtaaccaaaactgatgtaaaatgtttgttgcctgcttttctgtatggttagtgaaggtggctgctatttttaagtatgattcttcgaagaggaactgcctttcattgtga

SEQ ID NO: 61367 - DNA, 1352 bp, Homo sapiens
accatgttggccaggctggtcttgagctcctgacctcaggtgatcggcctgcctcagcctcccaaagtgctggtattacaggcgtgagccaccatgctcagccctttattctttttttttgagacgaggtcttactctgttgcccaggctgaagtatagtagtctgatcatggctcaccgcagccttgaactcctgggcttaagtgatcctccgacctcagccttttgaatagctaggactacaggcacaatccaccacactgggctaatttttaaattttttgtagagatgaagtctcactatgttgcccatgttggtcttgaactcctcggctcaagcagtcctcctgccttggcctcccaaagtactgggattatagggtgagccaccgtgcccggactctttattctttgattaatgccataccatggctcatggatatattagaattactaggataacatgttaggaaaactaagatgttactgtggaagttgtgcactttaaagaatcttaaacgtttgccagccgtagtggctcatgcctgtaatcccagcactttgggaggccgaggcgggcggatcatgaggtcaggagttcgagaccagcctgactaatatggtgaaaccccgtctctactaaaaatacaaaaaaattagctgggtgtggtggtgcgcgcctgtaatcccaactactcgggaggctgaggcaggagaattgcttgaatccgggagacggaggttgcagtgagccgagatcatgccactgcactccagcctgggtgacagagcaacactccgtcccggaaaaagggaaaaaaaagaaccttagtgattagagttcagtaagaccttatattgaggaaacaagagtatgagtggtgaaatggcttttttttttttttttattgagatggagtcacgctgtcgtccatgctggagtgcagtggcgctatctctgctctctgcagtctctgtctcctgggttcaagtgattctgctgccccagcctcctgagtggctgggactacaggtgtgcgccaccgccccctgccgatttttgtatttttagtagagatggggttttgccatgttggttaggctggtctcgaactactgacctcagatgatctgcgtgtcttggcctcccaaagtactggggttacaggtgtgagccactgcgcccggccgaaatggtttttttcttagtagctcagcatcttaatacagaactggaaatgggtcacgcatcttctcattttcctattcaattcttttcctactaaattacacaattctttgtttcatttaaaacacttaagctgagagtggttctaaaaagtggattgggg

SEQ ID NO: 61368 - DNA, 2004 bp, Homo sapiens
ccaacgctttgggaggctgaggcgagtggatcacctgaggtcaggagctcaagaccagcctggccaacatggtgaaaccccatccctactaaaaaaatacaaaaattagctgggtgtggtggtgtgcgcctgtaatcccagctactcaggaggctgaggcaggagaatcacttgaaccgggaggcagaggttgcagtgagctgacatggtgccattgcaccccagcctggacaacaagaacgaaactgtgtctcaaaaaaagaaaaaaaaaaaaaaagcaaacatttggaaatataatgtgactggaaaagtgtggtcagcattctgggcagcaccaatctgacatgacctcatgagggagtaagatgtatttgagaagcagccactggtttgttacaactggagtatgcgcaagaatagctggagattaggctggacaatagtagttataccaatgataatatttttcaagtatatcatgtgccaagaattttacatagattatctcatttaattcttgtgatacactatgacccaggtactgtttttatcctcattttatagatagtgaaactaagttacccactgagttaaatgatttgcccagagtcacagctgttaagtgacacacagtaaatgacttaaccatgatcacacagctagcagatgtcacacctagcatataaacccccaaacagtggcttcagatcctgtctcttaaccactgtttctgtggtgagggatcagactatgaagggacttctgaagaaattgaaattttgttctgtaggtcagtgtttttatgttttgtttttaactcagcccacagtagaagtacattttacactgtaacccagttatgtgtgtgcattgtacacacataaaactaaagaaaagtggctgggcatggtggctcacacctgtaatcccagcactttgggaggtggaggcaggcagatcacttgaggccaggagtttgagaccagcctgggcaacatggtgaaaccaacctaatacaaaaattagcctagcatggtggcatacacctataatcccagctactccagaggctgagacgtgagaattgcttgaacccaggaggcagaggctgcagtgagcagagatcactgcattccagtctgggcgacagcaagactctgtctcaaaacaacaacaacaacaacaacaacaacaaaaaacaactaaaaaaaagtttcatgaaataatattttttactatgtattttatatagtttccattctgttttgttaaagaaatattagttgagacctaaattgattttacatcttaagccatagtttgaaaaaatactgcttgtctatagatgagcctctgaagaatttcaagtgggagaatcaggtgatcaggtaggtaacgctggcagcagtatgaaggccgggtggaaaggatgggaccagagaggtagaaagaccagtaaggagcatctcactggaccaaggaaaagatgcctgactaggacagtagcgttgtagatagagaaaagggaagagagaagagagatttaagaagtagaactgatagaacttggtgattgaatgtagattatcacttactaccagtagaaaggccattcaattcacggtctgtttgactttattactcaggcactgaaactttatttcttaacctttgctgagtgttcctttttacaatcatgttaaatatgctttttttctatgcctctaattttgtatttaaaactgtactgacctgctaaaattttaaattttgacctgatttaaaatttgtgattttttttttattttttaaattaaattaaaactttcctagagacaaggtcttcctctgtcacccaggccggagttcatggcaccattataaatcactgtagcctcgaactcctgagctgaagggatcctcctgcctcagcatcccaagtaactgggactacaggcatgcactgtcatgcctggataatttttttttttttttttttttttt

SEQ ID NO: 61369 - DNA, 1108 bp, Homo sapiens
agcagctaatactcttaaaacagtttcgattgtgctgaaacaagcaggactaaataaaatgctcagtaaaaatagtaatgaaaaagattgtaaagctattatgttaaaagtaatttgaggccaggctcagtggctcacgtttgtaatcccagcactttgggaggctgaggcaggaggatcacttgagcctaggctgcagtaagctttgattgtaccactgtactccagcctgggtgacagagtgaaataccctatctctaaaaaaaaaaaatttaagaaattgatacagtggcatctacctggcatgattggtgggggtatgggccatgctggacactgcagaagagagaaaggaactatttcaaagaggtgctgccaactgtagattctttctgtatatatatatttccaaagaaggcagatttttggaagtgtttattttggaactagtcttgtgtatttccattctgtccccactgtatcctgtattttgcactgccagaattctgatagctgccgtgaagcagggctgtggcaagtggccaagtgtgataaaaacctatttttcattttaaaacaatacagatgtcagaatactttaaagaagtatttaaagatagattgagtagaatggaacaaatagtaaaaatctaatgagaagattgaaggtttttcatttgcttttgatggaattacattttttggaaacagaagaataccaggttatgtctttcttgatctgttagtttctctctctttctccctttttcctgatctgtgaatgctggtgctagacactgctgaatagacaggaaaaatggattttctggtgtttttttttcttttttgaggggacccctagggtatactttgtgtgagtatctgactagatatagatatagatgtcaatagtttggttttgtttatttattttcttgttttaaccccaaagaaaatgaaatcttgttttctttttattttcagctgtgacttaaacgttaaaatgctgcctaagcacagttgagatagtaaaacaggattttagtgtaacatattacagaattttggaatattcatttacttaatggacagctgaactccagtcagt

SEQ ID NO: 61370 - DNA, 1112 bp, Homo sapiens
tctcgatctgtcgcccaggctggagtgcagtggtgcgatctcaggtcactgcaacctctgcctccctggttcaagcaattctcctgcctcagcctcctgagtagctgggactacaggcacatgccaccatgcccggctaattttttgtactttttagtagagatggggtttcaccatgttggccaggatggtcttgatctcctgacctcgtgatctgcccccctcagcctcccaaagtgctgagattacaggtgtgagctatagcgcctggttaatggctttctttttaatgattctagagcttttaacatgagaaagtagaaaatgaaaggaaactataatagatttcttgcctaaaatgggtgttctttgtaagatgaaaagtagagacaatctgagaccctgagttatggatccgaaggtcacatcacagccagcattagacagtcatagcactagtggaagaaaaggcagaaggtaaactactgatgggaatgctgtcaaaggagctcacttggaaaggccattccatcacctaaggtttttttttttttttttttttttttttggtggaggtggagtggtcctttataaggaaattacattatgttcaatcagacatacaaggacaaaaatcttttatttttaaattgtgaagtatgtcatgtctataaaaagtagaataatataatatacaacctttagcttgagaaattgaacattatgattataattgctgcccccaagtaccattccttaaacctctctcccaaaagtaacattctcttaaatttgatgtttaccatcccatgagtgtgtttatcctttatctacacctatcttatatagttttgtaagaatgttttaaaaccttatttaaaaggtattaaactggccgggcgcagtggctcatgcctgtaatcccagcgctttgggaggccaaggcaggtagatcacctgagatcaggagttcaagaccagcctggccaacatcatgaaacccctgtctctactaaaaatacaaaaattagctgggcatggtggtgggcgcctgtaatcccagctacttgggaggctgaggcaggataattgcttgaacctgggaggcagag

SEQ ID NO: 61371 - DNA, 1002 bp, Homo sapiens
tgcctcagcctcccgagtagctgggattacaggtgcctgccaccaggcccggctagttttagtatttttagtagagatgggacttcaccatgttggccaggctggtcttgaactcctgacctcaggtgatctgcccgcctcgctagtgctggttttcttgctaactacacaaattatacttctgtagtaattttcacaaattattttaccgtgaaaagtataggtatggggagaggagatagtggtatgtgaaagggccttttgtatttttcttgttttggaatgatttccaatcattttcaaacagaacctctaaaccaaagagtttgtgtggcttggcaaatgaaccagaattttttttaatttagtacttcaaggtttctaaattttgtaaacttgtttctgaaactagtgaaagcctgaaactagtggatggcctaagacttttttaatttaaaaaatgtttcttatttcttcattgtttgttagggttctatcagttttttatattccggacacacagagatggggtgaatttgttttcctctttcatcatttgtgtgtgtgtgtgtgtgtgtgtgtgtgtgtgtgtgtgtgttggagtctcgctttgtcgtccagcctggagtgcaatggcgcgatcttggctcactgcaacctccgcatccctggttcaagcagttctcctacctcagcctcccgagtagctgggattacaggtgtgctctaccacacctggctaatttttgtatttttagtagcgatggggtttcaccatgttggccaggctggtctcgaactcctgacctcatgatttgcccaccgcggcctcccaaagtgctgggattacaggcatgagctaccacgcctggccaatttttttcttgtttaatctaaaaatatttctaaaaaaatttgtttatgagctgttacttcagttccccccgccctggtctttttttttttttttttttttttaaagagatggggtcttgcttgttg

SEQ ID NO: 61372 - DNA, 1335 bp, Homo sapiens
ccaatttttatatctgttgagcttatcatgtgattgtcaaatatctattattactattttttttgagacagagtttccctcctgttgcccaggctagagtgcaatggcatgatctcagctcaccgcaaactctgcctcccgggttaaagcaattctcctgcctcagcctcccaagaagctgggattacaggcatgcaacaccacgctgggcaaattttgtatttttagtagagacggggtgtctccatgttggtcaggctggtcttgaattcccaacttcaggtgatctgccccccccttggcctcccaaagtgctgggattacaggcgtgagccactgcgccctgcccaaatatttaatactttgtttctggaaaaagtattttagagtttcttacggtcaatctggatttattctaggttacaactaattttttttaaaagtgctctcttgtcctaagggtcactgtgataactagtggctaagaatgacttaaacaaggtcttttcagactttctttcttctttggcattatatgctgaggtacccacattagcaggctcaagagggcctttacctttgacatttactttacttttttctattcttttaggtctttcactaccattcctacagtgattggcaagataccgtttctacctcactctccatgtaccatgccagtgacatcttagctgctagagtgtggagctggcctgtgggagtcaagtaagtgccttttttactatttggcatggtttttgcttactttgcaaagccatgtagaggagcttcttaagattagtttttaaaaaggcacttgcttgatccttgtgggctggctctttgctccagcctgctattgaacacttggtagctaacatggggctgagtttagtgaggtgactgttgcacaatagaatatttttactatggtacaccctaagggataatatatctgatcttagcctgattagaccatattggtaaacaaccccaataaatcagaactatgctacctcacacagttactctggtctcctggaaatttaatagggtgtggatgaccaagggtctgtctgctggtgtaaaccaactggattgcatggaaacagggcagctctcctaggaaagccaattaccttggcatttatcttaattaatttggcttaatatatggaagaagtaatggttgaggttaatcaggtatgggtttctatgtttatcattaaagttgctaaaacctggtatcttacttttgcaggtcatcttgtaaattttgcctatataaattaacacatcccctgtatgtcataacaaccatgtaagggagag

SEQ ID NO: 61373 - DNA, 1101 bp, Homo sapiens
agtggtaggatgttattactattattggattctctaaaggttttataggctgggcgtggtagctcacacatgtaatctgaacactttgggaggccgaggtgtgaggatcgctggaggccaggagtgcctaaccagcttgggcaatatagtgaggccccattaaaaaaaaaaaaaaattagttgggcatgcccctgtagttatggctactcgggaggctgaggtgaaaggatcgcttgagcccaggaaatttgaggctgcagtgagctgtgatcacgccattgtactccagcctggatgacagagcaagaccctgtttcttaaagaaagaaaggacttccagattcatggaagaattattacagttaaaataccagtcagggtaatggaaattgaggaccagagttattcaaggatcacagagcaaatcagtgttctactactgaaatcagagggtaggtctcctgcctcctttcctagggttccttttgctaggtctcacaacatattaggcgatgcttgttttccctactatttgaaaggtgcacagtctatttcctttctctctctctctctttttttttttttttgcccctgaagtaaaagcaaagactcaatgatttaaaccacaaagatatggttgttaagagtatcggtcttaattggagtttggatgcttttattgtttgaagataactaggggattgcttctttttttttttttggagatacagtctcgctctgtcgcgcaggctggagtgcagtggcacgatctcggctcactgcaacctctacctcccgagttcaagcaattctcctacctcagcctcctaagtagctgggttataggcgcccgccaccacgcccgcttaatttttgtacttttagtagagacgggctttcaccatgttggccaggctggtctcaaactcctgacctcaggtgatccacccgcttcagcctcccaaagtgctgggattacaggtgtgagccactgtgcccagccgggattgcttcttaatgagtcactaagtgcttatagtatatactcagaaaggttggcttagatggaataaaaaaagaagttagagccttgttcataa

SEQ ID NO: 61374 - DNA, 1003 bp, Homo sapiens
gtctgcatacttcccagttgtaacctctgtctccccatgctcctgaatgccatgaatagattactccttaatcaccaagtgcattcccacctttttcttagccctttcactttgcagatccactgactattaggccctgacttgttccgtttgttcctttctcatcatctcactctatccatccttcaaggcacagctcaagtcctatctgttcagtgacttcttccttctcctttccaatttatagaatactccttagccctgccacacattttatacttccattgtgttgaatctatctttttatatacggatgctttagtttaaacttcagattgtaacctccttgaggaaagggcttggattacagattttacttgtattctctgcagtgtcttataatagatgttcaacaaatgtatatgttgatcaattgaaatgataatagaacccttaatagctgaagatatgtaacgtgcatctaagactcctggttatttgagcttcttgaagtactttatacatccaactaacagtcttaattcagaaccaggaatgacatgtttaggttagagttagatactgatttctagacaggaagcttagtaattgttgctacatactgatccaagtaagaatagttctttatatccagagcctgaatgaaagagccagtggtgagacagtgagttgattacttctcactgtttcaccactggctctttggttcatgctaacaatgtatctcacctagattatattaacagctttctaattagtctccctgcttttgttctttcttacctctggtcgtaattcagcagtgggaatgatgacatcaggcagaaggagacttattcagtagcttctgatctcactcagtaaaagacaaagttcttcaaggggcctacaggtagtgacaataaactggctctctggagggggaaaaggttctgatttgtagcatttgcctgttttactggtataattactcccactctgg

SEQ ID NO: 61375 - DNA, 1050 bp, Homo sapiens
aaaaaaaatcaaaattcagtatttgaaacacttctggtccaaagcatttccaatgaggaatactcaacccatatttaataattactgccagattgcttttcttagccaacttaagagtctttccaaggtcccttctggttcatgtaaggccataaaatatatagtcttcttatagttgttagttataggatttttctggattcttaaaaagactttaagagttctatttataaaattgataatcttctgaatgactgtgttaccttagtacaaaataaaacaaaagtctttcatcaaagctctagtacctggaaaatattctaatagactagaaggtaaattgagttgagacaaattttaatgtatggctttggggatggcggttgggaaataaaggccgttttggcaatagatttttatctttaaagtgggtatccacttggttgcaagaggattaattataggaatctcttcctcttgtagtctctcagcttgaaaagataaatatagagcaccagtgctcagagagggaatgctgtagagaacgtgtgggtagctgctgtagttttacacagcagataacatctagaataaagaacagatgaaaatactcattgaggattagtgttcttgaaacatcatcaaatggaacattccccaagcctggcattcagagccattcataatcttgctcatcttgcatgtctgataatatctcctatcgagcccaacatacttttccctaatcccactttactctctgcctgctacattcattcccagtgccagacatttgttttatcctttggaagatacatctctgcttttctacattcctgattacaatctgtcttttcagtactccaatcaagtgtcatcgcccttcataaagcctctttgctttctctagaccacattgatcctttttcactcttaactcctagagtactgatactttgaattcttcgtgttggttcccgagtatgtatttgtgtagcagtaggaagttttttttgagtgcctcttgtatgggaagcactatgctacata

SEQ ID NO: 61376 - DNA, 1073 bp, Homo sapiens
cagcactttagcccattttcaaattgggttgtctttctgttgttttaagagtaaggatgccttttttaagctcctttttagttcattatgaatctggcatctattcatttagttaatctatttgataactcatagaatgttttttcaaagaaggcagttttgtgcccttttcagtgtccttcagttattttaaatgctgatcagcaagagattaaactataattctttaaaaaatgagatagagactgttgatgtgaaaagacagatatgtgaaagaaattataaagcactgctaatatagatcaaacatgataggatctggtgaaccgaattaaagctctagaattcctgtgggaatctgattgagcaggtaatctacaacttctgagtgtgtcaaacaactgcccttggtttctggtatgctccttaagcacacttccttatcaggaatataagaaacacctgtgcttagttttgcaagattttgtacataacattttgattatgtatttgttttacctttcctcaccaggaatttgggtttaaagaattcacagttggtttaactagatcatgtagctatggtgtaccaacttttgtaggagcaaatgaaagctattgaatatattcttaccttgattaaatgataggcaagagcatccatgagacgaaaatggcccttttgagtgttttttctacatttagtgaggttaacataatctttcactaagagcatttatgccagattaatattaaatggaagaaaataatagtgctgaaagaaatgtagagagggttggaaaaagcacaggttttggtgccagactgaatttcagatcaaattttaactctccatttcctccttgagtgacctcggacaagggaattaatctctctaaacttcagtcttcatctataaaatgggatggattaaatctatcttgaggctgggcgcagtggctcacgcctgtaatcccagcactttgggatgctgaggcgggtggatcacggggtcaggagttcaagaccagcctggccaacatggtgaaaccccatctctactaaagatacaa

SEQ ID NO: 61377 - DNA, 1067 bp, Homo sapiens
cattcttaggaaaatatttccttctaacccagacatcttttgtttttccccagatggttctgttatatcccccagagaccaagggttggccctttatgcttattaggaaagaaggattatgaccaacacttgcatcctgggtatgtttaggataaatgttgctaagctgctttagtaaatagatcgtaaacagaaactgagccacacctcctcctgccattattatcttagtaaatgtttgcttaggattttgattatttaaatgctgtagttctctcatgtacttaacaaatctgtaacattttgtcagtaaagagatttattaatatgcttcctttgccttagctcaatagtgcccttttgatgattttttaggccaggcatttagcagtctaaatggtggacaatcttggacattgttgcgtgctgtcaacataaagctgtttggtgtttgagatggtagtgctaggaaaaatgtgttagcatttgctaaaagagctttcacaggctggtcgctttcaatgtttaaaaaaagtttatgtaagactgttgatacttcactacagtgttcccaaaagctttctagtcttgttagtgaagcgtgtggggtatatgaattgtggtttaaactctaaatggccacagacatttttcttgaatatgactcttaacttgctttctctaaacttcagtttgatactatagcggttgttgataccatagtagttgtgtagttcaaattctccagtcatgagttttcattcttggatatggtagtgtctttgaggtcaggaagaaagaacagaagtcactaatgttaatagcagaaactttaacattataggaataaaagtggtaataatagatgagcagaaacctcaattcaagaaatacttgtttcaaaaaattattattctgtaccttctgtgtaaaatgcccattgctaggcctgggccccagactttaaagagcatatagtctagttgtattgggtcgataatttgaaatgtaaagagagggggtaagggaagcagccatgtatgaattccttagaaggaaagttggcg

SEQ ID NO: 61378 - DNA, 1780 bp, Homo sapiens
tctgttgtgttgccatttccccctagaggttctctgcatttttatgtatcattcagctatttttttagacttaagtaaataatactcagaaatgaatatgattcttataaccatcgttttcatgtgttctttggatgcttgcatatttactggggagagtgattgtgtgagaatcctatcagtaggatttaattaggacaaagtggaagataagtcaaacatgtcttgcctgcaaactttcacacatataagtgtgcctaataatgaagaaccattaattttaagagtatgtggcccatgggcaggggctgaactatagataaattgcagggattgattatacccattaggggagacagaaaacaccagggaacccaagttaggaaaagtctttctcctgaagatgtaattagagtggcagcttgctctttgggcaactcctgaggtgatttctagggggtgcaatgctataaatgctgctagggattttattcaaggtaggaagtcagggaaagggggttaacaagttttggtatcgaatggacatgtgagaacatgtgagagtgtgtgagagagtgaagtgagagagtatgagagagagggtgagggggagagagagagagaggaagagacttgatcatcatgttgtatttatggcattgccccgtcattcactgtctcgagaaaagtgaggggttttgggctgggcgtggtggctcacacctgtaatcccggcactttgggaggctgaggcaggtggattacctgaggtcaggagtttgagaccagcctggtcagtattgtgaaaccccgtctccagtaaaaataaaaaaaaataaatgctaggcatggtggcgggtgcttgtaatcccagctactcgggaggctgaggcaggagaatcacttgaacctgggaggcagaggctgcagtgagccgatattgtgccactacactccagcctgcatgacagagtgatactccatctcaaaaaaaaaaaaaaaaaaaaggtttttggagcccctttaatatatctttatgggggggagatagtaatattcactagaattcattcctttattcattcagcagatatttactgaatacctactgtatatgaggcactgttttaattattagaagcattttttttctgtacttgtacatttaaggtgctatgcaagtcatgtttctacttctagaagcttgtgcaagttatgcagattagtgtattatgaacttagaggcaaatgaaaaaaacttcaacaaatacagattaattttgcattatcacctagaggggtggatgctttcattggaagagtggctatgaggaagtcatgaaagatttatatgtgtatgatggaatttgagaccaactaattagacttgaaaataaccttagttctgcatagtatatttctatatgaaattctcttggtgcctggcagcagctgattctaagaagctgaggaggatactgttctatagtataactaaactctgcccctctttccagaaatccagccatttgtgttttgtaggttatgctgtagctcatcattttcatgtctctcccttaatagtttatatatatatatgtatgtgtatttatatgtatgtaaaacatatatatgttatttatatacataaatatataaaatatacatgcatcttccttttatcccactcttaatataggaggtattttctatatagtttacaaattctttctctatattatggaataactatgtataactatatagttgatcttttggc

SEQ ID NO: 61379 - DNA, 1039 bp, Homo sapiens
ttattgtggtaaagtatacataacataaaatataccattttaataattttgacgtgtatagttcattgacattaagtaccttcatgtagttgtgaaccattaccactatccacctccagaacatcttcattattctgtactgagtggctatttttaatgtttctaggtggaagggcatcccagcttttcctgcctgtgttttgtttccttgcatccagtttttctttgctgtttggtggtagtggacctacttctcctcttctcatttattcactcaacaaatatttgttgagcatcttttgtgtgcacagtatagcgtgaaacctagtggaaaactatagttatagtattcgaatataagactgtctcataccagccacactggcgttgcagtaatttttcaaaaaccaaaaagaaaaggcctccataaaatacttgaattatagtcaggcttaaaatgaaaaaatatttgagcagaagctccaagtcacatcacatatctggagaattagaagtttttttgtggttgtaaaaaacaaagatttttcgtacaggcgttttaactttaagtagaggcataaatgttatctgtgtctatgtaaatactacctcacttttcagttggataaatctgacttaaatgctctgattaagttgaatgtttgaattgtatctattagaacagtatcctaagcagcaagcccaagtctgttattttcaggccttcttctggttctagggtatgtaataagacttcagtgtttgaaatgtctgaagttgtctccaaacagagattacactagcccttatgtgtttggggattctgtgctaattgcataattgtaatgtttagcagccatctgaaatgtaaacttaatgccaaatttcttataattgcttccatggaaggtaacccagggttcagaaaaaaaataacttatttggacttctaatccctgccgactctgagatatcaagacatgtagttattatgtactgaattggggaggtgactaatttatgatctctatctagaagt

SEQ ID NO: 61380 - DNA, 1036 bp, Homo sapiens
ttacaggtgtgaaccaccacacctggctaattttttgtgtttttattagatacagggttttgctgtgttgcccaggctggtcttgaactcgtgagctcaagcaatcttcctgcctcagcctccaaaagtactgtattacaggtgtgagcccggccaaaatcagtttttaaaagaggtttacatggccgtatggtattctctttcttttttggaaacaatactatttgtaccatgttgtgttatcaatctatgtttggattgttagcatttaagaactacatttttcagtagattgctctaggttatagccactaacaattacttatacataaaaattttcttttgagtcattagccaatttggggggcctctcaggagaaactgcataattcactgggtgaatgcaagttcattgctcttggaggctgtgatagcataatcattgcttgctgtattcatggtcagtacaccttctgatttgtttttagtagtagttttgccatattcaaagaagagctcaatctgaggagactccttgatttgaccttactttggcatagctagcatattaccttaagttagtgtttgccatctattttgttccctgacattctctgttgacgttttatgccccgccccccgtgtccagctcccctcctcacaatccctgccccctgctgccatctttagcactggaaagttaagagttttgatctcagagttcatcaactcaagcttttgctttttatttgtaaaagaaccatgtgaagctgggctcagtggcatacacctgtagtcccaggtacttgggaggctgaggcaggaggattattcgaactcaggagtatgggtccagcctggataacgtaatgagacctccatcttgaaaaaggaaaaaaaaaaaaaagaaaagaaccatacgaaagtacataagtgtatgaaaaagctacttaacatttcaaaaagcagtaaatggcacattgtcaagtgagtggttttatcagtcagggtctcacaaggaaaacagaaaccattt

SEQ ID NO: 61381 - DNA, 1266 bp, Homo sapiens
attgttaaggtttagtcaggaagcaggcacagatagtgatagtataatgtcataaaactgttccccagtgtattaggtgttttttttttcctgcagtaataaattaaaataacaaatttattatcttgcatttctgtaggtcagaaatctgacagaggtcccactgggctaaaatcaacgtgtcttcagggatgtgttcctttctggacctgtgagagcagaatctgtttccttgccttttctggtttctggagactacccacatttccttggttcatgatttttttctccatcttcaaagctagtgttttctgttcctttcaggctgccatctctctggttctctggagctggaacaggttttctgattttaattgattaaataactgtgattagattgtgcccacctggataatcctgggtgcaaactttttcatttttacatcaaagtccttagccacatctgtaaagttccttttgccacgtaaggtaacatattcactaattttgaggattagggcatggacacattttggggtccttatttcacctaccatactaaggaaatatcaaagagtctggcacctaacccagtttaggagcccaggaaaagcttcgaggagcagatcagctgggtctcaaactgggtgaagcgggagtatgagtggctgctggctgggtgtcaaatgagtgagggaaaggcatttgagctaaggggagctacatgagtatatatagaggtgtgaaaaagaatgggttttaacattaatttttattttttaaagaatcacaaatcagtaaaaatgtagtatgaaatggtagcttggggatgagtagggatggagagaaaggtttgattatggtgggactttgcatactgtgctttacagcttcagtttatcctgtagacagtggcatgacattgaaggatttgaaactggcgagtgacttgattagatttcactttaggtagatcatattcagctgtctggagggggaataggctggcggtaaagagactgaaaaggcttttactatatagttcaggtatctttatatataattcagctgattaagtttttggcttaggtgactgagtcataccatcagagataggaaaatacagaaagaaagctatgagaggtgtaaggtaatattaatactctccccttcacactccccttccacacacacacacgcatgtgctcaaccaaagaatgaaccttgattaaagtcagcctaaatttctattttttttctctaaaa

SEQ ID NO: 61382 - DNA, 1040 bp, Homo sapiens
gaagatgctcaacatcattagtcattatagaaatgcaaatgaaaaccacaatgaaataccactttatacacactgcatggctataataatgcgacagaaaataacaagtgttagtgagggtatggggaaattggaaccctcattcattgctgttgggattgtaaaatggtacagctacttaggaaaatagtttgtctgcctctcaaaatgttgaacatgtatttcccatagaacctagcaattctacttgtaaatatgtatatacccaatagaaataaaagcacatatctacacaaaaacatgtacatatgttcatagcagcattagtcacaatagccaaaaagtgaaataaccctaatatctgtcatctgatgaatggataaacagaaggtggtatatccatacgatggaatattattcagcctagaaaggaatgaaataccgacacatactataacccagatgaaccttgaaaatatggtaaatgataagaagccagtcacaaaagaccacataatttgtttgaaatgtccagaataggcaaatccatagagaaaaagtagattagtggttgccagggcctgggtagaggataatggggagtgactactagtgggtatgaggtttctttttagggtggtgatatactggaattagatagtggtgatggttacataactgtataccaaaaaccacttaattgtacattttaaaagggtgaattttatggtatataaattatatctcaaaaggattttttaaaaaatagctgtggaaggacaaaatggaaaattaagtctgccagttattttaatgttctgaagtattctttggctaagtgtgtgtgtgtgtgtgtgtgtgtgtgtgtgtgtgtgtgttgggtgaatttggaagagaggaagagagataactgttgtcatcatttgttaaaacaaatttgccataatctcttaccatagcaggaacaccagggctacttgatttagatgaagtcactcagagcttctctcctgctgccctctcctaaccttcccatcatc

SEQ ID NO: 61383 - DNA, 1064 bp, Homo sapiens
tagttacattatatgtagagcctccagatactttaaaatagattatgttttacattccttcctatcctttcagaaccatcaccttcatgtccaaaacagtgtgatgctattcattttagaatattattgaggacatcacactggtggctctttgaagggatgtgttttggactcaggtgtggaactgccacatgccacttattcaactctttggcatctaggaggctttgcatatgccatgtgccacttattcaactctttggcatctaggaggctttgcatatgccatgtgaatcctctcttcctaggagagtttacttagtggagcagtgttgggatttctagcctggtttcttctgaggaaaaaaacatgtcaagttaaaccttccaggataaagagaggattttgttggggggagctgttgtatctgaagtgttaatatagagcaaatgcagtttattttctcaaaggaagggagagagatcatgccaagaaaaacgcatagagtggggtggagtggagttgggaaagaaaatgtgacaagtacctaaaatcaaatgcctataggaaggattttccccatgattagctccaaatgttggggagtggggaggatgttgcttgtttctttctttatttctttttaaaaaattgttttactttgttcttgactctttagtttcaaaagcagattaaggaaaagcttattaggaagtctagagccataggcactatagaaattaccagcccccaaaagtcaatacccagttactttacctttttggctgttccacgtaattaaccctgctgcttgatccaagtgaagccgggggaaagccgggcaccgttggatggtgtagctccttgcttaacccctcatgttgtactgcaaagatgaatgcccacttacctggatctctcaggggatgacattttccaaaagaagattttcttctgctccctcttgagaacaatataaagagtatgtaattcagagagattactttgaatttcactaaaagggaagtacaaaggctttgttttttcagatcctatcaaatta

SEQ ID NO: 61384 - DNA, 1052 bp, Homo sapiens
ctgcaattttcatcttggtttaatttgcaagaaaaacattattatgtacgtatagctacttgttttaatttagtgtcaattgtcaatgtcgtagtagaaatggatgaagaaaatccttttggaaaggagatttttatagaaatcaaaggagtattgcccagcaactcttaataggtgtttactgaatatatactatgggaatgtattgcacgctttagagattctaaagaataacatatccttgcctacaaggtgttgcttaccaatttgaggagatgaagattgtccgtagaatagggactgaacaagcactgtgtgaaaaaacggtattatgctgtgcaataaaatttcaagaataggataatacataaaggaacgatttgctgtggagatcatttcattatatgtgagattgatgtccagagatgtcatccagtttagttaatgtagttctggctagctgtttgtggaattctggctagtttgtttttttaatgtccttatcctgtttcttgtgttatacttgaacacatcaacatagagtgagaagttactgtttttgttacctaaaaatgagtcacatagtaaaaagagatgggttgagaatcagatatatttgatttcagatcctggctgtgctcattcttagctctgtgtgctctgtgtgcctcagttttctcattggaagaactggaatgtaagttactaatttacagatttgttgggattaaattattttgaagcatggctgggtgccatggctctttcctataaccccagcactttgggaggctgaggcgggcagatcacgtggaggtcaggagttcgagaccagactggtcaacatggcgaaaccccgtctctaccaaaaatacaaaaattagcagggcgtggtggcaggcgcctgtaatcccagctactcgggagattgaggcaggagaatcgcttgaacccagcaggtggaggttgcaatgagccgagattgtgccacttcactccaacctgggcaacagagcgagacaatgtctcaaaataaataaataagtaaaaat

SEQ ID NO: 61385 - DNA, 1020 bp, Homo sapiens
gtacctatgtaaatctccctgagtcttaataaaatattttaaaggttcattctggattttatatttgcccagagtgcatttcttcatttgagaatagcttgctttttggattgaatgaaaaaaatgtttatttttcaaacccagaaaatcctaggttatttatattttcttaaaattttccttgaaaatgagtttttaaaatttataccacctctcttccatttctatttaactatagacagctagaggaagaaaaatagtaccttcaaaattctgtcctaaaatctcctcattgagctcattaggtatatttcttattttccacattaccataggtgactatattgccaagtttttcaccactctagcttccaataaaattttcctcactttcctgtaagttttcatcatcaccttcctcaggcccaccctgcctccacctgccatcccttctcagtcagtgccacacatttttggtttttgatatggcatcatcccacttccagtaatattgactctgggttatcaagttaaaattgtttcatattcagtatgttttaagaaaaatgagtaaattttagaaacttttccattaaaactgctaaaaatttgaaatgtgtatatatgtatgatacggtgattttaaaaatcttacttttagagatgttgaaatattagtgtataacatgatataatttctgggacttatatcagcaatatattagtgggggaaatggagtgtgggtacagtttgatcgtggctcctgatgactgaaaatgttggtggcttctgatgaggcatctattatgtggtgtctgtttcttggcacaaaggaacagtgtagttaaaaatgccactctggggccgggcacagtggcttatgcctgtaatcccagcactttgggaggctgaggcaggtggatcacgagttcaagagttcaagaccagcctggacaacatagtgaaaccctgtctctactaagaatacaaaaattagccgggtgtggtggcgggcgcct

SEQ ID NO: 61386 - DNA, 1048 bp, Homo sapiens
aacacaacacacagtttgttcagggatcttaaggcaaaaagaccctccccccagtgccttccagttgcgatgtgtcttttccaagcacagcatgatggtgatgccaaacaaccacaaattgtccacatggtggccgagatagttgaaaccttttgctttctgatggttcagtgtatagactttgtttcctgcccacagttatttaaaatattgtataaagttatctttagcctatgtgtataaggtgtatatgaaacataaatgaattttgtgtttagatttgggtcccattcccaaagtatctcaatatgtgtgagagaatatttcaaaatccaaagaattttgaaatctgaaacacttttggtcccaaggattttagatagagaatactcaaccggtaatgcaaaacagatggaaaagcctgttggtcatgtatcaagatttatttactgaatgacttaatgagtccatatatcttccaaaaaccctgtctgtagattacagcctctgaattgttctttcaatttgaaaggctgagaatcactgataacaaaagcaaacatcctgtaacagaatactgaatacaagagagagctgtgccttcctaaagaaatttttgaattcatttgtgtttggatgatcttttttaaccttgccgtcatgcatttttaattgatataatttacacacaatgaagtacacaatctaaggtgttggattattttttaaatagtttcactgaggcctagcacggtggctcacacctttaatctcaacagtttgtgaggccagaagttcgagaccagcctgggcaacatagcaagaccctgtctctacaaaaaaattaaaaaattcgctgggcatggtggaacacacctgtagtcctaggtacttgagaggctgaggtggaaggccggaagtttgaggctacagtgagctatgattgattgcaccactgcaccccagcctgaacgatagagtgagaccctgtctcttaaaataaaaaagtttcactgaagtgagaaaccaaaaattttagtgtattttc

SEQ ID NO: 61387 - DNA, 1092 bp, Homo sapiens
aatgtgatgtaacgtccagagctgtaaacgactctgaagactgcagaaacctaaccctttaattatagaaggtaatgaaaaatcaggtaaaacttgggaaagaagtgtaagaggatctgttaatttaaataccagctctctcttttttttttttttttttttttttttgagatggagtcttgctctgttgcccaagctggagtgcagtggcacaatcttgtctcactgcaacttccgcctcctgggatcaagcgattctcctgcctcagcctcctgagtagctgggatcacaggcatgcaccaccacacctggctaatttttgtagttttagtagagacagggtttcactatgttggccaggctggtctcgaactcctggcctcaagtgatctgcccgcctcagcctcccaaattgctgggattacaggcgtgagcccctgcgcccagcaaataccatctctcttgatgtctgcactatggatagcatatttttgtgatttttttttttcctgactgtgaaacaacacgattgttgtaaacaatttgcaaactatacataaattataacctgcaggtctatttagtctatgttcttcaggtctatacatacatattttttaaacataatttaggttcttgctacacactgtgttttgtaactgacagtgtgatgtttcaacacctagacccaaagaattttaaaccttaaaaatcccctaatctaaccttctgaaattggaggaggtacttgaatccaagtggcaggggatggaaaagtaaaggcagttacacacatgttcaacaaatgagggtcaaatcaaatggaagagtgcaacaagggactttagtaatggtcaggtgaaactggtaatcctgatcctggtaaactggtaaaaacctaatttgtaagcatgccatggaagtcttttatagtatggcattctgcaactgcctttaatccaagtggtacaactgatttggcatggctgctggaacggatctccaaacaaatgttgttcctggcacaggcttcttctgagcaattctttcacactgctgacattggagttttttgtttttttttaatatat

SEQ ID NO: 61388 - DNA, 1024 bp, Homo sapiens
tgaagacataaaggtggtcagtaagcatatgaaaagatgctcaacatcattacttataagagaaatggaaatcaaagccacgatgagataccatttaacatccactaagataggtataatcaaaaagacagataggactgggtgaagtggctgccacctgtaatcccagcactttgagaggccaaggccggaggattgcttagagcccaggaggtcaaagctgcagtgagtcttgactgtgccaccatactcagcctgggcaacacagtgagaccctgtctcaaaaaaaaaaaatgacagtatcaagtgttggtaaggatatagagaaattggaaccctcactgtaaatgtaaatgtaatgtaaaatattgcagctactttatataaatactcgtatggcgattcctcacaatgttatcagagttcccatgggaccccacaattctactcctagatagctatccaagaagaaggaaaatatatgttcacacaaaaacttgtacataaatgtctatagcagcattattcataatagctaaaaagtggaaacaacccaaatggtcattgactgatgagtggataaacaaaatgtcatatatccatacaatggaatattatttggcaataaaaaggaattaagtaccaatatgtgctacaacatagataagccttgaaaacatcatgctaagtgaaagaaggcagtcacaaaaagaccacaaattgggccccgtgcatgcttagaaaatacagaagatggtagtgatgttagtaatggagttctttctttatatgcaaataagcatctgctggtctctcaactgtgtaaagttgtgacttagaattgcttgctaagagactggtccccatgtgatccctaaacagacaggagaggtcagctggagtcatagacagagtgggctgaggaccattctgggttgagtgttttcagttttgaattatatgtgaaaatcatcttaactctcttatttgatcttcccttttatactgcactaagacctttaat

SEQ ID NO: 61389 - DNA, 1104 bp, Homo sapiens
ttgtgaaatagttttattgttatcattgttgcattatttttaatttaacagatgaagaaacagagacttagaagtggaaattcaaggtagtgagttgtggaagtgggcccaagtcttcccactccagtgttttcccccactatccaatgtccagggtttaaagccacagaccttatttagtatattggtagattagaagtagtaaatgttgctgatatgatgcttcaacaactttactgtatcagggatatagaaaaaaactgatcccaagttgtggaagctgttataggtgtgtcttgcattagaccaactgaaatagtttacactgctaattggagtatccgtataagcactgaattttggagacaggtttggcaaagttgctgaaacatgggtactctggtcttagaaaagaaatttttggaacattattgaaaggggttcattttttataagcattccatgttgtgctaagggaaatgtaacagggagatacaagtggtcatatccaaacttaaggcagagtgaggctatttataataagattttagccatggacaaatatatagatacagtgttccatctaaagctgtttgatgtagttaatgtagtttagtttgaggtagctaataggtgtttgtttcttaatgaaattagatcccaagattttcttaaagggaactaggttaataaggaaataactttccctctctttctctttctctctccccctgccactccctcccttcctccccctcagcattccccttcctttagcctgatgtctaactggctgtgaatatttgggggctattgacaggttatttagatttgacaatcctcccaagtttctggaaggagtatactgttgagtttgctcttttgaactatgaaagatgaattaggtatagttgaataatttatgatcatagtaaggaatttaaaagtaaattttgacttgaatttaataattttctgaggacataaaatatcttttttatcattctaatttttattggcttaaatcttatgttttggagaaataaagttacagtgttttgtaacctgactctaaattgataacactagggattaagatcaaag

SEQ ID NO: 61390 - DNA, 1026 bp, Homo sapiens
tctatgatgctataaactggcgacaggatccaaacctttgttgtttttatggtagtggagggagatgtgtttacaactcttattgtcatttctcttacccggtattgtgcatttacagtttaggttgcttagtttaggggttgactgttagatatgtttcctctgtataaagtttagtttgatagagctctgatttcaaccttagaaacattaattcgtaagcataacaaccactgaaagagcatcctgcaaatttacaagggtgcctaaaactaaagaagcccagaaaatgaatcatgagaacactagaatccccaacatttagtcagtataatatttgcagtgttatcagaatcacctcccaaagctgttacgtgaatttatagacagtgtgctcatatttgccaaatcttctaaatttggaagaaaaatccattgtgattactcatttgtaatatggaaaggttaaaaaggggaaaatagaccaaaatcaaaataaggaaaatattagctggctctctgtttccagtctcttaaagacaaaaaactaaaaattagtaccaattaatgtataagttaaaaagcagcacttagcactgtgttgtggccagaaaggtagctgtgttgcccccagtcaagagtcagtatgtacccagataacagtactttctacgtggccaagagccagaggaccataatgccacctggctatgctacatattcctttccctccttaagctccttcaatgcagtgggtgggtatctctcttcctcttgacactgcttggtccattaaatagccaaatggtgactgtccacatctgtgccagcaccactcccaggttctgacttactccattaccactgcagggtgccatcattagatagtttgaataaaaagaatttcactgttaaaaaaaaaaaagtttacattgctgaatccactcagttttgctgaactatttcattcaaaaatttctagtatttatgatagtgtttgaaattgtcatatattcaatatccaca

SEQ ID NO: 61391 - DNA, 1051 bp, Homo sapiens
tgagctatgtgatccatttgatcttttataagccagttcccagaataaccttcaactaaagctaaagggcatgttcttaaaccttctttgaaaacattttaaatcacactaataatagacccccatgcaagaatggtaataatgtgactttaacttacattgaaatccaattatcatatgtttgtgggtctttttcattcagatgttacagtggtttatcaaaatgggttacctgtgatatctgtgaggctaccatcccggcgtgaacgctgtcagttcacactcaagcctatctctgactctgttggtgtatttttacgacaactgcaagaagaggatcggggaattgacagagttgctatctattcaccaggtatagtcaccatcattattaattaccatctatccctcatttcaccccacaccatttctagacacatacatacaccacacacgtagctacaaaagaaccctatactgttaacttcagaaaacttttttcttttgcttagcacttaccaggagagaaagggatttctctcccagtggtactcagagtataattgatcggttttagcaaatgtgtatgcacagggaatctcattcaaaagcagctcacatataatgccatgagcaaggatgaacaatcaatcacattttatattattgagactttttatcattactttcggtgtagaataaatacttccagtagttaaaccctcatctctggaaagaaaagtttgccaaaataaagaagtatataatttgaaaagaatataaactaaggcactaaaaattaccattttatgtatttaatttatttattttttaatctttttaagtttttttcccattgtgttttccccatttttactttaaaatttttcaaacctgcagaaaacttgaaaggtaagtacaataaatgcccatttacccttcacctggattcaccagttaacaattaccacatttctactcatctggcaatataattagtagaccagctggtggatgtataatactttgctaaccccagcgtctatctcta

SEQ ID NO: 61392 - DNA, 1042 bp, Homo sapiens
tactggttcgcaccccaggggtgggggaccactgctgtaggacattccttcttttcaatcctgcttttaagaattgggtttaggcctggtaaggtggctcacacctgtaatcccagcactttaggaagccgaggcaggaggattgcttaagaccaggagtttgggaccagcctgggcaacacagtagcaaccagcctgggcaacacatctttttaaaaaaaaagaaaaaaaaaaaagaaagaattgggtctaacatagaaaagttctgagtgaaaccctgttattaaattcctctataatctggtccccatctaccttttaaaatgttttctttccctcctacatgttgcctactttctctccactgtgtattccttcatggtttcctgaactatgccccgttcttttccatctcactgtttgcccactttcctctgcctaagatgtctttcttcctaacccctgttttctcaagtcaaaattgtcaatattgactcttccaataagcctttaatgatcatactctttctgtctctgacccctgaccaaccaaaaatgattaatctcttctctgaattttgcttcgtccttttctttgatgctgtgagggaaggcactgtgattttgtattccccattgattccttctatattgagtgaattaaatgtgttcgctgggtagcattttgattgtgcagaggccatattcactttctttaagctaaatgagagggagctagctgggagaaagtatagaaaagtatccttaaatagaatggaaagatattctttaaatacagttgattgttgaacaaagcaggtttgaaaaaacttgcaaacgaaccacataacctagaaatatccaaaaacattaagaaaagtatgtcatgaatgcatgaaatatatgtagatacaagtctatcttattttattttatttttgagacggagtctctctctgtcccccaggctggagtgcagcagtgcaatctcagctcactgcaacctctgcctcctgggttcaaattattctcctccctcagc

SEQ ID NO: 61393 - DNA, 1025 bp, Homo sapiens
gtctttccctcttacctgggttttacttttccccactgctaccacacatttttgtgaaaaatcttagataaattattacagaaataatcaaaaagcagagggaaaagtagaaacagacaactacaaagaaataaaatgaaaaaaaaaaaaaagtaaaagtaggcctaaaaatgtcaatgtgctagtgttaacaggatggagcaaacacaccatcttctcacttgctttttataaaactttctagagaaatgtccatgcctaaaatagttactgtaatcaactgaggaataatttatacaggaagaagagggttggaacattccttcagtttactcatttgaagaaccgtggctgtggataataataataaccatgcaagatagggctgggatttattttaatttttgtaaaacttacctgagcaattgcatccttgagttgattgtatttctctaggtcaaaacgtgactttttggctcctttatggaaaaatagtaagtattgtctgtctctggcttctggataaacatattcctaaaaaaatgaagaaacggaattatcagtccttagcatactatcttcacaaaatatttactaactgctgcttagattcaatacatatgtatgcgtgtgtgctgacatgtgctgtgttaagtatttaatcaccacctgaacatttctactgtgaaacatacagaacagtacacacaaaatgtacatcacagtgaatcatcacacaatgaacatgctactcatcaccaggttttataaaaatagaactctgccaacaatccagaaactccctcttgccccttcccaattactcatatctctttcccccaaagtaatcactctcttgacttttatggtaattgttttcttattttctttataacttacctccttaagcatgtattcctaagttccacaacttagttttacctgttttatgaattttatgaagatggagtcatacagtatatatttatatggctaccttcactcagtattaggtttgtgaaatt

SEQ ID NO: 61394 - DNA, 1921 bp, Homo sapiens
acttgatgagcatacaatagcaatggttgataagagagttgttcctttagagtgcaaagtttgtgttcattattgtctttgtattttggaggctgtactttgaaaacaatacataaagcaatattctactcttacctgtacctgtatcttaggtccatttgtgtctcatttcaagcctcacattgaacattggaaactgtaagaaatgcacatagactggcaaatatacatgtgtatacatacatgtatgtacatacacgcacacaagtgtgtacacatatgtatataggtatataaaatctgtgttttcagcatttagccaagtttttaagtagcatctgcctttatccggttttggtgttgaacttttatcccatgatgaaactttgttatagacctagcttttagaaactaattaaatactgattagattaagggggaaaattaatatattacttttctctcacagtatccaataaatggctccatgaacgtggacaagaatttcgaagaccttgtacgttgtcagaattggaatgacaaacaggcttccctttttctcctattgttgtactcttatgtgtctgatatacacatttcctagtcttaactttcaggagtttacaattgactaacactccatgattgattcagtcatgaacctcatcccatgtttcatctgtggacaattgcttactttgtgggttcttttaaaagtaacacgaaatcatcatattgcataaaaccttaaagttctgttggtatcacagaagacaaggcagagtttaaagtgaggaattttatatttaaagaactttttggttggataaaaacataatttgagcatccagttttagtatttcactacatctcagttggtgggtgttaagctagaatgggctgtgtgataggaaacaaatgccttacagatgtgcctaggtgttctgtttacctagtgtcttactctgttttctggatctgaagactagtaataaactaggacactaactgggttccatgtgattgccctttcatatgatcttctaagttgatttttttcctcccaagtcttttttaaagaaagtatactgtattttaccaaccccctctcttttcttttagctcctctgtggtgaattaaacgtacttgagttaaaatatttcgattttttttttttttttaatggaaagtcctgcataacaacactgggccttcttaactaaaatgctcaccacttagcctgtttttttatcccttttttaaaatgacagatgattttgttcaggaattttgctgtttttcttagtgctaataccttgcctcttattcctgctacagcagggtggtaatattggcattctgattaaatactgtgccttaggagactggaagtttaaaaatgtacaagtcctttcagtgatgagggaattgattttttttaaaagtctttttcttagaaagccaaaatgtttgtttttttaagattctgaaatgtgttgtgacaacaatgacctatttatgatcttaaatcttttttaaaaaaatgtttgttttctgtgtggtgtttttcgtatttaaatccgaatgtatgatgtggcagtaacaggttaacttatgtaatttctttagtacatagggcttaggtttatactcttggtttccactcacactaatgtcacatggttaagaaaaacttaggctctctgaagtttcagatatttcatgaatcaagatgtgcttccttcaaagagagctctaaaatactttactgtggttatgaagttattatgggccaggcatggtggctcacgccttcaatcccagcactttgggaggccgaggcaggcggatcacctgaggctaggagttcgagaccagcctggccaacatggtgaaaccccatccctactaaaattacca

SEQ ID NO: 61395 - DNA, 1005 bp, Homo sapiens
aggctgcagtgtgctctgattgcatcactgcactccagcctgtctctggtggggggtggggaggggtacatatgtagatatagatctatatatatagatatctatatatgtagatctgtatagagatatagatatctatatatacatctgtagatatagatatctatatatacatctgtagatatagatatctatatatacatctgtagatatagatatctatatatacatctgtagatatagatatctatatatacatctgtagatatagatatctatatatacatctgtagatatagatctgtacatagatatatagtagctgtcctttgtttttcatccctgttttcataggaactcttgttgattttaaatatttttcatttctctgtaaatacctgaccatgatctataaaagtccaaaaaatgaggttcatagattttttttgaatagtaatctttatagttcttttctttcatgctttgtgtctttccttcaggtagcaaattatggagttggaggacagtatgaaccccattttgactttgcacgggtaagtgaaaaagaaatggagaaattcactgaggcttatgcattacattgtttgtctcaaaacaaaacaaaaaaacagtctcactctgtcacccaggctggagtgcagtagcacgatcttggctcactgcaacctctgcctcctgggttggagcaattctcctacctcagcctcccgagtagctgggatcacaggcatgcgccaccatgcccagctaatttttgtatttttagtagcgacagggtttcgccattttggccaggctggtcttgaacttctgacctcaggtgatccacccacctcagcctcccagagtgctgggattacaggcgtgagccactgtgcccggccgcattacattgttaaagaaaaagttattcttgacacttgttaaagatggtaaggcagacttcattcaaggggggaccattgcgataggtatagggaccac

SEQ ID NO: 61396 - DNA, 1064 bp, Homo sapiens
taacttttcaaaacttaagcagtaagcagaatttttttcttataaaatattagcattatgtagctcagactaaagaccccatgacttccaccatagtcagttcctataccttacctggaaagaacgttgttttgtttggtatggttttttaaagaattttttgaagttctcaatgtaggtggctttcaatatagcctccttacattaatccaactgttttcatataagcattataataaatttgattagttttttccttcccaacctctaacagtagaatgtgacatttaaaaaaaattacaatatccattaataaagatgatactaagcaagaaaatgaactaaatgccttcagtaaaggtttattgtcctatatattaaatattatggctttaaaaataacagctattagtctccatgtaatgaaacattatcaataaaactaatattcctcttattcttagtgcctggctctctggctatgaaaatcctgtggtgtctcgaattaatatgagaatacaagatctaacaggactagatgtttccacagcagaggaattacaggtaggtaatcacattatccttaagtcatttttacacttcaggagatgcttgagaggagatttcctgacactgaacaggcagtcctcaatttgcatgatagtttgggaccttaaaaagtgaccctgtaagctgcaaccatgcaaagtgattttaataatgggaaaaattgtgattgttctgtgacttttaaatttcttgtcaaaacatgaaaactcttatctagggaaatgaaaaatatagatcactaatacttactaagtacactgtaattttttttctatcccccaggcctcactttgcctgtcaagtggccagggtgggttttaaaaaatagtgggtttttttcctttttatttatttatttttaagcaaacagttttcctttatttgtaatagtgaaacataggacttttttcatcacttctctttttctgttacttttatgtctataaatcatttgtcatcaaaagtagctgtcccaaaataattcttcttcactc

SEQ ID NO: 61397 - DNA, 1036 bp, Homo sapiens
acttattttttctttttcagagctatccattttttattttgcccttaaaaaaattcctttttttttttttttttttttgccacaagcatttaactgtgaggtatttaggaaaacctagttttttttttcttctagaaactttttgtctctgggtgctttccagttactttgtgccatttagagcaatgccaggcattcatttaatattttcataaacatggcttttttttcatatttaaacatttgaactttattttgatgagtgaagggttaaaagagatacactacctttctccttatttaagacctcgcctctctcacccagaaaataatcattaatactgtatttaaaattctgaacatcctgtttgaggcaaaatatttgcagagtactgcttcttttgtatgtttttccagagatactctgtatatgcaagcatgattattgtctcttatctgcataggaatagatattaaaagtattattactgtaatatattcatcatattcttaactttatgtttagacccctcggagacagaaaaaactcttttgccgctaccatgatggaaaccgtaatcctaaatttattctggctccagctaaacaggaggatgaatgggacaagcctcgtattattcgcttccatgatattatttctgatgcagaaattgaaatcgtcaaagacctagcaaaaccaagggtaaataatgttttctttctttctcctcaatttactgtacctttgtatcaatttttctttgtaaaaaaataggataattgatatacgaataatgccacagattttttaaagatattttgcctcagcataatggagttactaatgatgctgtgtttatgccagtttttccatttgttatcaacacaagtaatgtacccttaactgggttttaagcactgaattatgaaaattattgtgagatttttattcaccattaacaaatttgtgtttcactgtcttcctgataaacttttctctgtattttggagtcttttaatctcagaggctactcaa

SEQ ID NO: 61398 - DNA, 1181 bp, Homo sapiens
ttctcaaagtaaaagcaccagttgccacctttaaataaatagctgtttctgtctccagaactgtcttttttgagacagggtttcactccttttgcccaggctggagtgcaatggcatgatctcggctcactgcaacccccgcctcccgggttcaagtgattctcctgcctcagcctcctgagtagctgggattgcaagcacccaccaccacgcccagctaattttgtatttttagtagagacgaggtttcactatgttggtcaggctggtctcgaactcctgacctgaggtgatccacccacctcagtctcccaaaatgctgggattacaggtgtgagccaccaggcctggcccagaactgtttttatataggtgactatatgtcctgatttacttgggggcagtagtaacttatacctattattttggtataataatttttattagtgcctcctttcactcacaacagcaacctggtttggaagataaattataatgtctcctatttttatattactatattctgatgcttgaacaagcatgaacttacccatggacatgctttgtttctcttctaatagatcctgaacatcagagagctaatggtaacttaaaatattttgagtatataatggctaaagaaaaagatgtcaataagtctgcttcagatgaccaatctgatcagaaaactacaccaaagaaaaaaggggttgctgtggattacctgccagagagacagaagtacgaaatgctgtgccgtggggagggtatcaaaatggtaaagtggaaaagccaattgtgtgtatgtgaatgtgtgtgtgtatgtgtttgtacacagttctggagagaatcagttattttatatttaagcctatgtgataaaaatcagaatgactgcataaaatattacagtatgtcagcttaggcaacatagaccccattacaaaaaaatttaaaaattagctgggcatgctggtgtacacttgtagtcttagctactcaggagtctgaggtgggaggatcacttgaaccaggagttcaggggcacagtgagttatgattacaccactgcactccagcctgggctacagaataagaccctgtctctaaaaaacttttttttttttttttgagatggagtctcaccctgccacccaggctagagtgcagtggcatgatct

SEQ ID NO: 61399 - DNA, 1057 bp, Homo sapiens
aatggtttttaattccttgtgagatttaaggacaatgaaagatgacaaaaaaactttagtgacaatatattttagcaatggcaaaataacctcttttctgacaaatctaaactctcttatcagagttaaaagtttagacaacatttgtgattagccttctgttaacagtgaaaacatttgtattttctgcaaatagcatttatccatgaagaaaattagaatagaagtatgtttaaacagaaaattctagactcttcttcagacagctcaggcttttcaaaaagccttgtgctttggcaggagcccaggagaggaagtgtctacatctgctacattctagaagccttccccaaatcactgtaaggtagccaaaagagcagtgtatttccttactgtgtggttctggaagtaactggaagtttgcagcaaactcgagggaggagactagggagtacttccagtttttgtggtgatctgtttttattgagattcaagttagggggcagtggggttattttttagctcttgtagaacggggagctttcaatttgaacctgagccttttggtttagctcacgtcacataggaagacgagtcagaggggcctgcacaaagagaaacaggttgacaagtcagggtaactaatgggagcctgttactggggcaaactatactgtaatgtaacttattctcctgtaaggtaataagaaagacaaagttcatgtttgtaggggagaaggagcaagagaagagtgctagcagggcatctgggaaagtgaggtaaagcctttctgttggttagtttatatcctcatctgccatgaagaatcctcactagaaaagacggtgctatcatggatatagaggaaaaacactaatgggctttgctgccaggtttaaaaaaagaaaagaggccatagacatgtcttaggctaagtttttttttacatagaacacagttgataagagaaacaaaactgaagtctgggtcctttgagagaaaatactagtttaaatggacatggctgtttattcgttttggattctctacaactta

SEQ ID NO: 61400 - DNA, 1018 bp, Homo sapiens
actggaaagttatttgaatgtttaagatcctgtttatttacttatgttattttgttttaatccactgtggcccaaggcatagtctcaaaaggtcttgagaacatgtgccctctcttttttaaaatccatttaagctgtagtttttttaaactacttttgaaaaaaaatgtatttaagaagtagtagtgtacaatcgcattctaatttgagcatattatatgactttttattttaaatcctgatagataacgtagaataagtaatataatgaagcttatgttttggaaaattaagtctatgatcctttatcctaccagagttaggaaaacaattaacattcttatttatttcaaatctcacacaccaaaaaaagaaaaactatgataaaatatggttttagctatctgacatactagactcagaaagagaaagaggttaaaaacacacataccacttggttcctagtggtgaaacttttgctgatgcaggtgtgtgctagttcctggtccatctgggccatgtatgacttgagattatcaagtgttcctttcagggaagcctcttcgccaggttcgtgtgtttcaaagtccaagtcatcatcactatctaaacattcaaagtcttcatcatccagatcatcagaatctgactcattaggccttggccctacacagatcccaagaaagaaagagccacttagtaattattattattattattattattattattatttagttactacacatctcaaaataattagaatgttacccacagaaaaagactaatacacacagtcagtctacttcacaaaaatcccttctacaaatggtaatgctggcagatatgtgtgcatttaatgttgtggaaaagcgtacaagctgaatcaaaagatttagcttaaaaaaaagtgaattcaattaattaaaatatttttcttaaaaaatttttaaaaatacctaataaatgaatacattttgatgtaaacattcaagccatacaagtattgtctccaatc

SEQ ID NO: 61401 - DNA, 1126 bp, Homo sapiens
ctcatgatccgcccatctcagcctaccaaagtgctgggattacaggcgtgagccaccgtgcccggcctcattaaatatttgagagtgactgaatgctgtgtgtttaaatagggttttaccttggctcccatattatattgttcttttttggaattactgtacttacaaatcagtaataaaaagataactcaaaaaataattataatatgtatatatgtacagaactgcagagagaaagattgggatacccggaaactgctaaaagatgcttacctctggggagagagtgagattggagacaatacttgtatggcttgaatgtttacatcaaaatgtattcatttattaggtatttttaaaaattttttaagaaaaatattttaattaattgaattcacttttttttaagctaaatcttttgattcagcttgtacgcttttccacaacattaaatgcacacatatctgccagcattaccatttgtagaagggatttttgtgaagtagactgactgtgtgtattagtctttttctgtgggtaacattctaattattttgagatgtgtagtaactaaataataataataataataataataataataattactaagtggctctttctttcttgggatctgtgtagggccaaggcctaatgagtcagattctgatgatctggatgatgaagactttgaatgtttagatagtgatgatgacttggactttgaaacacacgaacctggcgaagaggcttccctgaaaggaacacttgataatctcaagtcatacatggcccagatggaccaggaactagcacacacctgcatcagcaaaagtttcaccactaggaaccaagtggtatgtgtgtttttaacctctttctctttctgagtctagtatgtcagatagctaaaaccatattttatcatagtttttctttttttggtgtgtgagatttgaaataaataagaatgttaattgttttcctaactctggtaggataaaggatcatagacttaattttccaaaacataagcttcattatattacttattctacgttatctatcaggatttaaaataaaaagtcatataatatgctcaaattagaatgcgattgtacactac

SEQ ID NO: 61402 - DNA, 1047 bp, Homo sapiens
atagtaatggtgggattttgccattttttattctacttggcaaactttctgtactttgttttgtgaattactagttaatcagctatatctttaatttaattttttttttcatagaggcagggtctcaccatgttgcccaggctggtcctgaactcctgagctcaagcagtctgcccatctcatcctcccaaagtgttgggattataggcgtgagccatcgcacccagccaattatatcttaataagtaattaagtaaaagaaaatggtggaaaactttccaaactggaaataggcccttaatggtggaaaagattaggaatcactacatctagccgcgtcccctcatttgaagaaactggagctcaaacaggcccattaatgataaaacagggcctaggacttggggcacgtgattcctgagtagtagattatttgctgcctccctgaaagttgctggtgaacacatttttttcatgacaacttgtgagtaatgttctgatagacctttttttttttttaagggactgatagaaggttctgctcagtaccgggaaaggctagaaatggcagagaattacttccagctctcagtagactggccagaaaggtgagttattgttaagactcctactacaaagattggtatttaggtagttctttttattttttatttattatttattattcttatttatttatttttttgagacggagtctcactctgtcacccaggctggcaacctccgcctcctgggctcaagcgatcacaccactgcactccagcctggatgacagagtgagactctgcctcaaaaaagaaaaaaaaaacaacgaaagaaattttgcatcctcctctatgtaattttactcatcatgatatcacattttccatggcattatgaagtctttataaacataatttttaaaagctgcacaatatggccaggcgcggtggctcacgcctgtaatcccagcactttgggaggccgaggcaggcggatcacgaggtcaaaagatcaagaccatcctggtcaacatggtgaaac

SEQ ID NO: 61403 - DNA, 1025 bp, Homo sapiens
tcctctctttactatgtctgagatcatgttcaatatatgtataatttctgttggacaagaaaccttttgtaaccctgttcataatcaaacaaaaaataaatgtaaatttctggttttgtaatcagcaggaaaaggaatctctttgaagagaacaggaatctttattgtatattattttctttccttttatgtttttagtaatctataatgattgagaaacttgggaataagtttatatttttcataaaattcaaaaagtgttataattgtccaaatgcccatgtatccagtcatctagttctagagtgtggctcaatggaaaaaaagtaatgtgttataataagatacgggaaaaaaggaacttagtaacaaaaattctacctatctcatctaggctcatggatttgagatcttatgctccaaatgtagcccacatttttctgactgcaagaaatcccttgtgactgcctcaccactctgggccagtttccttgaaagtctgaaaaagaatgattactttaaggtaggacttgcaatatatttgcttttaagtattcaatccagggaaaatcaagccagcgacttaaagtcctatagtccatatttaaatgtatgacataattatggaagctagacttaaaggagacctttctagttcagtggtactcaggtgctaatgaaggaggtatctatgaactgtttccagtattagagaaaaactaacactgttggtattaaatgatgaaagtgattatctgtaccagataaaacaacttgcaaaaacttgataatgcaaacatgaaaacaccagataggaaaattagcaaagatgtggattttaaaaattattaaaagatacctagtaaatttctcttaaaatattcaacttcacaagtagtaaagatatatatatatatatatgaacacagtaatgaagaatgtctttcatgtatgtacaaaaggatatgaatgatattctgtgctgtcgagagtatggtaaaaataacactcctataccttgctgg

SEQ ID NO: 61404 - DNA, 2299 bp, Homo sapiens
cttgtgataccatcacaagatataccccccatgtatacatcacaagtatacatcactgtgatactctcagtttagtgcgtatctgttatcttttggcaacaattgctacatatcttactgttaattttattgaactcttattcattgaaatacatatgatatttattggcaagaacactgtcacattggtgtagcacatctaaaaccaaccctttatccatcctctagaaaaccatttttactgttttcttatcttgtttaatggcattgccatccacccagttatccaagctagtcagtaattcaaaatcataatcagttcctcacttcaccatgttcagtcagatgctaaatcctgaatgcttctaaaatatgaccccttctctacatctatttggcttcagtgtagaccctctttatctctacatctggaaaacaacaacagcctcctaacttacctctctggttcctgtctttctagttcctaacactgttgctggttatgtttgtaaaacacaaatttgattgtgtcactctcctgcttaatatccttcagtagttcccattgcttcaagatgaaatttaaatcaaagtctaatatagacaaaaatagttactttaattggagttctctagttgaagaaacttgagatctggggtggggagaagaagagttggttgggctgttcttctacctattgtttgccatggcagctcttgagacactctgtaatgcacttgtttgaccttcattctgttaatgtgggatattaactgtacattgattttcgtgtgttgaaccatccttgcatcccaggaataaatctcgcttggtcgtggtgaataatctatttaatgtgttgttgaattcagattgctgatattttgttaaggatttctgcattgatactcatcagggatattgatctacagctttctcatattgtctttgtctggctttggtattagggtaatgctggcctcagaaggaatttgggaattccctcccttttatttttttggaagattttgaggaggattggtgtcaaattctttaaatgtttggaagaattccccggtgaagccagcttttctttgttaggagcttttggattattgattcaatctccttactagttatagatctgttcagatttttgtatttctcatgatccagtcttgacaggttgtgtttctaggaatttgtcaatttcttataggttatccaacttactggtataccattgttcatagaattctcttatccttcttatttctatgacataagttgtactgtcccctctttcatttccgattttagttatttgagtatttgctcttattcctggttaatcaagttaatagtttgtcaatcttttaaaaaaaacccaactcagctgttttgtttttctattattttttctggtctctatatttctctctgctgtaatgtttattatttccttccttatgctaggtttgggtttagtttttgttttttttttttgaggtataggttgttgatttgagatctttcacaactacaaacttcctttttagcactgctttcactgaattccttaagttttggtatgatgtgcattcattttcatttgtcccaagatattttctaatttccctgtgatttattccaagagtgtgttgttgtttagtttccatgtgtttgtgaatagtgcacatgtttgaaaacttctgctccatccaaatctagcgtcctggtattcccagaatactctatacatacatactctatacatcatgcctctgtgcctttgcacatacttttccatttttctggaaagctcacctcttgtcattcctccaggcaagcatagcacagatatcccctcctttatactcacatagccgttactgcacactcctgttctagagttcattatcttgttttgagatcatttggttgtcttgttttaccctgagctcctcaggagtaggcttcttcttcaggattgcaacccctgctccccagtacttagagcaatcagtcaatgaatgtgtattcagttgaatgattatgtgcattttatttgcagtaacaaatttatctggttacatggttgcttttctcttgtttttaggaggtgttcctgctcatatgtttggcgtgacaaagtttggggataacattgaggatgaatggtttattgtttatgtaataaagcagatcacaaaggaatttccagagttagtagcaaggtattgtagttattttaattattctaaaggaattctattactgaaacaaagtgactacatt

SEQ ID NO: 61405 - DNA, 1435 bp, Homo sapiens
aaacaaaaaagaaaagaaaaaggtataaacagtttgtttaaaaccttatggttggcacagattttataattaataatgtctatttatatctattctaactatattctaacagtagacctatcacatagatatgatttatcttctttactggataggtgagaatcagagtagttaatgatttgtctcaagtaaagctaaaaccaaaaccttattcatctgattctcaatccagtcttctcttcactattccttgctacctttctgtgacattaacctgttaaactattcctctaagcctttaaaagttccagatttgatagtcacagcagcatatttgaaaataagtgagaatttctttttaggctgtgcagctgtggttaggtctagtagttagtattgtgtcacatgattctggatgcattttttttttcccattgcatttttttcccattgtatttcctgctgagccatgttcactcacgtatcactcatgtgcacacagccctagggccagctaaatataagccaggcttctatacataataccactgagctagaactggaagcagattcttttggttttccaaagattgcctccttccctttcacttctcctgtgtcaaattacttctattttctatttattacttctatttggcctttgtcaaattaattctattttccatttttcctcaaatcaaagtgaattttcaggtaatacacagacaattttagaaaggcagccttcccttcagcatcatgaagtctttccttcttgcttctgttacagagaagagggatttcatgggaagaaatcagaagcagctacagagaaacagaaattagggtatcctcccattgctccattttactgcatgaaagaagatgtccttgcttatgtgtttgacagtgtatggtgcaaggttgtgagctgtatggagcagttgacacgtagtcactgggaaggatttgcctctggtaaggatctttgtgaaaataatgtaaaaatcaattgtttatgatttctaaaccctaaccagtctattagatgatatgcttcttagtgcaaaaggtgcgtatgggccaggcacagtggcttatgcctataatccaaacactttgggaggccaaggggaaggatctcttgagcccaggagtttgagaccagcctgggcaatgtagtgagatcccatctctctaaaaaaattaaaaattagccaggcatggtggcattcacctatagttccagctacgcaagagactgaggtgggagcatcacttgagcccaggaggtcaagtctgcagtgagctatgactgcaccactgcactctagcctgggcataagatgagagactctgtctcaaaaaagaagaaaaaaaaaagtgggtatgagagagaggaaaaacccaaatgtttttccctaaatgttttttc

SEQ ID NO: 61406 - DNA, 1049 bp, Homo sapiens
gatgctagttgcaagctccaagttgtgacctgtacttctgacctaccagaagtctaccagagagactaggtctctctgaacctagtcctttaggatttttatggaggtttcattttgtaggcatgattcaattgttggccatcgctgattaactcgaccttcagcccctgtcttctccctagaggttaaggggtggggctgaaaaagtgaaaaagttccaaccttctaattacatggttggttcccctgccaaccactatctccctacccaatcctcagactatccaagagcccctaaccaccggtcatatcattagcatacaaaaaaaaacaccactttgggtattataagagttttaggagctatgtgcctcaaccaggggcagagaccaaatatctgtttattatcatctcatgatatgatatggaatgacccatatatttagtctctgcccctgatttcagatcatagtgggtctgacttatgtttgtatttcccacaaaaactaacaggtatttagtaaatatttgagaatgagtagatcgataaaaaggcctagtctgtgatgattagacagagcttgtactttctctttgaatataatgatttatgaagaaaaatcatgtgcaagtagcacttttttaaactgctttattaaagcataatagatatataataaactgcactattttttcttttcattttattttttatttttatgtatttgaagggtccaagtgcgggtttcttatgtgcatgtatttcttagtggtgaaatctgggtttttagtgacctcaggtggtacactaaaatattcactcaaatagtgaatattgtgctcaataggtaatttttcaaaccttgcctccctcccaccttcccacctttcggagtctccagtgtttcttattacactctgtatgtccatgtgaacccattgtttagctttcacttataagtgagaacatgtggtatttgactttctgtttctgagttatttcgctaggataatggcctccagttccatctatgttgctgcaaaagaca

SEQ ID NO: 61407 - DNA, 1070 bp, Homo sapiens
ggcaaatttttgggaagcactttggagtaggtgtccttcaggcttgccttcactggtgactaaaaaagtgactgtgatggcaggtggataatggacttgctttgccaaatgtccattctagtaaattatgtttatgattgaaataatgtcccacttttaagaacagattctcatgcctgagctagagtaccatctggaaactagtgttacttattgaaaggtttttatttttgctttatttccccctaaatgtagtttctagtctaaggctttttaccccgttagtcttgtcttccttgacatactgatctttacttcattgtgggtttctgatttggctactagagatcttgatgacaagctacttatgaggcctgggtccagtaccatcctttcaactcgaaattggccaaatcgagctgtggagtttagtacatcatctctgtcatacacagtgcagtccaccaggagacgcaatccaccaccacgaactcttcatccgatcagcacgagccattcatgtgctgaaacaccaagatctgtggaagaaatcctcagaggagcccgagtgtaggtttcaaaagcagaacttctggaaaccgtggtaaaactaacacattttacatacagaattaatttaaatataagactgaaatctatgcctagaaactaatcattaagtagtcttatgacagattgcccatgggtttagatccaacacaaaattttttaatgtggttaaattttattttattttatttttttagatacagtctcactcctgtcgcccaggctggagtgcagtggatgatcatggctcactgcagcctcaacttctgggctcaagtggttctcccaccccagcctctcaagtagccgggaccacaggcgggtggtgccaccatgccaggttaactttttgtgtttttagtagagacaggggtcttgtcatgttgcccaggctggtttcaaattcctgagctcaagcaatctgcctgcctcagtctcctaaagtgctgagattacaggtgtgaaccaccgcacccagcaggggttaaataattttaatg

SEQ ID NO: 61408 - DNA, 1019 bp, Homo sapiens
caaaaggatcggcaaaaggaaatggacaattttctggctcagatggaagcaaagtactgcaaatcttccaaaggaggagggaaaaaatctgctctcaagaaagaaaagaaataatggaatttttctcttcaaaggtccttaggtgtaaattgatgccatcgtaggcaaggtgcaggcaggatttgaaggcaaaagtcaattcagctcttgagaaaaggtgtctttccagcctgaatttttcagattgactagaccaagcagaatctctcaacctgatcttagtatttcctagaaagcacttgacattgtgtgaggtctcacctgaaggaacttggtggtgacatttgggagggtggagggaggcagtgtccttcctgacagcacttgcctccatggatcttctgtacacagaactcttatctaggatgtggttctgttcatgctgctttctgcgatgtgcgtgtctgttagaataggctctctacccagctagaacaccttccagacacttgctggacagctatcttccacatacttcccagtttacatttggtcttaatgatcttgaatagatcctctcttcattttactcagccaggttttgtactgatgtacaggtgttaaattacttcaagcatttttgtaagaggtgtatataattcaataaaaaaggtaaaacatgatgattaagttctgggggctttgtaaatgatcccactaaaatgtgacctaggaaaaatatgaatggtgtttaggatgagagaaaaggggaaaacaatagccctggtcagctttataatagagagcctggtttccctagcatgaagagatgtatgttgtagtcctgccactgattactgaagtcctgccattaattgctgaatgtcttcagttgggccactgagcttgtctgaatctgttcccttttataaaagagttactacatcaaaacaaagagtgaaatccaaatttgtcaaactgtatgtattaaacatgtccagttttttggttaaaaaaaa

SEQ ID NO: 61409 - DNA, 1090 bp, Homo sapiens
cgtaaagcgcggatgcgcggcgtggccacgccccttcagtgcttgtgacgcaggcgccctgggctttttgggcgcgaaaaagaagcagtcctgggttgtacccggcgcagctgggagcggctgcttcctccggggtcgtatctccgcccggcatggggctgctggacctttgcgaggaagtgttcggcaccgccgacctttaccgggtgctgggcgtgcgacgcgaggcctccgacggcgaggtccgacgaggctaccacaaggtgtccctgcaggtacacccggaccgggtgggtgagggcgacaaggaggacgccacccgccgcttccaggtatgcagggtcccgccccgaagccgaccggctgcgcgggcctccccctagccttttggctaccgggccccgccccgggggagcgcgctgagctccgcttggcgccttctgatctttatttctcgcgccgccgtttcggtgggaggagcaggggtgatttacggatactctttgccctcagatcctgggaaaagtctattccgttctcagtgacagagaacagagagcagtgtacgatgagcagggaacagtggacgaggactctcctgtgctcacccaagaccgagactgggaggcgtattggcggctactctttaaaaaggtaaaggactctggaggtttctttgtgactgttaccatcattcaatcaacaaacctttattgactgcctctaagatcttgtattttgtgttaattttgtaggaattaggaattttgagtttggccttgaaatacagatacacgcacgcttactgaaacgggctttaaatttcctgttaatgtgattgttgcactgaaaagggccgatttattttttttgccggatgcgctttattttacatatccaaatgtaagtcctgattccggatcacctctcactcttggaaatttcacttaaatttcccttccctggtccctagttagcagttaatgaagattggatttaaaaaggaggactccggagaagcttaggcatagaaaatctggttcaataatttcaactcaagcaactgttgtattgcagcaattcaacaccc

SEQ ID NO: 61410 - DNA, 1072 bp, Homo sapiens
attttctatgcctaagcttctccggagtcctcctttttaaatccaatcttcattaactgctaactagggaccagggaagggaaatttaagtgaaatttccaagagtgagaggtgatccggaatcaggacttacatttggatatgtaaaataaagcgcatccggcaaaaaaaataaatcggcccttttcagtgcaacaatcacattaacaggaaatttaaagcccgtttcagtaagcgtgcgtgtatctgtatttcaaggccaaactcaaaattcctaattcctacaaaattaacacaaaatacaagatcttagaggcagtcaataaaggtttgttgattgaatgatggtaacagtcacaaagaaacctccagagtcctttacctttttaaagagtagccgccaatacgcctcccagtctcggtcttgggtgagcacaggagagtcctcgtccactgttccctgctcatcgtacactgctctctgttctctgtcactgagaacggaatagacttttcccaggatctgagggcaaagagtatccgtaaatcacccctgctcctcccaccgaaacggcggcgcgagaaataaagatcagaaggcgccaagcggagctcagcgcgctcccccggggcggggcccggtagccaaaaggctagggggaggcccgcgcagccggtcggcttcggggcgggaccctgcatacctggaagcggcgggtggcgtcctccttgtcgccctcacccacccggtccgggtgtacctgcagggacaccttgtggtagcctcgtcggacctcgccgtcggaggcctcgcgtcgcacgcccagcacccggtaaaggtcggcggtgccgaacacttcctcgcaaaggtccagcagccccatgccgggcggagatacgaccccggaggaagcagccgctcccagctgcgccgggtacaacccaggactgcttctttttcgcgcccaaaaagcccagggcgcctgcgtcacaagcactgaaggggcgtggccacgccgcgcatccgcgctttacggcggccgcaaaatgaggtgtggcgagtcaggcgcgg

SEQ ID NO: 61411 - DNA, 2090 bp, Homo sapiens
atgttggtcaggctggtctcgaactcctgacctgatgatccgtctgcctcggcctcccaaagtgctgggattataggcatgagccaccacacccggccaaaaaccctaaattatactaaagaaggtagattatttttaaagaaaacaaccagaatatggtattttgaaaaaaactttgttctttaacttaaattttcaaagcaggatgttttaagttgtgataaaatatacataacataaaaatttaccatttttaagtagcagtaagtacattcacattgttatgcaaccatcattaccattcaccttcagatgttttttcaacttgcaaaactgaaaatccatactccttaaacagtaactccccattctcctttctcccaactgctggcaacaaaccatgtgactttctgtgcctgtgtttgactactctaggtacgtcatattggtggaatcatacaatatttgtctttttgtgagtgttgtcttttacttagcatagcgtcctcaaggtttattcatgttatagcatgtcagaatttccttccttttgagactgagtaattaaatagtctattgtacgtgtatcccaccttttggttttttttttaattcatctgtgacacttggtttgtttctgcctgaataatgctgctatgaacatggatgtacaaatatctgttcaagtctactttcacttattttgaatatacccagaagtggaatttctaggtcatattgtaattctttggaagtgtttttgttttgctttgaggaattaaccatattagtttccacagcagctgcacccttttacttttccatcaacctgtgtacaagtgttcccatttcatggcatccttgccaatacttactatttttttggttttgataatagccatcctatcaaatgtttttaaatgactaatatctttggaataatagatgaaactagtactaccctgaccaagtattttacagagctgtgaatcagaccttcattgggtagtgctagcattggtatgagtgccagccataaaatgtcagtcacttggtgttttcccccccaagttttgattattattaagatcttattatttaaaaagaattttaagaaatgtcagttgtcacagatgtttttctgacagaaatattatttcttatgcagattgaccttgtacaaataaaacagatgttcgctcagatgtatcagaagactctgggcacaatgattgcaggtgacacgagtggagattaccgaagacttcttctggctattgtgggccagtaggagggatttttttttttttaatgaaaaaaaatttctattcatagcttatccttcagagcaatgacctgcatgcagcaatatcaaacatcagctaaccgaaagagctttctgtcaaggaccgtatcagggtaatgtgcttggtttgcacatgttgttattgccttaattctaattttattttgttctctacatacaatcaatgtaaagccatatcacaatgatacagtaatattgcaatgtttgtaaaccttcattcttactagtttcattctaatcaagatgtcaaattgaataaaaatcacagcaatctctgattctgtgtaataatattgaataattttttagaaggttactgaaagctctgccttccggaatccctctaagtctgcttgatagagtggatagtgtgttaaaactgtgtactttaaaaaaaaattcaacctttacatctagaataatttgcatctcattttgcctaaattggttctgtattcataaacactttccacatagaaaatagattagtattacctgtggcaccttttaagaaagggtcaaatgtttatatgcttaagatacatagcctacttttttttcgcagttgttttctttttttaaattgagttatgacaaataaaaaattgcatatatttaaggtgtacaatatggtgttttgatatcagcattccttgtgtaatgattccacaattaaggtcaggctaattacgtatctgtcaccttgacatagttaccattttttcatgtgtggtgaaaacacttaagatctactaccttagca

SEQ ID NO: 61412 - DNA, 1013 bp, Homo sapiens
tttcaggtactcagcccagtgagactcatttcctttttgaagttaaccagtttctggtggtctaatacacagatgtctaacaaagtgaaagtttcattctcatggatattaggactaaggggagtattagtaacactttggtattaacaatggaatgttgggccaggggcagtagctcacacttgtagtcccagctactcagaaggctgaggtgggaggatcacctgagtctgggaggctacagtcagccatgattgcaccactgcactctaggctggatgacagagtgagaacctgtctcaaaaaaaatcaaggagagcatctgaacactcttaactcaccccatgtttctgtgatgattacagagaaaataatcaaaggcaggctataagtgataaatgaagctggaggggtacacttcttgtgagatcatgattccatgtctcaaccatctctaacttgcagtgcagtgtgccctgaaccgccctgccttctttgctgagaggctctactatgctatgaaaggtgctggcacagatgactccaccctggtccggattgtggtcactcgaagtgaggtgaggcaggcctctctctttttgtcgggtcttacttgatgttcaatgttgatttcttaaaagttccccagttggttgtcagtccctcaaaaatgataagaaagagctctctttgccacctaaaagaggtggtataaagaacagaaaattcactttcctcatgctgtgggagaagcttgcattagtgaaataggccactctaccctaatgaagataatactaacagattttacaacttgagaacgtcaatggagaatacaaatttatgggaagttagacatttgtctttcgattttcattttgcttatataaaaattagatgaaaggcctatgtagattaatcctagtggatatcaacattatttaaatttagcatcctttattaataataaaacaatttttaaaatattcataattgtctcaagtatagcctca

SEQ ID NO: 61413 - DNA, 1094 bp, Homo sapiens
ttataaagcaattccatttctttttttgtattttccttaaaagatttaagtgacaaaatttggagaacacatatacttagcttgtatttgtgattaaataggatttaatcaaagatctcaaatcagagttaagtggaaatatggaagaactgatcctggccctcttcatgcctcctacgtattacgatgcctggagcttacggaaagcaatgcaggtactactatatgtcatttattatgaatattttgtcctatttcatatgtaaaaccgtacaaattatgacagttctgaatttacagtggtaattaaagcaattctttatttcacatcatccatctgaatatatagtttttagttctacagaacaaagaaatatttgacgaagatttaattacttgcagaaatttcatttttctttgtataatcttcccttcatttcatgtagggagcaggaactcaggaacgtgtattgattgagattttgtgcacaagaacaaatcaggaaatccgagaaattgtcagatgttatcagtcagaatttggacgagaccttgaaaaggacattaggtcagatacatcaggacattttgaacgtttacttgtgtccatgtgccaggtgagtatagtatgaatgcttgtgcgttgatagagggaacatactttaaaagccttttgccagtgagcattctttattccttttaatatttagccaccttgcaatattgccatctttaagagggacaacacagaaaccagtgtacagatttctttgtagttactattgagatttattcctgtaaatctggcttttgtaaggaattagagatttaacctctaaggttgtatggaatcagaaaccaattcgaggctctgtggctgggatggggatgaaactgtacatttgagcttatcactatcctgcccattatgccccaccatcaagtgaagatgtgcaggactgccatagaggtgctacaggaagtgaggactatgtgaggagacccagaaatgcagaaaaatgttttagggttcccagtaataactgtgattagcaccttctttattttgattccccaggtgtgctggagaattg

SEQ ID NO: 61414 - DNA, 1025 bp, Homo sapiens
atttgtatataccctttactcagattctccaaatgttaacttcctacataaacacaatgcaatgatcaaaatcaggaaataacatcgatatagtactgttacccaacctacagaccttatttcagtttcaccagttgtctcaatgatgtcctttttctggttcaggatcaaatccagaatgcaatgttgtatttattgtcatgtctcttaagtctcctttaatctgaaatagttcctcagtctttgttgttcatgcccttgatgcttttgaagaacactgtcagttattttataaaatatttcttaatttgggtttgtctgatattttctcatggttaaatccaggtcatgcctttttggcaagagtaccacagaaatgattttgtgcccccagtgcatcatatcaggagacacttattattgacttattccattactggtgataattaattttgatcatttaagttggtgcctgcaaggtttctctgctataatgttataggttatacaaatatcctgtttctttatacttttgccacctaattttagcacccactgttgattcttgcctgaaacagttactaccatagtatttgctaaatggcaatttttaattttcatatagatttatttcatgtataataatcagggtccatataggaaattaagagagattactaaaattatattgctggtttgaaatctcactgggcattcatgtgctacttcactaaagccattttatattcttctgtttttaaatcaaacattgtcgctcatctcacaccattcagggatcagtcttcttttttcttcctattctaccaaaaaggaaactatagtaagattgtgactttaatttcacaagtttggccatcttgtctcctggaagtttggtgtctggctatctgttggcaggagaaaaatctgtcctgaagggggataggtctttcctgtctgttccataatgagctctggtaataaaatgctcatatccttgccttaaaacccaaacattggccttc

SEQ ID NO: 61415 - DNA, 1334 bp, Homo sapiens
ttctgacaaccattccaggtggactcagaatttaatctgattcaagtgtgaaaaaagtattatttatgaggatcttatgtagaacatggaatattaaaaaggttcttatgaccaaagttggttttagattcagtaaattatatttttaaaaactatcctcataagtatcatagtgtgaatgttcttgtatgtttccatattcatagtcatcaatgctgttttgaaaaattaaaacatgtaagacctgttgccgtattattattattttttttaacattataggtggctttcctggaggacagatgccttctcagtatcctggaggacaacctacttaccctagtcaggtattttgttcctaccttttaagctcactctaggtagctagataaagaaggaacctatcctttgctgaggtttccatgggtcggaggaaatggcccattatagtaatggaagactaaagtctttacttctgatagactccatactttctttggtccatctgctttaatagtgtcctgatgactttgagaagacaagcataggtctattctcataggtaatgattctcacaactttatcctggagattaacctggggtcttggttttagttctttttcctcttccttgcccttaccagcagttacacctatgaatttgggtggctgggtgattggtatttctgacagtgatttatgtagggtggttttgtttcccatttttacctttataacttttcactcttttttcagatcaatacagattctttttcttcctatcctgttttctctcctgtttctttggattatagcagtgaagtgagtaaggttttctaatgtttactaatcactaggtcctttatatgtgcctttgtttctgattctcatgtacttgtctctcactacttcttaagggctcacctgtatctattttatctttgtgttcctgtaataataggtagggctttagacatagtagccagttagtctgttgactggattttctcattagctgcagagtttcctatatgtcaaatatttgccctactccgtatggcttctttttttttttttttgagatggagtttcactgttggcacccaggctagagtgcagtggcacgacctcggctcactgcaccctccaccttccgggttcaagcgattttcctgcctcagcctccggagtaactgggattacaggcgcacgccactacacctgtcacatttttttgtatttttagtagagacagggtttcaccatgttggccaggctggtctcgaactcttgacctcaggtgatccacctgcctcggcctcccaaagagctgg

SEQ ID NO: 61416 - DNA, 1052 bp, Homo sapiens
cacccaggctacagagattagaacagtgttctaatcctgcttatttttggtgttattgggaagtgagacaagaaaccacaatacaatcctctctgtctctctcttgagtactcaaggagtaagactacatttgttctggggaggtggaggttgaaccatacctgttatgagaggacagctgcaaactcgtggtgttttttctaaaagtgatataaaaagtgagttgttccagatagagagtaaggtatcactctgtctggcagaataattatattcccaatccctcctgccttgtctgccaaatgtagtccccaaaattggtgcatcagctctcattcctctccctaccttccttacccattcaccatcctaggtgcaggaatatcagttcctttcctccgataaccccaatcatatttatagtataagaactatttctctctcattctctcaggtgcagaaatgtctattactgtggtccagagtgccagaagtcagactggcccgcacacaggagggtttgtcaagagcttcgtcttgtggctgtggaccgtctcatggaatggcttctggtcacaggtggagtggtggtgttgaggatctctgccataatggtcatagttgattgcatttaaaggaagatacaaaatcatattgttatgaaaaaatgaggaagtggggcaaaggatggggcacgcctgctcacaggttggcagagtgaacatggagggaatattgatcattagtgagggggaaattttgaagccaggaaagcattaggttacttcttatttcttctttcctacaggtgattttgttctaccctcaggaccttggccatggccacctgaagctgtacaggactgggactcctggttttctatgaaggggttacacctagatgctacattggatgctgtgctagttagtcatgctgtgaccaccttatgggccagtgtaggacggccaaggccagacccggatgtcctgcagggatctttgaagcggctgctgacagatgtcctgtcacggcccttgactctaggcctagg

SEQ ID NO: 61417 - DNA, 1768 bp, Homo sapiens
gagtgagactctgtctcaaagaaagaaagaaaaagaaaatgttatcttgcctgaggcaggtgggtagagtagataaatgctttttgtagaatggcagtgattctgaaaatgcaatgagaatgtgaggtgattaaaagtggaggacagaatgaggttagttgttggaaattgggccctaaagtgtgaagggcaattccatttactcttttggtaaaaggacatgacccttaaaccctaagataatctaatatcattaggtccaatttcttcattgaaggtaatatataggatatggtatacagatgagcttgactatttctgttctgtggactgaaaccatccattcacccatgggataaggggagacattaagagggtggatggaaacataaggatgaggagatagaaagtacaaaggaaaatacaaatttgttcctccattaacctgaggacaggtttttaagagtcatgttgtaagatatggatatgagctggataattctgggagctttttgtttatttttgccacctgcatacacctcagctgcatgatgattctgaggtttttcctaacagatctgatctagaaggatcaaatgtcagatcatttttgtaacaaaacatgatccctggtttgaactttaacagtttcctcattcacactgccagcgtttttaatcctctgttatttctctgtacctgaagacaatctggggattaataactttttagcctctcaatctctatgaataccttccttcctttcttttttaatcgaagtgaaaatcatataacataaaattaataattttaaagtgagcaattaaatggcatttagtgtattcacggtattgttcaaccatcaattttgtcttgttccaaaacatttttatcaccccaaaagaagaccccataaccattaagcagttactccccattttcccttccacccagcccttagcaactaccaatctgctttctgtctctgggtttacctattctggatatttcatagaaatggcatcatacaacatgtatacaacattttgtgtctggctttcttcacttagtataatgttttttgaagttcctctacattgtagcgtgtatcagtatttcatttctttttatagctgaataatatacatcttcatatgtatatttatatcccaatttgtttatccatttatccattgatggacctttgggttgtttctaccttttagctgttgcgaatagtgctgctatgaacattcacatataagtatttgtttgagtatctgtttttaaatattttgggcacatacctaagaatgaaatttctggttatatagtaatattatgttaactttttggggaactgccgtactgttttctatggtggtggcaccattttacattctcacctgcagtgtacgagggttcaaattactccatatcctcatcaacacttgtcattttctgttttttttttttataatagccatactagtgggtatgaagtaatatctcactgtggttctgatttgcattttcctaatgactattgagcatattttcttgtgtttattgtccatttgcatatattctttgggaaaatgcctattcacatgttatgcccaattttttagttgggttgtttggtggtttttttgtttgttattgagttgtgggaattctttatatattttgaatactaaccccttatcagatatatggtgtgcaaatattttcttccattcttggggtgtcatttgactctgttgtt

SEQ ID NO: 61418 - DNA, 1198 bp, Homo sapiens
ccccttataaggatctccaatgaccagtttcagtcttccttctccctacctctccaaagacgttttgcattttttggtgacttacagaaaattagatgagcactccttatctggagatagtgaaaatatgactgtagtttaggtgaaacttgggactcttggtggtaaagaagaagatgggaaacctaggtctaggaatagattaatattttgtcttgaatttggacatgaaggataaaagtttttctaggcaatcaagatcatgtctcctctccagttcttggtgttggtgttctctctcttatactgggactaaattagagcctaagtcactggggatggctagaaaaaaatgaaagggattccctttctaagtggagagcattctagactctggaaagttcaaagagcttactgcaattctttccagcttctcctgtgagtcccctgttttttcctttgtttctctcagtttataacctgtgaacagggagtagcctggggctctttacaggagatttagaaccagggaagctgtgtctgggcctggggtatataaactcaaacatgaacctgatgatgtatatagatgcagatcaaagacctggcttctcacccaccttctttcttttctgccagaaagctaactcatttgtatcatgaacattgtgctctagacacagaggagactgtgacattagggatttttaccaccactcctcttcctcaaactgtgtgatccttttgctttctgaccagttcagccaactcccagattgccaagagctaatcttcctttagaggaagacctcaccttggaaatgcggaaaagtaaagcagtacctttctgaccttaagtggcttgcttccattgcagcaaaaaggcttatgttttaacttcagggagatatctattataaattctgggatttaagaccctagagttgtctcaaatcacactttccttccatacctatttaaaaaaaaaaaagtcattctttcaaggtttaagaaagtggtgtcttggccgggcgccgtggctcatgcctgtaatcccagcactttgggaggtcgaggtgggtggatcacgaggtcaggagttcgagaccagcctgaccaacatggtgaaaccccatctctactaaaaatacaaaaattagctgggcatggtggcgcgagcctgtaatcccagctactc

SEQ ID NO: 61419 - DNA, 1133 bp, Homo sapiens
cagcataccatttattaagattttttaaatgcaactcatgatgaatacaaattgtgaaaagttcagacttcgtaactttaaatgtttaccagagcaagtcatagtgatagtaaaatataagtattcaacatcaaagtttttctatattactattctcctttatattcattgacaacttctgaattagaaaagtcaatctctgatgtcttgtatcttctgcagttcagccattattaacagaactcaaaacatttgaggttctcagataaattttgaagcctgttaaatttgaagttggcctgaaacttttgcacaaagtgaattacccctattttatttagggtttttgcctattgcaactgattttcctttatccacagctattctacataatgttatgcagtgtttggttgaatccttaacacttttcttccaccttccctgcatgtagtttgtactttttacagtttggggttcctgtgtggatttgatttgccacattccgggacctcattgcgagtgattctgttccccagtttgatgatgttcaaagaagcaggtaagtgagagctggggtcagatataagcagaaagtcagaacttttttatttaaaaattttaaaaaaattttttgagggtaagaaagatcttgcagtcttttaggaccactgccctaacaacttcagataggctagctgtaagtagaaagaagctaggactgtggaattgaatttcctggatcagctgcaattacaaggaggataagagaatggttgagctgattcttttctattttcttttcctagaaatagtatgtatttttagtcattaactagtattttggttttgtttaatatcccagaagcatttattcctctcttaatacaggtaaagtgctcctgatgactctctcactcagagagttatcttacccttctttcagggaaagtgaattttacaagttaattctgcatgtttcccctacaactgatttcattctgtaccattaaatggccatttattttctcccttctacttaatccaagattggacattgttgagttttgtttgaacaatgtttgttatgctgaaaaaggacaccaggcctgggggaactcatcctgtgtctagat

SEQ ID NO: 61420 - DNA, 4176 bp, Homo sapiens
aactctgtcagtataaatggaattttttaaggctatagatgttagtatctgtaggtatttggaacatcagtactagaatagaaaggaagttactggtagacaggagaagtcctttcaggtcccccacaaagaacagagccacagaactgttctacttatagtaattcatcaagtttactgcccttaaatttcactgtagtcatatcagctcttgcagcttatgttttgccttataaattacaagtaacaggtaaagcattgctgaccccttctagtttatgtcttagggaaccaactggtaatgagtattgttctcactgacatgaaagaaaagacttttctgtttgcttttctgctacaattctattataattttaccctagagcattttcctgtgattgtgatggatgtgatataataaacataatggaaaattctaaggccatcaaattactgattcaagatgggtaattaatactggagtgcatttgcatgggtgctgaggtgtctgtgtttacagtaggtttatgtgttctgtgctctgagtgatgttgtcatagtgctgtgtgtaaactgtgctgtgtcaggaattgggggtttggatggggctctctaatttgggtactatttatgttaaattttaaatgatgatgtagtatgggatactgtgatattttaagtgatcattgccttttctgctgtacaatatgacccttctcatctctctcattcattttgcatgcctctgctcacttctgtacagccacagttgaggctattgaggctgaaaaaggtatgatcagagtccttgtgctgggcagagatctgtggtgtgtgggtgggcatcagagaatgtcctgtgggtgtgttttactcctagcttttacagcccaagatgaatcagactcactgattcatcaagtttagaagccttgcagccctctttttttaatttttcatttttaaatcagaagggctgatgtctatggtgacagtctttttcttctttccggtgtaatatgcaatcagaaagtaatgtttctgatttctttagagtatagcatgttatgctatacagtatagctttataaagttgcctgttttaatggaaattgccaaactgacctgcaaatagagatctgttccatattttgcatgattctatgctactcagattttttttccctaagtgaatcctcctctaggtataggtgtgagtttgtttttacaaactagtgtgcctgactgagaatacaggaactgtcactataatgattttcttttttcttttttggccgcagtttgggctatagtttatggataagattatgttcatatatatatgtgttggcttggtatttcacattcctcagtgtttgtagccccagccatttgtttggttcatgtgccagactaagacctaaggattgcagatattaagcaaccagattataaccagtggtttgaaaatatttcctatgaacactttaataatggaggatgcatcattctagatgaagtgaatgagaaaccatacaattggtggagaattgccatttattttgatttgagtttccaaagactgtgcagtatggccaatgaattaaggagaacatcttctaaattacgagattataaatacttttttgctatcagccatacacagatctaactcttggaggcacttccacctttttaatgttatattggtggcgatgggctgaccttgacctccaagatagttctgatctactgtattttaacctttctttaactctttctcctcccaagctcttggtacagatttgtatattgaggattaaccttgtttagcctcctcacttgcccctactctcattgctgccttactgtgatagtcactggtgatcttagggactgatgtaggagataattggtatagtagaagtcagactgagaccctgagaccattgcctggaggttgattttgggggcaggagagggttaacattttttttgtatttttattttttggaaggctttgctaacacttgtcacctataaagctatgatgtttatatttaggtttaaacatttcacattttaaggaaagactgaaatgaggataggattcagttaaagtaagatttatgtgttgctacttacagctactaatttctttcttcttaaaaatcattaattatgtttttgaaatctcagaaatgtttttcaattactgacttatcaaatttgcattttattaagcaatacgaggattctctccaccacatagaatctgcagttttgaagaggcaaagggtttggataggatcaatgagagaatgccacctcggaaagatgctgtacagcaagatggtttcaattctctgaacaccgcacatgccactgagaaccacgggacgggcaaccatactgcccagtgacccactacttcccagggactctcacatctcgggccccaaatggacagatcacccgaggagctggaggggtcggccaagctgactgtaaatttcacagtctctctgaagaaaccattgtgcttctgagaccctagcccccttcctggatggaggcttgagggccctgggacatgtgctatctgataagattgggtcatcgctgccaaggtggagagcagtgagcaaggggcttggggcaatttccagtggagggcatccacacctccattttatgcttgtggttcacacatttaagtttacaaatcagatttcttttccccttcagtagaattagattttgtttttcaatcatgatttcaaatgcaatcctaagagctaatgtggacttttctttttccatgaaatgtctttaaaggatgaattagcatggtcttaaaatacatttctgaggttactagctgtattttgaattgtgagcaaaatgccgagaaacccagttggcatttatacaaaatgttgacctcaggtctatagttcttaaatgtggctaattctgtaacatagtcttggtattttttaattatgaatgcatatcctatttccaggcaggctctcttacttgaacacaaatccaaaaactaatttagagtcttttttgcccagatcttttaagacttacaccccagagatttaagaagaaaacctctaaatttcaaaattatgaagaattacagaattactcatttaaggtactttaaaagaagtttgtacattgtcaaagtaaattttaattcaaatcatgtctgtaaaacttgacgtattttgtgtatgcatgttttcattttgcaaatatttaatatatagacctatgatgtacaggtacgacatgtataggttacctagatgttatgagaaattttagtttattgtgagtactcaagttgcttagagagccaccagggtgatttgctgctggctttctatcatttttatgttttaatgcaaaggaaattttaaaatgttctggaagtgtttttgattaagcaatgcagcctagaagcaatggttctgttcaatcattcagatgttagtggaagcataaaagtcaagactgcatgttgaaacctttcttttgatagttactgaactgcttggttaaactaaatggaaccatgtgctaatttttcacaattattgacctgtattgattgccactgtagtttggtatttccctttactttggtggcctgcttccctcatgccctggaatacaactcagagctccaggcagcggaaccatctattgttttgtttgccagaaagtgcaccctgtatggtctcctgtctaagttggaaatattatgcatgtgcaggactattcgagtattttataaacagtagcacacaataaattccatgcatgggccgctgctcctatctctgtgttgggttttatttggaagatgcaatctgatttgtccttttgatgcaaatcagaaaatcctgttactagagctgggatgtcctccggagattatctcgtggatagttcatggtaatttgattaattaaattctttataaattttgccttaaaaaaaacttttgttatatacttgttttacatgagcattagtaactgagcactagaggactttgaatgcctactgtaggcctcctaagtctaatatttaagatcactgtttattgtcttttaattgaaagaaaatatgttattgtctagaattttgtta

SEQ ID NO: 61421 - DNA, 1001 bp, Homo sapiens
tttacattccttgccctccatttttcttattatattgtaaacattagaaaaatgaactaaaaagaatttcatgaatgtacattaaaacaagatcttaaacatttgataaaactagtaaaaatgttaatagaaaaggatgaactttaatagcttcaaaaatattatactcttctttgttcagaaaagaaaaataaaaccaaaagggtatcatacttaaataaatctacagtatagtcatctctcagttatccttggatataacattacttttatattgtatccgcagcaaaccttgctttcagatttcacgattagcccctgctaattacatgctttgttgacttctgtttattcttaatttgtacacggcttgaagctcattccttcaactttgaaaccaccctcaactgcaggggaggtttgaaagacagcagctttgctggagggactctctattctcagcatggactaagttactggaaggaattgagtttaaggggtctaatttgggaccccttaaactagatagcttctagttttgctagctcttgatagtgtggtttgggcatttggtcaaaattattttcctagcataagataaatccactttgaaacaaataacaaaggtcatacaaaagctgcatgtttgtgattattttttaaaaagttatcctacattttaaattttagtagataatgttccctgatgttagtgtgtataactgagagttaggtattgcaaaaggaaaaaattttaattctaagacctcgtgcctatttgtcagaaaataaaaattgtcgtttcaagaactttaaaagttaatttacatgatgtttcttgagtgtttttacaaactgcacaactctattggaggtggattttctgttcatctttattttatgtatgttttctttctgggaaatttgattgggagctagcactgtaatgctaccctcaccaggatctatatgggaaatatatgtggccaattctatgttag

SEQ ID NO: 61422 - DNA, 1798 bp, Homo sapiens
tttttagagtattcttgatgaacttgttcatccatataggaagtcccttgtgctggagccataaattgccttccctggggttaattcaggaagaccaggttaaagggtacaaatgaataggtcagtctttaaaaatttgtttgcacaactgactacatcagacatttgaacttcagagcatatgaaataccatattttctcaatagtatgatgccccttgatgaatcttaccacatatttaataaagcttttcaggaaaaacaatatatgcctcaatggtaaggcacaccctcatacctgaaacacttaaaatatagaaaaattaatgtcttgaaattgaggaaaatatggtaatagcaatgaatgtcatgaattttatatatggcctatatctagaccctatgtcttcttttaaattaagtacttgttggaagtatctgatatttgttatatctctctgctatagggaggagagtgaaagtgtgctgacactcaagggcctgactcccacagggatgttgcctagtggagtgttagctggaggacggcagaccctgcaaagtggtaatgatgttatgcaacttgctgtgcctcagatggactggggcacacctcactcttttgctaacaattcacataatgcatgcagggaattccttctgttttttagttcctgtctcagcagctgacctagacagggtactgtattagctagtgtctcattaatacctgatcagggcagaaaactgatagaatgggtattcctttcaattgaaaataatggtcagttcctcagcttttcatgaaatgatatgggagcagctcatatcataatgtctgaaatatttatttattcatctgtctaattcacccttttcttttaaaagccccagtttcagaatgtgaatcagggatattcctgttactaaaatggaaatgtaattccaagtttcttttttaattttttaaatttatgtcattgtattggactatgcttatatttaaaactacttaatttagagttaactacctgcttaggccccagaacattacttatgcccttcagttaccaaaagatttgtgcaaggttttgtaccctggtaaatgatgccaaagtttgttttctgtggtgtttgtcaaatgttctatgtataattaactgtctgtaacatgctgtttccttcctctgcagatgtagctgctttcctaaatctgtctgtctttctttaggttagctgtatgtctgtaaaagtatgttcaattaaattactccatcagacacttgtctgtcttgcaatgtagaagcagctttgtagcaccttgttttgaggtttgctgcatttgttgctgcactttgtgcattctgaacatgaatgtaacattagatattaagtcattgttataaggggttgaatttaaatcctgtaagtcaaaattgaaagggtgttattaagtgtgcctttattttgcatgaaaataaaaagaattatacgtaaagcattcctgtaatctggctcattgaatattttatacttaaaaaactttttttggcgtaaatatttgtgtaaatactgggttaactttttaaaagcccattacagattaaatagaagagagtgatgtgagtattagtgaccatacacagtaattcagtctagatttcttttcctgtggttggaaagcaaaaatacatgatgtggaaaagcctgaatttcttgtagtcacttttgacagccctctaagggtcattgtctattaaaatagcaacagatctgatgttttccttagtcataattag

SEQ ID NO: 61423 - DNA, 1007 bp, Homo sapiens
tgcattgttgaaatgctggtatggcccttagttcaggattacctgcacagtagctccttcatgccattcattttagaccaactcaaagcaaagaagcttattctgtcatagtctgatgggatattgtcagcctgcatgtcaaatactttgtgatagttaaataagactacaggactgttagaaattcttgtctgttagtctgcatgccataggctgtcatgaaaattaaacagagactataggattattatcagtttttgccctctggtttgtaatgcaagttgggctcaagtttgtttgtttttttttccccattgctgttttactgattagccagtagagtgaaatattaaagtttgtggattactttttatttctatatttatcagaccccagtattagaccaatgctgagctaaacattgagagagcaagacattttttagcatgagttcatctagtcccctccatgtaagctggtggcaggggtcttggtactggtttagatgagtgtggaacaggctaatagaatattgtaagcatgcatgccctaaacttgagcctttctctctatttattccattgaaagtaggttcagctgcagcccggaaagaaatcataagaaacaaaattcgagcaattggcaagatggcaagagtcttctctgttctcaggtaatgatatattttcttgattatttgttttgcagaaattacgtttattgtaccttgttacaagcattgtcccgcatctaaaagcaaaatggggccgggtatggtggcacactcctgtaatctcagcattttgggatgccaaggcgggcggatcacctgaggtcaggagtttgaaaccagcctggccaacatagtgaatccccatctctactaaatatacaaaaattagccgggcgtggtggcatgcacctgtaatcccagctactcgggaagctgaggcacaagaattgcttgaacccaggaggcagaagttgcggtgagccgagactgcgcc

SEQ ID NO: 61424 - DNA, 1369 bp, Homo sapiens
tctctctttctacattcattcttcagtaccactgccaagttaaatctctatctttttatttgtcccaaccaccttttctccatcattcacttccttttttctggactctccatctgaagaacggctcatatatggcaataaaaaaggtacagaccagacagagtaacattgttttgaaatatgacttcataagttatcttcatgtccatgtaagttagcacattcattgagtaatgtctatgcagagtcctcttgggccttgtgcaaatttagcttaagttttatctgtgttagtgtttggtatttttagaagtcatattccaagatatctgtctttctgtgcatggaaatattttccctccttttcattcctgttttaaaatttcattcttttgcttatttgtaatgttttgtacttttccctgcatgattagggttgtttgattgtctattatttcccaaagaaatgttactgtgaccatttactttaatatgatgcatgatgtgtttgtagactgatttaaaatcctgatttgtacagtgtttttatattcctgtgaatttttcatttgatatcagtatagtttacatgtcatttggttttatagatatagaaattaaatctgaaaatatgaatgtacttattacagccatcctccccaacaccctactgcttatccccagtctagctactttaaaattctgtcaattttaaaacaaaatgtttataatcatttattagaagagaatcagacttaccttctatccttgaacaagtcacttaataacctcagtttctttgtctataaaatgaggagattgcactttatagtatctccattgtctcttcaaattctaatattctatgattcttatatttttagtttttgggggtttttttgtggtttttttttttggtattttaaaaatacctgtttagagtgctgtggtacccaggtacccacacagttttggacttgtaaaagctgtagcttcagtgctcataatatttaccctttagaagatcataaacatgtcatggagcctatttttttcccctaaaatatgtcttttgtttctgtctttcaagttggatttctttttctcttttcttgcagtcagatccagtcattatcttagtttttaattatatgtaattgtggactgcttgaattttaaatgagatgttctctcccagaagacttacagttgttcagacctctgtatacctaaggccccttttgaattagtgtctttagcctttccttaaccttctcctcaaccatggtgcttccatgtgtgttttcattgtgttgaagcacggctctaaggaaccacacttttgggtccagagtgattctagttgcta

SEQ ID NO: 61425 - DNA, 1054 bp, Homo sapiens
tgggaggctggggcaggagaatacagtgaacccaggaggcggaggttacagtgagtcgagatcgcaccactgcactccagcctgggcgacagatggagactccgtctcaaaaaaaaaaaaaaaaaaaaagagatgagtgaggtttccctatgttaccaaggctggtcttgaactcctggcctcaagcagtcctcccacctcagcctctcaaaaagcgctgggattacaggcatgagctaccaggcctggccaagtcttttgtttttccttccttccttccttcttcctttctctttctttcttttttaaaaaatagtatttagttttccaaactaagaccaagaactcttgctctatataattatttactatttcctccatttaaggttatatagtttttctttgaaaaaattttgtcattatcaagttaaattaatacatctgtattttatgttcttattactattacaactggtgtctcttattttctatctgtgtaaaagaatatactatatatttgtgggtttatcttatatctaacaaacttgaatcagcagaattattttctatgataattttaagtttgttttctattacttttaaaaatatgtcatttataggggattgatattgttatttattttctgtatttttacctttcttttattctttaaaagttattatgagtattgcaatagtatgttaaataggcatgatggtagataatgctttagtcctcttcttataataataagaaaaaaaggttccttgttaagtctaattatagtacttggttttaggtacctatgatttatatgaataaagatactgagtcatattttgagatggaaccagaaataaatataaaattttattatattctaatgagaagattttatatatcatcagtatttttcctattagtatgataatttatccacttgttattatcattcttgcattccagggatgaattgaatttgatcattaaagaggcagtgtagtttaatgaaaaggatcagtggtttaggtgtcttgtcactaccgttcacta

SEQ ID NO: 61426 - DNA, 1042 bp, Homo sapiens
agacagttatatatggtcagctaacatgtaacttttttttcccaaatagtgacagaaatgttggtaaatgttctgagtatttgctctgatgatgaactaatgactgaaggtgaagaccagtttgatggtatgattattcatcttactatttttttttttactgtgaaatggtatttctttactgcctagcctcagtacacactattttgcaaaaaatagtcattgctttcagagactatgctatttgataagtaacaagttactttttttggatattaagatttgaaaataatttcagtgatttcatttttttattgtaatatggggaagaagatgaactttgggaaaggagaaatttggaagaaagaagataaggaaaggaaaattgaagtgttaaaaggatgtagttcttggcaaatatggacactggttagagaaaagaggataaaaatactatttgttttattagaacaatattcttagtgcatcagaagcatacctgaactcccaattttgcttttcctgccttttagacactaaaatagactgcttctaaattagtgtgattgtgttctaaaagaccacttgctaatttagtttcagattctgaaagcatttttttccacagaaacaaagttatacatggttgttgttacgtaagccaacaagcctatgtacctaatgcatgtttatagtaaaaagtaatactatagaaacaattcattttattttgttttgaaatttttatttaaaactttattatttaaatgtttaattaaaacctgagtacataaaaaggtaaacaatatataaactgaaaacgattcccttccatattcccctcatatctttgttgtagtatactttttatagttgtaatcaatatttcaatgtttccgtgtattaaacatggtctgtatattggtaagatttaatagctacgtatttctaagtccattgataaactataatgtttggctagatgtggtggctcacgcctgtaatcccaccactttgggaggccaaggcaggaggatccctt

SEQ ID NO: 61427 - DNA, 1304 bp, Homo sapiens
ctgggggactgggagaagatttataaatagcccaatgtcttcagctgttggattttctttttttttttttctttagcttaaatcttttatgaaggggtggagagattgctttgcttgaaatgggcccttctgcatatcttaacaccatttttgggcattccaccgaaattcttggggaaatttagtagccttcattttagcaatattagtcattttaatagctgttctatactttaagagaaatcataaagagaaattcagattgtaacccaatattccttctcttatataaaaaatatgtataaaattttagtagtgatgcctttctaatttagaggaacacttgttagtacataataggctttttgagagaaaataaatgctatttaagaaattctgtttctgtgtttcatttgtagttctatagaattcttaggattttgttacctatcatgttcttttccattttaagttaatttttttcataagaaaatgcctcagtttccatatgtggaaaatgacattatgagagtacagacatgattataaaacattttgttcagtatccccctctattttttctcacctcttccatattacaaaatgttcctttctgtatgagatacgtcacttctgccaaggcaatttgtagttctgaaattcagaattaatacttaaactgtgtatgttaaacaggttttctgcagattgcatttggtgttcttcatttactcagtaggtccaatgttaatacggagatagaattaccctttagcatttgagaagggggccagttaagggcttaggtgcaagggatgcattacacttacaaccttctatctttggtgtatgagaaatagttcaatcatagcatcatcagatgaattaaataattcatcctgctcactctcctgccttcaggctagactgcaactcaactgttttaatgtaatatgggaaggatggaggggccaggaagataaggtaggaggaaaatggacatttcatagattctaatttgattctctgatagtcccacataaggaaatatttcgttatatctaatctaaatatttatgctatgagtatttaaacaaggaaagaaatagagataataggtttttctcaactaatgcacctgtcaaaaaccagggcatcatagggttttagagctcataagtggatataacagtcatttagcccaactccttttgagagatgagataatttaagatgaattctgtggatcccttacaagtgaagatggagaacagtaggcttttatcagtattcctgtatttgag

SEQ ID NO: 61428 - DNA, 1036 bp, Homo sapiens
ggaggggagagaacaataaataaaaatccaaaatgtgaaactaagtaatatgtaaccccattccacaacttgtctcttggaaaagccattttgtaaaacgtgctctgagttaagtgcatcaagcaaaaccaaacatgattttctcaaactcccctttcttaaatcttttcccttattgaggatgttttcttatttgtataaagctgctgctgctttgatgattttatttgcactgtctacttgtttagtttatcatgtttcttgttttatgttcactgatctaggttctctttccctttcttatttccttcttttacctccacagtcttatcactgccccatgaagatttgtatttgagcttttttttaattaattcagtttcatctcatttgagggatacattcttctctttatttttactgcttttttcctttgccttccgttccagagattttcatttccccaccttccctgaaaatttgacctgtctatagtaattggatttcattttattttgaatacagtttattgacagaaagtgccaaagggtcttaatctagttaagtgtgtgccaaggacattgaagatgagattgggtatgtttatgtagtttacatctttggaagatgatattaagaggccagcttctcttctgtcttgacatgtctggaattcagttgactatgccatagcttcaggatcagactggagtggatgtgccaagaggaaagaacagaaggttaaagactttaaaaaggacatttagagagagaatgaggtcattgctaaataagggtcatggtgtaagttcaaaagaggaacagaggaagtttttttggatgatgagaggtgatggttaaaagattaaaacacttgcctgagaccaaacagtagcatgctggataacttgggtacagaatatgctacaagaacttacactatagatatcttatgaaatatgacttcatttttgagaagaaacatatctaagttttgattccattctttctctctctagacagggtctcgctctgt

SEQ ID NO: 61429 - DNA, 1047 bp, Homo sapiens
taaaatggtcacaccaccaccagtaatgtaattttcaattagttttttgtttttctaggtaaaattaagtattcggaaagagtctatgaagcttgtatggaagcttttgatagtttgcctcttgctgcacttttaaaccaacagtttctttgtgttcatggtggactttcaccagaaatacacacactggatgatattaggagagtaagtatatattttacttccgagattgatttctatttatagtacattgttgagtagagcagaagtttcaaacttcacttcactgccaagattaggtaatagtaaaaattagtatactgatatcttaaggaaataacttctgtttattcacaataatatagtatgaactgtattcaaagttggtatcgttttcctatgcacattttatccttactttttgatgagttacttctgttctttcttttctttctttcacagttagatagattcaaagagccacctgcatttggaccaatgtgtgacttgttatggtccgatccttctgaagattttggaaatgaaaaatcacaggaacattttagtcacaatacagttcgaggatgttcttatttttataagtaaggaaaaatatccaagattaatcacattttagttgttaacatagcatatgcttcatacagaaaagccattattttacttaatttactctttttcccccacagctatccagcagtgtgtgaatttttgcaaaacaataatttgttatcgattattagagctcatgaagctcaagatgcagggtaagaattctgtttccctgacccaaattaacacctaaaatataaatcaaacttagtaaccatgattgatgctttacgatgcatattaagctatttgttttgcagctatagaatgtacagaaaaagtcaaactacagggttcccttcattaataacaattttttcggcacctaattacttagatgtctacaataataaaggtaagatattgttgataaaaaaaattgttaaacaacttagtattttaattgactttttttaa

SEQ ID NO: 61430 - DNA, 1066 bp, Homo sapiens
agcatcattttaatatctacattgttttccatctaataaacaaaccataattaattaattccttgtgttagacactgaagatgttcccagtttttttctttacaaatgatgctttaatgagtcatattattcatacatctttacatacttgcctgattatttttgtaggacaaattcctagaggtagaattgtggggtcaaatttctaccaatagatacctgtgttgcacatttaatatgttctaagcatgttctaggcactgaagacatatcgattaatcctcacaataatattaatgaggtaagtactgttgttttattcattttatagatgaggaacctgaggcttagagaggttaagtaacttgcccaaggtattattagtaaacagcatagccaggcaatgtgactcccagcatatgcttttaaccaccttccctagtagatactgaaaccttacctggtgaatttatgttggttactgttgtttatatctccttctccagtgtttccaatatacctttttttctgaggtgtgctaggattctcagagtggaaggaagttctagactctgtctgtcctgcttcccttaggaattttgctattttgagttcttcttcctcctgctgatagttgattattagcctcgtcaacttttcccaaattgtcacagggcttcaggcaaatcagaaaatggcccattttaacaaaaaaatttcaggcatttgaccaaaacaataaaataaacagttttatgaagcttatttggtaactaagttggtgtgcatgtccttgtgtaagattgttttgcagctgactctttttttttttttttttaattgagatggactctcactctgtcgcccaggctggagtgtagtggcgtgatctcggctcactgcaacctctgcctcccaggttcaagagattctcctgcctcagcctcccaagtagttgggattacaggtgcccaccaccactcccggctagtttttgtatttttaatagagatggagtttcgccatgttggtcaagctgatctcgaactcctggcctcaggtgatc

SEQ ID NO: 61431 - DNA, 1080 bp, Homo sapiens
catcaattgtgttgaccatacttcaatttgatcaatacttactttgctttcaattgttagggtcaaataccttgatgtcatatcagataccaaaagtgaccatttagagagcaacagaaagtattgagttagaatggatattttaactgccaccattgtaattttgtcatcttgaaacttaaaacacatccttggagtcctagagacgatctttataaatgtagatttcagtttgtcactgaccacaaatttcgttatttctgttacatctttttctagatcttgagcacatgaacacttggttacacatcatcctaatcatgactgttcatagactacttccttctcagacatttcttgatagcatttgtactatgtcttatgtaaaatacgttttaacttaagtaaaatttgttgttttagagatttttttcccttatctaataatcttcttgtttcagtgtgtggtgacatccatggccaattttttgatctgatgaaactttttgaagtaggaggatcacctgctaatacacgatacctttttcttggcgattatgtggacagaggttattttagtatagaggtaataatcataaactgtcatttgatttgctgttaagtgttaacacagatgctttcacttaatcctagttttcacaagtacctgtgttaggtttttttaataactctgcatattctgaagtttttatgaaaagctactatttattcctgttctgtctttcaaacaattcaaataaatttctttgtataactctgtttatataattataattgccatttttttcccagtggaatttatgagctgactgaggggtctttattgccctgttaactagtggccttaaaaatttagtgctatttatctctcttgcccctaaaggcattaaaccatgtgaaaaaagattacttgaattctgtctgattaaataaagtatattgtgatttttttattgcttgagccctagtgcttctgtttctccttgtgtagctattaagactcaagtatatcctatggaatctttgtgtatttggaaagtattaatttgtttttaaaaa

SEQ ID NO: 61432 - DNA, 1060 bp, Homo sapiens
agggttcgagtccagcctggccaacatggtgaaaccccgtctctactaaaaatacaaagattagccgggcatggtggtgcacgcctgtaatcccagctgctcaggaggctgaggcaggagaatcgcttgaacctgggaggcagaggttgcagtgagctcatgttgcgccactgcattctagcctgggcaacagagcaagactgcatctgaaaaaaaaaaatacacacacacacacacacacacacacacacacacacacacacaattagccaggtgtggtggtgtgtgcctgtagtctcagctacttgggaggctgaggcaggagaattgcttgaacctgggaggtgggggtttcagtgagctgagatcctgccactgcattccagccccggcgacgatgcgagactctgccaagaaaacaacaaaaaaagagattgtgtgtagggtttgtgggatagattaaaacaaaatcttataataggaattctgaaggcctcaatgaaaaggatggagggagaacagcaagaaggaaattgtatgagggaaagaaatacagagaaaaatttagaagtatagatgtagagactgtattttggatagttgccaaggatggcaatgatgggaagcatgatgagattaactgaccttaggcatctgaatgatactttggagtcaagttattcacttggcacagactgtacccccgttgaagtcagaggcctcatagggctaagagggcagtccttgcttagaattggggaacaggatcagttaattctcaggtttccttgcccagtggtagaaacagtaagaagatctctgtaccaccaccccctttttcccaattcctgatcagtctgtgttcttggtttctttttccaacttcctaaattaaaatgtttttcagtccttgtttttttagccaccatacattaaatgtgagtgaaaataccttgcgaatattattggttactatatagagatgcccttcatgtcaaaatttggataaaaggaagattttcaacagaacagtttggtcaaaatgaatgttaccaaatca

SEQ ID NO: 61433 - DNA, 1345 bp, Homo sapiens
tttttttaaccctcaagacaggatcttgctctgtcacccaggctgtagtgcagcgccatgatcatagctcactgcaggttcaaacttctgggctcaagcgatcccccaactcagcctcccaagtagctgggactacaggcacacaccaccatgcctggctaattttgtttattttttatggagacagaggtctcactatgttgcccagattggtctcaaattcctgggctccagtgactgtcctgccttggcctcccaaagtgctgcagttacaggtgtgagccaccacgcccagccatgatcagccttttgatgtctccttttgtcaaaagaaaattgtccttgtgttggtataaagacatatgctacaggagcagcattctgaagacttcaatttcaactatggctctacttcttactagtgaaacccctggagaagcaacttaatgtctctgaacctgttatctatcatttgtgaaatgggagataaaacttgcctgaccctaaccccagcactttgggaggtggaggcgggcggatcacttgaggtcatatgttcgagaccagcctggccaacatggtgaaaccccgtctctattaaaaatatactaattagccgggtgtgatggtgggcgcctgtaatcccagctactcgagaggctgaggtagggagaatcgcttgaacctgggaggcaggggttgccatgagctgagatctcaccattgcactccaactggggcaacagagcgagactctgtggaaaaaaaaaaaacaaaaacttgcctgaccaaactcaaaggatgtccctgggaatcatgtaggattatgtatgtgaaagtacttggtcaactatgaataaaacactataaatatattgtcattgctacataaattagtgtcgttaaacaagtattttggaaactataatcattaattctgtaaacatttcttaatacctatgtttttcctgtttgttttttttttttttttttttggttttggtttttttttgagatggagtctcactctgttgccctggctggagtacagtggcatgatctcggctcactgcaacctctgcctcccaggttcaagcaactctcctgcctcagcctcccaagtagctgggattataggcatctgccaccacgccccgctaatttttgtatttttagtagagacgggatttcgccatgttggccaggctgttctcaaactcctgacctcaagcgatatacccaccttgacctcccaaagtactgggattacaggcatgagccactgcacctggccagttcttaagttttagataggttttgataatggtggaacttagaatggata

SEQ ID NO: 61434 - DNA, 1705 bp, Homo sapiens
ccagcctgaccaacatggtgaaaccccgtctctactaaaaatacaaaaattagcctggtgtggtggtacacgcctgtaatcccagctactcgggaggctgaggcaggagaatcgcttgaacctgcgaggcggagattgcagtgagccgagttcatgccactgcactccagcctgggcgacagagcaagactgtcaaaaaaaaaaaaaaaaaaaaaaaaaaaaaacaataaaaacaaacaaacaaaaattagcagggtgtggtggcacgcacctgtaatcctaactacttgggaggctgaggcaggagaatcacttgaacctgagaagtggaggctgcagtgagccgagattgtgccactgcaccctgcctgggtgacagagcgatattccgtctcaaataaataaaaataaataaataaaataaatcttcagtaccatgtgtcctagtgaaagcaaaggaacagaaagagagagagaaaaagagtgtgaggggatggggtgagagggagagggagagggaacactatggtaacaagttaccttaaaaggaaaatgccaagttggaaatacagcttagtagtgaggcaaaagcttcaggttccagagctattgaatgaattggcaagagttgtaaggaaaagtttggtaaaaggaccttgatttattaaacaaagcgtgccaatcatatgacctcatttcaccataaaaaatgttttttatacacagagatgaaataagctgaagctaattgggcatcgtctgtgtatggtatgtaaaatttattttggaacatcacagtcgtgaaatagcaaatatttattaaatgtctgctgtatcacaaaactgtaggagaacaacaaaagtacaaaatataaaatacagacttggttcatgaataaatattcatgaaaaattaacaatatatgacataaggacaggtatagttaataattgccaggtaagttgctgagcccgcaagttgtcagttcaaaggaggtagtgatgactctggactggaatggtctaggaagggcttgtgtagaagcaaaggggccttgaaggatggttaggattaaaatagaggattgggaccatttatttgtgcagtgtttattgagtaccagctttgtaccaggcattgtgctaggcattgatgatacagaagtgaataggatattaagtaagatagattctcttgtagtgccggcattctagtgggggagacactattataaataaataatgtaatgaatttggtacaaagcgctactggagctgtaaagaagggattggctatcttactttgagggaaagcgtcactgagaggataatgtttcgaggtagtccttgaaggatgagtagaatttcaccagaaagtggggctagagtaggtgtaacagaagcagaaaggcatggagtttgaaaaaagcatgaaatgtatggcaaaagtatgtgaagtgcttggcaaggagtgacaggaatgaagttagaaaagatcttttgtattacaagttgaggagctaaaacttaagctgttaagcagtatagcagtatatagtacctggatgattaaaagcacaagctctggagtcagactgcctgggtttgaatcctagctctactacttaataaccttcttgccatggacaagatacttaacatctccaagccttaattttcttatctgtaaagtagagctaataaa

SEQ ID NO: 61435 - DNA, 1052 bp, Homo sapiens
aataacgagtttatggaatccttaatacagagaaatcttaaaaaaaaaatagtaatgcagacattcattctatcaagaaatcctggagttttgtgggggtgggaacgggacattggctacctcttcattttctgactgtatttctgtgttgtgtgttcatttccctgggcacttttcaccagactgttagatggggtaaccaatcacattcctgaacaatgagtttatgctatccttacgtttgtgaatcttcttattccttgtcatatatatggtaatgttttttctgtactgctttaatgcagtgaaaataagattccaaacataaggcagattccttaggggtgagttgtgagtccaaggcagtcatatttgcaggttattggtgtggaataaaagccatttgatttagataaataggaaaggagcttgttaatatagaaaattatagttaaataaagcttatggttatcatatttctggtgcttcattgtgccctcttcatagagacaactttcatttctttatggaatttgttaaccagttggaattcctgtatggattatatgttttaaaatggtgtgtaacagactaatttgcactgctcatggagtctcctgcatttactgggaaattcacctttcttacagatccagaaattcacttttaaatttcatcttcaggattcttccttgtcttttattcagtaattatactataatgtgatacctgatattagagaatactggttgcctgatgataaatgatgtgagttcagcttaagtttaacttgttaaaatccaaatttcttttaagtccacaatgtggtggtagttttgtatcgatacattttcatagtagtgatattatggagactgtctgttggcattgaatgcaagtagtctttttctccctggaattttttttttttttttgagacggagtttcactcttgttgcccaagtggagtgcagtggcgcgatctctactcactgcaacctctgcctcctgggttcaagcgattctcctgcctcagcctcccgagtagctgg

SEQ ID NO: 61436 - DNA, 1034 bp, Homo sapiens
actccatctcaaaaaacaaaacaaaacaacaacaaaataaactactgtggcagcgttggtaccctgcatcactgccatggttgtgctattctcatctcaacatagaattggtgggttctcctaagggtgtcaggaacctctaaaaagatgtgattctttgggaggggatatttgaaattccaacttccattccccctagcaaaaggaagcagctgctgtttaagggttttatctgagccactttaaagatgaatccatggtattactctggatactagccattccttaggattttaaggtcacattttattcctggatgctttatgtccccacctccacctgagccctcatcctctgttccctactatactcccaacttctactctttgttttatccacctatccctattacctgaccctttgtcttccctgtctcccatccttggggggacatgtagccctgtggtcatggttctgatgacatcatcagggcagcccccctgcccaggtattatggcctgtcagcattccctgtgccctccaaaccttaggcctagaatgcggagctgccaacataacattcacccttttgaacagatggagtcaggcacactaacacagccttctgtcctcaataacacagccattattgccacttgctcagtcgtcaatgtaaaccctcagagtcagctgaactattttaggccaaacatactgtttttgtaaagtatttttcattaataaatctataagacagttctatttaattccttgtcattcttccctttgtatgctcttgctttctttgtattggggctggaagtctggataaatatatgaagtggcttttgactgagtggaagtgaggagccagagacgagttgaaggatatacaatcaaggtgggaatcaatgggtcctaaaatagggtgcctttcctttctagtattgctgctaggatgtttcccatccctttcctgacagagcattcagtactcagtacattatacacttccttcctcccctccttaggaa

SEQ ID NO: 61437 - DNA, 1035 bp, Homo sapiens
gtctctattttttttaaaaagaaaagctgcgtgaggttttggtatggtggctctaggagtatagtcatcacaaagggagtatacgtttgccatatattgctatatattagggagcccttcttttgtaggtgtgtgtatagtggatgagagattatagtggagggaggtagaggtatggcaacatccatgagactgtttcatttgcccaggttggaggtatgagatttgattttgatgtatattaagaattttaagaaatggaatcaaaagcacagcttgattcattctttcccttgtatgtatgctcttggaggagtagggaattgggctacacagctaggcatggctctctgggaaggagaatggttttctgaagatgctcagtctttgggtttcttttctttccccaggaacttcaaggagtgtccagcagtttctggctatgtgtgacaggggtgaaacttcccaaggggccaagtacacaggaaggactttgaactaccagagcctcccccatcgctccagaacagacaactcctgggcaccctggtcagagaccaaccagcatattgggaccagattcctgactactccagggtgcaatcctcaactaacctacactgccacactaccagaaagaagcaagggccttcaggttcctcacactcagtcctggagtgatcttttccattcaccctcccaccctcccattgttcatcctgtgtacccaccatctagcagtcttcatgtacccctgaggtcagcttggaattcagatcctgttccagggtcccgaacccctggtcctcgaagagtagatatgcccccagatgatgactggaggcaaagcagttatgcctcccactctggacacaggagaacagtgggagaggggtttctgtttgttctatcagatgctcccagaagagagcagatcagggctagagtcctgcagcacagtcaatggtaaaggttattcctttcctttcctggagctacacctttctttgtaaaactgtactgtgggccgggcgc

SEQ ID NO: 61438 - DNA, 1076 bp, Homo sapiens
tgaaagtatgagccatcagaagaatattcttggtaacagaaacaggaagtataaagactctgaggtagcaatgagcttggtgtgtttgaggaatattaaagttagagtgtaaaagctccaggaatgataggaaataaagtgaggagcagcagggccatatcacacaggaccttgtaggccacagtaaggaggagtggatgggagataggaaaagcagattgaaggctgttgcagtagtccaggtgaatttaaatataaaacccataggtagaaatgatagtccttggcaagtaatggaattgtggatgggaagtgggaaatcaaggtcattgccaatgtttgaatatgggtgatttaggaaaatgaggtgccaggaggaggagtttggaaggattttggttcaattttggatatgttagtgtttcagatgttaaaggggaatatttctgggtatttatcataaaagtagataactaatagggagtagagcaggacattagcatcagtaaatacaaacttgacaggcaaaagaggaagctgtggaatgtgtagcagtgacaggagagaagatggggtagagttcttgattctacatttaaacatatatagtttcattcccagtacttagaataagtgaaggatttttttttctcattctctcaggctttctgaatttctcatatttcgtttttatttttaaatttctatctcaatctctctaattctactgttagcattaaggagtttgctaaagacctgaatgatagggttgggaaggtgagggatatgaggaagactggttaagggataaggatctgaagtttgcagtttcttagagggctagcagggagagcaactgagtaaattgggtcctgttccagaacaaggcatgtaggcatgtttgtgctctggttccctccatttccctttgcttgcctcactgtgtttacccaactacatcctgctttgtgttaatcctcatctctatgtttttttgtcttgtctcattataaggattcatcaaacgtgaggaagcctttggaaaccgggcaccgttgttccagctcctcttccct

SEQ ID NO: 61439 - DNA, 1020 bp, Homo sapiens
ttaatggcaaattgttcttttcctaggagagttggcttcctttcttctgacttctgtatcattcattgattcattcttttaaataaatgcttattgattctgtacaagattcctagcacaaaaataaacaaataaataagtgcttattgagtgtgttctaggtattgtgctaggtgctggagctacaatggtgagttagatatagtccctgcttttatggagcttacagtctacagtgagggacggataaataaacaaacagttataatgtgttaaggatttgatcctatgggaacataatagaagggatatttaaatcaggcttgaggtatcatggaaggcttcctggaggaagcaaaaagaatatagcaagtaaaagggacctgagcaaatattaactgaattaaaagaagcttatttagtatggcaggattagaaagtctggcaaggggagatgatggagagtgttgacaagagaggatacaaagaatattatggaccacagacagccctgtatgtcacagtaagtagtttggaaggatagagataagtcgatgtatttgagacccagttaggaagtaaacatcagtgggagttggtgcctgcctggatgttgggagtggggataaaggatgatactcaagttttatgggtagataatgatatatttgagggaagatatgcattcagttttacatatattaagcttgagtggaggtatctggcaggcttttggaatgagatatataagctgcaaattgaaatctgggaatcatagccattgaaaaagaggaaaagacttgcagaaagagaagaggagccaggacatatccctaaagagcatcagatttaaggtggttcttctgaagaaccctaaaaggagactgagaaaaaaagattagagagactgaagggaaaccaaggatgtgtggtaccatagtcaccaaggggagagtgtttcaagaagaaaggaatagccgggcgcggtggctcacgcctgtaatcccagcactttgggag

SEQ ID NO: 61440 - DNA, 1167 bp, Homo sapiens
tgaataatatcagcttcagccagatatatatatatatattagaatcaaatcatcaaatcaagacatgaattggccatggacatatgtatcaaatgtaggtcaggggcatatacagttttggaatggaaaacttaattagttggattggggatagccccttgggagtcaccaatccagtttagagcaactgaacaatctagaaagattttgaaaagaggtaagcatttagtggttgtttagaaatttaaatgatttgagagaagctaaggggaaaagagcattacatatgtaaaacattcctgaggagctcctgctctcagagtaaaagaggtcaccaggtgagatggtaagagtactgtactgaaaatcaagaggatttaattttaatcctggttaaactactaaactctcagaccctggaactcattttcctgttatataaaatgaggaggtttgatagatgattattatgatcatttctattctgaactagactggagataatttcctttgtcaccacagatactttagaaaatcactgtgttagaaaacaaaactcactgtgttagatactttcctctgtctataagtcttgagcctaagtctgacagaagctgattatgtttacaaaaatgaaatgaagcaagatggggacactcagtaaactatctatattctaaaattcttgtttctttttttttttgagacggagtctcgctctgtcacccgggctggagtgcagtggcgtgatctccgctcactgcaagctacgcctcccgggttcacgccattctcctgcctcagcctcccgagtagctgggattacaggtgcctgccaccacgcccggctaattttttgtatttttagtagagacagggttttaccatgttagccagggtggtctcgatctcctgacctcgtgatctgcccgtgttggcctcccaaagtgctgggattacaggtgtgagccaccgcgcccagcccctcttgcttctaaattccaggagcatgttcctccgttgaattcaaggatgcatatttattattaaatgaaacaacagctcctgagtttgtgctgctaggcttagaggttaggccctaggggaagagatggcctcaacttgtatttgtgttttcctcttcaggctctgcagatggcatgggga

SEQ ID NO: 61441 - DNA, 1046 bp, Homo sapiens
tgcatgtgagactagctgattttgtttcctaatttgcaagtagaatgtgattggaatgcgacttcacaggtagtgaagaatattggcaagggctccacttaatgttactgtgcaactttggtgagggtgtttaataaagaggattaacgttacctatttacctgagtgtgagctgaccatgtgccttttcttttgtgatcctctgaactactgactctacttgtgcttgtctttctgtttatttttaccattccctgtgtgaatagctagaaatgggaatggaatgttgagttctttctgtaagtgttcctgtcagtcaaggcagcttatgactagctctctccatttgtttcagtgaacagcctatcccgctccaagtattgttaagccaagaggcccaactggaatccggcatggatacagagtttggggccagttctttcttccattcacctgcttcctgccatgagtcacactcatcactatctccagagtcatctgccccacagcacagctcccccagtagatctgccttgaagcttctgacttcggttgaagtagacaacattgaaccctctgcattccacaggcaaggtttacctaaagcaccagggtggactgagaagaattctcatcatagttgggagccattggatgccccagagggtaagctgcaaggctctaggtgtgacaacagcagttgcagcaagctccctccacaagaaggaagaggcattgctcaagaacagctgttccaagaaaagaaggatcctgctaacccctccccggtgatgcctggaatagccacctctgagaggggtgatgaacacagcctaggctgtagtccttcaaattcatcagctcagcccagccttcccctgtatagaacctgccaccccataatgcctgttgcttcttcatttgtgcttcactgtcctgatcctgtgcagaaaactaaccaatgcctccaaggccaaagcctcaaaacttcattgactttaaaagtggacagaggcagtgaggagacctataggccagagtttccc

SEQ ID NO: 61442 - DNA, 1676 bp, Homo sapiens
cagtgaacgtcttagttgacatctagggtgttctgacactagttggcaagaattgcactgggaaagagcagttcaattccgggcataagaacctaaccttctgctattactttgttctttccttgagggacttcctccgctcgcactgtcatataagtaccgcgcgctaaccgattgcaccactggagctccttccttgagggacttcctaagggtcttggtgttagaatatgtggccattaatggcatgcctctctttcatggccttggtaacatcttggttaaggcaaaatggatgtcctgcttgttttcagataattcttaataggaatagacagttggaataagggtagaccagtggctcagcagcaaggatctctgtgtactgaagggaaacaacagtacacaggaaaatttggaatgaattgtaatgaaaatgaaaagtgctggccctttcagggaggagtgacggctttgagaggtccctgcaagaggcagagtcagtgtttgaagagtcactacatctggaacagaaaggagactgtgctgcagctttggctctctgtaatgaagctatctgtaagtaactctaactgctatggctgtggcacttttgactaacttcacaataggtattattagtgttgtcactcagacaggataaaaacagtttttgtgtctcctcactcttgctctcccaaactgagtcgcgttagctgtttttgccctttgatttctaagtgtacctggcactggcactgtggcctatggatatttaccagaataacctcagcaaggaatccatagatgatttctccagtcatgcctaccttcttatttcaggataaagttagacctcagatgtgaaattagtctgctcttttgctagtcactggctagtgggttggagcttatagaaggaaaactgaataaattggctatgacttcccaggcctgtgactttttaattcagtatttgattctttctgattctcccctaccttcatagtatgcagcaccataaacttacagcaagagactaaggcttagaattggtatcagcttcttgtatgtgacccacaagaagctgtggtctataaagacagatgcaggtttggatcttatttctgctgttggccattgggaagagaggggtgagagtagagtgtggagaccagagtcagacaggtcagatgcaaaggacaagagtggcaatctctaagatggaggcactggtttatcttcttgatttattttagttttgtttttttaatttggattaacctgtttggcctccatggcttccatcaatgttccttatagccagaggcagctgtgtgccctggacagcatatgcatggtccatgccttgcgttcctgctacatattttgagttttactgcatatctttgctcattttttttcaattttattctttttatttttatttgtgttttgtgttctgtttctgctatattttcttttgcattttagctaaactaagacttgccctgcatggtgccagctgtagcacgcacagcagagccctagtcgataagaagttgcaaatcagtattcgaaaagcacggagcctgcaggatcgcatgcagcagcagcaatcaccacagcagccgtcgcagccctcagcctgcctcccaacacaggcggggactctc

SEQ ID NO: 61443 - DNA, 1022 bp, Homo sapiens
ccatctaaatagatcttacttttcacaactttttcatcacttctgcttttcccccgataggttttataaaaccctcacagtttttcacagtggcaggcaaagtgagggcttcagcagggtagggaaagggatgggaggaattttacatgtgtctgggtgatctggaagttgggtgttgggaagaatggcttgatggtatagcatatccttctcacacttgtgtctaggaagttcttgccttatggagctttgttgtgtccatctcttttccttctctttgctactgttctgtttcctcactttttgcatatgtgtttcctcctcctctcagggagggagccctccatctcaagtgacactcgaacagattcctcaacggagagctatccctacaaacattcccaccatgagtctgtggtcagtcacttctcttctgattctcaggggacagtcatctataatgtggaaaatgattccatgtctcagagcagtcgggacacaggtagggacttatacagagggtcctgcttgcctgaatcaattcctgcatagatctcctaagaaaaagaaactgtgaggccaggcgcagtggctcacacctgtaatcccagcactttgggaggccgaggcgggcggccaaggtgggtggatcatgaggtaaggagatggagaccatcctggctaacacacggtgaaactccgtctctactaaaaatacaaaaaaaaaattagttgggcatggtggcaggcacctgtagtcctacctactcgggaggctgaggcaggagaatggcatgaacccaggaggcgaagctttcagtgagctgggatcgtgccactgcactccagcctgggcaacagagcgagactccgtctcaaaaaaaaaaaaaaggagaaagaaactgggggaagtcagaaatgttcgttacgcaaaggcacaatggcacagaatttgggcaattcaatgggatacaaagaagcaacacagttttgaatgaaccgtgatgctccattgcacatac

SEQ ID NO: 61444 - DNA, 1039 bp, Homo sapiens
gtgtcatgatctcggttcactgcaatctctgcctcctgcctcaacgtctcaagtagctgggattacagacatgcaccaccacacccagctgatttttgtatttttagtagagatggggtttcactatgttggccaggctggtctcgaatacctgacctcaagagatctgttcacctcaccctcccaaagtgtaggaattacaggcgtgagccaccacactgggcctaaagatagggtcttgctatctagtctaggttgttctcgaactcttgtcctcaagtaattctcttaccttggcctcacaaagtgctgaagttaaattctgatgattaatctaaactaacaaaaatcttaaactgaagggaagagaagcaagtcagtaccttacttaagaaatgctggtggagtctgctgagagatgatgtggaatggttgaatatgtgactgtgctttcttttctcttctttcccctcagctgtttttcagagtgacggatgaccgggccaagcaatctgaactgtacttagttggaatgatctgttactatggcaaacattattctacattcttttttcaaacaaagattcgcaaatggatgtattttgatgatgctcatgtcaaggaggtaggagtagtcaagtcctttttgaagtgtttggtgactacaaaaaaaaagaataatcatttgtctttagtgtttcattttcataattttgaatgggacctccccacatttctataaaacatatatatatatatattttttttttttttaattttttttttttttgagatggagtctcactctgtcacccaggttggagtgcagtggcttggtcttggctcactgcaatctctgcctcctgggttcaagtgattctcccacctcagcctcctgagtagctgggagtacatgcgcatgctaccacacctggctaatttttgtatttttagtagagacagagtttcactatgtttgccaggctggtctcgaactcctgaccttgtgatccgcctacctcagcctcccaaagtgctg

SEQ ID NO: 61445 - DNA, 1016 bp, Homo sapiens
tgtgtttttagcaggacggtgtttcatcatgttggtcaggctggtcttgaactcgtgacctcaaatgatctacctgccttggcctcccaaagtgctgggattacaggcgtgagccacagtgcctggcctattggactttaattggagacattcaaatagttttatatcttggccgggcatggtggctcatgcctataatcctagcactttgggaggcccaggtgggcggatcacttgaggctaagagttcgagaccagcctggccaacatgacaaaaccctgtctctactaaaaatgtcaagaattagccaggcatggttgcgcgtgcctgtaatcccagctattctgaaggctgaggcatgagaattgcttgaacccaggaggcggaggtttctgtgagctgagattgagcccctgcactccagccaggtaacagagcgagaccctgtctcaaaaaaaccaccaccaacaacaataaaaacacaaatagttttatatccttattgctgaatctgtgctatattgtaggaatgcagaacagtaatttaaaaataatttttgttctccttctttcctctcccatccctccccttttcttaggctcagtactggccagcaaagtgggaggaggagtggggattctatgagctttggatctggggacaggtagaggtacttactgtgtttatgggacactgagcctggtcaggggctttggtatagggggcagaggaagaaagtcaaatgtgtgagttaggaatgtacattaatgtttgatttagcagtaactaaatacaaaccatcatcccccttctattccccatcttgaagcaatcaggctatttgtatgctggaaagacgagagaaaccttcaccaagcatgtttggtgagctgctgcagaatgccagcaccatgggggatctgcggaactgtccagtgagttaaatcaggggtggggtttggagtgggaaagggaaccatcgatcagtggaattgatgcaaagccagtgggaaa

SEQ ID NO: 61446 - DNA, 1050 bp, Homo sapiens
attaaattacatatgtgatgatattaagacattaataacttttggggtgtgtgtgataatgatattattatttatttagttatttattgagacagggtcttgctctgtcacccaggctgaagtgcagtggtgcaattatagctcactgtagcctggaactcttgggcttaaatgatcttcccacctcagccaactgtgtagctgaaactacaggcatatgccactgtacccagttaatttttttttgtagagacaaggtcttgccttgttgcccaggctggtctcaaactcctggctttaagccatcctcccaaagtgctgggattataggcatgagccacagtgcccagccttatggtcatgtttcagagaaaaagttattattttttagagatatattttgaaatatttacaaatgaaaaatgtttggcacttgtttcaaaatgatctgagagtaagttaagtggatgggtggtatagatgaaataagattggccacaggttgataattgttgaagttgaatgataaataaagggagttgatttagctcttctgtctactcttgtatgtttgaaattttttacaataaaatgttaaaatcctatgttattatttttgagtgccaaaagggtaaaatgtttttcccctcttaaaagacaactttcaacattcttttgaatacagaaaaccaagtgaacgtctcttttccagtagtcagtgatcctcaaggactagctcctttaacttacttacagagggtagtgtttacaaagaagccagactggccaattaagttctatgattcccaggagatgtagcgaaagcagtgattatgagagccaaaattgggaagtccaggttgagaagagaaaccctaagaattgagttaatggcagggtgtaaagtttgtcacacctttgcagaaggtattgcagggatgaagtgggctgcccactggagcactttccaaagaccttgagctcaaaaagcaccaaaattagtgacaacctttctccttaatcctcaccttctctactcatgacttcttt

SEQ ID NO: 61447 - DNA, 1081 bp, Homo sapiens
cttaaggagatcacacttctcttagaaatgtctgaaaattgagagtcctaacaaagataaaattccacactacagctcacatttctacagttcacatttctaatataagttttaaaatatttttgcttttcttgtgtggataatgaatataaatccttattcttcagctttaacccgtaaatttcctcttccggatcacatttgatgtatatcatgtcatattttaactgtattaccttcactttatgttcaaattaatatctttcccagaatatgaccatttatttttcttgttagatacctcaccttttttcacatttgttttaatatactagaatgaagttttcttttgggaataaagacatcttctgcagtcattacctatgtttgtttgaactctttactttaaaattaaatggtagctttttatagagtaatgaaatattttccttttctcatcaggttttgtggcacttggatatcttccgacgtagctttaggcagcttacaactcacaagtgcatgggagattcctgcatcttttgcgctctcaaggtaagtacttccaattagtttcttctcactaccattgggtggccaaatggtcaatatcaaggtggtttggttaatcaggatgatgccaaagaatttgttactgaattatctacctgtggtttagtgcaaaaatggatatgatttgtttgcttgcttcaaagaattagtacttggcttgggtagtctcttttactgaaccttttttgcttatgcagctctgtttgatgtgatagaatactatgcaagtatgcttctccttttttttttttttttttttttttttgggatgaagtctcactctgtcacccagtctggagtgcactggtgcgacctcagctcactgcagcctccgcctcctgggttccagcaattctcctgtctcagcctcccgagtagctgggattataggcgtgtgccaccatgctcggttaatttttgtatttttagtagagacggggtttcgccatgttggccaggctggtctcaaactcctgacttcaggtgatctgcctgcctcggcctccca

SEQ ID NO: 61448 - DNA, 1047 bp, Homo sapiens
caaggcaatagagggtgaggaggatcatgttggattcttgcttctctgtctgcctctccttccagttggaaaaatcttcagtccataagaagcattatcaacaagcctgaagaacacatcttaccctgatcctggatgctgttggagttgagaattacatccacttcaccaggactttatggaggctgttcaagaaaaatagaaggaagcaatacttaaggatttctctgtttgcattagtcctgtgccatgttacattttggagattgtttggaacaagtgagggagggctctgtcatcttgatctaggaggatacctgagtcccttgactacacagatgatatttggaaggtggtaaagtcaaaatcttccaaaataaattcactaaattctggattccctttccttttagaactttagcagacagaaattcctgccaaaaaggcacaaatccttctccatttttttttcaggctaaatgtgaacaataatgtcttggaagagaaattatttttcagggggtcgtggtagtgtacaagggatgtttgcacctcgaagctcaacctccatagcccccagcaaaggcctcagcaatgagccagggcaaaacagctgcttcctcaacagtgccctgcaggtaagggtcatttctttatttttggtgaactttgacttttaattgctgatgctgtatttctgataactctttttaaataaaatgtttgatagtctctgtttgaggttagtaacctgagataatttttacatttatctgtgtgatctttggcaagtcactttatctctttgaatctcaattacctcatttgtaaaaaagagggattaataatgataagagaaataataataactgtaactactattatttacatgcctaaagggaggtaaatggaccaggtgatctttcagacagagtcttgctctgtcgcccaggctggagtgcagtggcgcaatctcggctcactgcaacctccgcctcccaggttcaagtgattctcttgcctcagcctcccgagtagctgggacta

SEQ ID NO: 61449 - DNA, 1048 bp, Homo sapiens
atttgggaagtcaaggcaggtggatcacctgaagtcaggggtttgagaccagcccctggtgaaatcccgtctctactaaaaatacaaaaattagccaggcatagtggcacatgcctgtaatcccagctactcgggaggctgaggcaggaggattgcttgaacctaagaggcggaggctgcagtgagccaatattgcgcgactgcactccagcctgggtgacagtgagattctgcctcagaaacaaaacaaaacaaaacaaaacaaaacccaaaaaacaaaactaggtagtgagagccatacagataaaactataattcccctcctcacatatcttcagtaaatggtattggagaaggattacattgtttaatgctatatctacaatttaagtgaaatgtttttggtgttagtatttctctggaccacttgttactgcctctcttgtctggtcctttatgctctcacttctagttggtgacacatctagaacaggtctgagaacttactgctttaccctacataatactgccattcagagcctgagaatcttttctctgctactgcgtttttctccttttgctccctgtactcaggagtgtgtgtcatagggcaggctgagtttcagttagctcctaatgtggatattggaaaccccacctgcctgccaagtccttttggctgtgagcaaagtggaggcttggtacttgtcattcctttgcagcagttgagctgaaggaatgctgcatggcttgttggaagttgcttagtggccttgagtggggtgtgtatgagggtgtgtgtagaaaggtgagggtcttatagtctgtgtgggagatatgggttcttttctagtgtcatgttaatcatcaggcagtatttattgactgccttcttatgactggcactgtaataggagcttttggaatagaataataaaatatataattaagtcattgtttaatagtcaaacatttctagatctgccacttaccagtgttgaattgggcaagttaatgtctttaagcctctctttacttttctgtaaaa

SEQ ID NO: 61450 - DNA, 1055 bp, Homo sapiens
atcagtatgcttataaaacaacttctttcaataaaactgttttataacctcaggtaatacatagaagggtgtgtgttggtcctctggggcctttgtgccctgcctgcaaatgcaagttctcggttgactgatcacatgtttgggggtgggactctgcctgctgtttgttcttggtgatgtaactaggtctcttccccgagagaggggtggagatctttccctgttgtggactttggggttgagaacccttagatcccaagcattttaaaattgactcagtagattccaatggctcagtttaaataataattttctttaatagtgtggctcgtttaagacagttggaggagttttgcctattaaaatgatttgatttaatttaagcccagtcttggaattctgaattagggattccaacaataacattgttttgattattctgtaaacaactacaaaaatgttgtcttctcgtgctccttttgactgcagtgcaaaggaatttttttgtgggggactggcccttctttggaagcagcagccaccctgcaaaccttattgtttaatgacctttgtcatcaggaatgccccaggaaacagcttcataattgtttttcttaagcctcaggtgaagtttgtgataacgtcctttcaagttacttttggttagtttcttaagtttactttgtttttaattggaagctccacctttttaactttgtcatgaattgtcagtgctgagttcctggtagttggtaaaaagaattgccttctctctgatatcctgttctgcgggaagtccttgtggtttagattcacagtttctcattgttgctagctacagtcgtctcctccctcctagccttccctccccacagctctagctattcccatatccctccccattcttgtatcacttgccccacagataccctcgtgattagaggtcttttgctggaggttgactgtgctgtctggtaagtattgtagttgttgtggtaaaaacagatagatagaagattcaggaaccggttagtttttgtgaagttttctttctt

SEQ ID NO: 61451 - DNA, 1856 bp, Homo sapiens
aatgatttacaaatattttctcccatctcatgggttgtcctttctcttttcctttgattcacagttctgttttttaaaaattttattatatattttctaagacatttaaaagaataacacagtaaacatctttataatcgccatccagcaaattaaatattagtaaattggtttgctcccgagtttccccttattgattacaagtccctcaccaaaggtaaccactaatgaatttgatttttctctgacatagtttatactccttagacagcctgttagcgtattagaagcttgtgatgactgaagtaaaaatactgcaaaggtcctggggaaggctaattagggtgggatgagttctttcttagatttttgtgatgctgttttcaaaagcccagttcagcaccctatcagagatacttgcacataataggtgtatagaaatgtttgttgaataactatttggaacccatgtacttctgattgaagatattttgtaccactattatactatttttttttttttttttttttttttgagacagagtcttgctctgtcgcccaggctggagtgcagtggtgcgatctcagctcactgcaacctccacctcctgagttcaagcagttctcctgtctcagtctcccaagtagctgggactacaggcgcacaccaccacgcctggctaatttttgtatttttattagagacaggttttcaccttggtcaggctggccttgaactcctgacctcaggtgatccacccgccttggcctcccaaagttctgggattataggcatgagccacagtgcctggccactattatactattttttttttttgaatcagagtcttgctctgttacccaggctggagtgcagtagcatgatctcagcttactgcaagctctgcctcctgggttcacgccattctcctgcctcagcctcctgagtagctgggactacagatgcccgccaccacgcccggctaatttttttataattttagtagagatggggtttcacagtgttagccagaatggtcttgatctcctgacctcgtgatctgcccacctcggcctcccaaagtgctgggattacaggcatgagccaccgtgcccggctattatactattttttcatgaagtgaagtttacatatctctgtattaggattactgtatactttaccaataaatagactgctatggcagaataaaggttttcttagaggtagtaaaactgagggcaaacctgagttgggaacattttagctctaaatacatacagtacatttagctgccttggctaatttaacttttagacagggcaaatggaataaggcagatgttgaggtgctacattgttggttcagaaaaatggttgtgagttttgaaagaaggcatgattctggtaagatctgactgtgggcaaggggctgttgaaacaaacagtgcagtgtttccagggcagtggtgaaggacttgacctccgttgtagctgaaaatgaagtccttctctaacaaagccatagtagcagcagcagcagctgttgccactgccacctgcgttcagtggctgtgtgaggtggctagaccaggaaatgattccatggcactaggcatgtataaggaaagacttactttggctctggcaaagtggttgtacaggttgtgggtgtcactttaaacatacaaagatctgcttgctggaggaggggcagcttcttgaggatcaggtgtgcatctgaaagggatgagctcatccttctaaccagacctgctctagacgctgactgaatgttttcctagttccaagtcctgcagctgggagaagcaggaaatgattgacacttcaggcac

SEQ ID NO: 61452 - DNA, 1079 bp, Homo sapiens
gggggtggggcggggctgaggccccccaggctgtcgttcgcccttttgggggctaaaggccggaaaataaccgaggtggtagttggccgctgcccttgtaggcccggggtaaagggcctggctgaccggttaaagatgcttggagctggggtcggggctccaccacctggttggaagggtctggggctggctacaggcgccggcaaggggctgggtgggagcacagctgcctctgggggagcactctgggcccgaggtggtgactgcaggccttccccgttgagcatggctgctggttcgacccgtgccagttcctgggtgctggagtctgcgcgctggcgctgctgttcaaagagctgcacccctcgcccagagacctcactcagctgccctcccagcccagagccctggccctctgatgctcttgagcccgccctggcaagctccatgtccagatagggactgtcccagtcagattgattggtgaggctgcgggcgtcagagaaggcttcttcgtccagctcggactcactcgtggggggaacgccgtcctcctcctcagcgcctgtcccagcagcagccccgaagctcaccagggtgtacttcttggctctctgccgccgtttcttaaacataagtacccctttggagtgggggttgggggctgcagtgagcagggatgcaattgtcctgcatttggtcttggcctcttttatgctcttctcttggaggctctctgcacgttgcagttctggggaggccaagaggtaaaatggtcaggggggcttcccagcctcttttagtcctgttccccaaggctttcaccccccatcccagcaagctccctcttgcactgacccgacccacaatgtcccctgtgacaaagtcctctgacttaggggcagagtggagggtgaaaggtgaaaccaaggacagttaaagataaggcagagtccagttggctgccctgacactgctctgaccacagctcttccatcccattttactgctattctgctcctatcttccaagagatgtgctcttatccaccccacacacattcctcacctgcctcccat

SEQ ID NO: 61453 - DNA, 1149 bp, Homo sapiens
ggtcaggagttcaagaccagcctggccaagatggtgaaacccccatctctactaaaaagacaaaaaaattagctggtgtggtggtggatgcctgtaatcctagctactcaggaggctgaggcagagaactgcttgaacctggaaggtggaggttgcagccaagagggtgccactgcactccagcctgggcgacagagagagactctatctcaaaataaattaaaaaaatacaaaaattagctggacgtggtggtgcatgcctgtaatcccagctactggggaggctgaggcaggagaagtgcttaagcccaggaggcagaggttgcaatgagttgagatcatgccactgtaatccagcatgagtgacagagcaaaactgtctcaaaaaaaaattaaaataataataaaaaaagggaagggaagggcgcccacggggctctcagctacacagggccagatttatgttcctcaatcccagttatccaaacttctcaggtagcttagctagagcaatacaacccaacctgaagactctgctgatttccctccctagctcaaaggaaacagaaacagaaacataccttggggaggtgtttgctgatagcctggtactgggccattgtaggctccatagggaatggcgggggctgtggaccctgattgcccaccatagctggactgatgataccctgggtagatgggctggggctgcccaaatggtggcacaggtggaactgactggttgacgttcattatgaaagcattcccaatttgatctcacctgtgagagagaggagaaattagtcaaaatgaactttctaaagagagcaactattcagggcaggaagtagagataaaaagaaattgaccttatcagacagtgatcagtttaataatcctcacacttccacaggatcttagtaattttctgccccagccagcattcagattatctcctaaaagcaaggattttgttattctgaccatccaccctttgtcactgtctaaatagtataaatttcaacttcagacagatccactgaaatggagcagcagcctccattccccagtggtatgatttctagtgtctagtcacacagtcttgtggctgatgaactaccttgatgttacaggtgaaagaaacaatgt

SEQ ID NO: 61454 - DNA, 1168 bp, Homo sapiens
acttgaaatcccagacttgggaggctgaggcagaagaatcatgaggcagaggttgccgtgagccgagatcgtgccattgcactccagcctgggcgatagagtgagactccgtctcataaataaataaataaataaataaataaaattgatctgatgaaagtagaaaggttaggaatgtatgggggtttgtgttttgttttgttttttttctctcctttgcctttcttgtagatcactttttctcttccctctacccttttgtactttgtcttcttttttccaggttacaggtactgctgacgtccagccctgtggattattgacccatcttagtacctgggttcctttgcatattcttcattttctgtgaacttgagtttcttgctttactagacatacatcttcaataatggttgcagtcctgttgagactaccctaagggagaaatgggaagaggaaacttcaggattatttgcatctcttttgacttgcccctttcctctagaacaggcacttagtaggactgattggttaagtttgggcatggccagttatgaactgaaagatactaaaagggaaaccacataaatggtgaaaacttcagtggtacagtgacccaataaacccatcttagcatgaaagtccattaaaggagggcagtcatctctattagagtgctttttaaaattttttaatttttttttttgagacagggtctcactccgtggcccaagctagagtgcagtggcaggatcacaactccctggagcctggatgtctcaggctcaggtgaccctcccacctcagtttcccaggtagctgggactacaggcatgcgccaccacacccagctaattttttgtatttttagtagagatggggtttcgctgtgttgcccaggctgatctcaaaactcctgagctcaagcaatctgcccaccttggcctcccaaagtgctaggattacaggagtgagccactgcacctggtcaggagtgttgtttgtgtttggtaaataaagagtaaaatataactgtgggaaaggggtatgataatagaaaagtcactttctgacactttaactgggtgtccagaacacacattttaagcattgaatgtaagcctgggtaagtcaaacaagtggggtacatagaagataacaagtacac

SEQ ID NO: 61455 - DNA, 1029 bp, Homo sapiens
cagctctccagtgggactttacatacacactgccctcataaactgtcgttcactcttccccatccacacagcagaagcctaccaaacaaaagtactggggacttcctcctaaaactgtccaagtaagagcagagaaaccagtgaggctttccttctcttaacatctaacatcagagaattcccacctgctctacccattaggaagaatgccatccttctagatctaaggggacaagacccagtcactgctccacagaaggacaaaggctactatactatgtatgtacagtagtgacagagtgcagccctcagacatctactggtgctgctgctcactcttggtttcccttccttctctgcccagctatagagtaaaacagccccccaaaagactcctagaacctcaagttccagttcagaatcaaattatatgtaagttctccaagaagatgaacaaaaagggaaaattatcagaaaatgctaggcaaacatttcatctagattgacctgcctatctggcagacacaaacccttcctcaggaccatgaaagtttctacttacagggcttgggatggcatcagggtccaggcgcttaggaggcagtggctgaggaggcccaggctgactgccaaaggtgggtgctgctgggtaggggcctccataattagactgagggccccgggctggtccgaaggaacctgagacaaggacacaaggttgatgaactcaaaatcccatccctatctcttcttaaggcctcaggaaaatgactagactcctaaaaacatagaattatgaggcacactaatgcctggcaaagacattcagaaaaataccatgttatcagaacgacaagaaaaaataatgtcttacaaaccccatatcctaggaataataccctgaagctacccatctaattcaccacttagcaagtaatactaaaaacaaacaaataaaaaacatcaaaaaccacctgagtagctgaagcctctagcttctaagacagaccttgggaaagactcaccatt

SEQ ID NO: 61456 - DNA, 1013 bp, Homo sapiens
agatgaaatgtttgcctagcattttctgataattttccctttttgttcatcttcttggagaacttacatataatttgattctgaactggaacttgaggttctaggagtcttttggggggctgttttactctatagctgggcagagaaggaagggaaaccaagagtgagcagcagcaccagtagatgtctgagggctgcactctgtcactactgtacatacatagtatagtagcctttgtccttctgtggagcagtgactgggtcttgtccccttagatctagaaggatggcattcttcctaatgggtagagcaggtgggaattctctgatgttagatgttaagagaaggaaagcctcactggtttctctgctcttacttggacagttttaggaggaagtccccagtacttttgtttggtaggcttctgctgtgtggatggggaagagtgaacgacagtttatgagggcagtgtgtatgtaaagtcccactggagagctgcttttttcaggaagagggtgaattgcacccttggagccatcagaatcctcaggccctccttatcagactcagaatagagactaggactgtactgccaagtaggggccactttatagttccacctgtaacatttgctatgtcagttaccttgccatgcttagccattgtcatattccattctgttctcgtccctcttcctcctttgggtaaccaacacagtgagggagcctgttggccaaggagaactcaagaggattaagcagcctctccttccttccccctccttcagtgagaaggagagtctggttggacatgaagggaggcttctttcagcataagatagtccttagaatgggaggtttggccttttagggggaacactcctcttcttcttccttaaggtttcttccattcagcctcagcccctccctgtgtaactcctgcttgcctcctgtttgcccctttccttatctttctacatcatagtctgagccattaaagcctctgtgttggg

SEQ ID NO: 61457 - DNA, 1028 bp, Homo sapiens
gtgacatttgcctggggcatcagtaactggcacagaatcccagggatacgggaggaggtgttacagatatttggttagggaaggagctggaatcaagattcttagagcaagagtgaagggcattagagatggggccagaaaggagaatcctagataatcttggctttctccctcatatgcccatggcagcccctagtctgatatggccggttttgcatttcctcttctctttcagtgagaaatgcagctctgggggtgggatgtaggaagagggaactatataatttttactcatagggacattttcctgtgatttgtctttactccctttcatcattgtgctccctactccctctgcagacagaatatctgcgccatgcgccttcttcctccggttgttcttcctcatctcctggctgaacctactgtggttttcctttatgtctgatcccttcccctttgcgccttaggcttcaccgtatgttgtggaccatggggaatctggccctttgcgctgcaaccgctgcaaagcatacatgtgtcccttcatgcagttcattgaaggagggaggcgtttccagtgctgtttttgcagctgtatcaatgatggtatgttcatggaagctgggatttgggggaaggtcttgattgtatcttccttgttctctattaaatagttagagagatgagggtccatctttcaggagctggggaagtagggcacatgggaatgagggatagtggtgtgagctcagctagggccagaatactaagattgaaactggatcttcgagtaacacactgccatgcttcccacagttcccccccagtattttcagcacctggatcataccggcaaacgtgtggatgcttatgaccgccctgagctatccctgggctcttatgaattcttggccactgtagattactgcaaggtgagggaaggtagcatgggaggagcagtgagtggaggataatgagacagctgagaatggctgttatcatttccctcaccccttttttgtccc

SEQ ID NO: 61458 - DNA, 1014 bp, Homo sapiens
caccttttccaccacccacaacttcatgacaccaagctacatttcttcagtcaacccagacaccctatcattaacctcaggaaacacctcagttctgtaactctcacctaggtagaaagtctaacagtgacttgagctcctcacagaggagcctaacaagaccagtcctgatggcattgtaggagacgtcaatcatgaagataaaggcaggagggctggggaacttattgttctgcagaggaagaaaatgttggggagagggggaatggtaagcaggccagttgactatagagaagtcagcatcaaaaagggacaaaaaaggggtgagggaaatgataacagccattctcagctgtctcattatcctccactcactgctcctcccatgctaccttccctcaccttgcagtaatctacagtggccaagaattcataagagcccagggatagctcagggcggtcataagcatccacacgtttgccggtatgatccaggtgctgaaaatactgggggggaactgtgggaagcatggcagtgtgttactcgaagatccagtttcaatcttagtattctggccctagctgagctcacaccactatccctcattcccatgtgccctacttccccagctcctgaaagatggaccctcatctctctaactatttaatagagaacaaggaagatacaatcaagaccttcccccaaatcccagcttccatgaacataccatcattgatacagctgcaaaaacagcactggaaacgcctccctccttcaatgaactgcatgaagggacacatgtatgctttgcagcggttgcagcgcaaagggccagattccccatggtccacaacatacggtgaagcctaaggcgcaaaggggaagggatcagacataaaggaaaaccacagtaggttcagccaggagatgaggaagaacaaccggaggaagaaggcgcatggcgcagatattctgtctgcagagggagtagggagcacaatgatgaaagggag

SEQ ID NO: 61459 - DNA, 1028 bp, Homo sapiens
gtggggcagaagagtcagcaatccgcgttggctttgtcacctacaataaggtgctccacttctataatgtgaagagctcattggcccagccacagatgatggttgtgtctgatgtggctgacatgtttgtgccactgctggatggcttcctggtcaacgtcaatgagtctcgggcagttatcaccaggtaagagccagattgtggaggtaaaggttgggggtggcatgggtaccaccatagaaggtcatggagttgaacagaggtattggacagtagatggaaaggggttgtggcccaggagttgtcagattctagaggcttgatgactcttcagggaatcgagaactgaggtatctggaatctgtatagcaattttggttgttttccgtcacctatctctttagcttattggatcagattccagaaatgtttgcagacacaagggaaacagagacagtatttgtaccagttatccaggctggaatggaggctctgaaggtaaggctggagtatcgggcaacctcctctaactccattttcctctgaccatcttatcccctgggatacaacctctctttcttcagtagtgggtgactgtccagtgtgttagactgtctgacatagctggtgcttaataaatgacaagggaagagatggatgaataaagaataaacaagtagtcctctcttttttcctaggctgctgagtgtgcagggaagctctttctattccatacatccctgcccattgcagaggccccagggaaactgaagaacagagatgacaggaagctgatcaatacagacaaggagaaggtgtgggactggaaaatgggggaggggaaggatttttcattacagaggaagtggggactctactttcttgatggtggctaggaccagacactccaccctttcaaataccatatctgtgactgccaacctccactgctgccatacttctctactccatctgatgccaaagctgttggtagactcttgtatttatttattttttaaagaagaac

SEQ ID NO: 61460 - DNA, 1031 bp, Homo sapiens
agaatatcaatgcaggactgattccaaggcccatgttcctaactgccacattctcgggctcacttcttcagactatgcagtcttctcttccaacactatttcttcttttttggagacggagtcttactctgtcgctctggctggagtgcagtggcgcaatctcggctcaccacaacctccacctcccgggttcaagggattcttagcttcctgagtagctgggattacaggcgcccgccaccacacccgactaatttttgtatttttcgtagagatggggttttgccatgttggccaggctggtcttgaactcctgacctcaggtgatctgcctgcctcagcctcccaaagtgctaggattacaggtgtgaggcaccgtgcctggccccaacactatttctattaatgagtcagccactgcatatataagcagatattcccagccctgctgccacctgctgccccaaatcccacaccatacctgaaaggaagcatatttgtagacagagccaccagtgagctggggcacaacagagagtgtggccacatccacatactggttagggaagagaaagagatctacacagcagccttgggccacacactctttggccagggtctgataggcacctgtctgaggctggaacagagtctagggggaaagaaaatggggagaagaaaatgttcaaatatctcagctccgccctatttgaaaactgtatatctagcatgggatattcaaattcatggaagacttcagatctacttccaaggattttccaatagtaaaaaattttcttttatattatttttatttttttgagacagggtctcactctgtcacccaggctggcatagagtggcatgatctcagctcactgcaacctctgcctcccaggttcaagcgattctcctgcctcagactcccaagtagctgggattacaggtgtgtgccaccacacctggctaatttttgtatttttagtagagacggggttttgccatgttagtcaggctggtctcaaacttct

SEQ ID NO: 61461 - DNA, 2155 bp, Homo sapiens
agaccagcctgactaacatggcaaaaccccgtctctactaaaaatacaaaaattagccaggtgtggtggcacacacctgtaatcccagctacttgggagtctgaggcaggagaatcgcttgaacctgggaggcagaggttgcagtgagctgagatcatgccactctatgccagcctgggtgacagagtgagaccctgtctcaaaaaaataaaaataatataaaagaaaattttttactattggaaaatccttggaagtagatctgaagtcttccatgaatttgaatatcccatgctagatatacagttttcaaatagggcggagctgagatatttgaacattttcttctccccattttctttccccctagactctgttccagcctcagacaggtgcctatcagaccctggccaaagagtgtgtggcccaaggctgctgtgtagatctctttctcttccctaaccagtatgtggatgtggccacactctctgttgtgccccagctcactggtggctctgtctacaaatatgcttcctttcaggtatggtgtgggatttggggcagcaggtggcagcagggctgggaatatctgcttatatatgcagtggctgactcattaatagaaatagtgttggggccaggcacggtgcctcacacctgtaatcctagcactttgggaggctgaggcaggcagatcacctgaggtcaggagttcaagaccagcctggccaacatggcaaaaccccatctctacgaaaaatacaaaaattagtcgggtgtggtggcgggcgcctgtaatcccagctactcaggaagctaagaatcccttgaacccgggaggtggaggttgtggtgagccgagattgcgccactgcactccagccagagcgacagagtaagactccgtctccaaaaaagaagaaatagtgttggaagagaagactgcatagtctgaagaagtgagcccgagaatgtggcagttaggaacatgggccttggaatcagtcctgcattgatattctggccccaccacttactagctacatgacctaggataaatttcttaagtacttcctcttttgttccttcatctgcaaaatggtgttaaaatacttaagtaggatttgtcaacagaattaaataattatatgtaaagcactctgtgtggtacctggcatgcagtctaagtgtttaaaagctattattgtcatcatcattatcatcctcactgttatgatgatgataattaggtggccttgtagagtggaaggggtacagggagattgtctgcacgatgagctatgtctagtcagtgacatgactctggacctgggggcctgcaggtggagaacgaccaggagcggttcctgagtgacctgcgtcgtgatgtccagaaggttgttggctttgatgctgtgatgcgggtccggacaagcactggtcagtcctgattgaagagcaggttggggggctaaatatggaagggaggcatgtggcacttgtcatactttttgccctgaccctgtccatgtggcctcaggtatccgtgctgtagatttctttggagctttctacatgagcaacacgacagatgtggagctggctgggctagatggggacaaaacagtgactgtggagttcaagcatgacgatcggctcaatgaagagagcggagctctcctgcaggtggcaggcgggaggcggggctgggcaggaagtgtttcattcgcttggtatagaagagggtgaggaatgggtagagagcactaaaagaagagacagggcacgggagtggctcatttctctcttccagtttaatagtgtagcaaagggcctttgtgagggaggggtgtgagttccccctttctcctttcccctagtgtgccctgctttacaccagctgtgcagggcagcgtcggctccgcatccataatctggccctgaactgctgcacccagctggctgatctatatcgaaactgtgagactgacacgctcatcaactacatggccaagtttggtgagggtagaagcagggcagggtgggattggggctgagaggtccaggatggtgagtgggtagttgtgatggtgggaatgcacacatgatgggcagctgaccagtgactatctttgctttcccatccagcatatcg

SEQ ID NO: 61462 - DNA, 1315 bp, Homo sapiens
tatattggctcccaattgtttcacaaagtatacttccacacccatattctccttgactccctgccctcaccaaaccactggtgatctgactgaaggaggagacgctgaaaaggctctggacaacaccctgttggacgcttgctcccacccagaggaagaggttgagcccattctccagtaaatatatatccccattgcttagacgctcttcagaggctcgaactgctggtggttcggtagtactctcaacgggagactttgtctagacaaaaggaagggagcaaaaggttaccaaggaccataagacaagtctgcccccccgcaccacacacaaaattttgaaagctaagtcctcagacaccaccccttctggggtctcagtaactctctcagtgtgaaaattacatcagctaaaatacataaaaacaaattccactagtgtctgactgatactagcctatcctttcctcctcctaagaggccctttgctccgtgcaagatctcatactccaaccctcaatcgcaccaaaggtaagagccgagggtagaagaagacattggtctcagtcacatccatggaggtaactagctgtcggacataggcacggtcatcagtagtgacttcagctccaggctgcaggacatcactcttcaacacacagttcaggtaaactgggagtagcttcatgcactcaggaaggatcaactgaggggattatcaaaataaagtcaatgatcatgagaaatccctcccaaatgcaaacatttgtcccaacaaccccacctcccactaatatacttgccccacctgtcctgcagaggaggggctagcacagttctttctgtaacaggccaggatctgggcacactgggtgatgagcgtgtcacgaacagccttcacagggctattcaggactccccgatatgctggatgggaaagcaaagatagtcactggtcagctgcccatcatgtgtgcattcccaccatcacaactacccactcaccatcctggacctctcagccccaatcccaccctgccctgcttctaccctcaccaaacttggccatgtagttgatgagcgtgtcagtctcacagtttcgatatagatcagccagctgggtgcagcagttcagggccagattatggatgcggagccgacgctgccctgcacagctggtgtaaagcagggcacactaggggaaaggagaaagggggaactcacacccctccctcacaaaggccctttgctacactattaaactggaagagagaaatgagccactcccgtgccctgtctcttcttttagtgctct

SEQ ID NO: 61463 - DNA, 2227 bp, Homo sapiens
gtattttagctgatgtaattttcacactgagagagttactgagaccccagaaggggtggtgtctgaggacttagctttcaaaattttgtgtgtggtgcgggggggcagacttgtcttatggtccttggtaaccttttgctcccttccttttgtctagacaaagtctcccgttgagagtactaccgaaccaccagcagttcgagcctctgaagagcgtctaagcaatggggatatatatttactggagaatgggctcaacctcttcctctgggtgggagcaagcgtccaacagggtgttgtccagagccttttcagcgtctcctccttcagtcagatcaccagtggtttggtgagggcagggagtcaaggagaatatgggtgtggaagtatactttgtgaaacaattgggagccaatatagttagtgtgctagtaccctcaaatatcagggaacacttggggacaagggcagttgctgtcattcttcccaggtttgcctgtttcagatgatgcatacatgtatgctgccccaccttgactgaactcagagtgccttaccataaggataaatgaattttgtgttctagagtgttctgccagttctggataatccactgtccaagaaggttcgaggcctcattgatagcttacgggcacagagatcccggtacatgaaggtaacactgatctgaaccctggatttcttaccttgtcaagtcctcacctagaagtgggggttgggtggggaatgagtaagtgactgcctaatgagatttctgggcatgtttaatttcctttggccttgccttatgaaccctgaattctggccgtagcttaccgtggtgaaacaggaagacaagatggagatgctgttcaagcacttcctggtggaagacaagagtctgagtgggggagcatcttatgtggactttctctgtcatatgcacaaggagattcggcagctactgagctaaagcaagtgggtaaatggcatagggcccaggctagcttccagaaagcaccccaggatgtcagagaaattgggacagtaacatatcttatgtaagctgacctcagtctctctggggggagggggagatataaggagacaccttctttctgggctcaagtatcctgccactctgtcatgtcctgctgatggaaggtgcccctgttccctcattctaccctctttttcctgctaatcctgtcataatgaatgtagcttctcagttcactgtatatgattcggtattgggggtttggaggcacccagaccctggcaatattatgtgtccctttggaccagtctcccaagaggagaggggcaggcaggaaagagtggggatcctaaggttactacagggggctcagtgtcatccacaacttcctatattagggataaaacatataggtgcacaagagctggggtatagcccataggtggtggagagaaaagtggtcagtccttcttgggcctggaggttagcagtcaagtttctctgctttcactgctcgctcgctctctcctgcaatgattgatgatcactccgtggatagagaggcacactgtcagaggtgaccggagaactgagttgcaaaatatattaagatctggtagaggtaccagcttcctttccagctggagaggccccaacactggatggttctgtagggagcctagggagcctggtcatcaacttgcaatacctcacagagccagttcacatcccactctgagctcccacgagaaacactgcttctccaggcccggggttgttggggagagaggcagaggcagctggagcgccgttctctcctgctgggacaccgcttgggctttggtattgactgagtggctgacagttatcttccaaccccaactggcttgggggcaggacaagggctaggcttgatggtggccaggcttgcctgctccccacctgggatgcccctgctctggacctctcatttctcttcattggtttatttttcaatgcatctttaatttgtaaagaaataaaataaattaagatgtaaccattagcctcatctttactcccgaaagctcactttgcttttagtcctggccgtcggctgagcgagctgcgcatgcgccacgtgcccccgtggcgtagggcctcgtccggtcacgactatccgctgggcggggtcggtgctggccgagggggcgccggctgccggagtggacatggcggccggcccca

SEQ ID NO: 61464 - DNA, 1089 bp, Homo sapiens
ggcaatgtggggctcaaagacggggctgtccccgggagaggccgcgtgggctttctcggcatccagccgagccagttcgtagtcacagacgaaacactcgaagccgttgaggtagttaggcagcaaaggatcattcactccccactcccgatgcttcagactatccagaagaaattggttggtgatgcccccaggttgcttgtatgccaggtatttcatatactcctcatcattcttgtccagaaagtcaataaactctgccagcttctgaggagactcaaaatcatcaatcaggatgacggagtgattgttcggcatccagtccctcacagagggagaaccgcggtacacgggcacagcgcccaggtgcatgggacgccacagtttttctgtcatgtagtcgttacagatggcattttccagggccaagtggaacttatagcgggacaagaaagccaagagctctggatcctcggtggtggccgtggctgtgtcctgtagccgcgcggtaggcagctcccgattctgcaggcatttcccgtaggagtctacctagaccgggtacagtaaggctgtcatgagggtgcggccctggaggcctggacacctggagtcctggacacctggagtcctggacacctggagtcctggcctcaacccgccctctccttttccttccctccggcccgccctcactcaccgggatgtggcgcatgagctcgcgcacgtagcggtcccggtccgctggcacgtcgcagtgtgactgcagatagagcagcggcgcgtagccgcggcggcgccactccgcgcgttccatgggcggaggcaccgggcggcgcagataggcggtcccgggcagccactgcagcgacagcgggtaatccgagtggcgactgaaggtggaggtaagattgaagaggcggatgcccgggccgtggctcagcaagaagttgttgaggggcgactcctcgtggaggagcgcccagctctggtgcgccaggcgcggcagcggggcggccgacgcgcggaagtctgtgccgtagaagagcagcgcgcgcgtccgcgagtccctcagcgctcggcggttcc

SEQ ID NO: 61465 - DNA, 1054 bp, Homo sapiens
gatcctcctgcctcaacctcccaagtatctagggctacaggtgtgcaccaccatgccctgctaattcttttattttttagagacaaggtcttgctaggatggtctcaaactcctggcttcaagcagtcgcctctcctcggcctcccaaagtgttgggattacaggcataagccactacgcctggccagaaaaagccaaaaaaaaaaaaaaaattagggctgggtgaggtggctgatgcctgtaaacccagcactctgggaggtcaaggcggatggattgcttgatccaggagttggagaccaacctgggcaatgtggcaaaacctcatctctacaaaaaatattttaaaaaaataaataaataagtaaaatagaagtttgacatgaaagtatataatataaaaaaatccaactccggaaaaccagaatacaactcaccaaatgttttgcttctccaccaacgtaacaatttataaagcaagagatgagaaaaagagattattgggaaatgtactgaataatgaggagtctggggaatagaacaaaagttgtaagtcgtaacctgacccatcttacttcactggtaatcaagtacagtcgaaaggatgaaataaagaagtgagtagtttaaaaactctgttggaccagcaccttgaatcaaatggatgttttagggttctgtttcccactgaaccaagaattgtatccctccatctctccttgaggagaggccctatgttagaccttggctactcatcattaagataaaatcttaatagataaaactggaattccttgaatccatgaaaagacagtgttcattaagggtttgtgcagtggatgctccttatgtcccatggtagaataagatctccttagctccgccaagttaaaggctcttgcaagggcacttagagatgttgcctcttcatgaagatttcatgtaggtaatcccaaaatttcgtctgctctgtttcattgttgtggatcatggcagtgagagcttccccctggtccagaccttgccaataatcttgcagccacatctctttcca

SEQ ID NO: 61466 - DNA, 1026 bp, Homo sapiens
cgcggagctcggggaaggctcgttggcttgctggcagccacctctttcttttacttggccggggctgcggcgacgctgggttcgaacagcggcgggttcatacttgtcagcagattaggaggagactctgggttcgtacgccgactgaggcttctccttgatgggctccgggccccgaagtctgggggcagtacggggccggggacatgcaggaaagggccctggtaagtggacactgttctggtggtagccggcttggtctaggggcgattggcatagggcggggttgggggggggggtggcgaatcaaaatttgagactttaagatgttgggttgggaaagattcgtgttttactttaataaacctgaaagaactgtcgtttttcactgcctataggaccactacaaagccgcaaagaaaaattagacttgtttcattttataacaacaacaactgctactactgctactagttagataccgtttgctcatttataacaatctcagttggtaggatgaagcttaaacacttggcattcatcgtctttttcagtcctctcgccagtcttacagacttggaccttcagttgtgatgcttaatcagaattttttttgagatagggtctctcttggttgcccagactggagtgcaagtggcacgttcatagctcactgcagctttaaactcctgaactcaaacgatcctcccgcctctgcctcctgagtagctgagaacacaggtgcaagacaccacgcccagctaattattttttgtagagacggggttttgtcatgttgcccgggctggtctcgaactcctgggttcaagcgatcttcctgcctcgccctcccaaagtgctttacatgactgagcctccgcgcccagccagacttgtttctcaagtgacttcttctggccattttcacaactcattccaaagatgtgcagcatattctcaaagcatttccaaataagctccaagaaatgtttttggtaatggaagcagaaaacaagcctgtagctc

SEQ ID NO: 61467 - DNA, 1275 bp, Homo sapiens
gtaaaacacgaatctttcccaacccaacatcttaaagtctcaaattttgattcgccacccccccccccaaccccgccctatgccaatcgcccctagaccaagccggctaccaccagaacagtgtccacttaccagggccctttcctgcatgtccccggccccgtactgcccccagacttcggggcccggagcccatcaaggagaagcctcagtcggcgtacgaacccagagtctcctcctaatctgctgacaagtatgaacccgccgctgttcgaacccagcgtcgccgcagccccggccaagtaaaagaaagaggtggctgccagcaagccaacgagccttccccgagctccgcgccgattcgtccagcccgtaggggtcacgcgaggtcacgcacggaaccgcaaagcctgccgggagcttggtgcgctatggcgacacccagcctgcggggtcgtctggcgcggtttgggaacccgcggaagcctgtgctgaagcccaataaacctctcattctagctaaccgcgtcggggagcggcgccgggagaagggcggtgagcagtcggagtcaggacggccccggagcggaagccggagcatgagcaggggcgggtgggtaggagggcaggaaggtgggtcttcttgtgactgaaggtcccccggatctgcccctccagaggcgacttgcatcacggagatgtcggtgatgatggcttgctggaagcagaatgaattccgcgacgatgcgtgcagaaaagagatccagggcttcctcgattgtgccgcgagggctcaggtgaccgatggctcctggggtgctttctcaggaaaagaatgggggagatagaagtaatgattctccctgccttttgctaggaaaggccctttcattcatttgggaggtatattattcacgccaaagtgggaaaggttacagttttgaaggctgtgtgatcttgacggatttattcattgctctgaactttcgagttactgtacgtaaaatgaggctaaccaataccaccttaaagaatgttgtgagtgtcagatgaagtaatgaatgggaaaatcattttgaaaaatgtaaattgctgctcaagtagacattattgtgtgaaatagaactaaagagactaaaactaaataatgacaatagtttggtttcctgtctaggcttaattgttagctgagatagtagcttctgaacatagtctcatttgtaggtcccaacgcccttttgttgaaaagaggctgacatagatctctccaggctg

SEQ ID NO: 61468 - DNA, 1930 bp, Homo sapiens
agcgatgaagattgttaacatattggtatcttcctggtcaggttaaaatctgggaaaacatgccatattaccccagtcccccgacttcagtcactgacttgtaaaataaaggggttggccaggtgcggtggctcgtgcctgtaatcccagtactttgggaggccgagtcgggtggatcacttgtggtcaggagtttgagaccagcttggccaacatggtgaaaccccatctctactaaaaatacaaaagattcgctgggtgtgttggcacccgcttgtaatctcagctacttgggaggctgaggtgggaggtaagtttgaacccaggagggagaggttgtggtgagccaagatggcaccattgcactccagcctgggtgacagagtgagacttcatctcaaaataaataaataaaaatcaaaaaaataaaataaaggggttaactcttctaaaaaggttctttttaattctatgattttctgatctattaatgtgactagcaattttgtgagatgtagtttgtcatgttatcactactttttggttaaaacactgtggaaaaccttgagtggtaactttatcttagtccaggtgattccagttgcagcagtagctaggtgccctgcgataactctctccccttgagggtttccagtgtgggaagttgtcatttaggcgcgccaaaagtggtctggcctctcgtgcttcttgagatcccttccgggctctggtctatcttgtctccttagctgggggcctacagtcatctagagtaaaagggatggttaaaaaaaaaaaaaaaaggcaatcggagacaagaatgccagaggagagacattaaccatgtaatttgaatttaaaatgctcatggaatatgggaaattcagtgctgagccatgtgagcagggttacttgctagggtcctggaacgcacctgtctggccaggagtttcttaagatatctctggtatcttctgttctagaccttaggtgtagccggctgtgggctggggattatccagctcccctttcccatatggagccttaagggttagtgtatcctgatagggggatccctaggactttcatccaggtctcttctttctttcatagtgaagatgaggcccaggatgttgtactggcatgagtgccaagagaccatggcccttttcatttcctattctctttcccctgatcccaaccattgtttgcaaagatggactggtgatcccattggtggagctgtcagcaaagcaggtggcatttcatatcccatttgaagtggtggagaaagtttacccaccagtgcctgagcagctacagctccgaattgctttttggagcttccctgagaatgaagaggacattcggtgaggccaaaggactgatggtggggagcggggtcctgatactccacactgtctgctgggtttcccatagaacaaaggagacattgtatttggggcagtggtaagaggaagacaagggagggattgcctgggattccactccctcccccccaccccccgccctggggaaggaatgaggctagggagagagtgcctagggcattgtggtctctgacagggtctgccaaaggttatttgctgagttgtggctgtgtcctcttcttcacccccaggctgtattcgtgcctggccaatggcagtgcggatgagtttcagcgaggggatcagctcttccgcatgcgggctgtgaaggacccattgcagataggtgagtgggccatcatgccatgtggcacatcctgctcctcccatcccctggcttatgaagtaagaacacaccgcaagaagctggagcatgttgtctgaataactgcagggccagggtcaagggcagagacccaggtcctgacagcactccctgaccatgcccccatttctccccagggttccacctgagtgct

SEQ ID NO: 61469 - DNA, 1053 bp, Homo sapiens
gatgtctgtacccaggacgacctcccttctacagatgagagtggcaatgggcttcccaaaaccaaagaggcagcccctgcagttggagaggaggatgatgactaccaggcgtactatctgaatgcccaggatggggctgggggcgaggaagagaaggccgagggcggggctggggaggagcacgacctgtttgctgggctgaagccactggaacaggagagtcgcatggaggtgaggggatggaaggagggagggctgggtgctccttagccacaactgggaggggctatctagctctagttgggagtgtcaggaccatcagcaggattgtgagaaccctgttgcaggcgccgaactggtctccctgctttcagtctactcacttttctgcttccacgagattttcctgaaatgtgatggtgtcactctgctgcttaaaacccttcaatgggttcctgttgcccttatgataaaatgaaagtggttggcatgacctgtgagggtccacttgatctggtctttgcctgctttgccagcctcacttggctgctctgtcctttgcactccagtcagctgaatcactcatgtatctgccatgctctctctcttgcctccaggattttggacagattgacctttctgcctggaatgctcttccccattagcccgtgtttctccttcaggtctcagggatcttaaagatcacttcctctagggagtctctctgatactgtccctgtgccccaagatatcccacctgcttccccttgacctttccctgtaatagctggcatcacggtggcatgtgtgtttatgtgtctgtctttctaaccagagctcctatggagcggcacagggcctggcatgtagcaagtgttcaaggaatgttggctgcatgagtgagcatgatgtcctgctcctggaagttgggactttaacctgtctggtcccatgtcctccttccaggtactgtttgcctgtgctgaggccctgcatgcgcatggctatagcagtgaggcctcccgtctcactgtggagcttgcccaggatctg

SEQ ID NO: 61470 - DNA, 1046 bp, Homo sapiens
aggtcgggtgggttggctagcagatcctgggcaagctccacagtgagacgggaggcctcactgctatagccatgcgcatgcagggcctcagcacaggcaaacagtacctggaaggaggacatgggaccagacaggttaaagtcccaacttccaggagcaggacatcatgctcactcatgcagccaacattccttgaacacttgctacatgccaggccctgtgccgctccataggagctctggttagaaagacagacacataaacacacatgccaccgtgatgccagctattacagggaaaggtcaaggggaagcaggtgggatatcttggggcacagggacagtatcagagagactccctagaggaagtgatctttaagatccctgagacctgaaggagaaacacgggctaatggggaagagcattccaggcagaaaggtcaatctgtccaaaatcctggaggcaagagagagagcatggcagatacatgagtgattcagctgactggagtgcaaaggacagagcagccaagtgaggctggcaaagcaggcaaagaccagatcaagtggaccctcacaggtcatgccaaccactttcattttatcataagggcaacaggaacccattgaagggttttaagcagcagagtgacaccatcacatttcaggaaaatctcgtggaagcagaaaagtgagtagactgaaagcagggagaccagttcggcgcctgcaacagggttctcacaatcctgctgatggtcctgacactcccaactagagctagatagcccctcccagttgtggctaaggagcacccagccctccctccttccatcccctcacctccatgcgactctcctgttccagtggcttcagcccagcaaacaggtcgtgctcctccccagccccgccctcggccttctcttcctcgcccccagccccatcctgggcattcagatagtacgcctggtagtcatcatcctcctctccaactgcaggggctgcctctttggttttgggaagcccattgccactctcatctgtaga

SEQ ID NO: 61471 - DNA, 1047 bp, Homo sapiens
aggtgagagacccccttcctctaccttcccctcccccacttacccccaacctgctcccatgccccaccccaagtgagagcatccttctacctccaccaaggtaagtcagaatcatctgcctgtctcctgtgtttcttccctttctagggcaagaagaacaaggtatccacgagccgtcagacctgggtggctaccaacaccctgagcaaggcggccttcctgttgacagtgctaagtgagcgtccagagcaccacaacctggccttccgagttggcatgtttgccttggagctacagaggcctccagcttctaccaaggccttggaggtcagaggctccatctcagccttgtatttcagtctctttagagccttgcaccttgatctctattgacacaccagaggtctgagctccttcctgtgccctcaggtgaagctggcataccaggagtctgaggtggctgccctgctcaagaagatccctctgggtccaagtgagatgagtaccatgcggtgccgggcagaggaacttcgggaggggacactctgtgactatcggcctgtgttgcctctcatgctggccagtttcatctttgacgttctctgtgctccaggtatgatgcctgaccctacagtaagtggggaactggggtaggggtagctttctctaagaaagaccaagagccccaagtttctgaatcacctttaggacccatcaggcagcttcatgggtaggtctgtgatgatgaggattttgggttcccctgtattttttcccatgcatgatacttctgtctgcctgacttaccccaacttttatacagtggtttctcccacaggttcccggcccccaagtcgcaactggaacagcgagacacctggggatgaggagcttggatttgaagcagcagttgctgccttgggtgagtcttgagcatatcaacgagctaagcctggttcaggtcttgaaggacatgagacctgtgccttgttgtgaagggctgtatggtaatgggaaggtcaggatgacatgtgtgagccaactagt

SEQ ID NO: 61472 - DNA, 1621 bp, Homo sapiens
cccttcaggtacaagggccgccgccccgagagtcatgcccctcatgtacccaatcagccatcagaggcagctgcacacttctacttcgagctggcgaagacagtgctgatcaaggcagggggcaacagcagcacttccattttcacacatccatcttcctcagggggccaccagggtcctcaccgcaacctgcacctttgcgccttcgagattgggctttatgcccttggcctgcacaactttgtttctcccaactggctctcacgtacttattcttcccacgtttcctggattacaggtaaatcatttgacctgacttgggtatgggagggggattaattggtggggataagacccttatctttgtggggttactgatctgataaaaagacattattctcacaccccagtggtgcccacactaacccaactctgcccttctctcctttcccctaaggccaggccatggagataggcagcgcagccctgactatactggtagaatgctgggatgggcacctgacaccccctgaggttgcatccctggctgacagggcatcacgggcaagagactccaatatggtgagggcggcagcagagctggccctgagctgcctgcctcacgcccatgcattgaaccctaatgagatccagcgggccctggtgcagtgcaaggaacaggtatttctacgggcaatctgggaacctcttctggggcatctgggcagggaggttgggcatgggaaagctaagggcccagctcttgattcccgtatcctggagtttacagatgattgttggtcctctcatggcaacattttacccattaatgtgctttcacacccatctttcctttaccttacaactcaaaggttaggtttatttctattttacagataaggaaatggaggcctacggtttagggaccaagatgatcactcaggatagaaaacttagggaaggcctcatacatctaagacttgaatgggagggggctgttaaattagtttggaactgggactataacctgggtcttgactcattttggtcagtatttactcagtgtgtgaagcactcactgctctgataatggactctaagcattgacactgacctctgatgattccctgggaatgagacagctctgagggagacattggaatctcatctaacaccttccatgtggtaaaggcctttcccccttaacactctgtgcccctctcttccaggacaacctgatgttggagaaggcctgcatggcagtggaagaggcagctaagggtgggggcgtgtaccctgaagtgttgtttgaggttgctcaccagtggttctggctgtatgagcaaactgcaggtggctcatccacagcccgtgaaggggctacaagctgtagtgccagtgggatcagggcaggtggggaagctgggcggggtatgcctgagggtagagggggcccagggactgagccggttacagtggcagcggcagcagtgacagcagcagccacagtggtgcccgtcatatcggtggggtctagtttatacccgggtccaggactggggcatggccactcccctggcctgcacccctacactgctctacagccccacctgccctgtag

SEQ ID NO: 61473 - DNA, 1004 bp, Homo sapiens
gcagaggtggccacccccgtctcatgcccctccccctgccccccaggagtgaactacgtgcaccagttctgtgtgggggcagccaagggggtgctgagcccgtttgtgctgcaggagatcgtcatggagacgctgcagcggctgagtcccgctcatgcccacaaccacctgcgtgccccggccttccaccaactggtgcagcgctgccagcaggcatacatgcaggtgacaacctagaattatggagcagggtggagcacttcctgggtggtcttggaccagagggaggcagggcctgtttctgtgctttgtactaaggctcatcctgcacacatcctcctccagtacatccaccaccgcttgattcacctgactcctgcggactacgacgactttgtgaatgcgatccggagtgcccgcagcgccttctgcctgacgcccatgggcatgatgcagttcaacgacatcctacagaacctcaagcgcagcaaacagaccaaggagctgtggcagcgggtctcactcgagatggccaccttctccccctgagtctttcacccttagggtcctatacagggacccaggcctgtggctatgggggcccctcacacagggggagtgaaacttggctggacagatcatcctcactcagttccctggtagcacagactgacagctgctcttgggctatagcttggggccaagatgtctcacaccctagaagcctagggctgggggagacagccctgtctgggagggggcgttgggtggcctctggtatttatttggcatttataaatatataaactccttttttactctagtcgacctgggcctttcccttctttccaaattccatgtgcagatgaaccttcaactggggaggaaacttctgacacttgctttagtctaggtttttcccactccagggaggcagacaaaacagaaaaataaggatgtttattaaggacatttctagcccacagctagggctcatactcggc

SEQ ID NO: 61474 - DNA, 1890 bp, Homo sapiens
gaaaaaattttaacaccctcagtaagagctttattgctataacttcagactcagtcctctataaatcccagtgtcctccatctacttctcattctatctttcaaatctcatctgttttttcttttccctccaggtgctgccccggcagacatgtggcctcttcactcacacaatcttctataatgagtatcctggaggctctcgtgaactagaccggagcatccgaggtggagagctctttctgacagtgctgcttaatccggtaaggtgctgagaggaacggctagaagattggagagccaaggtgtttgcaggctgggacctttattcaccaaggctaattcagaggtggggtaggctctccaaatctgacatgcaggtaccccttacagatcagcatctttatgacccatctgtccaattatggaaatgaccggctgggcctatacacctttgagagcttggtgcgcttcctccagtgttggacacggctgcgcctacagacccttcctcctgtcccacttgcacagaagtactttgaacttttccctcaggagcgaagccccctttggcaggtaaaggtggagctcagtctgatgagagacatgataggggtggggtgttttttgttgttgttgttgttgttttgagacagaatctcgctctgtcacccaggctagagtacaatggcacaatctctgctcattgcaacctccacctcccaggttcaagcgattctcctgcctcagcctccctagtagctgggattacacgcacccgccaccacgcccggctaattttttgtatttttagtagagacggggtttcaccatgttggtcaggctggtctcgaactcctgactgcaggtgatccgcccgcctcagcctcccaaagtgctgggattacatatgtaagccactgcgcccagccggggtgggggtttaagagaagactaggccaggccgggcacggtggctcatgcctgtaatcccagcactttgggaggccgaggcaggcagatcacctgaggtcaggagtctgagactaacctgaccaacttggagaaaccctgtctctactaaaaacacaaaattagccggacatggtggcacattgcctataatcccagctactcagaaggctgaggcaagagaattgcttgaacccaggaggcggaggttgcagtgagccgagatcatgcattgcactccagcctgggcaacaagaacgaaactccgtctcaaaaaaaaaaaaaaaataggccttatctgattattggccctggcttcagaatccctgtgatgacaagaggcacaaagatatctggtccaaggagaaaacctgtgatcgtctcccgaagttcctcattgtgggaccccagaaaacaggtgaagtatccttagctaacttctcttgccctgccttaaacccaaaggatccttttgtcaaggaactctcttctctctccaggtaatcacaggagtgaaaaaagtatttttaattttaataatttttttttttttgagataagagtctcacttctttgcccaggctggagcgcagtggcacgatctcagctcactacaacctccacctcccaggttcaggcaattctgctcagcttccctagtagctgggattacaggcaggtgccaccacacctggctaatttttgtatttttagtagagacggggtttcaccatgttggccaggctggtctcgaactcttgacctcaagtgatccgcctgccttggcctcccaaagtgctgggattacaggcatgagccaccgcacccggccttaatttgaatttttaagagagaaaaaaaggaactccttttatacccacccctcattgatccagtctcttgaggcagtgattcctaa

SEQ ID NO: 61475 - DNA, 1050 bp, Homo sapiens
agaagattaacagactcatgagttccttatctgatattttgttggagcatgggacttctgaagacttccggggctttccgtcccttcctcacagaaagatcagagctgttgctggctgccagctgctcggtcatgggctaggaactcctttcagagcaggcctgtttttagccttctaggatatttagcctcttgttgatgggagatttgttcctatcatttgcatatactgctccatctctgagctttgcttagagaggagaatttggacattcatttgggtattctaagaaagggaaagggaacaagctgtgaagctaaggtataggactcagcttgtagattctcctagaggaaacttttttttttttttttttgagaacagattatccagtaagcaggaggtaagagagatgggatggggaggagaatggattaatgacaatttcagagggaggagtaacccactgatttctctgtcttacaggtagaggggaagagattgaactttgctgacctttgatgtgaggcgctcagccagggccaaggggagagcctggcaagatttgcagcctgaagccatgggccagggggccatggtgacctgagacaagtggactctgtatagttgccccctgcttccccttctacctcccctaccctatgctaaggggactcgtctccacctcgtaaaggaaactccccaagggaatccctgtcccctattttcctatccttctacccttccaagacagtcctagcctatagaactcctacctcccatcccctgaggtggtccccattcctccctcccttcctccccccgccatgctccagttgtggaaggtggtacgcccagctcggcagctggaactgcaccgcctcatactgctgctgatcgctttcagcctgggctccatgggcttcctggcttattatgtgtccaccagccctaaggccaaggaacccttgcccctgcccttgggagactgcagcagcggtggggcagctggtcctggccctgcacggcctccagttccacctcggccc

SEQ ID NO: 61476 - DNA, 1051 bp, Homo sapiens
cattagcttcacccactttccccaccttctcaggccgacttggccatgtgtttagcgtgctaaagtcgctggaactcatctgtgtgctcattgtcctctgttctgttaccacattctgtcctgtttgacaggggctttaggagattccagccggaggtccaaccttcgcagccagtggctctggagggcctgagtgacagcggcagtcctgtttgtttgaggtttaaaacaattcaattacaaaagcggcagcagccaatgcacgcccctgcatgcagccctcccgcccgcccttcgtgtctgtctctgctgtaccgaggtgttttttacatttaagaaaaaaaaaaaagaaaaaaagattgtttaaaaaaaaaaggaatccataccatgatgcgttttaaaaccaccgacagcccttgggttggcaagaaggcaggagtatgtatgaggtccatcctggcatgagcagtggctcacccaccggccttgaagaggtgagcttggcctctctggtccccatggacttagggggaccaggcaagaactctgacagagctttgggggccgtgatgtgattgcagctcctgaggtggcctgcttaccccaggtctaggaatgaacttctttggaacttgcataggcgcctagaatggggctgatgagaacatcgtgaccatcagacctacttgggagagaacgcagagctcccagcctgctgtggaggcagctgagaagtggtggcctcaggactgagagcccggacgttgctgtactgtcttgtttagtgtagaagggaagagaattggtgctgcagaagtgtacccgccatgaagccgatgagaaacctcgtgttagtctgacatgcactcactcatccatttctataggatgcacaatgcatgtgggccctaatattgaggccttatccctgcagctaggagggggaggggttgttgctgctttgcttcgtgttttcttctaacctggcaaggagagagccaggccctggtcagggctcccgtgccgcctttggcggttctgtttctgtgct

SEQ ID NO: 61477 - DNA, 1049 bp, Homo sapiens
atcaattttgaatggtttaagttcatgattttgttctgcagccctagctaggggtgagccaagccttatgaaatctaaactcagcctaacagaatagaaaatctataggctttagttaagagtcacatggtcctgagttcaggtgtgtgatttgagcaaattattccttgagcctatttcctcatcttataatgaagaaaatattatccaccaagaaatacagctcgggcatgtaaaaccccagcacaatgcctgattaaaagcgcagcaggtactgtcactgttacccatctttctgttccttttggataaaggagactaatgtaatgtggcatcctggcctctggagggcgttcaggggttcgggggtgggggggggcggtacttggagattctgggagtggttgcttgggagatggtaagacttggaagtgcaggctgggaggaaaatgcaggtgcccaggcctgatgtcctcttacctaccccaccctgccctgcagtcctgtccaagaacagcaagcctatccataccaccatcctaaacccacacgtccacgtgattggggaggacgcagcgtgcatcgcctacatccgcctcacccagtacatcgacgggcagggtcggcctcgcaccagccagtcagaagagacccgggtctggcaccgtcgggatggcaagtggctcaatgtccactatcactgctcaggggcccctgccgcaccgctgcagtgagctcagccacaggtgcacctggttgacgggggagaggggctggaagggcctgggataggtggggtcagaggaagaagagaaggctgggaggtggtcctgggagaggaggtgtgggccgtcccagaggactggcaaagcctggcagaatggttgcaataagttatgcttggaaatcagacagactagggtctggctccgtgactccaaattggatgacctcagacaggttacttcccctccctaaactgtttccttagctgtcaaagaaaggcagagagtggtgcctacctcatttaatcattgtgaggattaagt

SEQ ID NO: 61478 - DNA, 1645 bp, Homo sapiens
gtcctggccactgaatgagggctacgagtgggggtggtgattgagacctgactgagccccttcaggtgagagaagtaaattgggggtggaagcggccttattgggagatgcttgtgagagaggctgctcatacaggggaggggctcacagcattcacgatgtaccaggctcctcacctgttaaaggcaagcgtgttttctgcaacctggttgttgatggaaagggaggcaaaggccaaagaaccataactaatggctgggcttcaggagaaagtggtcattgtctctgcagactgcagagagggagacgggagggaaggtgtgttcgctcttcctgccaagggccctagagacagagaagagggatgtctttgtcataagcgatcacaggggactcctgaggactggggagggctctctgtaacttgggaggttccccagtaggtaaattgatggatttttctcccccacagtgcgaaaacaggagatcattaagattacagaacagctgattgaagccatcaacaatggggactttgaggcctacacgtaagtagagacccatttttttttgtgacctaagtcatctcccaaggccttccctgcttccagacaacaattaggaccctggggaaagggaggttggaccttgggcaaagtatctgagttaagccctctcctaaactgggagcccttccaggtagattccctgagctcacccatggtatcctggcagtgggccgaaagcacagggctgagtggctcagcaggcaggcctggaagatctttgctgtcttgtctggcatggccacaggtagcctgctgctactggatagacaccgctgataaggaaggaagacaagtcactccatagaagcctgataggctgcttttttttttctccctgtaggaagatttgtgatccaggcctcacttcctttgagcctgaggcccttggtaacctcgtggaggggatggatttccataagttttactttgagaatcgtgagtgggttcgtgctgctgatatactcctgcctgcccctttacccctttgtctctgtctcctgctcaccttctcatcccagttgcccacttttcccttatttgaccttcgtgctgcactcctactctgtatgcttgtccccttgtgccccgatggttgtagacaggcacctttgaaggccctgctcctgagctccaagtgccattcattctgcagctgctttgtggcagtgccagtcaccacaatcaagctcacttatttcttgccgggcgcggtggcttacgcctgtaatcccaacactttgggaggctgaggctggcggatcacgaggtcaggagatcgaggccatcctggctaacacggtgaaaccccatctctactaaaaatacaaaaaattagccgggcgtggtggcggtgcctgtagtcccagctactcgggtggctgaggcaggagaatgatgtgaacctgggaggcagagcttgcagtgagccaagatcaggccactgcactccagcctgggcaacagagcaagactccatctcaaaaaaaaagaaaaaattatttaagcctcacctctttccaagacggattggaaggaaaccctttgagattaggttgagatgatctcagcacataaga

SEQ ID NO: 61479 - DNA, 1003 bp, Homo sapiens
tgcagtgagccgagatcatgccattgcactccagcctgtgcaacaagagcaaaactctgtttcaaaaaagaaaaactctagggaggaggtaagtgtggaagttagggagaccatgaagctgttatcatggttcaggtgtgagatgctggtggcctggagtcaggttgtagctgtgcattggaagtgaagaggtaagacatggggtttactttggaggcagaaccagaagattttattttagattgggcgatctgaatataagggaaaaagagaaagagaaggattgaggatgactccaggttttagcctgagtaactgggtagatggtggcatttaccaactgggggaagactagggaggggatttgggaagagtcagacagccagggtggaagcagaaccttccacaattcctccttgcacctcttgtaggagcagaaactctgcttttgttctgctttgctcctctggcttccaagggatggagcatatagaaacatgttctttttggcctacagggctccacagagagctgcaacaccaccacagaagatgaggacctcaaaggtaggtgctggcccttggagggggaaggactccagcagtgacccaggtacctgggctccaatggggcacctgccttttctgtccccagaactgggaatgctggctcctatgcccctaggagagggcttggtataaaagctactttccacgagccaagatatgaggcccctgtctggtgttgctgagttgggcaagaggcttctcttctttgaccccaagtctaaaatagctaagctagagattctccaggggccagggctcagagaactgttcctgttgctgataatgatgtgccatccaagaacaggggtaccccaagtccctgccgaagtagcctgtaagtgctatgagtcataaatagagtgaccaatcactcctggttttcctcggacacagaacttttggttttaagactgtgatgggccaggagtgctggc

SEQ ID NO: 61480 - DNA, 1008 bp, Homo sapiens
gatcacgccactgcactccagcttgggctacgcagtgagacttaatctctcaaaaaaaataaataagataaaatctaatgtcaataggtaatctgaagaaaatggcagaaagtagagagagggccaggtgcggtggctcatgcctgtaatcctagcactttgggaggccaaggcgggcggatcacttgaggtcaggagttcaaaaccagcctggccaacatggcaaaaccccatctctactaaagatacagaaattacctggggatggtggcacatgcctgtaatcccagctacctgggaggctgaggcaggagaatcgcttgaacctgggaggcggaggttgcagtgagctgaaatcgtgccactgcacttcagcctgggcgacagagcaagactccatctaaaaaatgaaaaacagaaaaacctcaccaaactagacagagagaacagggccttgaattaagtagtcaggagagggcttctttcaggaggtgatatctgagctagaaactgaatggtgggtgggaaggaggcagccaggccagctctgaggctgagtgccctaagcagaaggaactgaagctcagatgtggcctttgtaatcaagcagagggaagagcaaagtgagacggggagaaccataggagagtgatgaggttggagaagcagcagggcctgctacagaggcccttgtaggagtttgcattttcttccagcagcaaggagaagctattgggagttcttagcaggagtaacagaatctagttgacactttaaaacaccactctggcctcatgatcaagaactctagggaggcccgggcgtggtggctcacgcccgtaatccctgcactttggaaggccgaggcgagtggatcagcaaaggtcaggagctcgagaccagcctggccaacatgatgaaaccccatctctaataaaaatacaaaaattagccaggcatggtggcaggcacctgtaatcccagctactcaggaggctgagacaggag

SEQ ID NO: 61481 - DNA, 1102 bp, Homo sapiens
tctacacagcgttatggaggccacctcaggcctacctcctccaggccagaccagggggcaagggaggtctgggagttgaacctgagtggccttggggactctggaggaactaaaccatctgttttcttgtctcagccacagagcaacaacaaaaacagtctcgtaagcccagcccaagagcccgcgcccttgcagacggccatggtacctcctgactacagcttctccgcctctgaccctggctgcctcctgccccttccctcttcctcctcttgtgccccctccctggcctcctggcctgttcctttcttggtccccatagaactgactgctttgtgtgccgccctgtatgccccttccccttcattgtcccgcctggccgcgctccatcccgcatggcagaagtgctgctcctgctcctgctcctttcgctggtggggggaagagtgatcagggctctcagctgaacctcccaggcccagcccaggacccctagtgggtctgctgtgggggctgggaaggtgagttgcttaggaaaggagagggtaggagctttcttgggacctgaacatcagttcttggaggcccccttgtaaaacctgcctcagcctctcctttgcaaagccagaaacaggaaagagggctggggtccccacctctggatggtgctgaggtctccaggctcctggagtgcctcatgctggctaagttctctctgggctcctccaggggttctgtgtgctcttggaggtccctctgctagtggtggctaactagagagtcagcaggggggtgactgggaaagagggagaggtgatgttgcctgctactcccctccttgcggaccctcataccacatgacgtggcggcgtggggccaggaactagggaaggcagaaggcgggcgcagtgggcagctctctgggctcagcttgctgagggggcctcctgtcctggctctttctgggagacctcattcttctgcccatgttcctgcctcacacattccccgtgatgaacgctgtgggcggggcccggcctgtgccctcagtcccacagctcctctagtgtacctgccccgtgggaaccccatgtggaaagag

SEQ ID NO: 61482 - DNA, 4326 bp, Homo sapiens
ggtggtgtgcacctgtagtcctagctactcaggtggctgaggcaggaagatcccttgagcccaggaggttgaggctgcagtgagccatgatcatgccagtacttcagcccgggcaatagagcaagaccttatctctaaaaaaataataaaaagacctcacatttagacaatgtggtagtgtgctggttcagaaggagcccagctatgcatggctaagggcaaatccctgaatggagaaggaaattgaaaaatgttgactaacctgagaaacagtctttggaaaagggtgatctcaggttctcatgcaggacaatttaggaaaaagagagcaagccaggagaaggctgagaacttattccccattagtcaaaaatctgctttaagtcaagatcctgcaatggcctttcacaacaagcccctgaaaatcagcagaacaaagactgggcctggtgagtgagtgcctacgcagagttcttgctgccgtgattcagtgcaagttagaaacctgtgctcttctttagcctggggaaaaaccaaagtcagcaaacccagctcaactcagcaaactttcgtcgcctgtatgctaactataaggcatgttgctaggtactgtggaaattgtaaagacacataagataggaaccttcctgaaagcagtaacactttagttgggtaaagggataaggagatatacacacacacacacacacacacacacacacacaccccactacttatatatatgaatataagggaactccttctttttgagggatgattttcgaagtaaaatatcatatttgagcatatttaaaaggccactgtaaggctgtgtgcggtggctcacgcttgtaatcccagcactttgggaggccgaggtaggtggatcacctgaggtcaggaattcgagaccagcctggccaacatggcgaaaccagtctctctactaaaaatacaaaaaaaaatcagtggggcgtggtggcgggcgcctgtaatcccagccactcaggaggctaaggcaggagaattgcttgaaccagggaggcggaggttgcagtgagccgagatggtgccactgcactccagcctgggcaacagagtgagactccctaaaaataaataaataaataaataaataaataaataaataaataaataaaaggccaatgtaaaagaggcctaactatatttaggtttttcttttcctttaaatctaattctaaattatggaccattgtcaatatttgtagcctctttcgttgattataataataatccctgaaaatgccttctaaagaatgctggccgcttgagggcaggagcagtttatcagctgtgtttacctgaaacagccctcagtgtttgctgggcattgttaaatgaatgtgcaaaagttgaacgacagacggacatattacagggggaccttacccccagtgagctaatgatgacattgataattacccttcattttttagacacagtcttctgggatatattttcagtgttccacgtggtcttcatcttgatgcgtctgtttcacatgtgaacgtaaagttcgtgagcatctagttgaggctgaggaatcactgctttcaacattccctgtggcttacatccctgcatttttatgatcactgtagttttaatcactggcactcctgtgtttctattttccacgaattgcaaaatgcaataaaaaattcaaatattgtaaacaagcatggctatactgacaaaggaaggccaacatttaactgctaggtgattttcaaaagctcagcatctttatgtaaaaagcatagtagggatgcagcgaagtcagaagtcaaattttattagagctgaggagagcctgtagtagcttttgctttttccctggtggctgctcacttgaatttcagacagttctagtaatgagagaaaataaataacattacagggtgagctaaccctatgaacccagacctgtaaatttgtagcaaaatgatacttaacctcacagacttgtgtcttaatctccttaagaggctttttttgagcaaggctgagacatctcagaagatactaaatctgtgtctatgaacctgaccacaaaagagttcttccctcccagggtctggagggtgtgagtgcctgtcggtccgtgtgctgtttaaccctctggtgctggactccgggtctccctccgctcttttctccctgatgcagagcccacactggtgcgctaacctgcagcgtctctgtgcttctcttcttacctcctctttccccttctctttccctcttgctgtggtgtgtccagaaaaggaagtcgagttccagcgtgcacctaatggtgagccttgcctgcccacccatcgcccactccatgctgcctgtgcccgcctgccagccacgcaaacctgttctgccacgtgcgtgtgcctcactcatcctcactgcatgtctgtgctgtgtgggcaggtgtggcctgtcctgccaggcgggggccattgcccaaggtcacccagtagcctaaaaagtggacattggaaggggtggtacggcaccccctgctgtggagcttggacagaccccagcgacccagggtaggatgtgaagctggtagggacttggggcaagcaagggagagaccctcactctcttgtcacccagaaggagaggccctgcttcccaggcatgaggagctgcttcctacagactggcagctggagggcaactgtgtggtgggcagaggagctggttgcaggctcccacttgtgagtctcgctctcctggctctgcccccgtgcaaatcccattctctctagctgtgcccagtggtttattctgcccacccagccctcgggggacagctaactcatctttctcacgggacactgggcaccaagggcaacacagcagcctgagtcattatgaaaccatccattaaaaccagaggtgggggccgggcgcgatggctcacgcctgtaatcctagcactttgggaggccgaggcgggtggatcacaaggtcaggagatcaagaccataacacggtgaaaccctgtctctactaaaaatgcaaaaaattagccaggtgtggtggtgggcgcctgtagtcccagctactcaggaggctgaggcaggagaatggcgtgaacccaggaggcggagcttgcagtgagccgagatcgcgccactgcgctccagcctgggcgacagagctagactccgtctcaaaaaataaataaaccagaggtggggccacttgggtgacatcccagccctctgcaggttttgtgggcaccctggagtccttgccccctgtgagggtcttggcctcagctgggatttacaggtagggcagccctctctaaccaaccccgaacaggtcagcatcattcactgagctaggtgggctttgcttcttggtgggaatgagagacagcagagctcccgtgagtttagacccaccgtctcactactcctgggccccctcttctctagcctgtcgcagtctgtggagtcttgttcagtggagtcacttggtgcctggcttgaggttccatgcctagccctgggtttggggatgtctgagccattgacagcaagctggcggtggacggcttcaggtctggtccaagaggcctccaggcaagaagtaggacagtcaggatgctttctgtgtatgtcctaggagagaagacacacattctagctgtcgatgtatcatctgtgccctgtgcagggatggtagccacacatttgtctcactgcctattgaagaacttgcaggcatcaggctgctcctcagtggcccccaaccccactggaactcagtgagatggagtacgctggttagggaactatcagaggcaaagaacatcacatggatatggctccctgccctggagatcagccttcttcctttcttccatcttccccttgcccctcccttgctgtgcccctccgtgtaatgtttttgtttgttcgtttgcttttggttttttgagatggagtcttgctctgttgcccaggctggagtgcagtggtgcaatcttggctcactgcaatctctgcctcccaggttcaagcaattctcttgtctcagcctcccgagtagctgggattacaggcatgtgccaccatgcccggctaatttttgtatttttagtagagacggggtttcaccatgttggccaggctggtcttgaactcctgacctcaggtgatccacccgccttggcctcccaaagtgctgagattacaggtgtgagccaccgtgcccacccaccaccatgtagttttgaaaggcaaggagatatccctggtggtcatggtg

SEQ ID NO: 61483 - DNA, 1047 bp, Homo sapiens
gatctgcccgcctcaacctcctgaagtgcgggggttacaggcatgagccaccacgcctggcctataatgatatcttaaaagattgctttctttttttttttttttttttttttttagacggagtctcactctcacccaggctggagtgcaatggcatggtcttggctcactgcaacctccgcctcccgggttcaaacaattctccaacctcagcctcccaagtagctgggactacaggcgcgtgccaccacacccagctaatttttatatttttagtagagacggggttttgctatgttggccaggctggtctcgatctcctgaccttgtgatccacccgcctcagcctcccaaagtgctgggattacaggcatgaaccaccgtgcccggccaattgcattttttaaaaagactggaagattgctaggagtattagtggttttcccatgccccttctctgttttccaaattgcttgtattgtggctgcagtccttttataatatgaaacaggtaaataacaacttatgttgtggctgcatcaaaggggtgagaaacgaaaaggagaggacaaagcaagatgtgcagagttcgacctttccaggctctctcaaagtcaaggttttgatcaatgttatgagggaggcctgtgaagtagctcagatggtcttgagctttcagcatcatggattcttcttttagatcccatcttcccttcccaactcccccttcctcaattcctactgcttaagtgtccatagggcgatttctttttcactgttcagaagctttctgcaagatgttcaaaatactagcattggtttgagcagctagtctgtcttgtgttcttgatttgggggacttagcttctatttagatttctttgaagctggatgccagtgacccagggtctatggaagagtaagagccacttgtgaggatgactgaagaggccacaaactctcagatcctgagagtgtaggacaacttgtgccttctgctagtcccaggccagaatggccatcctatctttaaaaaagaaagcaagc

SEQ ID NO: 61484 - DNA, 1429 bp, Homo sapiens
ctgaggtgggctgatcacttgaggccaggagttcgagaccagcctggccaacatggtgaaaccccctctctactaaaaatacaaaaagtagccagtagtggtggtgcacgcctgtagtcccagctactcgggaggctgagataggagaatcacttgaaccttgcggggggcagaggttgccgtgagctgggattacaccactgcactccagcctgggggacagagcaagactctgtctcaaaaaaaaaaaaaggaagatagatgatcaaagaaaataaactgacaacctgaaaacaaggaagtagaactggataacaaatgtggaaaaatttctagcctcactagtatcagagaaatgcaaattgaaacaaggtgccatttttggactctagttagtgatggtagtgaaaaccagaatggtcctttctaaaacagcctgtgtgtcaaaaccataaaaatgcttctacctctttttaccctgttaattctacttctgagagtttttcctaaagaaataattcaaaataggaaaaagctaaaagcagaaaaatgttgaacatgacattatttatagctgtggaaagattggaggctgggcacagtggcttatgcttgtaatctcagcactttgtgaggccaagttgggaggattgcttgaacccaagagcttgagaccagcctgggaaacgtagtgagaccccatctcttaaaaaaaaaaaaaaaaattagctgagtgtggtggaacgtgcctgtagtcccagctacttgggaggctgaggtgggaggattgcttgagcccaggaggctgaggttacagccaggatcacaccactgcgctccagcctgggtgacagagtgaggctctgtttaaaaaaaaaaaaaaaagagagagaagaaaaaaaagattggagacaatttgaaaagccagtaaggagccagacacagtggtgcgtacctatagtcccagctactcaggaggctgtcgcaggacagaattgcttgagcccaggaattcgaggccagctgggcaacatagtgagacccccaactcttaaaaatgtttttaaatttaaaaataaaaagattttttaaaagccagtaaatgactaaataattatgggaaatctacttaataaactattcaaaagttattaattttcatgaccgtagggatattttaagtgaaaaataaagtgcagaaatgttttatattaagtgaaggaagtggtatataaaggagtacagacaagccaggcacggtggctcacgcctgtaatcccagcactttgggagcccgaggcagacagatcacgaggtcaggagatcgagaccagcctggccaacatggtgaaaccccgtctttactaaaaatacaaaaattagctgggcgtggtggtgcgtgcctgtaatcccagccacttggaaggct

SEQ ID NO: 61485 - DNA, 1030 bp, Homo sapiens
ctcactttgcagttttactttctgctatatgttttctttaaattgaaaatatgggtcaggcttggtggctcactcctgtaatcccagcactttgggaggctaaggcgggtggatcacctggggtcaggaattcaagaccagcctggccaacctggtgaaactccgtctctacaaaaatacaaaaattagccagtcataatgaccggtgcctgtaatcccagccactcgggagtctgaggcaggagaatggcttgaacctgggaggcggaggttgcagtgagccaagattgcgccattgcactccagcctgggcgacagagcaagactccgtctgaaaataaagaaaagagaaaagaaaacaacatgacatttctataacttaaaaacaacaaattatatttgtatgggttctcttatacatattgatgttctctgcccagtgagaacacagggtgtgtggtagattgatgtcaaaaatatggttggatcagtcttatcaggcagaattggaagtttctgtgtcagaccatgggaaataccataggccattgagcagggaagctatggtgagagtgctgatagaaatgatttggcaagccgggtgcggtggcttcactcctgtaatcccagcattttgggatgctgaggcaagaagattgcttgagtccaggagtttgagaccagcctgggcaaaaccttgtctgtgaaaaaaaaaaaaaaaaattaactgggcatagtggtgtgcatctgtagtcacagctacttgggaggctgaggtaagagaattgcctaagcccagggagtttgagcctgaggtgagccaagatcaagccactgcactctccagcctgggtgacagtgaaaccctgcctcaaaaaaaaaaaaaagatacctgctgtgcccctagaagttgggaaggcaaaacttaatctaccttttaaggtgtttacagtgggagagacacaaggcagctactgtttctatggagtctgctaaggtctcagggaggtgtgcacctggcaggtgctgg

SEQ ID NO: 61486 - DNA, 1009 bp, Homo sapiens
caggggaagtgatccaaatcatagtttataccagagctgaatccggaacctgacttctacacggatgcttcatctccagggcttgactctgggttttttaggtcatttggttatctttctttttttcctttttagagcacaaatccttttaatcaaatgaaagccaaatttgcctgagtgattcaggcagggtatagggcttggaacctgaaaccactctccttttggtctttttccttctctctacaacactttcagatcccactgagtgcaacagcctcgagctttcttgacgcataggctcctcagaaaaaggcaaaggccatggtggatcacggcttgttcccactgggtgagggagcttttcccatgggactggggcaagaggagggacctgggacccaccaggagccctgctgggaatggctgcttggccaaggtagaggagaggtgactggggctacccacagggcccaagacattctgtagatgctttgggggcagaaaggatcctggggctagggcattgggtaggagctcatgctatcttgaagcctcccagcttacactctagactagattttcactgggccttttcccaagatcttgtgtcaacagctgagatacacacacaagccccgttccctccccgttccctccccactccctcctctttccctcattctctgcatgcctgcttctgtgttcttccgcccctcgcaggggagcctgggctccgcgcacaccctctgacatggagctgggggcatcgtgcggtccccaagctctgcccctgagctacatggatggagccaggtgaggaaaaggggcaggtttagttggagagagtgtttaataagtacctgtcagtcagatgtccacgcagcattctgttctgaggggtacacaacagaggtgtaagagggggtgtggctttcagtcgccataggaagggggccgcacctggagtcagctgagcgctgctagtggacccacgcgagatggttta

SEQ ID NO: 61487 - DNA, 1384 bp, Homo sapiens
gtgtggtgggatgtgcctgtagtcccagctactcgggaggccaagacaggagaacctgagaggcggaggctacggtgagccgagattgcaccactgcactccagcctgactgacaaagcgagactccattgcaaaaaaaaaaaaaaattacatccagaatgatgaaaagaattgatgcttcaaggtgacgatccttagcttctgggatcatggcttcattcaggaccttgctgggggtgtgtggagaggggctcttggaaggaaggaatgtcctctgtagagagcaggaaccctgccgttctctcgctgctgagcatctggaacgcagtaggtgctcagtaaacagctgcctaaggagtgactgaatgaggatcacagcccccagggtactctcctgttcggtagcctctgtttcccaaggaagaataggacggtctctcagcagcccgtctagcatccgttatggtgttctcacgttcatgttgtccttatgtaaccttgagtttcgggtagtgcttttattctaaaagcgttttcacatctgtgacctcatttcatcttcagagcaactctggggtggctgagtgcatgaccctgtcctgggcatggtatcggtgccaggactgtgggaggcgcagaggatctgggctggggctcatagcctgtctgtttggtttctagcaacgatccacggtggcatccatgatgcatcgtcaggagactgtggagtgtttgcgcaagttcaatgcccggagaaaactgaaggtgagtgtcgtttctaggctgccagcctccttgacatcatgccttgcaccagtgtggctcctgccccatttcagaaggaagctcccctcctggctggagctgggctctgaaggttgtacatgtcacaggggagggggcccagaggcctgatgtcttcaggctctagccaggacctgcctttgcctgagaccagcctgcccttttctagggtctcagtgaattcacaggaccttcctctttccccagggtgccatcctcacgaccatgcttgtctccaggaacttctcaggtatgttttcccagctgtgtactttgattatgccgaggtgagtggatcaggaatgggctgttgccatcccgggcaccgctgggtttcctcggcgtcctgggccacaccttgaccagggcgagtgaggatcctgttttgaggggctgctgctgctgctgagtcctgctcctgagattcagggggctggactcacatttgtgaattgtttcctagaacttcccaaggagtagcctgcccaacttgctatgtaccttgtttctctggattcttatttaactctctgaagactctcagcactttacagattttagccattctaggatcttggag

SEQ ID NO: 61488 - DNA, 1043 bp, Homo sapiens
gagaccagggtaggtagatcacttgagcccggaagtttgagaccagcctgggcaacatggcaaaaccccatctctacaaaaaaaaaaactttaaaaattagctggttgtggtaacgtgccttagctacttgggaggctgagatgagaggatcacctgagcctagagaggtggaggttgcagtaagccattattgtgctactgcactccagcctgggcaacagagtgagatgctgtttcaaaaaaaaaaaaaaatttttttgtttaaggagaggcttaactataatctatagagaagaatctagtccagaggaaagagttgaagatccttgctaattgaggaagcaaaggtttggacagcagaaaaagagagggggctcctgagccaagggcagggggtccatcccggggatgaccatgatccccctgagacttctattagtgtggaggcaggtgaagatcggcttgtgagtggaagtctgagctgaaaggggttcttgctgatgacctctcattttgcttttggagaaatttacaccgaggaggaggtaaaatgagagacttggggaaggtagagaaggtggggagagttgcctccggacctggaaagagtgggccaagggtgagggaaaggatgcgaggaggccccgtagtgttggtgggcacctggctgcaggtgccaggatttgtttttctgacaggctggtgaagacagcaacagcaaggggagagggcaagcaacctgaaacaggcacccaagaatgggggaaatattctgttctggggtcatttttgcaggccctaccctctgcagtcccgtgtgtctcgagcccctgaggacatcactatattctgaaattacataatgatgctggtattgacagctgagtcattgaggaagtgtagactgtgtcccatggactctgtttaaggaggccaggaagttagcagtaaatacattgaagacaaatttccatccaaaaaaggcggggcacagtggctcacacctgttatcccaggactctgggaggccgaagtgagcaga

SEQ ID NO: 61489 - DNA, 2375 bp, Homo sapiens
attccaggcgctacaagaagcccagcctgtcagctcttgctgcccatgtgctgagagtttatgtagcaaaagcagcaggaataagatgggacttgggggaaatggctggtgtggatttaacgagagagaaagtgggttcagtatgcctctgccctctcttttgctacaggttttgctggcaccccaggttacttgtcccctgaggtcttgaggaaagatccctatggaaaacctgtggatatctgggcctgcggtaagcccattccacgctctcagcttttcgctgttaagggccctcaacttccgatgatggcaagaaagaggcatcgctattccttgcaggtcacacacgtgcctggtgtatgtgaaattatggtgtttgcccctgggatggctgttcccatcacaccctcctccctgcgtacttctgggatgacattgtatccttcttggagagggatttgcccacgccttagaggatgggttgtgcctaaagaaatccctggtgtgacttggtgacgtgaagtgtgaggcatagcaggaggggctggtagcatagcattatcggctggcatccacttctgactctggtatggcccctgcctttctaggtggctctgagccctgcatggtttttcttggttcctcagggaagtaggcgactgacccccatgacctgtgtgttctgtctcgtaggggtcatcctgtatatcctcctggtgggctatcctcccttctgggatgaggatcagcacaagctgtatcagcagatcaaggctggagcctatgatgtaaggaccagagagccgggcagccaggccaggaagggcagatgtccttgctcctcgggctctgtccaagggagcaggcttgtttagtgtgtcacgtgatacgggggtgtcaggggactttgaggacccaggaatgggcatccagggcccaattcttgccactctatgtcccagggagcaactttcttttgcacagccttcttcataactaaaattgaggagtccactgaagtcctttgatctttacttgcaaagaatggagcggcctcattggtgtgctgtgtaacacagggacaaaaggcctggagactccctccactgcagtggcaccttggacacattgctgagcctctgttccctcctaagtatagagctgggcttaaaccagagaatgttggagtccccttcccgctctaatctgatgttctggcattctaaacatgactgttctgtctgtctttccaagtctttaagttgacacaggttctggaatagccgcagggcttctccaactctgccagtcacagctttaggtaccacagagtatcccaattacaggagttgagttgaagacagaaccagtgttgcagggtatgaagctcaccaataccacattcttctccctattcctgctccttagttcccatcaccagaatgggacacggtaactcctgaagccaagaacttgatcaaccagatgctgaccataaacccagcaaagcgcatcacggctgaccaggctctcaagcacccgtgggtctgtgtaagtgtctttgctagtggccaaggagctcaggggtgtcagccttctgtgtgccctcggcaccaccccctccttcttaccagcagagattcattctgggccccaagcaataactgagcaggcgggcagaggactgttgagggccagggtcaataaatgtcaccagggagactcgggaggctgatggggctggtgggccactgctcctctctcccccactcatggctgtcaggctgggattggttctgttcttggatgagggctcaggttgacccttgtggactccaggtagccggtgatagaaagcagctggcaaaacccaaagtgaattcccaagctggggttcatactcagatctcaactccactggagtggtgaccaagatccaacaaatcaacagaaggggtttctgagtcattaaaagcataaaagctgaggcataaagcttctgcgctaaagtcctaggagagtcctctaggctatcagtgtgggttgacgtactctgtttttatacacaattctttcaagctgaaatatcaactttcagacaaagaagaggatttggtagagttaggcatcttgacaaccacgaggcattatttatctgtccattctgtgtttattaaatacctctttggtgctggttaccgtctgggtgctggagatacaaagatgaatgaggcatggtccctgccccaaaagatcatctagggagacaggcactcaaacaggcagtcatgttacaatgtgacaagtaggtacaagaatctaatgagagtacaggagctcctactgttcctggtgggtggtggggttactga

SEQ ID NO: 61490 - DNA, 1051 bp, Homo sapiens
gggcggcaaattcattcccagttgaaaaccactgctctagactgcccccgctccctgtcaggagtttgatgacagggatggcaggatggtttgctatgtggacagtctgatttacgtgtgtgactgtggctgggcgcagtggctcacgcctgtaatcccaacactgagaggccaaggtgggtggatcacttgagctcaggagttcaagaccagcctgggcaacatggtgagaccttgtctccacaaaaaaatacaaaaattagctgggcacggtggctcatgcttgtggtcccagctactggggaggctgaagtgggaggattgcttgagcccaggaggtcaaggctgcggtgagctgtgttcacgacattgcactctaacccaggcaacagagtgagaccctgtctcaaaaataaaataataaaataactttgggtttttttctctacgcaaaatcatcagaagtgctccttaaatgccctgtttggaagctcttaagtacattgtttcttaaaggtatctttgtacttgttttagctgccttactggatgccagacctcagggcagctattgggtcttgtccatcttcattatcctaggcactcaataaacatttagggaaatgaatgagtgcacccaccgccaaagtagcttaggttgtttagttggactctccttcctaagttgccagcacaagcttcttctccaagaacaaagttactgtatggagaaagagaaagaaggaagggattggatgctctcttcttcctcaggattctgggctgtctcctgatctcttggaaatgagttggttgtgttagacctttccagtcaaaagggggtgagaggaacccgttctagcggtgatcctagaaaaaccattgcatctgcctgggcctcggtttcctctttctttaaataggttgaacaagatgatgtgcagagtctaaggttccagtggccgttaagtgattctctgtgaatccgtggccccttgtcacatgccttagtctgcagcatgtggttgtggatgtggatgaggtggtttaa

SEQ ID NO: 61491 - DNA, 1039 bp, Homo sapiens
attcagattctgattcagggggtctggggtaggacctgagtctccagctgatgctcatgctactggtccgcatgcctgtcaatacttggagaagccaagttttgcggcttcggagtcgcatccagatttggggtttgaatctgggatttgctaattagtaactgtgacctctggcaagttatttaactcctctatgcctgcctctgttttgttatctgggtcccttcgtggagttgttatgaaagggttcagccaggaaagggggctaggagggagatgatgaaaatggagattccagcccctagaagtgatctcttcaagacccccagcctcgactcagttcacaagttattcaagcctgaccatttacccttgagcccagtacccattcagctaacagtaagtgtagcaaagaaacggttgcaaataaaaagaaacattgaatcatgactgagcagttcctacatccctgcccccatggtgggggtggggggagccctgccacagtaagctcttggggggcagctcagtcccccacaagcccccatggcaacaggacctccttcccactgtgttattgctgcagatatttttaacagcaacactttttcagtgctttttggagaaagatttgttagttaaaatgtggcatattgttgggtggtttttaaagaattggaaatagccacaacatttgggttgtggctatctcagtccttgaagacatgaaatatcaagtaaaggtttgtaggtgttttggcctgttctgtcttccacggtttttaaagaacagcaattaggtttgttgctgaaatgcagtaaatgctttatactcctttccccagatcttcctgtctatggacatggcctggcccttgttggccttcatgccctgtctttactctggaatgggctgggtgtcagattattttattccacgcatccatagtccctctgctcctgcctcacagcatgacacagttgtgcttagttaacgcatttgtgtaattgctggtttaaagcctgtcttccctcttcg

SEQ ID NO: 61492 - DNA, 1045 bp, Homo sapiens
ggaagcagaaccatgtccacatcacccgcgatgcgggcgggttgaccatgggcgggttgaccacggatgggttggccacggacgggtcagggtataatgaagacaattgagaaatgagcaggaaggacaaaaatagaattctaggtgaaaaaagccctaggtgtctttttatttatttctagaattaaatacatacttttttaccccatagacttcactctgtttggtagccctttacttttaccatctgccctcggctcagaatggaggcaggcggagggaccatatatcctggccgtctgctcagaggccaggtggggcacagtcactcttttggcctctgatttcctagaactgtgcttccatttcatgactgctcccaggtcctaaggaggttggtccgaggaccgattctggggttgagggtgggcagagggaagggggagtcaagactgtgtcctgggagctccagcatccggtgggaaccagggctgttggagatgtggcggagctgcaggtccaggcggctgtggttgccatggatctggacctggcttgtggcaggagaggaggcaattttgtgcccctaattcactattcctcttctctctccactgcgctgtccttcagaactgtgacccttttggctctggcctcttgaactccatcccaaagggaaacaaacgggccagcccaagaacagtgcacagtcgaggaagctagagcaaagagcatgtggtcagccctgcctgtggtcagactcggaggcactgaattcagatggagcatttggtgctaggggccagtcatgcccagtttccccttaatagctagatattctgtcccaggagttaaaagcctgttggaagagtgaaccctgatataaactctggactttgggtaatgatgatgagtcaatgtgggttcatagacggtaacaaatccaccactctagtgggagatgttgatggtggaggagactgtgcatgtgggggacgtggggtatttgggaatgttctcgggtatttgggaacaccctgtactt

SEQ ID NO: 61493 - DNA, 1013 bp, Homo sapiens
cgtctcagaaagaaaaaaagagattctggacaccctggaccactgaaaccctgttgtggtggaaagagcaccagagttttagttgaatacctggattcaaatcccagctctgctgctcactggctcgaagtgtgcaaaccctcaagtcatttcctcatctggaaaaggtggtcataactatctatctggcccaggcctggtggctggtgcctatagttccagctattcaggaggctgaggtgggaggattgcttgagcccaggagtttgaggctgcgatcatgccactgcactcctgcctgagggacaaagtgagaccctaaaatgaaaggaaaacaagttgtctccaggattgccatgacttgctgcattacttcagcaaatcatcacaaatgcatagttagtacctgaactgaaggaatatgaataacaaggtgaccacaaggagaatggatggttgatggcttttgttttttctcttctgcttttagatcaccagaaactagaacgtgaggctcggatatgtcgacttctgaaacatccaaacatcggtgagtgcctgggcatggagcattttgtgggtattttgtagaagcagggataacagatatccactgcttttgtgtgtgggatcacctctgtctgtggaccttcacctggtgtctgtttttacatgagcaggatagcaactgtgtctcagaattctggggcattctagtttagagacctgagtatctgcatcactgcggcaccttctcagggctggggtgtgaggcatcagaataggtttcagatgctatttcttccctttctccttctgtctttgggctgaggtccagggtcctcagcgtgtgaggttccgggctcctagcctgccagcgtccctcaccaggggccatccacagccctcatgcaagggtcaggattttgtttgtggacctgaaagagttttgttcctgctgcggtgtcctgcacactctgggggtttccatggtgctcccatttgtattcccc

SEQ ID NO: 61494 - DNA, 1048 bp, Homo sapiens
cattatctcacactgacagtcctgagtttgaatcccccttttatccctttcctgctgtgggatcttgggcaagttacttaacttccctgggcctccgtttcttccatcatctggaaatgtggacaatcatagcatttacctaatgggatcattgtgagggctgtgggaagatttacagaagctttttgctgtttagggtagaggcagggagacaggaatagcttggcagctatggatgtgaaggcccctgcccgggcctggataattcagggtgaactggactctcttccttttgcaccccctccaaagcctagagtcttaactcaactctcaccattctttatctggccataatagcacaggggtggagaaagagggctctaggctcagaccacctgcatcactgcctgttcgtgttaccttaggcagattactctatctttttaaacctgtttcctcggtaatataatagagctaatcagatccctacttcacagagtttctgtaggtatgaaatatggtaatccatgcctctgcctgacatgtagtcagtgcatagtaagcgattgttatggcgactactgttattagtaaacccttattaagcccctgtttacagaaagaactctagaaagcactacctggaaaggtacccccgcccttcgaagagcttgcaactgaaagataactgatgtaatatatgatgtgagaatcgtgagaagtgcattgggaaatcggggggggggggggtggagtaggagggagaagtcacagtctaccgagaggagcagggaagacttcatgaaggaggtgacttttggcaggatttcagcaagtagaaagagggaaggacagtgggggagggctgtgaggcctccgtgctgtgagtagcatcctctcttcccacgtactggagctctgccttcctgtggaaggaattgacccacgcagctcacttggatctggggacttgtggatttctggttattccaccaaaaccaagtaatcctggagtctgaatttgaagaggtcaaagcttacagccatg

SEQ ID NO: 61495 - DNA, 1046 bp, Homo sapiens
tgcttcaggctcttgggctaggagatttttgtgcattatctcatttgactctcaaaccaccctatgagagaggtactattaggatcccttatttatttattttattttattttagagacagggacttgctctgttgcccagactggggtccaacgaggcaatcagggctcactgcagcctccacctcctgggcttaagggatcctcccaccccagcctcctgagtagctaggactataggctcatgccaccacacctggctaatttaaaaatttttttattttgttgagacaggcctcactttgttgcccaggctggtctcaaactcctggctttgagcaatcctcccgccttggcctcccaaattgctgagattataggtgtgagccacctagcctggcctgtgatcctcattttatgggtgaggaaaggggctcagaaatgttgtcaattgtccaagggtcacaggggcagaactggaaaccaaaatcaaaatcaggattttttttttactttctttctttccctctctttctttcttcctttctttcttttctttctttctcctcttcctcctcctcctttctctctcacatagtactttattgaactataacttacatatacctactatgtaatatattaggccatgtccacataattgtccacataatatgtggtatacacttataccattatgtccatgtagccaccacccggatcaaaatgagactatttctatcacactccagagttccttcatgcccctttccagcaaatactcactccccctagcctccaatgtaaccaatattctgacctctattctcatagattaattttacctattctcgaacttcgtgtaaatagaatcatattcttgtccaggagtgatggctcacacctgtaatcctaacactttgggaagccgaggcaggcagattgcctgaggtcaggagttcgagaccagcctggccaacatggtgaaaccccatctctaccaaaaatacaaaaagttagctgggcatggtggcacacacctgtagt

SEQ ID NO: 61496 - DNA, 2627 bp, Homo sapiens
ctagcgccgcttgaggtgaggagaccccgccccgctgaggtgattctgcagaggggcggagccccccagatccgaggcgggaggcggcccgggggcgggaccagccggctccagcggcccgctccgctcccaccatgcccttataaggagcgcccggcgttagggctcgggaatccggtagcaatcccggcggctcagccccaatcccaggcccctcccttaggaatgggggaggggcggggtttggcggcgcggtggctggggcggagcatctcgaaaagggaccagtaggagtggcggcccaggtctgagctgcgctgccattgggcgcggcgacgagagggggcggggagcccgtgaggctggttacgccgagggaagccccgactccgtagtcgctgcacagtctgtctcttcgccggttcccggccccgtggatcctacttctctgtcgcccgcggttcgccgccccgctcgccgccgcgatgccagtgtttcatacgcgcacgatcgagagcatcctggagccggtggcacagcagatctcccacctggtgataatgcacgaggagggcgaggtggacggcaaagccattcctgacctcaccgcgcccgtggccgccgtgcaggcggccgtcagcaacctcgtccgggtgagcgcgcagggcctggcgcgggagcgggcgcgggaggtatccccggggccccggcccgcgtcgcggctgcctgtggccggctcgctggccgtggctttccgcgtgggttccggagccaggcgccgagggttcgaatggcctcttctccgccctgtgaccttgagcgagtcctgagcctctccgggcctcagtgtcctcatctataaaatgggagcagtcatgaaaaaggctgccttgcgggcttgtcgtgaagatatggcgaggtattattcgtggagtgcctcgcgcggcgtgtggcccacagcagacacccaataaatgagagttgctgggatgtccgagggtccctgccccgcgcaggcttcgcccccacgttgacttcctcgctctcagcgccttttaggcctcctcgatctggctgtgcgggggagggagagcgggccttcccacggatcccttgccttctcttctagggatccttatttgagccacgttgtcctcctttctaatacttctgcccctcaccctgagacccgcctcgcccacccccgctccccagagctccctgtattccgcccttttattcacttgcctcactctctgtcgcctcctcctccctcctgggcattttacttatgctcactcctctggcactctcacacctttatgcagtcattcgtgaccacaagcccggtttttccttccgctcagccctgctgcccttcctttcattccctcctgtggacattttcacctggcgttacctgctgtcaaacggcctcctcccactggggcctttctagactcgggggccctccttggcccctcctcctggcaggaagcaagatggagctgttgggagaggcctgtggaatctgggatctgccgcccctgccggagagaaggctggggcatccgctccccatccacaactttcctggtggctctgcagacccctgtaacccacagctgtgactcataaccgaggtgattcctggaggaggtggagcccacgtctgaaatgggaaaaaagaggtgctgagaccagtctcccaagactcccctggctaatgtcacacttttctttcccaccctgggtgggtgactcagactggtcctgcttgtgaggaacaattttggaaaaagttcatactgctcccccactgagctgtgtaaatagtgtgtgtcagggcagttgggcggcaactgtgggtctgtctgggtggggcttgggttacttttctgatttgagcactttagtgcacttagaggctctttagcagctgaaagtcttcctcagtcttcaggggtccctggactgtctcaagcaatttaggagactggtagctaggaagacagggtgacaccaccgaccaaattcctgatctttcttctctatagctttagtaagaatctattcattcagtaagaatgctgtattcattcacaatgtctacttgtacattgttcttctttttataactaatttgaacagaacactccagagtacattcttatgtagtgttgtctaacatggctgcattccaggcctccatttttcaacaaataggaaacaatgtaaagagacaaggtaatagtgtctctccatgtagtacttcaggaaatgaaatcttaaaaccacatgttgcacttggaacagagctagtgtagtctaggggttgatatctggttaggctatttagagaaaagttatttatgggcttccatgccatgaattaataagcattgaatgtctgctatatggaaaacactgcaataaatcagtgcttctcagcttaagagtgttcatgaaaatcatcagtgaggctttttagaaattaagatgtccagctcccacgggtcaaggcctttgtattttgcttttttttttttttttttttgagacagggtctcgctctgtcacgcaggcgctggagtgcaatggcgtgatcatagctcactgcagcctcc

SEQ ID NO: 61497 - DNA, 1845 bp, Homo sapiens
gcatgtgccactgtgcccggccaggccttcgtattttttaggaagctccataggtgattgtgatatacggccttagttaggaaacactgtaatacacactgtgagacaaatacaaaagaaataaggttataagatgaaaacaatgatatgtagttaagttatatactttccaacacatacaaaagaggggacttgagattggtggtagctatgggttagcagagacaaagtagggaggattgtgctgataaatagttaatcatgaacaaaggtacttgtgagtaagtcacttccaggttacagcaagtagattatcttgattgcagctcaggagacaagttggagagaaattggagatgaagttagtgcgtgacatatgggcagtgtaacataggccttatccaaaaggatgaacaaagagagcaggaggggaaggaggatgagaatagtgtgtgagaaagactgcgtgagaatggcgtgtgagaatagtatagtgtgttttggggaggccagaggacctacccattgcttcacattcttggtgccaactgtgaccgttaaatatgtggattctgtacatgcttcaagattgttcctggaggtcaagccttgtctgatattcctctctttttaaaaaattttattttggttttaaatagagacagggtcttgttatgttgcccaggctggtctcgaatccctgggctcaagcaatcctcccgccttggcctctcaaagtgctggattacagttgtgagctactgtgcctggtctgatatttctttatatggtcctcagttcctgccctcaaaattggcacataggatcactcaataaatattgttgaaggaactatgggaagggagacaaattgggaagcttttaaaattggttggttatgaagaaaatgaaggcctggacttgcgagtggcagggaaaatggagaaggaattaatcagaaatatattagaagaagaaataatagaactggataattgaactctgaatttgctagaaaagaaacatagtattacggtaaaataatgaaactgattttagaacaaatcttctggaatttatgtaatctgggtgagtatttcttgggagttactttgggaggttatatccttattctagtgcttttctttgggaatttctttcagattatttacatacgtatgccaaattagtcttattttggtcaagaaagtgtacattttgactgaagtaggcattcttgagctcaactacttcatttactgttcttgagcctaaatgacttttggatatttccataattaaaatttactagatgaagatgaaattttcaattgttgtaatagtcattcacttatcaagcaggtgtttattgagaccccttccaatgtcaaagcaataagtgtgatgcctgtcacaatcagtatgatactgaattggaagtcttttttttctgagatggagttacgctcttattgcccaggttggagtgcagtggcatgatcttggctcaccgcaacctctgtctcccaggttcaagtgattctcctgcctcagcctccctagtagctgggattacaggcatgtgccaccacgcccggctaattttggatttttagtagagacggggtttctccatgttggttaggctggtcttgaactcctgacctcaggttatccgcccgcctcggcctcccaaagtgctgggattacaggcgtgagccaccacgcccggctgaattggaaatcttaagtggcactgaggaaacagagtatgatggaaagtcagaggaagacgagattacttttgattggagaatcagggaaggcttcacagaggatataaca

SEQ ID NO: 61498 - DNA, 1037 bp, Homo sapiens
tatttatttatttttttgagacagagtctcgctgtttcacccaggctggagtgcaattgcacgatctcagctcactgcaacctctgcctcccagattcaagagattctcccacctcagcctcctgagtagttgggattacaggcacccaccataatgcctggctaatttttgtatttttagtagagacagcgtttcaccttgttagccaggctgctcttgaactcctgacctcaggtgatccgctcgcctcggcctcccaaagtgctgggattacaggtgtgagccactgtgcccggcctatttttatttgtatttgtatatttttgatctccagttggttgaatccatagatgtggaactcaaggatatgcagggctatagctatgtttaaattttaatggaaccacaacttaaatgtttgtttacatccacacagtggaaaattgggcttttctaaagctgttttataaatagagctggtataactctaaatggacaaagtaagagggcaaaagtcctctggtatcagcaacagtagcttagattgggtcctcctgttacagtcctggagtaaggacaacagtaggacaaactacttttataggactcatttgaattttactatttcttagatatttgtttaaaaacaaactagcctggttatttcatacacaggttgagtatctctaatctgaaaatctgaaatctgaaatgctccaaaatctgactttttgagtattgacgtgatgccacttgtggaaaattccacatctgacctcatgataggtagaagtcaaaactttgtttcatgcacaaattattacaactattatgtaaaattaccttcatgctatgtgtatatgaaacataaatgaattttgtgtttaacctttggtcctatctccaatatagctcatgatatatatgcaaaaattcccaaatccaaaaaaatctgaaatatgagatacttctgatctgaagcatttcagataagggatatttaacctgtacttatttaattactcatcatttatat

SEQ ID NO: 61499 - DNA, 1046 bp, Homo sapiens
tcccgaagtactgggattacaggcatgagccgctgcgctcagcctaaatttttttttcctttttttttgagatggagtttcattcttgttgcccaggctggagcgcagtggcacaatctccgctcactgcaacctctgcctcctgggttcaagtgattctcctgcctcagcctcccaagtagctggaattacaggcacccaccaccatggacggctaatttttggtatttttagtagagatggggattcaccatgttggccagtctggtctcgaagtcctgacctgaggtgatctacccaccttagcttcccaaagtgctgggattataggcatgagccaccgcgcccggcctaaatttttaaattaagtgaacatatgcatagcatttatttttatttataacatataatattaggaattatcgtacagtgaatatttcccatccccagctgtcaaatatctggtatagtcaaatttgagccatctcatggaatttataatgggctttgactgaaacaagtgaaatatatactaagaggaatgaatggctaactgcccattgtttgagataacaaaagtgttcaggctattttgggttgtggtttttctgtttcagagtcatttcagctatgcagatcacttactaaattcataatgtgagagtatgttaccttctatctgaaagtggcgttgggattttgcattctcttcttgggagtgcctttttaaaatttaatgatttagaccagatgttgatatattatttggagccctgctggttacaatgtagtctcatactatgagtcagaattcctcattaaaggatctttatttccctgaaccatatggcaagagacaaagatatcacaaagttgatctgctgcttttttgctttctggctgatttgggcccagccttttcattaaacctttaggtcatggttccgacagcggggtgtatttttacataataaaccagcattagggcagtatcaaaagaagtagcagtctttaatgagcaaatatcagagattagctgctttctt

SEQ ID NO: 61500 - DNA, 1300 bp, Homo sapiens
ccatctggggagctgtgctgtagacaggaaactgctgcttcagaaaatatgaaatgaaataacttcaagataatgagcctcatcctgaaagaacttctggtcccaacatacttattaagacatgggggctgggcatggtggctcatgcctgtaagcccagcactctggggtgctgaggcaggtggatcacctgaggtcaggagttcgagaccagcctggccaacatggcgaaaccccatctctactaaaaattcaaaaaattggctgggcatggtggcaggtgcctgtaatcccaggtacatgggaggctgaggcaggagaatcgtttgaacccaggaggcagaggttgcagttagctgcgccattgcactccagcgtgggcaacaagagtgaaactctatctcaaaaaaaaaaaaaaaaaaaaaaaaaagacacgggatcaaataaccattgattaaattaagtatgtgcattgcatgtatgcaaagaggtagagtgggatagagtgttaggtaaaaaggaacttgtataattagacgtaggaaatggggaactcactgccttctttcaagtcccttggtaaatgtagattttatgtcctcatatactggatcatcagtccttggatgatggatttcatatcgaattttcttccccctctcctccctactctcctagggtgtctccctttagactgttggtttctgaagggcaaggagtgggttttattcttcatattattggttctgtgtttaccatagtcccctgctcatggtagttcttcaattaagtgtgttatgttctgatatttaatataccagctagtcattttaggttattttatgataataaggatagctgattatctcttgcctccactggaaggcatgatgtttctcttttcctgccctcaaatgttgctatgtaccaaatatttatacagtctcaaagagaaacaaagattcataaacgatattatattgtgttgggtacatattttgaacttttagattccaaaaaattccatgtcacttctatcagaagttagcacactggattggcataagtgtggggtgtgtgtatagaggagagaggtggtgaatcttagaactcgaaatgttttacaaatgttgttaagctgcagaaaatagagtctttggcccttagagaatttcccactgataaaatttccagttgaatgacttttaaggggaaagtggctgaatttcactgcacttcttaccacagctggccaccatccaagtcaaagtcattccttcttttgaaataagcttaagtt

SEQ ID NO: 61501 - DNA, 1023 bp, Homo sapiens
ctatataagtgaaatcatatagtatttgtccttttgtgattggcttatttcacttagaataatgtcttcaaggttcatccaagttgtagcatatgtcagaatttccttcctttttttttttttttttttgagacggagtctcgctctgtcgcccaggctggagtgcagtggcgggatctcggctcactgcaagctccgcctcccgggttcacgccattctcctgcctcagcctcccaagtagctgggactacaggcgcccgccactacgcccggctaattttttgtatttttagtagagacggggtttcaccgttttagccgggatggtctcgatctcctgacctcgtgatccgcccgcctcggcctcccaaagtgctgggattacaggcgtgagccaccgcgcccggcctccttcctttttaaggctgaattatattccattgtatgtgcataccacatttgtttacccattcatccattgatggacatttggattgcttccaccttttggctattgtgaataatgctgctatttcatcatatgtttaatatcttaagaggcctgaactctgtctctgaagggtgtaagctgctgctgctgctttttctttctttctttctttttttttttttgagacagggtctggttttgttgcccaggctggagtgcagtggtatgatctcagctcactacaacctcaacctcccaggctcaagccatcctcccacctcagcctcccaagtagctgggactactacaggtgcatgccaccatgtctggctaatttttgtgtgtatgtgtatatattatacacatacaattttattatacttaaaattgtcatttcttgttgttcttgttgtttttcttggagtatagaaactataagagcttaataccagagcgagaatagcaaggcacctttaaaatctggtgaaggctgggtaaggtggctcatgcctgtaatcccagcactttgggaggctgaggcaggcagattgcttgagcgtagaagtccgag

SEQ ID NO: 61502 - DNA, 1031 bp, Homo sapiens
aaaaagaaaaaaaaatctggtaaaatgtgaggatatatataggatatatatatatatatatatatataaatacatatatatatgtgtattattttattttattttatagaatggggttttaccatgttgctcaggctggtcttgaactcctgggctcatgtgatctacctgccttggcctcccaaagtgctaggattacaggtgtaagccaccgtgcccagctggaatgtaagcttctgacggacttgggctaggactgtgaacttagcctctgatgccaaggagcaaacatggaatgaaagcaggccaaaggcccttttgcataatatggcagtaaggcaggaagggaagttcattccactttagagaggcagtgtttgaagcatgaggaagtttgccagccagagaaaatgggaataccttctgtgcagagtgaatacaaagatacaagggtgtgaatgtgcagttagggaatggggaagctttagtaatgagactgttaaggtggattgtgtcccttgtgaagggactcagacgacataaatcagttaaaaaaaacaaaactaacttcagtttttgaataggtataggattcacctggttcaaaatttaaaaggtaaaggtatacagtgaaaagtctccctttcccccttgaactccagccacccagtttccctcctcataggaaaccgatgcacttaagaaacccaatgtcttggatatgcttctagagatagtttgtgcacaatctggcagtaactagtcccctttcatacaaatgaagacctgttatactgtcttgtcctgtttcttgatttttttttcatcctttgcatgttttggggaacatttcttgcttgtatctacagaactttctcttcttttgacagttaaataatagtcccttgatggttgtagataatttattaaactagacccttatggaaggttatttgtgatctgttgctgtttcagacaacatggcaaagaatgacacaaatatgtcagtttacgtatgtgcaagtacattt

SEQ ID NO: 61503 - DNA, 1024 bp, Homo sapiens
aatggtcaacgttagtaaatgcatttaaagactttttgccggctgggcgcagtggctcatgcctgtaatcccagcattttgggaggccaaggtgggaggatcacctgaggtcgggggttcgagaccagcctggccaacgtggtgaaaccctgtctctactaaaaatacaaaaattagccgggcatggtggcaggcgcctgtagtaccaggtactcgggagactgaggcaggagaattgcttgaactcgggaggcagaggttgcagtgagctgagattgcaccattgcactctaggcaacaagagcaacgtgacactccatctcaaaaaaaaaaaaaagacttttgccattgtgttaccatttcaagttttcatcacacctgtaatttaaaaaatggggggtctacagtgttggtcagtactggttcaattttaaaagttacttaaggccaggctgactcagctgatcatgcctaagcaaataacagttaaggagctgaagccctagttaagcctaactgatcttggctgtggaaaccttccagcttctgggaagaaccaggacaatgggacatcagttggttagactgcatcttgatggtttatatgtgcccattgtgtacttgaagtttttcttgtccttcttgccatctgatagtgctgtagagttacagaatcacacaatataacagccaaaaatattagacataattgaatcccactctcattttattttattttattttattacttttttgagacaaagtcttgctctgtcacccaggcatggcacgatctcagctcactgcaacctctgcctcctgggttcaagcgattctcctgtctcagcctcccaactagctgggattacaggtgtgcaccaccatgcctggctaattttttgtattttcagtagagacggggattcaccatgttggcctggctggttcaaactcctgacctcaggtgatccacccacctcagcatcccaaaatgctgggaatacaggcgtagccatggtgcctg

SEQ ID NO: 61504 - DNA, 1024 bp, Homo sapiens
ttaatttcagtttttttgattactagtgaagttgcatattttcatgtttggtttctagtgtcagaatcataatagcttcaaatatttttcccagttccaataacttcgtttttttctgtatagatagttttgtctgtctaacttgattcatgtacttcatgtaacattttagagatgtggcctagttttttggcttaaatacacacacttatattctcaatgatgaatttctcctattatgctcagtaatgctttcaaattagttattctgaagaaggagtaatacaacattatgtttgtattccatattgttattctagtatattgtgaaggcatattatgtgagtaatcctaaaaaattttttaaatccagaaatctcccttaaatctagaaactttaatgatagattatgtttaagtatatgtttcaaatatgcttaagtaatagttttttaaagtctgagaatttatatttgaattatgattttttttcctcttgtaggttggaaaagagactgttcaaaccactgaggatcagattttgaagagagatatgccaccagcatttattaagtgagtaattgaaatattcttctgttgctaagcagaataatactcttgttaggaagaaaaagtagctgatttcagtaacaacttttttttggtataaaacttttgtttacaattgaaatttcaacttttttgtcttctaacttttttaaaaaaactgttcattttagtttttgatattaggcatttttgacataataattttttttttttgagacggagtttcaccctcgtcacccagtttggagtgcaatggtgcgatgtcagctcactgcaacctctgcctcttgggttcaaatgatttgcctgtctcagcctctggaatagcttggattataggcgcgtgccaccatccctggctaatctttgtatttttagtagagatggggtttcaccatgttggccaagctggtcttgaacttccgacctcaggtgatccacccaccttggcctc

SEQ ID NO: 61505 - DNA, 1931 bp, Homo sapiens
aattagccggacgtggtggcaggcaccagtagtcccagctactcaggaggctgaggcaggagaatgcgtgaacccaggaggcggagtttgcagtgagctgagattgcgccactgcactccagcctgggcgacagagcgagactccatctcaaaaaaacaaacaaacaaacaaacaaacaaaaacttaattgagcatatttaagttcacgtgtataataatatccctctcattccttctcattatgtttttttttaaactttcattgaagtataatatgcttgttattatgttttctttaatgggagataaaatagtggaactacagctattgtggctgggaattatgcataatcccaagtagacccatggggatatgccataaacttgagttttatttttctatatatgatggcagagcaaaagtggaaacactactgcagagaaattttgtaaaaaagaaatattttaagacgtttccaattaaagagctataatacagactgactttatgataggaattcagagagagagctctctcattataagtaggaatagtagaaagagcgtttatgtaggaagtggggcttgggaggatggttagatgtagggaggaaggaaaatactctaggtgcaatgaatggcatgaccaagtcatgagggcctgtggggagaggggcacatggtgggggtggtaggaactaagcttaggtaggtaggttgggcaatagtgaaggtccttgaaagccaggcaaaggaatttagaattgggcaggagggaagctttgtagttgctgagcagtaggatgacaatatgaaagcatcttccagaagattcataaccaaatacagaaggaatagtaggtgctaatgttgtaacagagaataagctagatgtcaaactgaccagatttattttctgtcagtgtagatttgcttcagattgattccttattataggtgagaaatgtttatagcaaactattttatttgccttggaaaaattgtcattgctgtatacagtggaatttcattcttatttctgcaatggagcagaaatgaataaggaaggcaattcttggacctgatccaaggatgttcagaactgaatggatcaaaaagcatcacttctgaggtggtcttgtgatatgaacttgaaaagggcatggtgtacattatctgttggcaggcaaatgacagctttcatttcgaactggacagtgttgtcactttctgccttagtgctgctctgacagtctgcttgaagtcaaaacttggattggttcaccagcttggactatttttgaagcatactgtaatgtctaggcttattgaataaaagaatgttcccaaaataccatgtgaaaggatgtactactgctacatgattgccattattcacatttcttgggaattctttgttttaacccttaaactttattagttaagaacagttatggtatttacttatacaaatttaccataatttatattcatgcacaaagaagaaatttgagaaggattaaaatatgctttatacttaatttagatctcttttgacctaaagtaatgatgtcacatttttaggtcatcaggccttgtagctttttctttgcttgtgatcttgaacactcaaaataatttgtgatgaaatttgtatttttaaacacacttgtgggtgaaagtgcccagaatatctttttttaacaattaattacttaatcatatcacttaataccttttgtttgcctggggctaatgtgtgatttgtgtgtgtgtgtgtcctgagttttgtggtcctttccactgctacagtattagaagatttttgtctcttaatgtggatgcccaagttctgtgatgtaatcattgacctctgcccactgccttgctgcatttttgacctagagcaagcactcaaactttaaatagt

SEQ ID NO: 61506 - DNA, 1036 bp, Homo sapiens
cgaagtgggtggatcacttgaggtcaggagttggagaccagcctgggcaatatgatgaaacctcatctctacgcaaaatacaaaaaaaattagctgggcatagtggcgcattcctgtagttccagctacttgggaggctgaggcaggaggattgcttgagcccagggaacggaggttgctgtgagctgagatcgcgccactgcactccagcctgggcaacagaatgagactctgtctcaaaaaaaaaaaaaaaaagaaaaagaaaaagaagaaaaaagacttgtggtagtctttttataatctctaaatggattttcctcttctttggcatacatttaatcttcttggttagtgataattgaaatcacatggaactgaggaatttgtgctctttttttcttacaaaataattactcatactcaaggtcttctcctaaattgtctcaaattagagtaggtggtaattctgggaagaatgtattagagggtcatgagtgagcatatttcgagatcccataaggctgtcattggtccatttgatatatagcataagattttttttctagcaatttaggttgaagattcaaagggagagagaagtactagttgattgatttaaattatctaattaaatattattagtatatagttaagatatacaattatttaggaaactgaccttatgcctactttcattctttaaatactttttaaaaattcagatttctattaaaatgtgcaagatcactttaagaagctagggagcttgaatgtttaaataaaatccaattttccatacacaagacagacttcttcctgtttctgactgctggttagtcttagtgggatttgtttggcttttatgaatgccattaaattttaatgtgcagatcagatgtcttattgtataaaaaaatggttcagtctctgttttggacctatcattttaccacacaagggaaccattagtgataatcaattttattcctgtaaaccttttcaatttcatctttttcagtttcctttctccataatg

SEQ ID NO: 61507 - DNA, 1747 bp, Homo sapiens
tcaagtagtagctaaaaaaggacatatgagtataagagttcaggaggctgggcacagtggctcactcctgtaatcccagcactttgggaggccgaggtgggtggatcacctgaggtcaggagttcgagaccagcctggccaacatggcaaaaccccgtctctactaaaaacaaaacaaaacaaaaattagccaggattggtggcagacggctataatcccagctactcaggaggttgaggcaggagaattgctcaaacccaggaggcggaggttgcagtgagccgagatcacgccgaaagtgttgggattacaggcgtgagccaccatgcccagacattatttttttcttctttatgtttgggggttggcaaatccaagctacatgttgagagaaatctcggatgataaacttgacatcttgggatcttctgctgggatcaggggcagcaggatacgccattcagagtattactgacagttttcatattgtcccattaggtttgtagtagatggagccagggtgagggccaggatgataactgatttagaaggatattagatattttgtgattgcaggtcatcagcatatgcaggttaaattagttacttaatcatgttgtgatggtgtctttgtaccttgagttttctttttctttttttatttttacaataaaggttgttaatgttggaactttattgtcaaacttgtagtgtttgttttgtatactcattttaggatcttaaaagcccaaaacatctaaagtgtagaacatcttttgtgaatattgttatacaacaagattaaattccaagcttactttctgatcttttatttttacagctatgaagatttttgtaacaactaaaaactcaaaaaaccaaggcatagaggaagctttaaaaaatcgcaattttactgtagaaaaaatgagtgctgaaattaatgagataattcgtgtgttacaactcacctcttgggatgaagatgcctgggccagcaaggtacgtgttcttagtggagaaataagcaaaatccccaactctccctggctgggggttttgattggcacctgtctcatactttatcttgtaatttttgtagcataagagtactcagatattgtgaaagtaatttcttcttcatttctgtttcataggttacttgctatctttgctaatttcctttgttctaaggtagaacaagtaaataggcatgtggggtagatactggtttaaggctgagatttatagcttttccatcaggctggagtcttattggttggactggtggaagagtatattcccgtggatgggagctctgccttgtatatgggtggttcttcccagctgactaagtaagatacagatatgcctgtaattctgaactttatggaaaacttttctttaaccaatctttgatccagagaaatctacagaggaaactcttggcatttctagatgtgtcccttgatcattccattttccccaaggaaggtttaattaaaatattagtcttcacattggtcagttagtttgagggatcccttcaccctttttctggaatctcttttaggaccccagaggggctggcagattccttctagagcctgttagcagtggttttgtgttgctgctgctctggtctgctgctccctgtttaatgactgtgaaccaagctttcaggtctgggggaacagagatacttgggttcatactttccttgtaggagcccaagatgtaggcagt

SEQ ID NO: 61508 - DNA, 2101 bp, Homo sapiens
cttcttccaggtgagggatagtaagggaactaagaaggaggaatagcagggaaggtcagaaaacacttctaaattatattactttgaggggtttatttgtagaattaaaattaaactgctagattaacattttcaattgtttcttccaaccagtaattccaagtttttcaggttaattgaatatagtgaaatatcatccagtgtgtgcatttcaaaacaagatgtaaaagaactgtgatttgtggcaccacatactaacgaggcttccctgaggtgggaagggctttggcaaggctgcagtagatgaatgttgactagtggaaaggctgacaatgaggcatgtgacaacagggctttttcctgctgaagacattaaacatattctggcttgagcaattttaccagttttcacagttttagcaatagggaacccaattccactctgtttagcaacagagtagaattaactgaatatttgcatgcaagatgctgcattttgacagaaatgagaattgtggtgtggtgacaatatttttaaggccttcgtaggactgactaccttagctatgtatgttaatgctgtaacttcttctctgtcttacgttctatcatggtatctcaacttttgcaaagaaaataatggtgggatttcttcccaaaaggacactgaagccatgaagagagcattggcctccatagactccaaactgaaccaggccaaaggttggctccgtgaccctagtgcctccccaggtaaccctctagttctgcttttctgatcaatacaacgagaagctaaaaaccaagcaaatgaaagaaagaaattttcccataatctcatcatctgagagaactactgtaacattatggggcataccccattatctgatagttctgagtaactgaagcaagtagtaggccttacaaggatgaagggaatagattcgatcacctctaatcacggaggagtaagtcatactgagctgggcattctttgcaaaatttttggttctccccttccctgaatccaaaaggtaattattttgaatgaaagttcttctcttccagttcccattgagcagacttccatttatgtcaacagagttcttaattaagcagattaaatcatgatgccaatgagaattggaaagttgactgtataaagataagacccaaataggttattgaactaggctttattgattttctaatctaatatttattctgttttagattaatatttgaatgaatgtgaaaaacctaaagtaggttggaggtgctaaatactattaaattgttagagtctgttttcatcatccatattcttaccacaagctacttagtatctccaaatagatacagttccaagtatctttttttgcgtgtctgttgttgaaacctcaccctatggtttaagggcactgcttggctgttagctatcagatatgttgccttctattcactcgtcttgtttaaaatcatccattccttggtgaatgaaatgacttgtaaagtatcctctctaaataatgaatgtgtcaacaatgtagttattgaatatctctttattttaggggatgctggtgagcaggccatcagacagatcttagatgaagctggaaaagttggtgaactctgtgcaggcaaagaacgcagggagattctgggaacttgcaaaatgctagggcagatgactgatcaagtggctgacctccgtgccaggtaaaagttcctctgtccttacagagcagtagtgggtaactcactcctaacagggtgattcagaaaacaagcctctgccagttttgagttatctctttggctagtagataacagagatattatagtctattaaattcttttgagatggaggtgaactttccctttgctgactttatttatttatttattattttttgagacagagtctcactctgttacccagactggagtgcggtggtgcgatcttggctcactgcaacctccacctcccaggttcaagagattctcctgcctcagcctcccgggtagctgggattataggcgcccgccatcacacctggctaattttgtttgtttgtttgtttgtttgtttgagatg

SEQ ID NO: 61509 - DNA, 2244 bp, Homo sapiens
gaaaatagtgaaatcagttctttaggaacttgatgggaaacagtggtttcctatcaccatgtgctcagtattagctagtttcgattatttatatatttataggttgcctaggaggaaggtaggcatttaagattatcattaggttcattataaaaatgatgataattcagtaataatgatagatttttattgccagtgttttcaagtatattattttgatgcttgaagccactccataagataagtggggaaaatgtattacctaccttcattatatgttaccttcactatataagttagaaaatggaaacccagggaggttaaacatcataaacaaggttccacaggtaccaagagtcaagatttgaacacagatctgcttgttcccagtctggtacactttcattaacactatgcgtgcttcctcctgaaacattttcaatgtatacttgcccataagaagacaatttaatggactatttatttcagaagcacacattactatggtaacaaagccctccctagcaataagatcaccagcacattttcccactgaagtttagattggattatgtaatcactaccaagaggagaataattatcaaaatttgctggcctggtcttcaaagtggttatgcagttccgtgaagctaatgtgcatttttaaaagaaaaagtacttgatttgggcgtcttgctttgtttatgtctgttttcttgtgctgtcccagatttactgggaaaaaggaaaaagccaagcatgttcatgaaaaccacatgtactgtgctattgggaatattttgtcattaagtatttgagggtgtacaatgacagcatgtgtctgttttgagcagaggacaaggatcctcaccggtggccatgcagaaagctcagcaggtatctcagggtctggatgtgctcacagcaaaagtggaaaatgcagctcgcaagctggaagccatgaccaactcaaagcagagcattgcaaagaagatcgatgctgctcaggtagtcacagtgattttcaggaggggtgggaaatatttcataaatatcctaagtcataaatatcctatctttcttctctgtctcttatcatttactgtggttggataatggtttctaagtgatgagtgacttccagcacttaccaatgttaacacctcctttaccaccacaggtttagacaaatgtttatctatattttgaaataaagatcttaatttacagcacttcagttaggtaaaagtaagctctcagagtaccaagggaagattgcagtacattggaactattccttgtcccagaattcacaactcttgggtcattgtaatgtttaggggttaaagttttccgatactgctctactgtaaaatgattttcaagcatttcacaaacacacatgtttgaggaactgaggaactaataaggtgtggttaattcagagatgagataaagcttgggaaaatattttatgctaatgggtgtaaaaaaattgattttaaaaagatgagagattgagtttcttatctaagaacctccatacaataataaagatcagaattataaaaatgattactggtatattacttttgaaatccttcttctggccttgttaagtttagtagaaaggagtgtgtgagtagatcacagcgtgctgcttctccgtttctatgtgtagaactggcttgcagatccaaatggtggaccggaaggagaagagcagattcgaggtgctttggctgaagctcggaaaatagcagaattatgtgatgatcctaaagaaagagatgacattctacgttcccttggggaaatatctgctctgacttctaaattagcagatctacgaagacagtatgtatttaacccttacattgccttttcatatcttttcttctctttctctctcccttccctctccctttctttctttcttcccccaagaacatacatatttcaattcccctaggttaaatgcacttatgatgctcttccactatattctcattaattctaggtcagatgttaatttgctgtatcagtgatgtaactgaggtttaatgatttattgctggtcacatagttataaattgataaatttaggatgctaagaactccttttttgagatgctttttaaatttctaagctagggctttctttgatacatcatgtttatgacctatctgtttcccatacataagaggaaaataatttttgtggctagctatgaaaagactcct

SEQ ID NO: 61510 - DNA, 1049 bp, Homo sapiens
ctacaggcgcacaccaccacgcccagctaaatttttgtatttttagtagagatggggtttcaccatgttgtccaggatggtcttgatctcttgacctcgtgatccacccacctcagcctcccaagtcctgggattacaggtgtgagccaccacacctggcctattatttttatttttacagatgagacagataaagttagcctgaaagttacctttctatggctgagaggacctgagatggaaaatgagtcagattctttgtatttttataatggttagaatttgaagtctttggaataaggtgttgggggcagtttttttctttgtgatataattgtggttgtctttttatttctgtgttgatacttggttgaggttctttggttggaaggacctggtcaagtaaaaagtagaggattattgaaaatagaggcacctcatcaaacccaatagcttgaatgtggccagatcttgggcaactggaagcccctccctccacctcttagtcgctgtgtgggatcctctatgtctgtttcaccctgtgtgttgacttagtttatttatctgggggttttgtctctggctgtgagctaccacggcccaggcttaatcactttccagctccagataccatcactggttgactatgcagtgtttttgaaatatggacccaggattatctgcctaagaatcatctgagaaggtcgttaaaaatgcagaccccttgaccccaccgcagacatacttaattggaatcgcttttgatggtgggtttaacaatctgtatttaaaaataagatctccagtgacttttatccacactggactttgagaacccccagaatctaattgagtgccttgcctgactgtgggtatgttgtccttgaggtagataaccacccagtttaatcagttatggcaaggactggggattatgtgataccaaatgtatagtagtttatgaatgaaggctgggcacggtggctcacgcctgtaatcctagcactttgggaggctgacgtgggcacatcacccgaggtcaggagttc

SEQ ID NO: 61511 - DNA, 1039 bp, Homo sapiens
aaacccctctcaaaacaaaaaacaaacaacaacaaaaaattgcttgtaacagtacctggcagaattaggactcaaaagatagtattactactagtttgactataactgtttcagctgctcctacaacaaacatggctgcctgggcccacccagttccagaggaaactggtgttttcagaggtggcaggcagagggtgccgctaacctagtgatgattgattgagctccgctaaccaaatgattgatctgagctttactgatgcaaactcatatttaatgtcttaactaggacaaaataatctgaatgtaaattattaatttcttatgtaagggccaaataaataaaccactcctttcaaaccaaattaatagtaatcaggagcaatttgtcatcctattagcatttgtcattagcagctaagtgatctcaatgtaaatagtgtttatgtgtgacaggatggctgtctttttctctgtagggggaaaggagattctccagaggctcgagccttggccaaacaggtggccacggccctgcagaacctgcagaccaaaaccaaccgggctgtggccaacagcagaccggccaaagcagctgtacaccttgagggcaagattgagcaagcacagcggtggattgataatcccacagtggatgaccgtggagtcggtaagggcagcagtgcactataacctcattaaattggtctcagtgcaaataagcaagttgttgataggggtcctgtaacatctgtaattaggtaagggttctttagctgctgataagtaactgtgattccatttccaaatgcagccagtaaaattcctgtgatgtaatcaagaagcagaccaggcatggtggctcatgtttgtaatccaagtgctttgggaggctaaggtgggaggatcacttgcgcccaggagtttgagaccagccaagcaacatagcaagaccctctctgtacaaaaataaaagagtaaagaattggctgggcatagtgatgctcacctgtagtcacacctttccagctacttggga

SEQ ID NO: 61512 - DNA, 1034 bp, Homo sapiens
tattacatagattttagatcatgattttaaaagatagtgaaataaaaataaagtgttaaataaaaagaactggctgggtgcggtggctcatccctgtaatcccagcactttgggaggccgaggtgggtggatcgcctgaactcaggggtttgagaccagcctgggcaacatagtgagaccctgtctctctaaaaaaaaccaattagccaggtatggtggtgcacacttgtagttccagctacttgagaggctgtggtgggagggattgcttgagccggcaggtcaaggctgcaatgagctgttgttccactgcactccagcttgggtgatagagcaagacgccacatcgcaccacagaatggcattgcaattgtctcctctgggtcttgtaagtttcattgtttttctcttggtccaggtcaggctgccatccgggggcttgtggccgaagggcatcgtctggctaatgttatgatggggccttatcggcaagatcttctcgccaagtgtgaccgagtggaccagctgacagcccagctggctgacctggctgccagaggggaaggggagagtcctcaggcacgagcacttgcatctcagctccaagactccttaaaggtagaagtcaggagcacatatcattttactttttatgcttcctattattgaaagacgagggaaggaagagagagttttgaaaaatacataatttctggggtctagggaaaatgaaaagagtgtgaccaaagatataaggaaatctagagcttattaggaaaaagcttgctggtatatagtagcaactaaatttgtgttttccaaattccactcagtcaagagccctttcgtgatttttgctctatccacatatcatctgtacttttatttagccaatatttttcttaaaatggactttttttttttttttaaatggacttctttttaaaacttaaatttatttaagagaaaactctgtgggccgggcatggtggtacatgcctgtaatctcagctacttgggaggctgaggtggga

SEQ ID NO: 61513 - DNA, 1016 bp, Homo sapiens
tgaccttagcatttggggtcttttagaaattgcttatctttcttggaactgcaaatgtttttagatgctacattgctaatgatcagagctccaaatatgaattgtgtgggctgtgctaaagctagatgaaatgtttgcattttctttttttttccacagaagcaagtagattggtatcttagaagccatgtgcttttgtcctttctcagaatcatttcacctgtcaactcaagacagctccaggctgtctcttactcagcaaatctgaaggtgtaaatattaatgtggttggtaaaaatatggatgctacagcagtcttgccctatgaataacttttgcctattttcccctaaatgatgaaaagtgagcagtagcttttctagataagaggaatattattgctaaccctgcagtgaaaggtagctcttagttctaaactgtttctaatatgaccctagatcttttttttaatgtttttatgaccctagatctttattcccaccacctatttgcctttattctttacacatcctcaaagctttcaagctcttgtgtcgattgtatttcctcagggacctcctgcacctgcagctgatcttggatttttttcaggctgggaaattcacattggtttttaactctgtattttgctgaactgttagctgtgagcccaggttctaagaaggaagggagactttgctggtgttggacctgacctgtagaattatttataatggtatctctccaactgcatgtggcagagccccactgtgcatggggagtgggggagggtgacagtgaagattttaaaggaaatttaaatttcattacaatgaaccaaaatacactatgcagaacaaaaaatatacatgaattatttaaaaaaacaaacaaacttaaaagcagacagcattggcccacattacttgccccactctgccatttgtggccagaagtcctgaggtctatctcctgaagtgtgcaagatcaggagtttgctgactttgagttgtgtg

SEQ ID NO: 61514 - DNA, 1023 bp, Homo sapiens
ttttctctccggattccttttaaaggtaatttgctactatcgtttggttgtttggctcctcagaaatattctcatgtgagaatcactcttgtcaagtttgactttagtatcaagtatattaaagaaatggatgccacttgctttcttggtgtaaagatttctctagaagccctttgccattggagtgagtcccttttcttctctcaccacacagtggcttgggctgagtggcgctggaggctgagaattcccccttctgtgaagcttggtacacaaggctcctagagaacatgtttctttctcatcctaggcaggctttggttactaaaccagctgaagcccagtttcccaagtcgtattgctcttactaacactatccctatttctcatccttcccgccatcgacaaagccgggcatcccagccgctgaggtgggtataggtgttgtagctgaggcagatgcggccgatgctgctggcttccctgtcccccctgacatggaagacgattacgaacctgagctgctgttaatgccatccaatcagccggtcaaccagcccattctggccgcggctcagtccttgcatcgggaagctaccaagtggtctagtaaggtactgataagcacccccagttgggggctgctccatatgcatccggccatgtgcagccttgacacattgcatcactcatgatctgtgctggtcctgtgagtctgagcagggcgggcatctgtctgtctgcaccatgttgttaggactggcttcacaagtttgataggtctgctaacgccagattaattggactgcatttatgtttaggggatgaagagagatggggggggtcacttttggaaaggattccttttcttactgattttgtggccatcgctggaaaccccttgggaagccgtgaatgcatctctcaatgacttccaggtcaggaaccatggtagaccattacgaggtcacctggcctgaccattgagctttgcctgctcccaactgacccctcactgatggc

SEQ ID NO: 61515 - DNA, 1434 bp, Homo sapiens
gaggctgcagtggccgagatcacaccactgcactccagcctggatgaaagagaaagaccccatctcaaaaaaagaatgagcagggaaatcctcaccaaggtgacaagtgagcaaagatctgaaggtgaggggatccctgggatccctggggaaagagcagtccaggtacaggaaacagcaagtcctgagggagaagcatgtttgaagaccaagaaagaggacatgctgtaagctatctgaagccacagtatacaatcagcgatggccagttttgggttctttttggtgatctgggaaaacccctagtgatgcaagcaaatatgggggatgccaggtaccagtggggttagctgcatcccactcctggctgaaacctattttagagacaggcctgcatcagggaccctgggtaacggaaagtacctttttccttgcaggccacagagatgctggttcacaatgcccagaacctcatgcagtctgtgaaggagactgtgcgggaagctgaagctgcttcaatcaaaattcgaacagatgctggatttacactgcgctgggttagaaagactccctggtaccagtaggcacctggctgagcctggctggcacagaaacctctactaaaaagaaggaaaatgatctgagtcccaggagctgcccagagttgctgggagctgaaaaatcacatcctggcctggcacatcagaaaggaatgggggcctcttcaaattagaagacatttatactcttttttcatggacactttgaaatgtgtttctgtataaagcctgtattctcaaacacagttacacttgtgcaccctctatcccaataggcagactgggtttctagcccatggacttcacataagctcagaatccaagtgaacactagccagacactctgctctgcccttgttccctaggggacacttccctctgtttctctttccttggctcccattcactcttccagaatcccaagacccagggcccaggcaaatcagttactaagaagaaaattgctgtgcctcccaaaattgttttgagctttccatgttgctgccaaccataccttccttccctgggctgtgctacctgggtccttttcagaagtgagctttgctgctacaggggaaggtggcctctgtggagccccagcatatgggggcctggattcatttcctgcccttcctcagtttaatccttctagtttcccacaatataaaactgtacttcactgtcaggaagaaatcacagaatcatatgattctgcttttaccatgcccctgagcaatgtctgtgctagggaaacttcccgtcccatatcctgcctcagcccgccaaggtagccatcccatgaacacactgtgtcctggtgctctctgccactggaagggcagagtagccagggtgtggccctgccatcttccca

SEQ ID NO: 61516 - DNA, 1025 bp, Homo sapiens
aggaggataccatctggcggctgcacattgtaacagtaaaggcagaaagctgtagtgataacctctctcctaaaagagttaactggtctcatccagcagaagctatcttaaatctgtgatgtgtcaggtgcagccaaatatcacaccttctgatcttagccatcccaaaccagtatctgtcccgagaggaaattccccccacccccagaagtttacagaaaactgcctcttcaagtgtttgccttattcagcttttcacttgtgccattaagcaagcactgtagcaaaagccacttccacatggccctggcagggagcactgctgctccatgctccattctcactgtacttggtattgtattttttataaataagatttttatgtaaagcttagaatttgatttacagggaccttgctgcagtaaataccatctcaattttgtgccactggttcagctgttagcacagtaaaaaaatcatttgtatcaaaggggcaaatgctttattaaggtagtaaaagggaacattacttctgcttttaggaagttactgcaagcacaagcatttgtgcttttaagcaaattaaagtagtaaaagaaaaacttaagtgaaacctttgccatcttcatgttttataatataaagcttacccaacaccagttaagccatggttaacctaaatgcctcatgccccagttcagcaaaaggaggaaaatgtgcctgcctcacagtcatcagtctttttaaatcttttttgttgttgttcttaagggtttgaatttgtctgcattccttgtctttaggggaaattcccttttcatattgtgtgcttcccaaagctatagtcatagatttcttccagaaactattgtcataattgtcactggagtgcttaaatatacgtactatactgacaaaatacatggaagtgagttataatgaggcagaaacaaaatcctcggtaacattgatgatactctaccgatcaccgtggttttggaaagtcagtcaacagttgtattatt

SEQ ID NO: 61517 - DNA, 1115 bp, Homo sapiens
aatgctttaactagaatatgtattcccactcacttggtacctaatagtgatacatcgtaatgacacttggaaaacaaactggtcctgaggaattttggcctcttctcatgtcctcacttggaactttccagctttcgtgacgtatttgactcctttaaatggcttatatttctccccatacatgtccaaacggtttacttttaagcctgtatcaaaaagaatgaaaaagaataaattatcatcatcccaaccaatataatgttagcaatgagcgctatatggtaaatctgacattaaccagtgtcccttccaccatttggaagaaatgtctcttctatcatttacaaattattgcactttgatggtatggttttggttaagattcccacacaggcagggaatgtctgtgaagtataattctactttctgtgaatatgaataactctctttttggtgcttaaatgagggcggaggtgaggggaagctgtttgaaataaggtgctctgaaaaatcatttggtcggtgcctgtgagactgccccaccaagcacagtataaaaggcaaatgggctactgctctttctagagaaggaaacttttgttactcttctaaatgcctaataaatgagcttgcaaaactcaattacccttaactacaagtcaaccttatccttacctgaaatagcaagctgctggatcttaaactgtatgttgaggctcggattctcttctggtttgggggctccagactgtaaatttaccagtcctttaagacttgggagcttttgtggagtaatttttcccacatcccatgttagtaccttaaaaagacaaaaaatgaaaaacaaatagaaccatttattaaagacaaaccctcaaaaacaaagttcaaagatatcataaacttctgtacaaactgaagtgcagtctcttgaaaacaagagatctggcatctacagtgagtttacctctgattaattctgtgactttgaatggggagtgagagcagagaatctacatttgttgagcattttcttttgtattagcaccgtgcttagcattattcatatgttgtctcattgagggctgtgaagtagcttttgtcttctatttaca

SEQ ID NO: 61518 - DNA, 1040 bp, Homo sapiens
gagtgaggctgcagtgagctatgatcatacaactgcactccaaccttggcaacagagcaagactctgtctctaaaaacaataaataaaaataaaaagatacagtgataggtctagtgaagactcatattccattgatgttatcttccttttttttttctttcttcaggatctacagtctttgcagaaattcagggggtcattgatgcttgcattaaactatctggaatgcctgatctctccctttctttcatggtaagttttattctcctgttttatagccccttgaatgcctaatacatgtgaagtactaaatgaaatgataaatattgagataagtttgcatcttagattgcaaaggattatctcagaaatattcctagcagagtttcctaagacagtcgcttacatgatgagcgtggtctttgtggaaagactaagggaggtctttgcctgagtgtgctagaaggggcttaaaattggctggctggcttctgcaaatatccagtatcatttttactgaataattatttgctttgctgatatgaaaggacactggtcttttgtatcattttagagtcagcatgatatactgctaggaacaattaagagaactgacttctggtgttgtcaccagtttgctctgaccttaagtcctctgaacctcagttttttaatctgttaaagggaaataatactacttgccttttctcctttatagttattgaaattcaaataaaataatgtacataaaatatttacaaactttaaagcattatgaaactataaggttgtgtagatgtggtcataaactcttccatgactgctttatcttcagggaacatatttgtcaaggtatctgagtacagttcccatattcattatagtctatgaacgactgtcttctgtttttctggcagaaccctaggcttctggatgatgtcagctttcacccctgcatccggttcaagcgttgggaatctgaaagagttttgtcatttattcctccagatggaaatttccgactcatatcataccgtgt

SEQ ID NO: 61519 - DNA, 1001 bp, Homo sapiens
attccatttactccactgaggcgtgcttggcagcatctcatgtaaaataaagttgaatactgaagggcctagttataactctgtattctcactggagacattttattggcagaaggttttgaaacaaccaacctcttttttcatcagtggcagagattctgttgttgagccactggaattagattagattactgttaacacacaggaggcaaaagataagtaaataaatttaacctggtttggcaggtagacagagggccacatggcctatatttcttttctagaaatttgatcatgttggtatggatatgtctgacaattctagtgaccatccacaacttcattaagaaaaatccaaacattgaagaagcagctttttttttcctagtaataaattttctcatgactgttttatacatcagctttgccttctccttttttggtttctaggcagtagtaatgttggggacacactccccaccgggcagctgtccaacataccatggcgtcgggcaggggtaaagtacacaaacaatgaagcctattttgatgttgttgaagaaatagacgcaattatagataaatcaggtaattgtgtgcatgtcatcttatttggggaaaaacaattcatctgacacagatgaatagaaaactgaagtcctggccgggcgcggtggctcacgcctgtaatcccagccctttgggaggccaaggcaggcggaacatgaggtcagagttcgagaccagcctggccaacatggtgaaactctgtctctactaaagatacaaaaaattagccgggcatggtggcgcgcacctgtaatcccagctactcgggaggctgaggcaggaaaattgcttgaacccaggaggcagaggttgcaatgagacaagatcatgccattgcactccagcctggctctgtctcaacaaaaaaaaaaaaaagaagaagaaaggaaaagaaaattgaagtcctttggcagtatggtttcggtggaaag

SEQ ID NO: 61520 - DNA, 1068 bp, Homo sapiens
tcccattcgaaagtactacatacttaacaacaacaaaaaggtagagttcagagaagtggtttaaagaaaaacacctgtcttcttactaacaaaatatatctaccattaacatttttgttaatattatggtattaacattttaatataatattaacattttggtatatttctttgaatatttccaccaccagaaggttgcatttttttctattttgataattttggtttttaattgcactttaaaatatagtcgcaatcatactgtatctacaattttgcagtctacttatgattggtgttcctacctgcaacctataatcatgttatcttcctgctcaaaaacgttcaatgtttgctcactggctttatgataaaagctaaatatttatcctagctttgaaggactttctctactttttaatttgatctctaacttctcaagtgaaaaacagttctgcttctgctaaagggattaataaaactttaggtttttctctttcatgtgtgtttttttctcatacagttccaccatggagaatgctcttattccttcctcacttcctgaattctactgattttccaaggtggccacccaccacagttcaggagggattacttcattaatggaaccattctcttgaactttgtaatacactatctaatgaatctgttatgttttgcattatatattttagtaacttttctctgactataaaatacatgtttattttggaaaattagaaagtataaagcaaaaataaatataatctgtatttagctgggtataatcattgtaaatacttttttgtcggagtgaatatttatatataagaataatttttttcagttttgtgctgacttttcaatttaacgttacatcatgtgtatttattttccaatgctattactttatctgtgaagtatggaattgctttttaaagtcttatacagttatttacttaattttttttccaatgtcccattcagagtataagttttaggagtacagacacaccatcttatctttctttgaatttctcctaacattcgtccttacacaaaggatga

SEQ ID NO: 61521 - DNA, 2353 bp, Homo sapiens
ctgaggaagtttctttttgttcttaaatggctttcttttttttttttttttttcgtaaaaggatgttggattttgtcaaatgcaatttctgcaccttttgaaatgattgttttagttcttattgtatatcatgttgattgatttttgtatgttgaaccagccttgcattcttagaataaatcccacttggtcaaggtgtataatctttttgtgtatgttaaatgatatttaatgtataataaatttaaacctttctttgccccaacagaaaatgatccacagtctatttctcataaactgttccggtgacatatttctagagaagcactggaagagcgttgtgagccagtctgtctgtgattatttctttgaagctcaagagaaagctgctgatgttgaaaatgtaccacctgtcatttcaacacctcaccactacctcatcagtatctaccgggataagctcttctttgtatctgtcatacagaccgaagtgccacctctctttgtaattgagttcctacatcgagttgctgacacttttcaggttggttatctatcatacctttctaagttaaatgacccaagttagctgaaggtgagacatgattatattatttaattacccaggttttgatgtttactgtctgtctctctctgtttaagcgtaaattcataagcccttttctgtgtggtatacagttacacacatggctgctctattcactattttttatatgtattacagattacagttggctctccatatacatgggttctgcatccataaagtcacccaaccttacatggcaaatatttgaacaaaaaaatcgaactgaacatgtacaaacttcttctcattattacttgaacaatacagtataacaaatagttacatagcatttacactgtgttagatattacaagtaatctagaggtgatttaaagtatataggaggatgtgtataagttatgtgcaaatactatgccattttatgtcagcgacttgagaattgtgaactttggtatctacaggggatcctggaactaattcccacaaataccaagggatgactgtatatcatcaggaaacaataatgccctccgcatacagttctctcaatggtctcaagattttcattggttatgaactcttctatatttacattttattattttgtcttgcggaatataccaaataatttaagcttatctatatgtattttgggataatcagggtgaatgaagtttatagctcaaattccaatttaatgtttcaatactttctggtataatatgtaataggaattaaattcaacctagaaatatcaagaaaatattgaggaataatattaggactatagaggggttttttttgtttgcttgttttgttttgttttgttttgttttgtttgagacggagtctcactctgttccctaggctggagtgcagtagcatgatcttggctcaccgcaacctccgcctcccgggttcaagcaatcctcccgcctcagcctcccaagtagctgggaccacaggtgtgcaccatcacactcagctaatttttgtatttttagtagagacagggtttcaccatgttggccaggctggtcttgaattcctgacctcaagtgatgcatccgcctcagcctcccaaattgctgggattacaggcatgggccaccatgcccggactatagagggttttttcccccgctctgttttatatatgttcagcagcttaagcaatgaattatgctactctaagtttattcttcagaacaaaaagtatttagcaggcctttctttttgccttccattgtgtgatattttgtgtgtattttgtcaggactactttggtgagtgttcagaggctgcaattaaggataatgtggtcatagtatatgaactcttagaagaaatgttagacaatggatttccactggctaccgaatctaacattttgaaagaattgattaaaccaccaacaattctacgctctgttgtcaactctattacaggtaagatgaaaacatactgtgctagtaactgagcaattaaaactttgtaaacaactcattattgctcatgatctgacatattattaaggtagtacaatttggccataattaaagttactggtaaagttaaaatggatgtactatatatttattttcatggaaagaggctagaccttaagtgataaagaacttttggttattactctttttttttttctaaaacaccacaacaatattattaccattatttaacactaaatactaagactgaataaattgttccagttattcctaaagaagccagtatatgagcccacttagaagagaatttagt

SEQ ID NO: 61522 - DNA, 1144 bp, Homo sapiens
tatagaaggaatacatttttgtttttagacactgtcttccaagaatattttgactattgtaaatgcattgcttgtgaattacccaggatgattataaaatgtttagtaaaaaggatttatgatgtatttaagctgcagtcaaagctctggtgggtctgcctctgaacacagtttcttctagtggcttttaaataagctgggagaattctgttttatgactcaaaagccactaggaacaaaaagatggttgtggtaataatgagtgtgtagttttctcagaaagtttatgaaaataataattaaaaaaataactgcagctaccaaaaggacgataaataaagaaacaggctaatttacactgcaacatggtattatttaattgttatatgcattagaccttggtcataatatggatagaagaagtaagctctcttttcctattatagaaggttaagatgggttttaaagctaagcacagtcgagaacttacaagtgttatgctttcatctcagcactaaggataacaacaataaatctaggaggctggtttaactttctgtattctgagacctgaactactgccaataaaaacaacttcggtggaaactttcctggaaagaatttttcaccagcttaagaggatgagtagagatctggccctaaaataaagtaactacaaaatcacttactttcaaaacaagcaactctttcagagtgtattgtggcaaaggagcactataaatccttgtgaactatattttcgataggatgaatgattttagataacctgtgtcggtgcttttaaatataacttccactctaaataatttattaaacttcctcagcataacaactagaatgtcttttgcctcctaactaaacaagaaatgtcttttacctcctcctcttaaatcataagctaggctgggtgcagtggctcatgcctgtaatctcagcactttgggaggctgaggcgggcggatcacgaggtcaggagttcgagaccagcctggccaacatggtgaaaccccatctctactaaaaatacaaaaaattagctgggcatggtggcgcatgcctgtaatcctagctactcgggaggctgaggcaggagaatcgcttgaacccagcaggcggaggttgt

SEQ ID NO: 61523 - DNA, 1626 bp, Homo sapiens
ccccaagtccggcagcgctcacctcagcgcttgcggcgcctccaccttcagctttttgggcttcggctcctcctcagcagctgccatcttcgcgctcccaccccactttggctctacagcccacctctgccatccactctctggtcccgccccctcttcgcatcaccgctttctcttctccaaatcccgcccctccagactccgcccattctgtgccgctgtcatccacaatcattggctctatccgtcggcaccaacagcgaatgccccgcccattcctgaccccgcctcccctaccatgagggaccccagactgcgttaggcagcagatgaccgcctgaatctagatggagagaaacccaccatttttctaggccctggattatgtagaagatttagatactaagcctcaagagacgtctttcctctcatttacggtcttcctgcatatttaaaatttctaatacggtagacagagtcggtgtctttgaagctgttaatcaggcaatttcctgggcactccagctgcgggtcctcgcggccttctcggcttctccagcttcggtaggagaggatccggcgccgaatcactgactggcacaggtgttggggtgagtgtgaggggcgggaaatctgtggactggggacagctccaaaacccgggagtaggctgaatagctggggcccccgactccgatctgggctctaggagcgtctttggtgctgttggcccgggcctcgcttcccccccactcccggccttccgggctttctcgccagcaaggccagaagggagcggtccacctgcagcccagtgttctcaggcgcctgagccccggaggtcaagcttactgggttccccctctatagtgagctggagtacagacggcaggaatctcagtcccaggtttctgctttggaggacaaaaccccaaacggacctgagcagacgtcctgttagcgggtggtgcctggaagagcctggggtgaggaatgcagtgagaagggtgttgcagttcttcaggagagaggtaacggggttctaagctgagcaggtggcagtgagtgtggaagagtgacgggcgatgtggctgtttgtatttggtagatttgtttgaacctgaaacttacagccttatgtgtgattaagaagatggtgccagtgacaggaggaggtattttatggagtttgagttttatcgaatttgaaacagtggtttacatggagattgtagaaagactttaaaaaaaattatgagaattaagcccgaaagactttcaaggtgagacccaaaacagatgaagtttcatataaaagggtaagaagtatttttgtttaggagaaagttatcaatgacataaaatgctgcaatggtcagaggaggaagctgaaatcagaataggtcgttggattttataattagaaagtcattgagctgtttgagagagatgctttaatagtaactgaggaaagactgcaagtgtagaccaatccttcatcatttggggcatgaagcaagattattgagagtggcaaggtgggggaaagtttggggtttgttttaaagaatacaagatatctatttgggggcaggaagcaagcaactatttgaagattcaagaaaa

SEQ ID NO: 61524 - DNA, 1032 bp, Homo sapiens
tcccaagtagctgggattacaggcgtacaccactatgcctggctaatttttgtatttttagtagagacgggattttgccatgttggctaggctggtcttgaacttctgacctcaagcgatccacctgcctcagcctcccaaagtgttgggattacaggtgtgagccaccgtgccctgccttcccagaccttaatttttactgtctgctgagtatgtgcttctgagtgactttctgacatttcgaagtcatatataccaaactaaattatctgttatcctgaatctgtgcatttttccatatttcctgcatctgttaatggcaccagtaacctcctttactccaaagtttgagacctagatatttgattcattttacatccacattataatgtctttccttttccattcctgctgccacaccttacgtttagactttatcttttgcttagattttgttttgacttcctaagcagtctctttaccttcagcctcaagttctgcctacttttctttaggcacagctctacttattcatcacggcaaatatttgtaaactctgaagttgatgttaggaaacgttgaatcctgaaagcccatatcattactccatctgacattagcaattaaggattattaaggatcatgacttttaatagtactaaaaaggaaacaaactacagttctctaatcagcaaatgctgagcttttctcaaatattgcttcctaactgtttcacttccatggaccccttttattattttcctctatctcctacctcactatggaccctgtgttctaaaattaaacctaggagctgggcatggtggctcacacctacattccagcactttgggaggccaaggtgggaggtttgcttgaacccagaagttcgagaccagtctgggcaacaaaatgagaccctcgaatctttaaaaaaaacgaaacaaaaactagctggacatggtggcataagcctgtggtcccagctacacaggaggctgaggcaggaggattccttggcttcccaaagtg

SEQ ID NO: 61525 - DNA, 1114 bp, Homo sapiens
atgtatctattatagaaagactgaaaatttagacactccaaatttaatagtgggcatctttaggtggaagaattatgaggtttaaaaaaaaacttgtattttccaatgtttctacactgaacatattaggaatcttgcttttaagttggagagacttgaagtacactgaatatataagtggccaagtgctgtgtggctaaatattatctttacagaatggacctctgggataccaaatacctctgaaacttggtaacataattattatgactttattgtaggctataatcttttaagctatatttctgaaatcccaaagctctggaagctggaagttttttaaaaagtttgagatgaattaatttggcagcaaaatttgaactgatgtaaaggtgtcagtagtatttatttgtctgacacaaatgtatatgctttgctatggaaatattaggctgttaatgacatgccacatgaattcctcctgggtgttctacaaaatatatagtgcagtgttaccttcctaaaatccataaaattctgaattccaaaacataccctgccccaaggatttaagaaagggtttgtggacttttattacttatttatagtttacttttaaaagttggctactgtgcaggaacaataatttctcatcagagttagttcctagatttttttctctagtcactgttctgcacttctatgatactaagtagatgctcatttcaaagatactttttggctagctctactgtaataccagtacagttgatgtcactgagttattaggcttttcttcctctccagtagtaactgaaaagacagacttctcttcaacttttggacttgaagatttggaaggctgttttacaaaatggtctcccaaactgaagtttcacatactgcttgaagaagatacattctgatgatttatcaaagcagatttagagtttttgctctcatttatgtgtattatttctgatgttgtttgtacttttggcttcgtaccatttctttaaaaatttggttcatacacttcagatctagaagcaatgtgattagcctttgatataagaacatctgagtttctatttgcatttttactttcattgca

SEQ ID NO: 61526 - DNA, 1051 bp, Homo sapiens
tagttggagttaattttccttttattggttcacaatttcttaactcttcaactgcattaaactgtaagattagagccaggagttagggtgccatccacttttcccctctatggtcttagattcttttttttttatagcccgcatgcttctttggaaagtgaggtaattgtgtcaaataggatagccttgagtggggcccagaggttgtaaaattttatgtctgtacctgattcacctggtaacttgctaaaaataccgatgtccaggcctacctttctagattcggatacataaagtgacactttccatattaaataagctgctctaagtgtttctgaagttcaggaacgtttgggaccatcagatccagcaattgactctcaaaggctgcggactggaattagtacgtcgtgctgccgttgccaggcattttatattttcctaggctgaggcttcccaggctgttgctttttttccccccacctttgcagatggattttgcaggctgttaaatcccactcccgaagacctgccctgacagcgcctctttcctaagtgctgttacagggagctgagcttgccgaggtagacagtggccacgtgactgctaaaccggttgccagaggcgcggccatttttggggcgggcacccaatctctcgccctgtaaactgcggggtgacgggacgctgttactaggactcaagatggccaccgcgcccgctagtcatctcgctagcccgcgcgccagtgagctggcacgagacacgcggtggcccacggcgtctggggacgatctccagcccttcgcacggggcggagcgcccgccttccctccaatcagcacgccgggccggctagccaggggccgcccgcgcgcggggtgtgtgaggacgcgctcccagtcgctgagtgcctgagccgggaagcagttgctgtggtacctgctgctgcccgagcggacgtagagcatcggacgcgggcgccgtggcgctgggcaggagggcgaagccatgacgtcagtcaggtaacgagcgggcggctgccttgac

SEQ ID NO: 61527 - DNA, 1041 bp, Homo sapiens
ggttttgggcatcgcttacagcttgggtttgcgccagggaagactaggaaatggagttggggaatatttgttgtagagctaatgagccctattctttggtctgcccagataggtcaggtttggtctaaaactattctgggactctggacatcactgtgccctacatgatgattctggaacccacttttgtgggttaagcctacattggaaaatttatgtgggcagtgggtggggtcgtggggtattttccttctaacactcgaaactttttgaggtatgtccaatagaatctgccaagccactcagaacattcatatggagactaaaatctggctaagattgaaactgtctttgttgagttggtttctttagagccttaaagttttcaaactcatttttacctgtgtttttaaaatacgaattgtaaattcacattactgcacaattttttttatgctgtgggatgtttttagagaggtaagtgagcttttaaactaaaattgtttcatttatggaatattttgaagaagtaaaacagaaatctttttatttatttatttatttatttatttatttatttttgagacacagttatactcttattgcccaggctggagtgcaatggcacaatatctgctcactgcaacctccgcctcccgggttcaagcaattatcctctctcagcctcctgagtagctggaattacaggcacatgccaccatgcccggctaatttttgtatttttagtagagatggggtttcatcgtattggtcaggctggcctcgaacttctgacctcaggtgattctcctgccttggcctcccaaagtgctcacaggcatgagctaccgtgccggccaggaatcttttatgtgcaacgttgtcagctgttaatgctcctatttatgaataggtcacctttgtttgaaaaaagcgtacaaggttttctaactccaaatctttccagccacaatattgctacgttaagcagaactgtcaaagataaaacttgaaccaaagtgattttctagactgtttgaa

SEQ ID NO: 61528 - DNA, 1050 bp, Homo sapiens
ccactgcactccagccttggtgacagagtgagactctatctcaacaaataaacaaacaaacaaaaaacacacaaaccctccaaagcttttctttccctcctgtgtcatgctacttagtacatagcctggttcacagtatatgattactatatatttaatgaatgatttacatattatttgtgaagtccaaaatacttaacgttgtagttgttccatcagttttgaactgctgaataagtgtgacattacagatgattcactacagaagaatattgaagatcttcaaagcattgttaaggtgatctcctttcagttcctggagtggtgttcctggaaatgactaatagaacagcaaaaaaccgtctacttgggcattcttggtgttttatcaattaagtcagagacctataacagtgttggagtgcttgttttgaagaggtcagctaacttacgttgacactgtgtgtgtatgaagagtgtaattttcgtttctgttatacaggtattctctgaaaccaaatgaccaaatcttggctgaagacaaacacaaggaactgtaagtgcattaaaccattggttgtaaatagtttactctgtctatgaacttgatatatgtatatgtaaattatctgattttcaaaattatataatgacaaagtataattaacactatgaccttaatcctaacaattatgataacctacactatataatttacactacataaagtttacacaggacataatttctcctgtattcacattaaaagatgtagtgttgtattccatcatctagactaaagtcttactgggaaatatgtcatgctattttctctttccagataaaatattaaattgttcctattttctttctgactgctctaccagaaaaaagtaaaaaataaaaataaattgtcactcttaatttttgggtcttactccggtggatcacccaccttcatggtaatgatagacaaatataattttgtttctgtcactggtttatgcaaaagtaaatgtcaattgtttggtacaaggtaaaacactttat

SEQ ID NO: 61529 - DNA, 1053 bp, Homo sapiens
ggtgggtggatcacctgaggtcaggagttcaagaccagcctggccaagatggtgaaaccctgtctctactaaaaatacaaaaattagccaggcatggttgtgggtgcctgtaatcccagctactcaggaggctgaggcaggagaattgcttgaatctgggaggaaaagttgcagtgagccaagatcacgctactgcactccagcctgggtgacagggcgagactctgtctcaaaaaaaagaaaaaaaaattagcctgatgaggtggtgtgtgcctgcagtcccagctgctcaggaagctgaggcaggtagatctcttgggcctaggagatcaaggctgcagtgaaccatgatcattccactgagctctggactggacagcagagtgagaccttgcctttaaaaaaataaaaaaagaataccaataagagagtacaatgatagttctaattatcttgatattaatgaatattaagtatgttttcattaaaacatttttagttcctgaaattttgtgattcagatttcatatacacttagtcactgatgcttcacgagtatacttgtttctctgtctgaggaagattggcatgggaaaacagggaaatattggtcagcagtgacacttgtttttctaagcaaagtggtttttctcaacttcctgtttttcattattctacatactgaagaccttgggggatgattttaagtagagaaagctgagcaattcaagttgtgatgtgatttatctaaaactataggatttatagtttgttctatacatgatccagtaatcaactggtttcattagctttctagtttttttcagttttagttttgtaaatggaataatttaaaataaattaggaaaacatcactattttactaagtattttttcacctactttccattgtgctaggcattaaagaaaagatagtgtgcagctttttatatgtcaattatacttcaataaagcggtttaagaaaaagtaaaagatactgattttatttataaatggaatcttactctccaatagtggcttttcaaaatctt

SEQ ID NO: 61530 - DNA, 1062 bp, Homo sapiens
aagaacaaggaagaagggcattgttttaattattttgtgatctaatttaatccccacagcaactctgtgaagcagatattgtaatcattcccattttacagatgaggaagagacttcgtaacttggtttatataagaaaaggatagaactgtttagatctttttgattgctttccattttgtataagttcagtgacttaggaaccttttttaaaaaacttctttggaggagtgatattgttcattatgaacatacctacttgaaaagtatttaaaggtatttttcatggaaattatattttataagttttagtatggttcactagaaatacgtcacaatttgtaggtaatactgtgttttattttgagttggctaattgttaaggtaaaactttagaggataaagtgagctcatattgatgaatggtaatctgatatttccaacagactaggtctttttttgaagttcatgtattataactttattctttgtgatactagctccctctgtagaacttcaataagattgcaactggactttttcaataatttagaaaagtgatctaaacattatctataacatttccctgtaaaattttactttgtattctaatcagttgcaagtgggtttttaaaagtataaatgtaacatttataaaaatgtttcactttgtacacacaaagttttaataacatatacaaaataaaactttcttcaaacattcctataactttaatgcttttttatttaggaaggctagagagaggtgtgatttctaggtctgtaggtctgtgttgagtaaagcctgatggaagccctaggggaaaaataaattttgacgtttagctggatacttgaaattatcccttttttttttttttttctgaaactttccggtttgacttgggtgggaaaatgttcataagggattttttttttttatcttgtagagaaggggaaagcaaacttctacaacaggtagaaagagcaaagagaaaatcttagcaagatccagaaatttagtggagaattgcaggaaaacattcttgacatttacggttt

SEQ ID NO: 61531 - DNA, 1032 bp, Homo sapiens
tctcaccatgatcactgacatcaattctccttgaaggaggatgagttttgtttgttcattttattgcaaaccatttgaagagatgatagattggtagcagaaatttggcagagaaaaggatgataaacattagaaaggaggataaagcccactggaagacataaatgaattgatgatattttggtgtatattttctcattgctttatgattataaatattttctgctgctttttgccactatctatttttcatgtcttccaataaagtattccatggccaaaatttgtgtgaaattctcttcggttgttgctggttttacaagttatagggttctttggaatataattactgaaatgatgactacactaaaacatatttcttcttaatttaacaaagtatttagtgggaggaaggctctagcttttcttattttctttaatgttttttaggcatgctagaggaaaatagtgttcttactattagttttgaacattttttatgactatagagttgaaagcccaaaacactagaagtaaatggatcattgcaaaatatttgttttgttttcatttgtgagtggggcattcgtgtgtcactgtgtctatgcttctatttttctctgtatatagtttatatccttaagactttcagaaagaaattgagatgttatgttgttttattgtatatgcatgtacatgcatacacacacacacacacacacacacacacacagttttatttgttcatcatatatttaaggcctgacataggtcttacaaagttcaattactatagggcttaagtaggaaatgaatggtaaaatgagccaatttgaagcaataaatactgattgatagattatcaccttcttccaaataagatatgtggcatcgtagaatcttgctcttagatacacagatatgtgtgatgtttaaatagttgagaaattcaaccagaaatgaatgaaagggttttcccgttatcctgtcatacgcaaattaccagatcattcagttcttcaatttatcaat

SEQ ID NO: 61532 - DNA, 1150 bp, Homo sapiens
actatagaaaaaaatgcagtgtaacttgtactgtaaataaacgattagcaatgaacattacagtgagagctgatagtttatgaattattcactgcaaacttattgtctctgtgtcattaacatgtaagataatgagcctaattaccatggctttaaactcaggggagttagcaatttatgtgtaaaagtttctgggctgtagttaccacccacaagggtattgagagaactgcagacactacttctgtgttttgtttcagaaatgttctttttcctcacttgcttccttcttaataaattagtttttatttatttttatagtgagaattatgagcttttcctcttgcttgaatacctttttaaaggagttatgagaaatatttaagtatttttttagtgtagtttagtgttgtaagtagacaaaatattattagatgtattcttttatttgcttacataagttggcatcacttactatagtaaatgaccactaatagtgtaatttcttggaaaatctagcctaaaaggtcaatattaataattggttttctcctctaaaaggatttgtactaagatgatttactttcaaagtactcagtattagcctatagccttttttctaatctttaatattgtatctttgatcttaatttaaagttttgatgaacttgttgcttctattttctctcttatagtataaattatctgtaataagccaccttaattaaagttggtaaatctacaactgcttcaattatacactaatcaattatacactaatttaattctacttagcaggatacggtacatcattaatcagttttagacttaatacaacagatttagaagtaatcaaaattgaagcattttatttagctgggaaaaaaatgaagggtcataatctagtaattcacatatcaattctgataaaaatcaaagattctttgctaaaaatgaaggaatgtagctgttatgtttactgttgagtgccatgggctgaagctgtgattatataatatctttagatgttaatagcataatagttttgtgctctacctttttctttaaattgttattcatgttactaaatgggttgttttctgtaacatgattgtttaacgtatacataatataagaattccttgagtga

SEQ ID NO: 61533 - DNA, 1054 bp, Homo sapiens
ttttttcttattattattatactttaagttttagggtacatgtgcacaatgtgcgggttagttacacatgtatacatgtgccatgctggtgtgctgcacccattaactcatcatttagcattagtatatctcctaatgactatccctcccccctccccccaccccacaacagtccccagagtgtgatgttccccttcctgtgtccatgtgttctcattgttcaattcccatctatgagtgagaacatgcggtgtttggttttttgtccttgtgatagtttactgagaatgatgatttccaatttcatccatgtccctataaaggacatgaactcatcattttttatggctgcatagtatatattcaggtatattttaaggcagtttttaagtatatcttttttctttaatagtacttacaaaaatgtaattatttgatatgacaaagctgcttcatattttcatattagcttgaactttccattgatatgtcaagcaaataaatacttagtttttttctgagtagaaaccaactgtactgcaaaccccattgatagtaaattaattgcagggatttaacatgtagggaaaccttaattattctgaatatacttatgttatgatgtgtagatgatttgtttactgtctttaatgtgactgagtcaaaatatgtgtagttatttgcataaaagggaagtgttgctaatatattttgcattacttaatgttatatataaaattaattttccttgtaagggatgtgagaaatttttttactcctcatttctgtttattctcatctatttctttgaaaatgtagatttaatttatttaaatactgtgtgatgaaaacattacagatatgttcttgctctctttttttttttgagacagggtctcactctgtcatctaggctgagtgcagtggcataatcatggctccctgcatgtcaacctcctgggctcaggcagtcctcccacctcagcttcctgagtgtttgggactacaggcgcgcactaccatgccgggttaacttttgactttttgtagagat

SEQ ID NO: 61534 - DNA, 1046 bp, Homo sapiens
agtgtaaggtcttataattttcatacttcttgaactgattccaagggtaacattaagtgaaattttgtttagtttctatagaaaactctgttagttgtctggaatgaggagaaatacatgctgatttctgtatgtttgtagtaacaagtgattctgagactgggattctgattttgacttaaccagtttgccacgtgacctccatttggcaatctattaattattacttttactttctgtttagtttaatggccaattatggacagtctgttttaaattcttaaattcttatagttgtacacttatggaaaacatttcttaaatgtggaaatttagtatttttgttataagatatttcaattcatttattcaacatacttaaacaataaaaacattttactatttgtgttttaatactcttctgctcagaaaagtttactttgttgcaactcacagaaggtaacttacttttttctactgtgatttccttataggtttgatgaacttgtgaaaaaattcaaagtcgaatatcatgctggtggctctacccagaattcaattaaagtggctcaggttggttaattattttaaaagttaaaaggattcaaaatgattctagacccatgtctattttgcataattgtttccttttatattgtgttgctgtagaatagttttgttcatttgaattgggattttagtagtcattgcacatctaatcaaaagttattttaattggtatttctttggttattggtaagcttgaacttttaatgtttattgttcatttgtgtttcttcttaaattgtttcctttcactatcattttataatttttcatgttacagatttgtagaaacttcatattttatagatagtattcctttttattttataagttgaaagtatttattttttgttatgtgtacattaactcttacagtgtcttttactgtgccttagttcttaatgtaactttcaaagtttttaacgtaattaaactttatggcttcttcatttcctgcatgtcccccttacgaaggacgt

SEQ ID NO: 61535 - DNA, 1020 bp, Homo sapiens
atttttaattaaaatttaagaggactgcctaaatgccagtgtgtttatgttgtatacatctcggggcatgcttttaagtgttttcttgatgtaaaacatcacataataaactagtgttcataattgtattttaaagctttccaaaattctatgtaaaatgagtttctaaaaacactaaacaaaagaagttttaggaattatgtttgaatgaaatagaaacattgaactcaaaattgtaaagctgatatttcaagaactaccaattagtgtaacattactaattgagttacagtatttagaagttaaaactgatgtaaatcaaaggactcatgttgtttatctattttgaatccttttttgaaaaaagttaatctttaaagtttttctgtattaaaaaaatctgattatctcttgtgacctattttacctagaaaagctagttagaggttaaaaggttttttatgagacatacttctgtgcatcggaacagtccagatgtaaatttaaaaagaagaaatgacaatgaagtgatcaaagagaattctgtgttcaaatgctttcacctggagcagttgtagaaatgtcagtagcacaactgtatttataattatagcaggatgtggcagatggtgatgcaacaccgtctcgtcaattctttgtgtcattgaagaaagtagtaagtattaattctgccaattttatgattaatgaataattttaagtaacacaggccctacgaataaggttgactgttcaaattgtgatacctcattatagtttttaaagtttaaatatgaattaatactcctctttgcctttctgttctctttccttttcaaattaggttgttaagttttcatagctaaaataagatgaaggaagcagtggcttgctgtcctcaattatatttttgatgtgtttgtgaaattattataacttagatcagattctttaaagaaaaatcagtatttcattttttcctttcctcccttttctccctctctcctttccttgtctctc

SEQ ID NO: 61536 - DNA, 1811 bp, Homo sapiens
tttgctacgagtaataaattgtctttgtttctgatccacagttcttgtgtccttatgtcattgtgtgtgtgtgcatatgtgtatgcaggagaacgaatgcggcagattgaagagcagttgaatatcagacctttgtagtgtggtggtggtgattatggtgttgagacagaattttgctgtgttacccagtctggtgtgcagtggcgcaaggctcatttcagccttcgaactttcaaactccatgggctcaggtgaccctcccagctggtactgaaggcacaccccaccatacccagtgattttttttttttttttttttttaagagacagggttttgtcatgttgccgaggctggtctcaaactcttgggctcaagcaatccacccacctcagcctcccaaagtgctggggttacgggcataagccaccatgcctagccctttgtgatttttttaacttaactctggctcacacaatttaactgtaggtctgtttgtaaacctgaagcgctttctatgctttcttccttacatagaccgataaaataagtagaaaatatggtgctaatgactagtatttggtataagtagataaatgttttgtatcacatttgcatgcttataatctgtgatcaatgagcagtctgaatatttttccctccatcctcataagttaaactaaaaaaaagttatagattgaggctgggatatctggtggcgaaattatatttatttgaacagagtttgtgtatatacatacatatttcagaatatattgaaaaataaaagtgtaatgaccttgataaaaatgaaatattcacttaaaaactccatttaataatgcccacaggaaagaaatgcttctagaattttttaactaatcatttttctcagtacttttgattgtcatgcaaactaaagaaatggacttaatgaacaatttagttacaataataaagtttcaaaaattctaaatttacctcataattgcaacagatgcaaaattatttcatatctttatactcgttatgaaattacctcatatccaaaaatatttatgtcaagtgacaggctttttgcagcatttttgatattattacccttgtaatatataattaactttgtaagttaaccttgtggaacttttaagggaaatgcattaacttagcattaatatagacttctaaaatttactgtgatgtagaacatttgatttaatgttgtctgtgtctaatacaaaataactgtggtccacttacttatttcaaattttattctcaaaggtacctactagattatgtgtgaagaagtttgtgaccaaagtaatataactgattctgttttgaaaatctagaataaagtttatgcaaaagcatatggattatttctttatgaatgcagttttatactaaaaactcctccatacccacgtaagtagatatattctcatagtgatgtagaaaactgacaaaacttttcatcctcagagctaggaattcttgtgtttggccacaagggaaagacaaaggtattagaattttaaataagctatcatcaacaaatactacatctctccagctccattcataaatatagcaacattttggaagtgcagatgaatcgaacatagttaagtgagaaaaatttttagtaacatacataatttgtaaatattgaatcgttttttaaatgatactctgagtcataattatttcaaattgtacataatgctagaagaaactaggataatagcagaataagttacagtgactaaaatcataggtttttttaagagattggggagtctctgtg

SEQ ID NO: 61537 - DNA, 1046 bp, Homo sapiens
cagaagcaagatttgaacccagagagtcttcaatcaagatggattctgctctttttatgacaatgctagacttcttatattgggacccactattattttcctatatcaggccagcatttgtcttaaggtctgtatgattttagctgctgagtccttaacaactttatgtactttatttctctccccaaagcagtataagatattacatggttgttatattaagtttttttaatcgtaagtgatagcacagaattgaaatcccattcataacagctacagtttctcacaaagcattcttgtcacatcactatctgtggcagaatattaaactatgtgtaccatttttttgccccattaaattatttatgttcctgttttacagtggatgattcaacagccacacaaagcagcaacattttttggatgcattgggatagataaatttggggagatcctgaagagaaaagctgctgaagcccatgtggatgctcattactacgagcagaatgagcagccaacaggaacttgtgctgcatgcatcactggtgacaacaggtcagtgtaattccaagggaaccactatactaattggctattttaacactggtaaaatatgaattccaatgtgaatttggaattttgactttataattccttttaatgtttgataaatgcttattccttatatcagttttcctgtattgtttttaaatttacttttgttaaacatgcagttgaattcatgaggcataatggaataaaagtttgaggttatttagtccagtctctactttttataattagaatcagaaaaggctgatagcttgctcaatgccttgtagcttgctcaacaccttgtagctaatttgttgcaaaacttgaattagaaacaatgttcttttcaccatatcctgaggttggaatacgagagagagagacagagagacagagagagagtgtgtgtgtgtattttatgtatataaaatacaacattacattcaggctcgtaagacttagtcatctaaatggtcatctaaaccatttct

SEQ ID NO: 61538 - DNA, 1034 bp, Homo sapiens
gctgaagtgggtggatcacctaagatcaagagtttgagaccagcctggccaaaatttttggtagagaccagaccatctctactaaaaatacaaaaattagccaatcatggtggtgcattccttagtcccagctgctggggaggctgaggtaggagaatcgctcaaacccaggaggcagaggttgcggtgagccaagatcgcgccactacactccagcctggctgacagagtgagactctgtctgaaaacaaacaaacaaacaaacaaaaacttacttaaagtgatagctttaaaccttattcgaccatggaacaagcctttgtaacataatctatactgttacaataagtacactttggcagagtaagtgaactaatgatttttttttataatttaagctagtctgtgaatgacagttgattaaataatgtcacagctctttatatatagcattaaatagagttcaaagtatttttggaatttattaatttataatattcttctgtgattattaaagaggtgggatagctaaactttttctcaccttttatcattgttccaagtgcagttttgaactcgtatgtgttagaactcccattatattggtcaaatcgatgatcaccatatgactttattcctgcatttttgcctcaaatttttaactatcctattctggactgcttcattaacttcattagggattaactatgaatgtttaagcctttattttacaatgtccttgcaggtgtccttaactgtttcatttataaacacagagaataaaatgaaaaaaaaatctgtagagttgtttgttctatttggagcttttcatgttggtgtaaaattcctgacacttaacacatatgaatctttttcattcatgtttaataattttatttgagagtcacttcaagtaaagcccaaactgtgttaacatttgagttaagcaaagacatctttgcttaacaataaagcaaatatcacaataaagcaagtcacatgaatattttggtttctgaattcatataaaagtt

SEQ ID NO: 61539 - DNA, 1132 bp, Homo sapiens
tttgtatattgttacctgcaagttattgataatggaaggaacaccttttcaatccttagtcccctttcccccaacacagcttttagattgtcgataaacttcccagctcagtaattaactgagctcagtcattgcaccctgtatcatgtgatttttttttccagtggaatacattattagagcacttacacagccagtctagctgcagcagcccaggcggcaacagcagtgccatttttcacaaagaaaatgttgaacaggagccaaatgtttggtggcagtctgttgctaggaaatcaaggtcctgaggcgattaatgacaaagcaagcaataacaagaaggcagaattacagatttaaaagagaaaaaagtggttggtgttataattacccaaagaaatccgcactcattaaattggctgtttttatgattgactttaattggaggttagctcagatatttagctcctttcccacccctttaaacacacacaggcacataatctgtagaactgcagacttgtttttctaagcattgagaggagcttgccctgtaatttgatccccactgacagatgcattttctatgctgccattttgaattaacctattgtagaacaattttcttcagccctgttgaataaaacatccagtctgattacctccgatggatttgatagagtaaaagaatgtacttctcattgaagtagattgtttgcatggactctactgattgtgaactctgccagtaagcacaatcatttgtaataaattttcaaagaaatttgtgaggaaaaggtaatgagagtcacccttttatagtttaatgtttggcacctccatcaaaataatataattcttataagacagtgttatttttccagtaagcttttcacgtggttttagaaaaaatttctgaatcttcatttggactattcatatatttaggaatagagtcttgtatttacactctaaaatgaccattcttcctccccaacaacagtattttagtgcaagactcaatatgcaaagcactctattgcaaaaatatttttggtatgtacaatatttaaagtgattttaagattggcctatttcagtctttgaagtatttcccccccccaaaaatccc

SEQ ID NO: 61540 - DNA, 1008 bp, Homo sapiens
aaaaagaactataggaggcaagtgcttccattagaagagtttttaaatctgcttctgtttcatttaaatctacttctatccccaaattacttacttataattgactagagcagctataaaccttaagatgctatctgaatatttttaaaaagttatcaccccagacactgccaccagggggaggaagctaaaatcttaaagttcttaactgatgatgatactgccagtaggtagattatattgcttagccctacatagttaactacttcctccagataataccgccttttgggacatgattctcacaacctgtaatatgtgatacctgtagacttagcacactattaattgtaaataaaatggaaactttcgtactctggtggttggggtcaggaaggggaaagaggaagtacaaataagcaacctggacatttttattgtttttctcttatctgttagtctacttgaagagctatccttgaaagtgagtgctttagatctatgaaactgggcagctatcatagcacatctattaagatctaataatcacataattaatgtagcaaaatgaatagactgtaaggtagttttctattttttgttactacactgtggttttgtttttaataaatagttttggctttattttaaacaattaaaaattcaaaatatttttatgaccaaagcttgtaggttctatccctggaaaatattttataaatgcagaaaatagttgcttaggattggaatccaactctgtttaccatgaacaacttaaaagttgatctcataatcttgcatgttgtggaataataccacgaaaaagttaattaaagaatttagatgtttgttctcctgtctagaactcaataacttttaagtagtaactctccctacagtttaactgttaaacagtaactcttctgacagttttaggttttattctgtgaagactcatgatttttaatttttgcatcttaatttttcagttatttcaggtattgaaat

SEQ ID NO: 61541 - DNA, 1029 bp, Homo sapiens
tgtattggcaatagaaataaatggtgatagtatttttttcatttagataaatttagcactgctcttagtattattgaaacttagtttaggaatgtatcatttatctataatcatttattgctgaagtgaacccttctttaaattttcctcttccaaatattgatgtagttctttctttcttcatcagttccatgcatacaattcaattttcttcatgacacgggatcatcatctataacgtctgttacttataggactattctatgagtctcttcaagtgtatacatgtatttgcttttattttaagttactcaaattgttatatattttgagtacttatatatacattttaataattttactagccctggagctggtggtgtgtcatcttcaacttcctttttaaattccttctaatttcttagggtgggaaaaatctaattcagtagattgaatttttagaaaagagtagataaactgatgtctaaatatttaggtatttgtctattctggaacctttttgcttcatgatttttcttttttactttgcattcctgagatttcctttcatgaactggaaggctttactttactaagtgactcagcagtagctctatgtatcttttagttggaaatgcctttggctctatgcatgcacacactgcccattaattagcaaaccaacatagaatcatctgttgatgacaaaattaccaaaatggatcatccataagtgtttatactgcaaacagtgtatcagaaatgtcataatctcattcattaagaaatttacatacacaccagattttagagtgctcattcatgatgaatgtctacttccacactgtttgtttggaaacattcaatagccagtcttgaatttaaaaaatttaattgaatgcttaaagaattacaagtgttcctttccttggctctaatgctaaccaaagtgcttttctaaactgctaagaatggactgaagattctgctgagggctgtagatacttatctgcctaattgagccatcat

SEQ ID NO: 61542 - DNA, 1143 bp, Homo sapiens
ttccaaatgtatatttttagcacatacctcttttctgatctccaaacttaatgaccaactggttatttagattattatatgcaaatagacttcttaatatacagtgtcaatcctgtttctcttatgtttaatacatctctgtatatggtaccactgcagggtttgactcatgtgccctagccaaaccctaggagtcatccttgattttttcttttccttcaataagtccctatctttatatctggaacccatttactcttcttttatcagcaattaccattctattacagaccattagtatttttctcctgccctactgctatagtctcctgactgatctccttctactttttaaccctttcaaaccattctccacagaatagctggagtggccttttaaaaatgcaaaccagcataaaacattttgatgtttaaatccctctcatggctgccaatgattgctcatagaataaactccaaactttctgccatggtgtataaagccctacatgtcttacatggctttcctcctacctgtctaatatcatcttattctagttctttctcattgattattcctttaacaaccaagcccttttccttcaaaagtccttcactcttactcctccttcctggaatgctcttcactgttttctaagggctgactcatgtataaccttcaacattcaactcaaatgccatcctcttagagagtcattttctggttagctatctaaagtagctttccctgttcctccatgagctgttgtcataatatccctccaacccccaacccccaccttatataaccatgcttgtctcctttgttgcagttatctccatttgtaattaacttgtttaaatcctcctagaatgccagctaataagaaggtaaggtccttgcctctctctctctttttttttttttgagacagtctcccctgtcacccaggctggagtgcaatgacgccatctcggctcactgcaacctccacctcccgagttcaagcaattctcctgcctcagcctcccaagtagctgggattacaggtgcctgtcaccacatccggctaattttttttttttttatctttagtagagatggggttttaccgtgttagccagagtggtctcgaactcctg

SEQ ID NO: 61543 - DNA, 1034 bp, Homo sapiens
agatgttttattgaatttctaaaataaaagtccacctaatgaatggctaatttactcaacacgtaagacaaagatgtatttctgtgttactaagaacatgcatcctatctccttgacaatggctctaattacctcagcttggactgatcaatatttgatctttttcccaccatgcaaacatgttactttgactttgtctcttcctcttcttttcagataatttgcagccatgtgagaatggttcattttgtttgttctccctggcttgaggccaggggtctcttattagtataatgcagttcattgatgtgaatttgttgatctcctgggtaggttttcacaaatttaaggcaattaaaagcttttatatggcatttcacttgaagttattagtggcctttcagtgattttgcttttaaaaattacttcatcattttatgattatttcctttccttctcttttctctactctccccatgctataaaattctatagtaaaggattgaaacaactatttcattgatttcattaaaagtaataatttataaacttataattcaatagcttaatattttaattaccacaatttttaaaggactaatgaaatttttggttttgtgttttcaaaagctgctttgttttaagcatataaatattcatgatagaagccataatttggagaataataagaattgaatctaaaaattattagtaattgctaaaaaattcaaaaagcacatagtgtaaactttgtgtatatgagacagaactttttctaaattgcagtttcattaacatcttaaagttttctcgtagctaacagatgtccatgatatttttgcttccttaacttttacagtcaatggaccattctccagcaggtcataagtaagaatgttaaataacggccactaaatcttaaggaatgtgacaacattgattagattaaaatcctttgacttcattgacatatcttttttctttccccatttaaaaaattgtttcagttgttttcctactgtttgttggtggca

SEQ ID NO: 61544 - DNA, 1581 bp, Homo sapiens
ggaatcatcagcttcaaaatgaaagaacaagatagtctcttggcattcaaaaatttagcatactttaactcatatttgctgtgatgttaggtagtgaattattcttgttaactatctagcgtccaatgtgacatgtgtttgttgttacctacaacttatcaaataaacagttaccctctggaatgataagaacttgggctttttatgaaaaataccctctaaatgaggacagaaatctatattaaggataggctattgattaaatttagagatacacataaagatgactctcatataaaatttagaataaacatgaaagttttagcatgtccagactttagggatttaggctttatgaaggtctcaagcctgtctcctggaattccaacattgtgatgactcaaattttatcagtaaatatggaaaaataagctaaagttcttgagaaattgctatctaataagtgattattttattttttttctagttttaaaataaaaaatctttactatttattagattcaccagtgttttatactgggggtccccaacctttttggcaccaaggactgtttcgtggaagatcattttccacagggcagggtgggggaggggtggtttcaggattattcaagtgcattgcatttgtcgtgcactttatttctgttattattacagtataatatataatgaaataattatacaactcaccataatgtagaatcagtgggagctctgaacttgttttcctgcaactagacagtcccatctgggggtgatgggagtcagtgacagatcatcaggcactagattctcataaggagcacataagctagatccctcacatgcacaattcacaatagggttcgcactctaatgagaatctaatgccgccagttatctgacaggaggtggaggtcagacagtaatttgagcaatgaggagtggctgtaaatacagatgaagcttcacttgcacatctggcactcacctcctgctgtgtggcccagttcctaacaggccatggatttgtatccgtccatgtctgaggggttggggacccttgttttatacaattctaattgtgtcattgaatttcttttttcttttttctcattgttaggaggctaaaaacaaacttgtcttgtgcagattcgtcgtctttaccaccaaatttttgtcatggtatcttgtcttttttttacgtctttctaaactgccttaatccttgtaagggaataggtaaggtgtaaatataattaataaggtgcaaggaaatgttattagaaagaaattagattgttatttgaaaacatacagagcctaaatgtaagagaaatgtcctaagcaaaacttattaacaggaaatttactgaattggaaagtactcttgattttatgactaatatgaattgaggtattcttatagacactcagagattcctgtacacatgttacttgtgtttttccaaaactatatacgtatagtctttttacaaataaacagtggccaccaagaaaaattacagcagtacacataagacataccgtatacatgatactcaactttgtctatatcct

SEQ ID NO: 61545 - DNA, 1056 bp, Homo sapiens
aaggacatatgttatgaagtaatgtagattacagctggtttactataagttggagtactatcgtggagcactttgaatgctggggtgtgaggcatttggattcaatttactaggaaaagaagagtgattagggtgattaatctgtcagcaagatataggatgattaaatcaaggagagaaaggaggcagggatagctttttaaaagggaatgatggattttgctttatgtatatgtatttcaaaggaaacaccaaactgttgatctttaaagagcatacttttgttcagcactgtaactaacagttgtaacataaaactcacttttctgatgggaggcagaagactttctaactttcttgttatttctagaggaataatatcaatacaatgtaaatatgtatggaatgcatactataggccaagaactatattaagcatttatttaattctcacaacccttgagagacattattattcccattttacaggtgagaacagtaaagcctagtaaagttaatgttgtccagagtcacatagttaataagtagacagattagcaaaaatttttaaaataagtttactagttggtttaaactaaggagaattgagttaattctccttgggtcttatcaaattatcttcatctgacttaggcatagtttctctctttttttatttttcatatcactcctgatctcttcccaccatgggtactcttaatgtgtttgatatggctcttacatttggatgtgtcctttaagactgtattgtgttattttagatgcatgcatatgtgtttaaattatacataatatataaaagggtaaattatagcttgtctgatttgatatatatgtttctactctattgcttttatatttttattttataagaaacacacatttttattttataagaaacaaggtcttgctattaatatgttaccaagaccagaatgcagtagttattcacaggtgtgatcattgtgcagatagccttgaactcctggcctcaccctatcctcccacttgagcctcctaaatagctggaactac

SEQ ID NO: 61546 - DNA, 1049 bp, Homo sapiens
aagtgaattattctcttctatttctttacattgccttctgtcattggtaacataacctttatggcattcacaagtatatttgttctagctttcttcttttagtaattctgttgctgtcgtttgtgtgaaatactgcatattataacattgtaattataaatgatttatacattatcttaatcgttgtcagggccaacgtttttcttacaagcagataggaactatgctttgttgtaactcatatttgatcgactctgagaacaaaatgtattttatactttcttggagtagtcccacaaaacatgtaggacccattaagaggaagaaagcatgctatatggttgttatatttgttatttttgacttgtaatttattcattctctcagccctgttctctgactagtgttactatggcacctaagttatggcatggaaaacaagctaattatgttcttcagaacagacgacagtgatacatcttgagacacaagcatctggtagtcttagccctttcctcatcagtgctagtctaggcttggttgggctctctggttgtccaaatatttttctgttacaacacatccttctttattttatttttcttctataaatagtggtttatgctttctaaagcctctagtctcatatttagtttgttcctttttgagccttctgtctactcaaagaagtaatatagacttactcccagctgtgtatgatctactcttactcctgtttattgagttaagctttttactatttgtaaacatctcttggttgtgtagacacaaatacaccaaaactaaaaatggttaaattggggtgaaaacttacggatatttcttacaatttatttttcaaaattcagtgatgtagttagatggctctcctgataaaaattgtttaagagatatgagtaatcaatacttttttatcagaagtgacatctaaccatattaccaaattttgaaaaacaaagaaaatattagaattatccacaatttttgtacctaaacttaaccagttttacttttgtttattcccttat

SEQ ID NO: 61547 - DNA, 1273 bp, Homo sapiens
ttaaaatgcaagacaatcagagactgatctaaaagtaatcaaggatgatcatgtcttgggagtatcctgtttctcagttgctctggacagaaagcacctagaaggttgagataattcaatgcaaaatcagagatttccccccatgtaatcaacctcagaacttgagttggtcctaacagtagactcaaccccttggaaaagactaggcagagcaattttcctattgactacatctgagacgccattcattcttgtgtcacatgagacatagcatatactttttaggtctctaataatagcagttctctaagaagcaaactgggatgaaagacactattcacttattttcttaaatggggaaggcattaaaaggagtgaaggtttattaatgccacttttaaagatataaatagtagatttttattctaataagtcatacatcaataaaatttgttattgcagctccggggcagcaattacttatatattgacaacttatacatgttttacatgcccatttgctctccttttcactactgaaatgtagttaccatagcaatgaacacatcacatggttcctgtgctagttctaaaatagagaacagcaatatgccatatgagctctgcttattttctacgtaaggactgcatatacaacttgaggctattccataaccttctcagtgcagatagcttatcattgatttagaaagctttcaaagtaaaaagcaattggcagtaatatatttcaagtctctagcttctcttgtactgttatttgccactgagctaaaagaacagtttcactagctttgaccaccagggactctgctgttgtatatttagccatagattgtctatggaatagcagtgccacttagaagattggtgggagaggcatatatagcattcatggacacattttctaagtcttactgagcaattcttaaccaatcttagcttttctcctactgtctcccttaatgtttcaagtttttaaaaatataggactctgttttagaatttgaggaaaggaagatgccaggcacaactggaggcatgctattagttccttttatgtccattattgttgtgtaaggttttaaaatgcattggttatatagcagtttatctatagaaaaggacttcagatttcagtgcctggtggtatcaggccgtatttatgccttactatcacatttagagtgtgttgtaggctgtcagacctccagaaataaagtaggaacatacccctcttactgtgactcttacc

SEQ ID NO: 61548 - DNA, 1038 bp, Homo sapiens
aaaagtaggggcaggttacgaaggacctctgaaagtcagactgtggaactggaacttttatcaggaagcagtagttagttttttcaagcaaaagctaattagagttgatatttaggaggatgaatctaacagttgtgtgcaaggatgccttcaaactgagtgagactagtactggagactggttaagagactacaacaataacctgagtaagaattaatacaggcctgacctagttttgagtgagtaggattggaaacaagagttttaggtattataggatttatgcatataaaatggacttgacagaacttgaagaaagagaaagtgtcaaaaggacacagaaagtgaggcaggatatcttacaatgttaaaggaaaggaataatagaagttaccccccaccccagagaaaaaaaagtaaagagaaaagattggaaagttaaaaactgaacttttagagaaagactgcatttagggaatgtagcaaataagataagcaacagaaaagtgagagaatgggaataaagatatgcaacagaaaagaagggaagagagttcctaggaaagggtggggaaattcaaattctaaaatatcgatgaagtctcatttttcatgtattaaattatccagtggagttggaagatccaaaagagagcaattaaatatgctagagtgcatggggaaaattgacaaaagacctaaaagaaaaatatttaaccacaaaatgaaaagtaataggagatgctaagaaattttggatgggagttaaaattaaatctctgaaagaataaaagggaattaatactcaatttatatcttaaataaatatttctaaatgttacactatgcagaaatccttcttccctggaaaaaatgagatcaagtcctattcaaaaaggtcaagaagaaagactgaggttggtgacccgtgagaaaagtttctgagataagtgtaggtggaatttgtagtattatttatcataagtcagatggctgttaacaaaaagttaattttacatctcatctgttagcccagt

SEQ ID NO: 61549 - DNA, 1002 bp, Homo sapiens
ggtattcttaaggaataaaacaaaaataaatcactttatcttaatagttttctgtgtgaaaatgcattaatactcttggctagtgtgacaaactagacaaaaatctgcattttatcccttctaactttaattttgactctaaatttggagcatgaatgagaagaaagaagtgaaaagattaaaagaaaggaaaggtgagtattttttccttccatcagtgccgctgtcctaccctcattttctcctataaatcccaatcagttccaaaagccactgagtattgccactagtgatctggctgctgacagaccaatccaagcgcctctaaaaataaccagtgtttattcgtcaggaaatattctcagtggcattttttttttaattgattattattctggttagcttctctgcaaattttacttttgtaaaaaaaaaaatctttaaactgaattcggcagttttcagtgagaagcagcagcttaggagagcactggagaatgagataaaaactggagctgggcagaacacaaagcataagagaggatttttttatatatataggtgatggaaaattgcatagtgcctgatttaaatgacagacctgctaagaatttaaaatgacaattcttggggtaaaaagttttataaggccttttattattctagaaaatcagttcagactggagtgtgtttttaaatctagcttttcttgagccgaactgattaaatgttcgtatttttagaacataaataaaaataaggtgctcaaaagcatgtttcattataaagccttttttaaactattgaaaattgatttaaataaagtgaagaaaatacctcaaaacctaaatatatatattctctatcttttcattgtctctgcaactgagtaaatgacaaatgatgaagagaattcataccttctctattggatcatttatttccttttactccaagtaataaattttagattttttttaaattttagatctctaagaataa

SEQ ID NO: 61550 - DNA, 1048 bp, Homo sapiens
tcagcatggatagaaagtctacagagaatgtattcaggcagtgttgattaccaaagaattaccttaggtgacttttaggttcctgtgttcttcacaaatataaatagtgcaatgaatgatcactcagagtttcagagtttctgaaaataagaccctaaatcaggccctgctggctaagagagtgcagtgttgtttttgtaggtgcctgaaccccaaaagaggacaattttagaacagttcagttaagggaaagcaataagctagtcttctaattctcttcatttaatcatttatttattcaacaaatatttactgagttcttactatgtacataccactttgatagaccccaagacaaggtggaagtgaccagagagtgtaccatgaaagagcatgtgggaagggttcccattttagctatgatggctatggaatgaccctaaaaatatgaatatctagcaatgacaaaaaaaaagcgacacaaacagcaaaacaaatttcaaacagagagaacaggactataaaagtctctgaacgagagagaacttaatgtactatgtactccaggaactgacagaaggccagtgtgactggaatggagttagtggggacagcatatgagatcaatctggcactgacacatcatataaacagcataactattaaaggagtttctatttggaaaacaaaacaaaatggtatggctagatgactcaatgtgtggaaacactacagttggttttctacagaactaggtagactgtgacaggattgcttaacctttgtataaccagctggttaaaaatagaataaagattttctttatccagtctatcattgatgggcatttgggttggttccaagcctttgctattgtgaatagtgctgcagcaaacatatatgggcatgtgtctttatatcagaatgatttataatcctatgggtatatatccagtaatggtattgctgggtcaaatggtatttcttgttctagatcctttaggaatccagttcatgttctttgcatggacatggatgaagctagaaa

SEQ ID NO: 61551 - DNA, 1383 bp, Homo sapiens
gattaaaagtgacttttgtgaacatttaaataaatatttgtgactgaattttctatggaacatttttccttcagtggcttgcattttaatgaaggaattattttaaaattaccttattccctcccaatgttgtttaaatatctagagggtatctagggcttaaggaagattggatgtggaacaatgagtggaggcctagagaacaagggtagtttcctgcaacagttatatggatccctagcaaggttcatatttctgtctatactgctggttaatctgaatattcccataaattgtggaacataatccatggccttggttttctgtttcttgtagtaagatttatcattttatttctaccataaattagagatcattacatgattactatgaaggatctacattgctatttgttatgatcaaataaacagtatttttgcagttgactattcagggatctgttaaagcatttagaccttaggccctcatagcatatatatataagctttttggagacttggctctcactactttgagaatttggcacacagggtaatcaaaaaaaaaagctttcttggctcttgcctgtaatcccagcattttgggaggctaaggcagaaggatcccttgagctcaggagttcaagaccagcctgagaaacatagcgagacctcatctctactaaaaaataaatagtaaaaaattatcccagcacagtgatgcgcacctgtagtcccagctaatcaggaggctgaggtgggaggatcacttgatccagggagtttgaggctgcagtgagctatgattgtgcacactccagcctgggtgacagagtgagaccctgtctaaagaaaaaaagctttctttcgaaatggcctcaggtttatcgatttttaatttaacattgctctacagatttattttgttgagtttttttttttttaagtactaagagtgttttgggcaggggaaagaaattcacagtgtttttttgttgttgtattttgttttgttttctgagacggagtctcgctctgtcacccaggctggagtgtgcagtggcacgatctcggctcactgcaacctccgccccctgggttaaagcaatcctcccacctcaacctccccagaagctaggattacaggtatacatcacctcacctggctaattttttttggtattgttagcagagatggggtttcaccgtgttggccaggctgatcccaaactcctgacctcaagtgatccacctgccttggcctaccaaagtgctcggattataggtgtgagccaccacacctggcctaccacaatgttttttaactgaacagttggctgcagtaagcttttagaagcctacacgttggtatttgagcatacga

SEQ ID NO: 61552 - DNA, 1036 bp, Homo sapiens
tatttttttaattacaatctaacaaaaatagaataatctaatataaatagaaactacaaaatgttccagaaaatgtaagtattcctgtgtgactagtgtagaattaatataagaaacattaataggtgataaagtaaaaaagataacttagggttagattacactgagatttgagtgcttggctacagagctgggtcttatttgaagggaagtgggaaactattgaagggttttgagcagaggaatgatatgttcaaaacagtggtttaggaatataatcccatgctagtgtacaaattagactagaggagggagagactattatcaaacggatcaatttggaaacaatttagataagcaccaataggaattgaattaaaataatagcaagctaatgaaaaaaagggaataaaatgtattaattctacatctacacagattgagagcctactatgttctatgtacttggtaaaggactgtatatatttttgtctttatagtcaaggaattcacaacatatgaaatgtagaagtatgaaaaaataacaatttgttgtaataagaactataatagatgaatatttaaggtgttaaggacacaagaagaggaagcagccaataatacagaggagtctaagacatgctttagataagatttaaccttacatgagtagttacagtttaccaaacaaagaaggcaaagaacaacattctagccagaagaaacagcacataaaaagtcacaggcaaagaagagtagagcatggtgaattgggggacatagttcactatatctacatgtgcaagctaagcataggtacagaagctagaaagataaggatcacatcactaagggcaaaagacatgaaaaatttggtgactatatgagatgaaacaagatttagtgactttataagaagacaaggatgaccttaatattttgaatttaagtgactagaaggataatgataaacccaatagtaagaattgtataacttatagacacttttcatctgagtggacattaaatacctagg

SEQ ID NO: 61553 - DNA, 1035 bp, Homo sapiens
tcccaactcaagtcagaaaccctctctaaaacattcacaacctgagaggtccatttaatttggttttataaaccctaaattgttagaaactttttccttctcttggacataaatttgccttcttgatcacttttacccataggttctagttctactttgggaaactatatagaatgcatcttatctgtcttcactgggcttcattgtgggtattttcttctgttctatcttccagttcactaattcttttttaagttgtgtctaagcttctattaaaactatccactaaatttttactttcaatttccatttaaacctgttgtattctagtcctctgttaaaattctcgattttatctttaactcttgctatttcaaagtttctgtttgttaagttcaatatctggaactgctttattaagctgtaatttctgctggttttaatttcctgcttgcctctttgtattactgtttattttttattgtgggtgatatgttgtatttgcaaaattgcttatagaaataatttgaagtataggatgattcatgtttgcttttggcaggcatggggacattggcacactatatttatcttcatctaagtttaaagatttagatgattagaggctaagctacaatcccttgtctaggtctttctactgcctgttcacacacccttaatccttttgattcccaccctgagataaggagattttaactaggcccattactcttgacagactgggttccagactttgtcctcctagcatcaaacaccagactcacttctctgggtttctatcatcctctgtattatagcctggtaattcttcattcttttgttaggacttcaatgccttcaaacagattttttaaaaatatgtccagatgttctaattcttgataagacagttggtctgaattacctaggctgccattagtacctgcaacctactttaatccgtattaatatttttctgtccttctggattgcttgggaaactgttaaagagcaggaataaccctgaccaggcat

SEQ ID NO: 61554 - DNA, 1042 bp, Homo sapiens
agcactaagttttctgtatcagcttgtctagaatttttgtttcaaaattgtattcttctaatttatttgcagtttttctcttctaattgtttaattgtccatcccctaccccctgccccaaggcaaatgtactgtcttttatccatatgtgcccataaattctaaactcaaagatttctggttctcccttatatttatggtatttttctacttctctgttcagtatatttttgcaagtgtttcagttttcttcagtgtttgaggttctctagtgtgtcatttcattttcatgcatcagagtaattcctaccattcttatatggagtctcttacctgatgattttttaattagtaaagtgcaatattgaacaacattgaagattttatttcttaatctaaaacataatatttatttaataatgaaatggaaatataggttttgtgaaagggagaaaggtgtttctctaaatattatacctgtgtcaaaaagctgcaagtgctactaccactgttttgtgacccctgaatgatttctgctttctttatattaatacttactctaatagtaattgaactcccaaaaagatcacaaagtccccaattgctagctttataaatacattgatgtgtaccttgtttgatgagataaaagcttcagtaagtgatatccccacctgtgtggttaatttcaaaatattgtttgtctaatacattgttgtcagtgacaactgaacaagaacttttagaagcagttggctgtccattaatggcagatttcaaggctatgcaaattgtgccagttcagccctgcattttttcgatattatcatatcaattgagtcagttcagagtagacaaagcaaggttatgggaaccacctagagcatcatgcaccatttaacatcaatgcagcatacatgaacatctgcaacttcgatcttattaacagaggatagaatggaaggcagtaaacagctttcttcatcacttaattgcaaaatagtatttcctaatgtttgcattgtttatcaacacgaacttc

SEQ ID NO: 61555 - DNA, 1042 bp, Homo sapiens
aagttagctgggcatagtggtgcacgcctgtaatcccagctaagagtagctgaggcacaagaatagcctgaacccaggaggtggaggttgaagtgagccaagaccacaccactgtaccccagcctatgcaacagagcaagatgctatctcaaaaaaaaaaaataatatatatatatatatatatgtatctcaaattagcttgtttatatatttgttacttgtgtattgtctatccccactagaatgttggcctcataaaagcagagtttttatcctattcacatctgtattcccagtccctaataaagtacctgacacatggtagagtcttaataaatatttattaaataaaatagctaagcccgaactagactaaaactatggcttttttgctcctaatcaagtgtacttcccatgaacatttaatttttcctactttttgtggaagcacttatacctttggaactacagtaagaattgatgttcagaataatgacattaagatgtgctgtaggattctctattatcaaagaaaaattttattcagttcaataaactaaactaattaaagcagggatgtcatggcatattattatattaacacatttagaaagatttccaaataaaaagactttctgctttttctttagttaactagaaaattaaattaactcagagctctttatgcctcaaaagtccttgttaattaggattgttctataaatctctattattagcagagttcatcatcttttttattgccctgtttattagggcagtctaagcagggtgtctttgctcatatcctgatatgtgtgtcctagtgaaaagaaaagcatttccggattctcattttttccctattccttgatataggcatatttcatgctgttagtataacaatttagtttccttctatcagttctctccataaagctggaatgatattattgacctatgaagcaaaataattaaatttaaggtctgtttaaaagcattaatgctttgtgacgttgtttatgataatagaagattgaaaata

SEQ ID NO: 61556 - DNA, 1334 bp, Homo sapiens
ttatatccagggtgaacattgcattgaaatgtcctcccaaatgtagatgacaaaaattttgtttcattaatagaaagaaggtaagactgaaacaccacaggtattccagataacttggatagggccattttgtaaagtcagtgtagaccaaaatatgtctctaaatatgagggaaataaagaatctgaaatgacatgaaaaataccaagtatttatatcaacctcctgttctagacgcacatgggaattaggaagtgaaaatttcattcagaagagctgtgcacaaaaagtggaaatgcattattcaattgaaacaagtaacatttttaagggggataaaatactttctacatgatctcactggttttgtcgtcctccgtaagggaaaatattgacatttaccagactgtttgctccagctttctgatctcctgcagtttatttttataacaaccttatcgatgggcctcttacccagctctctaggtttaactgagttgagtcgatttgttaccacagcttcaagtagctgttacagaacaagcaagacatcctaataaagctgtaaacgtgtttactcaaacagagtattgattttacttggaggggaagaagccggttcttagcacagtgtcagggtggatgaatttcactgcagtttttcattgtcatctgtcagggttgtgaaacactaagtaaagccatcagaggataattagaagtaccagaagtttagcccctaaaatcagttaaccacttgggagttttgtagcttaattagcttttattaaaactttccctagtattaatagccaagcacttttaatggtatttccaagtagatcaagatatcaagattgtgacttgttaaatatatgaatttaatggctaagggtttttcagaccttttctcactctaaattaggctaccactagaacataattagaaccaaaaccaatgtaaagatacagtgatctgtacttatactagcagaataaatgcatgatttttttttctgaaaaatcaacttaaaagaagtagtaaaacaattataaaataatttaagccaggcgcagtggctcatacctgtaatctcagcactttgggaggccaaggcaggaagattacttgagcctaggagttcaaaatgagcctgggcaacatagtgagactcccatgtctacaaaaaattaataaattagccgggcatggtggtgcacacctatagttccagctactcaggaggccaaagtgggaggatcgcttgagctcaggaggtcaaggctgcagtgagccgtgatcacaccactgcattccagtctgtgtgacaaaa

SEQ ID NO: 61557 - DNA, 1049 bp, Homo sapiens
aaacataaaaataaaaaataaaataaataatagccagtttgaaaaatgcttacccagtaagggaattattatcttatctcacacaattttgggggttatcgtctcatattatttttgaggttgcctcattgacttgcactgcttgaggttgcaaaactactgaagaagtgggctactggtaggattcttgctggtgacgctgacaggctgctgggaatcagtgtgtacgggagctggctgtgcaatctcttcccagctctacattctgggcctaccttctgggtagtttgaaattggccatggtgggtgtatttacaccacagaaatctgcaaatgcctcaagtcagggctttttcttggaagaactggtggttaaaccgtaaccagcacgccattgccgtgagctctatttatagatgctgaatcaatgacttcataacccaagaaaggaacgctcatacagccagagacccttctaacctctccttgcacgagtcttcatgccttatatcacttgtttggatactgcatttcttcggctcttaagatatgtaaccccagctctaaaagcttaaatttgatggcttcctgcatgcttcctaggaccacacaactattacagctatagaaataaaatctgactgagtctgggccctctaagctttgttcagtgacctgaaggtcactccatgttccacagcccctacccccaacctccaagctagcacgcatccccctgcagcacccagagccgggtcctcatgtaaactttcatcacctctttttttctgtttagggtccagacaagggtttcttttgcagacaagtcccctggcctcccagcctggggtgcaggcacccgtctgccccgcctgcaggtctccttgagccgggtaagtcactgcagcccgttccttcaacacctggcagcagcatgcggacaaagaactcatgctgttgtgctgagcctggtgattcaggctgtaaaactgcaggccaagttgttaaacccagattcaggtagacagccaagcagggccaaggctgcc

SEQ ID NO: 61558 - DNA, 1082 bp, Homo sapiens
tgggaagatgagacaggtggatcacttgaggctaggagtttgagaccaccctggccaacatggcaaaaccccatctctactaaaaatacaaaaattagccaggcattgtggtgtatgcctgtaatcccagctacttgggaggctgaggcacgagaatcacttgaatccaggagtcagagagtgcagtgagcagagaccacgccactacactccagcctgggtgctgggtgatagaggaagactctgtctcaaaaaaaaaaaaaaaaaaaaaagcgtaacctaaatcaaatcataaggaaacatcagacaaacccaaactaaagggaattctacaaaatgacttgcctgaaacctttaaaaacatcaagttcatgaagactaggaaaggctgaggaactcttccagattaagaaggaaattaagcaaacaggacaaataaatgcaacatgtgatcctggactggctcctggtctggaaaagagaaagctataaaggcctttaattggacaattagtgaaatttgaatatgaatttcagcttagataacagcaatttaacaatgttaaattttctgcatttgataattgtacagtgattatttaagaggatgtccttcatgttagcagtgaagatggaaatatttaagggtaaaaatctatgatttgctctcaaatgttcatttaaactataattttaggctgggcacagtggttcacgcctgtaatcccaacactttgggaggctgaggtgggcggaacacctgagatcaggagtttgagaccagcctagccaacatggtgaaaccccatctctactaaaaatacaaaaattagccaggcgtggtggcacgcgcctgtaatcccagctactcaggaggctgaagtaggagaatagcttgaacctgggaggtagaggttgcagtgagccgagatcctgccactgccctccagcctgggacagtgcaagactgtctcaaaaaaaaaaaaaaaaaaaaaccccaaaactacccgaacatggtggcgggtacctgtaaacccagctactcaggaggctgaggcaggagaatcgcttgaacccaggag

SEQ ID NO: 61559 - DNA, 2580 bp, Homo sapiens
tcgattctttttcttttcttttctttttttttgagacagtctcgctctgtcgcccaggctggagtgcagtggtgcgatcttgctcactgcagcctccgcctcccaggttcaagcagttatcgtgtctcagcctcctgagtagctgggactgcaggtgtgcaccaccacacccagctaatttttgtatttttagtagagacggggtttcaccatgttggccaggctggtctcgaactcctgagctccagcaatcctcctgcctcggcctcccaaagtgctgggattacaggcatgggccaccgcgccaggtaaactgttgattcttaataaatcccagtagagacgtgcgcttgcgtgggcaaaagctcctgccgaggccatcagacgcgttgttgaggctccgggtccttggctttaccctggagacccaagtccaggggccttgggtgcactcagatggagaaaggtggcagcaaggagttggatgtgccactgagacaaaaaccaacgctaatactcaccatccgtgcattgccttctgtaagcgtaacaaatgcctggggccacggtcaccggaaagcccctctccttgtccgcgcctggggtggcttcggggctcgccgctgagacgcggggccaggagcgagtctggcaacttccagagccctccgcccgcctcccctgcctcctgcttaggtcgctgctccggcggggtgaggccgggcgggagcgggcaggctgggcatggcccgcgaggcagggtagccggcttggagcgcggggtccgggaggcaggcgcggggaaggaggccgagcgcgcctgccgggagggcgagcaggaggcggcgggcaaagcctacttcgcttagttttgtgcgcctgacagcagcccttcagcaaggtgaattctttgaggaagggtctcattcacaagctgccaagacatccgcgacctattcttgaattcacacaaaaattaaaggaaaaacaacagcccaactaatttagcaacttgcaagaggcagctggtgctcctttccgcgcccctggggcccagtcttcccctccccaccgcctcccaccccgcccccacccccgcctcgcctctgagaggtctccccagagttattttgtatcctgcagctccaggcctcattgtgacagctgagtgacttagctggcaccgtgggatgcggaatgacaaaggcgcagagcatcggaggcccggtggcagcaggggatggcaagggatggcggaggcttgcagctctgaggaccccccatccagcagccgcctgaggtgcccagtcgcccattccacctccctctaaaataatgcttctatgaattaagtgagaggcttttgcagtccaaaaattggtacttccagtgtcctcgcaggctggagatggtggggtctcaggcttctgcatgtcctggccctgacagttctttttctgtcgctgccagtagcaccttctctctatctcatccattaagtgccaggtctcctgccttctgtccccgaggccacttcgctctccctggcttccccatctttgtgcctccttggtggtgccagcttcctctccagcctgggagaggtcatgggttccaaaggcctgtcctggcagtgccggcctggactcctgaaccgcccccaagggccatccttacagaacagtgacttcaggcctggactctgaattcagacctcactgaggggcaagtggagtgcaatgatcagctgctcagttgggaattctgacctccctgaaactgcttaacacctcagagcacagttttcttgtctgtaaaatggggcataatagcaatatttaaagagaatggttatgaggattacatgagccaattcagggaactcacttaggttgtaagtgctccaaaagtgttagctattattaataatattgttctaccaaacactaaagacatgttcagcaaatatgctccctcagtccacttcagcatcttgagttcccacactatcttcctcagaggttttgagtggagccacagaattacacaacactatccccaatatcagtccccaactcctttaattggcaggaataaagtgttctttccctagccaccctgtaaatcagctcataggtcattaactgttactaagagctccagactaggctgaggaagctgcaaagaggccactgaacagatactgggcagaatttctttctcttcagatacagctgtactcccaagcaacatccttgtttccaaaaaattctacttacacttatgagaaagctaattatttggaagccaataagccaatttctgtcttagtccattttgtgttgctataagaaaatatccaggactgggtaatttatacagaacagaaatttatttctcacagttctggaggctgggaagtccaagatcaaggtgctggcatctggtgaggactgctctctgcttccaagatgaagccttggtcgggtgaggtggctcatgcctgtaatcccagcactttggcaggccgagggcagcggatcacctgaggtgaggagttcgagatcagcctgaccaaca

SEQ ID NO: 61560 - DNA, 1269 bp, Homo sapiens
accatagtatatataggattcagtactatctgtggtttcaggcatccactgggaatcttggaacatatcccctgaacactactgtttgttaatttaggttaagcaataccacctgctatagcagaaaaacttcagcatctcttcggcttaacacaataaggtgtatttctcctgttacatatcagaacaagtgggaggagtctgctccatgcagttacttaggggtccacgctaatggcagctctgctaacttgtagctcatcatctggaacacatggcttctgagatactaccgaaggggaagagaggaatggagaatgactcactctggttcttaactctttgaaccagaagtaacacatatcatttcagcttctcatccattggctgaaactagccacatggttctaacctaatggaggggaaggctatgaaatgcaggggtgcacagggactatttggtgaacactaatttttctgctacagagaaagatattacaaattacaaataagctgaacttagagttatttcatgtcatcagttgcaattcaggaaacgaaatctaggaattattacagactgtttaccacaggttatgactccatgtgtggcattggaattggtagaaaacagatctcagtctcggtaacagatatgccaagtcacattggccatggaagtgaggcacatggagcagatgaataggctgcaaacaccagaaggggcagctcagataagaggtcctcaaaatatgatacttgattttggaaagagaaaaggtacaatgggaacagttccaagactatgtatgtacatatataccacagaaaaaaatagcaaatgtagtacatgtaataaaaatagaacactccattggtcaaatgctaagatgctacgtgtttaaagtcactcttcaacaaacacacacagagtagaaaaagtggttttagactgggtaacaggaagtactactttacggtagttaggaaatatattcatgcaggcttcatgtatttaatgaatgtctatgatgtgtttgacatttacaagaaatctgtaagcatatgaagtttacagtctaatttctgaatttagacagatagatcttagataaacagataacagatccttaaccttttattttacttaacattatttattactactatgtgcaagacactttggagaatataaagatgaaccaaccccaatcccaaccctgaagcaatttataggcaaggttgtaggctgagtgcggtggctcactc

SEQ ID NO: 61561 - DNA, 1806 bp, Homo sapiens
accctgtctctattaaaaatacaaaaaattagccgggtgtgatggcatactcctgtagtcccagctaaccggaggctgaggtgggaggatcgcctgagcctgggaagttgaggctgcagtgaggcatgattgtgccactgcactccagcatgggcaacaggaacaagaccctgtcttaagataaataaataaataagaaataaatcaatggttgttcaccctgactgcacagggtgatttggaaaaatgctgatgaagggcccctctccccaaatattctaatttaattggccttacgtgggacttaggctctaggctggttcaagagctcctcaggtgattgctacgtgtggccagggaggcaaaccacaggtatgaatggtgtgtcttcattaagtagcttttatggcactagggcagttacacagatgaacaaactggtccatgcagtagaaaagctaattaggaaaacaggcaaaatatgacaagagagtagggtaaatgcttttatttattccataattcaacaaatattagctaagcacttaacaagcgccagtgctggagtgaagccaggctctcagtcctgtgggctacctgcaaaaaccaggaaaacttcacagaggaggcagcagccaagcaggaattgggaggagtgcttagccaaggtctttatcagataaggcagggagtgagggcatcgcagtgaggacagggtgtgctgggcacagacaagtggcaggctcgggaagctggagatgagatactagtgaggtgcagatatgcatacctttagaggactaaggggtttaggcttggtccagaacgcatttaaaagacgttaaaggttttaaagcaggaatgcataaattagatgtgggtacagaatactggtatttgagataaccccagctgttcataaaggcagctgtagctagaatttcctaaccagtttaatgctttgactgatcatcccccatcccctctgcccttgactgaagtaaccagacattgtgaccttgtggggtcagtttctagtcaatgaagggagaggattccatgtggcagttggaagggaggtgtagatcaatgttttttaagtgactaattgaatgtaaatagaattcaccatgggctgggccctggacaaatacgtttagcgtccttgcctgtgcctccttacccaatttcctttagaaggacttggtagtgcctctgtggatgtggtacctcttatcaggctgtttgtctgacttgcttcagagcaagtaaacaaacccaaaagatcaaaccatctgggttcccagaggttcctgcagctcctctgcactttattattcttgttcagaactcaaggacaaataggtcagatcatgaaatcagcccagtactagggactataaccttttggctaagacactcacagaagaagtaacttcctcggttggggaagaagaagatttagcctaggccagtggttctcaaatttagtgactgtaagcttcaagactagtcatgagctaaaaatatatttttgggagactcgcttcagacttactgaatcagaatctctggggttgggccaaggaaactgtctttcaaacactcattcccagatcattctgattccagtgatctgtagattgcatggagcagtataactagtcagtggttctggtctgtggtggtggctggcagctgttttggggttgtgggggacaggtcagataagcttctccattcataatcctccagcccagtaggcttgcaaaatttgcaccatgcttggttttcaattcaggctat

SEQ ID NO: 61562 - DNA, 1227 bp, Homo sapiens
cctgatctcctggggttacaagagcacaggtttaggcaaacatagccgatttctctctaaggtgtctcttcacttcttgatgcactggagatccttgtggaataatacattagtgataatgagtgttgggtgctcacaaatcacccacaattcattggctgaaggcatcttaaacgtggactttttggcttttattgtctttagctgcttcttttaacatactttagtttgagtgtacagatttggggttttcaaacttgtttttaattaaggcatggtttatttttattgcttgagataaaatgcagtctgagggtcacaaatgtaatttacaaaataaagtgcatctgggcagaccataagaaaaaaaaagaacagaaagcctaaataaagagtgggccaggattcttaagtttatttagtaacttcttggagaataaaaatcccagcacctgcattataaaaaagcacaccttataagtgtccttctcttcgaaacacctaagtgaactacactgaattatgaactaactaatggtttgtaaaaattcgccttgagcaagctattgaagatactaaataaacgaggctgagacagagtctgaggaaacccaacctgctgtttgttttatcagtaatgtaactcaaaagtagccaagcggatggctggagttttctctgtgttttgtttccctgggctgagcctgtgaatgccaagatttaatctaaagaggtttgtgttttaaaaaactaacaaccaagtaataaaacacctataaaaactgtttataatggaaccggtgacagtttgtagtgtagtattacaattcttctgctccccctcgacctttctctatcctttcatccaactctgtgccctttgtctaagttcctttctcaccttgctgccaagaagctcaggaggagagggagctcacaccccaaagcagcagaccatctttaaaaaatgaagtgtgtgttgtggtctgcatttgaagacagggctgcgtgtgctgcttgttttgtctgagataaggacgaagataagttgtcctaacaaagtacctacctagttgtacagtggtttctaatgggaaggtgaagatgccgctgcagtgtcagtggcatgaggctgcaggagtcaaccagggcaggaagcctggggcctcccctccctggcacccggcatagccatgcccaggcccaagatggccctgactccaggga

SEQ ID NO: 61563 - DNA, 1038 bp, Homo sapiens
aacttggttcttttgcaaagccatagttctcctccccctctcaaagaaatggcgcctgggagggaaacttcgtgctcaaactctctaggagccatttctcagcccacctttcctattttctgaagtctcccttgccagcatcccattcacctccggaaagaaccaggggcgctctcttcagagtccagagagctctgggaggcatgtgggcagcgtcagagtggcctcgcctgggcggccagaggagcccccagtctccctcaagtgggcctcaggaactcggggggcccaggggaagcctggaaaaccgaacttcgccatcagccttccttacagcgctggctaaaagagagggggggaagggccccccagcggtcttccccgcccccctcccgcctcagcccctctgccatccgcctgcaccgcccaagaaagcacccagaacgcggctgagctcgccagctcctcgcaggcagggagagagcatcctggggggcagcttccccctccagcccgcgtctgacatccccactcccacacaaggatgccgccgccgtgccctgtccgcagtcgctgaatgtcactgctccctcttcctcccgatcagggtagacacagctcccgaggcgtcccccaccccaaaactgccgcgatcgcccgaaggcgcaaagcctgggcgaaggacgaagtttggggcccacagcgacgggagtggggacgcgttggcgaggaccgcacctcagtcccagccctggcgggcacactccccgccccaaacggcccaggcgtccccatcctcccgcggacaccagcgtctccgccctcccccgagggcggcgagaggagccccccggggcggaggcaggtacccccggggcggagactggggcgggcggggtccgggctgcgcccccggccaggccgggcgggctggcgggcggcgcggggggagcggggctgggcggcgctgcctcgggctctgtgcgctgcagcccggagccgaggaggaggaggcggaggaggagaaggaggcggcgg

SEQ ID NO: 61564 - DNA, 3960 bp, Homo sapiens
cccggtgggtaggggcttgctcccccgaggcatgggatggcgaggaggctgcagcgacatcgttctgcctgcacccggcctggggctggcagggtaggggtgtgttggggggggaaggatgcgagccagggggcgggcgagtagtcgcccgggacgggacgggacgggagagagggtggaggagggggcgggatggaacgctccgggcggcgcgcccgtccgcacactccaccgaaggagctggcgactgagaacctcgaattttaacttcgcgtgcccgcccgcgcgcgcccgcccgcgcccacccctaaatcctgcggccgccgccagcgatcagctctcacacaaactttagctgcgggctagggggtttggggttgagtgggggaggggagagggaaaaggcctcctgattggcgtcgtctgcagccaataaggctacgctcctctgctgcgagtagacccaatcctttcctagaggtggagggggcgggtaggtggaagtagaggtggcgcggtatctaggagagagaaaaagggctggaccaataggtgcccggaagaggcggacccagcggtctgttgattggtattggcagtggaccctcccccggggtggtgccggagggggggatgatgggtcgaggggtgtgtttatgtggaagcgagatgaccggcaggaacctgccccaatgggctgcagagtggttagtgagtgggtgacagacagacccgtaggccaacgggtggccttaagtgtctttggtctcctccaatggagcagcggcggggcgggaccgcgactcgggtttaatgagactccattgggctgtaatcagtgtcatgtcggattcatgtcaacgacaacaacagggggacacaaaatggcggcggcttagctcctacccctggcggcggcggcagcggtggcggaggcgacggcacctcctccaggcggcagccgcagtttctcaggcagcggcagcgcccccggcaggcgcggtggcggtggcgcgcagccaggtctgtcacccaccccgcgcgttcccagggggaggagactgggcgggaggggggaacagacggggggggattcaggggcttgcgacgcccctcccacaggcctctgcgcgagggtcaccgcggggccgctcggggtcaggctgcccctgagcgtgacggtagggggcgggggaaaggggaggagggacaggccccgcccctcggcagggctctagggcaagggggcggggctcgagggcggaggggggcggggcgggatcgggtgggggcggggttcggggagtcggaaggcgggggctgagagggaatttctgagtgggagtgaactggtaggagcggtggggggccggcgagggtgtgaggaagactagtgagggttgggtgggaggagaagctgaaggtgtagaagcaggtgcagagggagagttagggagggatgcaatttgagagaagtggaaggcggaccgaggggtgtgtgagggcaggtgagatgataccgaaggcgagattgcagttgtctgggcgcagagtaggtgggtttgggtgtggtggatgtggagtagagttgaagcggtgcagagtgttgggtttggggaggcgttgaggggtttggggaggcattgaggcgcatgtgaggagcaggtacgattgcagtgatgggaaagaggtatctgggtggatcgcatgttggaataagaaggaggtttgctagctttggggtatgaagtattttttaaaaacgtggaaggatgggatggttgtgcttgggagagtttctgaaagatgatgctaagacagcagagcaaacttaaatatgaaggaaggggagagaggctgcttagaacttgcaaaatctgtggcagaaaatctcctggggacaagggattggtaggggtgggacaaggcggcaggtgtgaagaaagtgggtggagctgtacagtaattttcggtgaatgtgatttggtggactgtgccaggggtgaggatggggcagagaaaggtgttagtttgggagacaagttgtttgataggctgtatttattattttttataaaaatgagaaaagggtctcactatgttgcccaggctggtctcgaactcctggcctcaagtgatctgcccacctctgcctgactgatgggattacagacgtgagctatggcgacccgtgatacgctggattcattatgttaaacttgatctggagtcttcaagggagtgtccggcagcagggtatcccaggaagagacatgcaccataccttgggataggacattttgcatagctttgaatttgctagtactttgctgtgggcagagtgcagggagtggtaggagatgaccaggcaaaggcagaggaggggttagattacaaatggtgtcctatgccccatgaaggagtttaagccctgtaattggtagaaggtgttgggacgtgttaaagagagtgttagacagaagttgtgaaggggtagtgataaagaattacagatgtgggaaataggaaatgaagaccaacgaaccaagtatgtttggggttggaggtaccaaggaaattcagggtagagcatatgagggcccctcctatatggacagaaggtggaaatagcaaatggaaattagttgtgttcgaacagtcttagttctatggggccccaagaaggttttttgtgtttttttttttttaaagtgcattcttcctgtcttacttgtataccctagattttttggcatagccttgaaataaaacactccatttttttcttactcataagttctttttttttttttttttttttttgagacggagtctcagtctgtcgcccaggctggagtgcagtggcgccatctcggctcactgcaagctccgcctcccgggttcacgccattgtcctgcctcagcctccggagtagctgggactacaggcgcctgccaccacgccccgctaattttttgtatatttagtagagacggggtttcaccgtgttagccaggatggtctcgaactcttgaccttgtgatctgcccgcctcggcctcccaaagtgctgggattacaggcgtgagccaccgcgcccggccattcataagttctttacacatttatcagaatgaatttggacagtattttatgtttttaagaaggaaaggataatgcacatgttttttcttttccgagaacttctactgagagttaaaggttggagtggtgaagtgatggtttaaaaaaaaaaaaaaagaaaagaaaagagagagacagaggaagattttaacattaaaagaggaatttagggaatggctgatggtcatgacacggtcggcagaggaagttttgcttactagccacacttaggcttctgagtagagtggatattatgtcattgctattatagcatgtgtttatttcacacactgcttttgaagattgggtggaaactgtcagatgtgaggcatagcatgaatgaaaggtaaatagcatgagtattagaaagtagatgaggaagtttaataattttaatgtgcttcataagctctcatggactttcacgtatcaattagtaaaagacgtaactaagtgatctggctttcagtctcctagttctctacagtgtaccctcagttttccacgtgcttacacatgcctacatttgtactgagagaaaaggaaatagttttttttttttttttgagacagtcttgctctgttgcccaggctggagtgcagtggcacgatctcggctcactgcaacctccacctcctggattcaggtgattctcctgcctcagcttcccgggtagctaggattacagacatgtgcccagctaatttttgtatttttagtagaggtggggtttcgccatgttggccaggctggtctcaaactcctgacctcaggtgatccactcacctcggcctcccagagtgctgggattaaat

SEQ ID NO: 61565 - DNA, 1244 bp, Homo sapiens
taatggagtcaaatttattggtctttactttatggttagtgccttttgtgtcttgttttaagacttttcctaccctgaggtcaataagatattctcctatgcagtactatctttttaaagctttgttgaccttaaacaatgtataactatgagtaaaatacactcttcttgaccccagcctcaccattacaatctatttttgctttccttcacttttttctgttctctgtcttgaatttttacttctctgcagctataactaagagccaggtgctgacttctcctgtctcttaggagaaaatggtcatatagacagaagttcagccagattagattttacaggtctccagctgactgtattgccctttttccttttatgagctagcattttattgtgttcctgctatgtgtctgccatcatccttgctgctttcatatttgttatctcagtgattcctcttaacggttctgtaaaacagagaagtattctcatttttacagaagagaaaacagagacttagattgatttagtagcatgtccaatatcccctagcctaggtagctagcagaatggggactggatccctgactctgatacttcccatcacagcacacctacttgttgattaaaatgtcagaaacctgttttttgataacatccaaaaccaaaaagaataactttcttactcttgatgtaacatgccttaagtaaagcacacaaagctaactattgtgaaactggataaaatacctctctgtatatagccagtggaccttaagtggtccatggctggatgacagaaggtctgttaacccttaaaaatgtataccagtgtatatgggtacatgtgcttattttttagagtagagctataatatttatgaaactctcaaaagggaacctgaatttttcagggtatctggatatctggtctgaagacatctgtaatacagttaacaaagaatcctgtaataatctctctttcaaaagaatcataaaaaagttaagatgtcagatttttctcagccaggtgcagtggctcatgcctgtaatcccactactttgggaggctacagtgaaaggatcccttgagccctggagttcaagacatgcctgggcaacatagggagacccccgcctctatttttatttatttatttagattttttggtatcttcattttatcttatttattttgttgagatagagttttgctcttgttgcccaggctggagtgcaatgg

SEQ ID NO: 61566 - DNA, 1559 bp, Homo sapiens
acaaacaatggcatggtggcatgtgcctgtaatcccagctactcagaaggctggggcaggagagtcgtttgaacccgggaggcggaggttgcagtgagccgagatcacgccattgcactccagcctgggcaacagggcaagactctgtctcaaaaaaaaaaaaaaaaaaaaaaaaatcacattttttcccttaatacattattctcggtctttgtcatcaaaaaccaactaaagctaatttgtaattagggagaaatctaggattgaataggaatttttaaatgccaaaaaaagacactctaaatttagttgattatttcttaagtgaaagtgcttagttataatacatcattactaatcagtgtaccctggctccaaagacctgatgacttcaaatgacttttcatcttgtctctaaattcctctgttttacaagggatcaaatttcctgtgaggttcctaacagtgtgattaaattttagagactgaaactattgagcacttaaatgcagggataactatgcaaacctaattcatgggtttcaccaggagatttgggacctgtctctactaatttatgatgatgatgttgaaactaatctttgctagggattatggaaaccataatagtttattgatggttcagttattgtttgttgaagcacatttacacaattatagtttaatgacataacaaggatattgtcaactaggagagcatgacatgaaaaattaaacttgcaattaatataatatgtattagttgaaatgataatttttatggtgatttagcctcttagaaatccttggaaaacattattagcttatgaattgaaaactctctttgttaatgagtagtgggaaagaacttagtgttactctaaaaagatggggaattaaatattcagttcaaccagcgttttattgagtgcctgctctgggcttgctgctgagttaggctcataaatataagttgaacaagattgatgtttgcagagatgaaatactggttgcttttgttttttctttcaatcacccttccctccagagtagatggctactattgccagagtgattcaaacattcaacaggtttgtgtgtgtatgtgcatgcccttccctgtgcattatggtgtcacctgctcctgcagtggcttcctattcatctgtcacgttcacacaccacagcttggcttttttcacagccaactttatttctgttttttttttttttgagatggattctggctctgttgccaggctggagtgcagtggcgcgatctcggctcactgcatccaccacctccggggttcaagcaattcccctgcctcagccttccgagtagctgggaccacaggcatgcaccaccacgcctggctaattttttgtattttagtagagatggagtttcaccatgttggccaggatggtctcaatctcctgacctcgtgatctgcccgccttggcctcccaaagtgctaggattacaggtgtgagccactgtgcctggcctatttctgtttttcatttttaaattatatttgtcttttttagagaca

SEQ ID NO: 61567 - DNA, 1439 bp, Homo sapiens
tttaaagcgaatcttatggggaagacaaatatatgtaaaacagttaaagtggagctgcactgttgggttcaaggtgctgcaatggcccaaagtttaacccacaaggggtacctgaaggtaatacccgaagtaactccttgtcacagagatctaaagagcctagtttgaaaacctctggagagacagaaagagtttgggctttggcatctgaattaaaatccttcatgacttaatggctctgagatcttggctaagtcaagcctgttttccttttgtaaaaacaacaatgctaccttacagagttgttttaaagtttactgataatctatgtaaagtacctggaccacagtaggtgtcaggaaatggttggtattattattattattatagtttagtgctttgttatttctttttttttaaacaatttattgaggtgaaactcacataacataaaatgaaaaaaccattaaaaagtgaacaaatcagtggcatttagtacattcagtgttgtgtcaccactgccactatcaagttccaaaacatttttattgatcccaaataaaaccccttacccattaagcagtttctctagatatgtccctgagactccaccaatctgtgttttgtctatggatttatctattctggatgtctcatatgaatgaaattatatgatgtgtggccttttgtgtctggcttctttcacagcataacgtgtttgaggtccatctacattgtagtagcatgtatcgaaacttcattgctttttatagttgtatagtattctagtgtatggatataccacagtttatctgttcatctgttgatggacatttgggctgtttacaccttttggctactgtgaatagttttgttatgaacatgggtgtacgtgtacttatttgagtatctgttctcaattcttttgagtctatacctagaaatggaattacagaaccatatggtaattctgtgtttaactttttgaggaaccgccaaacagtgctttgctatttcttaattgcttcttatatgttctgtctctagctttgctttgtattccccatagtacctaccacagggctgcatgcagggagcatcagctcgctaaatatttgttggtttttctttgattagtatttataacctcacctcccagttcacatgttttgggcctgaagcattgatttcagaggaaatagatgcatccaggatttgaaagataagaaatatcaccatatggatggcgtttcatgttgtcagacaacagatatttgttaaccaaggacactattttgagcaactctgccaataacctgagctgggtgctgatagaagaaaaataagtcaaggtcccttcccctaaacagttctgttctgtttcggaagatactgcttagatttgtggatgctcactcagttacacaatgggctttgaa

SEQ ID NO: 61568 - DNA, 1684 bp, Homo sapiens
taatacttatgatccaggatattttgactcttcttatgctgacatgaatatttctgaatagtgttgatgtttatgtaataccagtgaagctaaaagctcagtgctggactaagcatttctctagatatgtttagaatatttgtaatgaatgatgtaaatagtgttatattataagaccgtatgatacaaccatataatttactgatattttgtagttaaaaataaaatgattcacaaccttagaaaatagaataatttaatttgatgtagcacaaatccccagaattaatttaggatgatttgctacctttttgatagccttttagtccaaccttcaagtttttatagaaaaaaaatgaaaagagaataatgattttagggttttcgcttgtgatagaatgtcctatctacatgtgaagcaaatccccatgctctgaaaaagagaaatagtgtggataattccaaatcaggaaaaaaaaaatcatttctatttggcttttgaatgaattatgcatttttttttcctgtggatttgtctttccagttagatactgcttaggctaaaatgaaattggttttcaatctattctcttgcttatatgaatttacagtggggccagtgggatgttggaaacaaatcagcctaagattaaaaaatttgcggtggataatatacaaagtggataatatacatgtgtttagttgagaattggctacagataagagacttctgattttgttcctctcctagctgtgtattttttttttttttttgaacactgtgattctgcttgtagcaaagagctgctgagttacatctgcttctgcctaattaactctgttggttggtgtcagatgagagctaattttgagattaaatcgaggagtggggtgtgtgtcgtggctgggggaggggagaaggaggatccaaggttgcttgattgttttacgtaagatcaaaatgcagttattcacaattgttcttttaaatttattttttgcttttcaagtaaaaataatcactgctgtcctaaaatgtgacttgtgtcaatacatatttactattatgtaaactggtacgtttttcttgtaggtgagcttattggtcatatctgggtagtccattcagtacctaggtgcctggtggcctttgggacaaacagcgaatgctgcccaggaatgtgaatgctgaccttaaaacaacttttgactgtctttttttctgataaatgttatatctgtttggctatttgagtagtagtgggtttttgtttttgttttgtttttccatgatgagattttttcttaggaatctatcacaaacctgatttttaaaatttgaacaggtctgggcttagggatgaaatttacttctataggcacttggctgggtccttggggcttcattttctgtctcaagtttcatatttataagaatccttcagtggtctaaaagaattattatatcaccaaatgtagtataataactcattggagctgtttgtcttgaatggttgtggagatacacggatggttgctgaatttaaggatgtccttatgtccaaatgaacatttccttttttcttttggcagatttgcctgaagacctggataatctccatttttgtcatggactgttaaaacgtttgaagttccaattctggtactttcccttattttatta

SEQ ID NO: 61569 - DNA, 1817 bp, Homo sapiens
gcaagactctgtgccccccaaaaaaaaaaaaatgattgtggtaaaagcttgtcatgaaggtatattttaggtatctattagttatgaaacacattttttttttttttttgagatggagtttcgctcttgttgccgaggctggagtacaatggcgcaatctcgactcactgcaacctctgcctcctgggttcaagcgattctcctgccttagcctcctgagtagctgggattacaggcgcatgccaccatgcttggctaattttttgtatttttagtagagacggggtttcaccatgttggccaggctggtcttgaactcctgaccttgggtgatccacccgccttggcctcccaaagtgctgggattacgggtgtgagccaccacgcccggctatgcattttgttttaatgtacgttcgtttgcttgtgtaacaaaacacctaaaagcaacttggcaatattgggcacttttcctgtgacctcttctactttctgcagttgtattttgtgcaatcaaattaaattagttgtgattcatcctgaataaatgatgaaagattaaataattacttggatacagtgaaatatcttctaatgaaattttgcccgaaaccattttacttgggaaagatcaatttcctgttctaaactaactgacagagaatgattctgtgttctatcctgaaagtggttgcactgtgaaagccagtgatttcattcctaaacacactgtgttccaagtctaacatttttgtcaagggtttatataatgaaacaaaagtgagtacttattagatttgtagatgacatagatgacagaatcaagattcaaaacaatctttagcaggttggaagataggcttaaatcaacgagatgaaattgaacggtaataaacgttaaattgcagcatttcaatttgcagaaggaaaggggtggaaagactcaacttgacagcactttttgaaaaaagatctgggatttttagttggactgcatgctcaccatgaccacttgtgtggcaggggtattgaggaagttcctgtaatttgggttgcatttataattggataatgcctgaactgtcatattttaagatggccaatagccaaactagtgagcaaccaagagaaagtggtgctttgaaacaatgtgatatgtggaagggttaagaaactgggatatgagtggtctaagttatggctggaggtagcatggggttttgtcgttagtggttttcaaaaggtacttgtttttggacatttgaaggcctctcatactgaagaaatactaagaattgtcttgggatccttccagggaataggactagttaggaataggaatagggtcgaagttatggggtggcagatttttgcttctctgagcaagaaatttagctagagctgtgcaacagtggggtgagctgcctcaaaaagtgacaaattatcaatcactggaagtattttaaaaatgtaaagactcattgcccatctatttgggatattgggcagggatcttttattggataactagaggttggactggatgaccttcagccccaagtttctgaatctgaggggagaatgagtagagtgaatttacagcttactgatcacagggacaatcttgtttaaattgcctcctttaaggtggcattttgggttggcatttaaaactgtactgtttgaacaagtatagttcaatgacccagctgtttttcagcaacattccaggatctctgagagcaaatactatattcttcagtatgtctggctaaagtttttaaggaaagatattattttcttctcttaggtatagt

SEQ ID NO: 61570 - DNA, 3978 bp, Homo sapiens
gagaacagtgatggacttagttggattttagaattggctgggcacagtggcttacacctataatcctagcacttttgagaggccgaggtgggctgaggtcaggagtttgagaccagcctggccaaaatggcaaaactccatctctactaaaaatacaaacattagctgggtgtggtggcacattcctgtaatcccagccacttgggaggctgtgcaggagaatcgcttgaacccagaaggcagagattacagtgagctgagattgcgctattgcactccagcctgggtgacagagcgagactctatctcaaaaaaaaaaaattaataaaaaaaattaatgatgttcgaccctttaatctgttattgactcttcccttgggtgaattccatcttctcccgagcctcagtttacccacaaagttctgcagtttaagtgacaagttatatgtgagcacactctgtacagtttaaactataaaaagaattaagaagtggatgttatcattggacaccaagattagagctcaggtttggcccaattcccaggccaaggctctttctccttgtagcctctttgtagatgtactcaataccagattggagatctagggtggtttttgtatataccaagcatctctcagaacaaatgccactgtccacctggaatcagatttgtatatatcttctttgtactgagctgtttaatgagctaactgggtattaagataactagaatgctctactacttaaaggtgaagggttatgttactgtattattttcagttttccaatttgtgggttagagggtatcatagacctctgttaaagggatggggatgtgattccatagaagtagctagatgggaagtttttttacgtatgagacttgggaaatacaatacctagctgaaagctggattatttactcttttttttaagtttaagattttttgaaataagtttaatgtactttcatcagattttttatatcatagacttattctttgatgtgtattttatgtttatggcagacatatacctcaaaccactttcatataattttgttaatttcaataaatataattaaatgtataatttagatgtgattatgcctcataaatgacttcatatagagaagtgaaacattctaaaaacaatttcttctcagactgtgacccaatttcttgttgaaaaatatagtcactgtggctgtgttatgtaatacctgcctgtcattacttcttgtggtcattctgtgtctgaaaaagtcatgctaaagaatcttttagtttatttgtgtaagcttcattattaagagactttcccctctttttatcctttaaggtcttgatttcccagttaaagatgttcttcacccgaatgcagtctttcctgttggtaaaataagacaaccatcaacattgcctgtttgtctgcttttgaatctcttaaggatggatgtttgtaagatgttgcttaatacagtctggaatactctgtccatttgttgaattgtaaatgactttcaaatgtgcaagttctgttaaatacaaagagaacctctatgggtaacttttgtgttgaagaagtcatttgtcaaccatggtaaaacttgcaaacccactttatacagagtggattcttgaagctatacagaaaataaaaaagcaaaagcaaaggccctctgaagagagaatctgccatgcggtcagtacttcccatgggttggataagaagacagtctctgaacagctggaactcagtgttcaggatggctcagttctcaaagtcaccaacaaaggccttgcctcctataaggacccagacaaccctgggcgcttttcatcagttaaaccaggcacttttcctaagtcagccaaggggtctagaggatcatgtaatgatctccgcaatgtggattggaataaacttttaaggagagcaattgaaggacttgaggagccgaatggctcctccctgaagaacatagagaagtatctcagaagtcaaagtgatctcacaagcaccaccaacaacccagcctttcagcagcggctgcgactgggggccaaacgcgctgtgaataatgggaggttactgaaagacggaccgcagtacagggtcaattatgggagcttagatggcaaaggggcacctcagtatcccagtgcattcccatcctcgctcccacctgtcagccttctaccccatgagaaagaccaggtaagcgaaggagtaatgttcgtgcattctcactactgtccttttgtcttttacggtttcacttaagttttatgtggacaaaagttctgaataaagtttgataaaattgaatgttttgccttagagcaggcttttgtattttaaaatgtatatattgtactgcattgtgtggaggacttcctcactggttggccaagaatttaatggaagagtcatgtggtttgtttttaagctctaattgctaactggttggtgtctgaagggaccaggaaggataatattgatctttcttcatccaggcagggtcatatatatttcagaaatctacgaaaaggccatcgtatatttttctctttattactattttcaaagaagaatctacagacttcttattttactattattatttttttgagacagaatctagctctgtcgcctaggctggagtgcagtggcgcagtcttgactcactgcaacctctgcctcccaggtttaagcgattctcctgcctcagcctcccaagtagctgggattacaggcacctgctaccacacctggctaatttttgtatttttaatagagacaggacttcaccatcttggccaggctggtctcaagctcctgacctcaagtgatgcgcccgcctcggcctcccaaagcgctgggattagaggcgtgagccaccatgcccagctagacttcttattttaatggtgataatctatgcttttttttttgagatggagttttgctcttgttgcccaggctggagtgcagtggcacaatctcggctcactgcaacctctgcctcccgggttcaagtgattcttctgcctcagcctacctagtagctgggattacaggcacatgccaccatgcccagctaatttttgtatttttagtagagaccaggtttcaccatgttggccgggctagtctcgaactcctgacttcaggtgatccacccgctttggtctcccaaagtgttgggattacaggcgtgagacaccatgcctggctgataatctatgcatgtaagaagttattttaatacgtcacctaaatccctcatttcaataaaaagtcattttttattgtccacttctctgtgttgtaggtgaatgtttattttgtctcatacagtatctttttaaaatactctgatttcttgggccttatgttatttctatagtatttataaatatatggcagaattctccttacattactgctaccactttaagtttttggttgagtaagatttgtctttgtttcaaagctacagtatttacttcccaaactaaacacaaagtagagcagcagaaagttatttatagttcatgtctagttttggggtttattctctgtcttttgggtgagcagatatattgatatcagttaattttattaatacatgttataaaacattaatcattgttgatagaaaggtggttttggctgggcagggtggctcctgcctgtagtcccagcaccttgggaggccagggtgggaggatcacttgagcccaggagttcaagactagcctgggcaacatagtaagacccctgtctctacaaaaaaatcaaagaattagccaggcttggtgaagcacatgtgtagtcccagctacttgggaggctgaggtgggaggatcacttgagcatgggaggtagaggctgcagtgagccttgattgtactccagcctgggtgatagagtgagatcctgtcccaaagataaagaaaggaagaaaga

SEQ ID NO: 61571 - DNA, 1286 bp, Homo sapiens
tttaattaaatacatatgtatatatatatttttgttttgtttttttgttttttttgagatggagtcttgctctgtcaccaggctggagtacagtggcatgatcttggctcactgcagcctctgcctcccaggttcaagtgatttccttgccttaacttcccgagtagctgggactacaggagcgtgccaccatgcctggccaattttttgtattttagtagagacggggtttcaccatgttggccaggatggcctcaatctcctgacctcatggtccacctgccttagcctcccaaaatgctgggattacaggcgtgagccactgtgcccagccttaattaaatattttttataaaagcttatactgtgaagaaattccttaagggactatagagccatttcttgatggatttggatatctttgtttttaaaaatatgtacactaccctaaggtatgttaaggttttataatgaacaggtacgtggactaattcaggtagctttaggcaatttaatagtatgtttcaataattttgtgatccaggggatactttttacttgtgatggaagagtcagtacaaattttccacagtatcttctgatccttcgctttaaccttgcccgtcatttcttgccaaccttatcatatttttttcaggcagcatctgtacagaagtatttttagtctaaaggaaaattcatgtctgaaagtgtctaggattgagagcagagtaatttattgcttagcaggcaattgttactgctctttttatgatgctgatctttaaattgtttagttagcatcatgctataatgaggaaagctgagaaatgttttctagaatttttacttgatgaaatttggagactaattctattaagtaatcatttgattcttaaaaaacaaaaataaataaaaatcagtttaaacaaagttggcaacatgtttgtattctttaatgaaatagcatttttttccagctgggtgcagtggctcatgcctgtaatcccagcactttgggaggccgaggtgggtggatcacctgaggtcagcagttcaagaccagcctgaccaacatggagaaacctcgtctctattaaaaaaatacaaaagtagccgggcatggtggtgcatgcctgtaatcccagctgctggggaggctgaggcaggagaattgcttgaacttgggaggcagagattgcagtgagccgagattgcgccattgcattccagcctgggcaacaaaagcgaaactccatctcaaaaaaaaaaataaataaataaaa

SEQ ID NO: 61572 - DNA, 2747 bp, Homo sapiens
tgaacctgggaggcggaggttgcagttagctgagattgaggcactgcactccagcctgggcgacagagcaacacttcgtttcaacaacaacaacaagaacaacaacaacaacaacaacatttttttgtggtttttaatttttttttttttaagctcactagctattgttagtgtattttatatgtggccctagacaattcttcttccagtgtggcccagggaagccaaaagattggacactcctggtctacatcttttgtcaaaggcacccaaaatgcctagtagccattttaaaatagtttgagtttcttatactaaatcatagtatgctaattgtcgacctatgatgattcttcctttggctgctgaacttggattcatatgtagattgattgtactataatttcctatatataagactttttctaatatatttgaaaagattatcattgttcttgatgtgcttgaagtcataggatttgccttgcattgtgggaggaaatttatgatataagtgaaaacagttcagaaatggagtgatctcaattacaatctagtcaactaatgccttttttttgagacagagtgtcactgtgtcacccagtctggagtgcagtggcatgatcttggctccctgcaacctcagcatcccaggttcaaacaattcttgtgcctcagcctcccgagtagctgggattacaggtgtgtgccaccacactgggctaatttttgtattttagtagagatggggtttcattaatgttggccaggctggccttgaactcctggcctcaagtgatccgcctgccttggcctcccaaaatgctgggattatagacgtgagctactatgccccatgcctggcctaactaatgacttttttttttttgagatggaatctcactctgtcatccagactggagtacgctggtgccatctcagctcactgcaacctccgcctcccagttcaagtgattctcctgcatcagcctcccaagtagctgggattacaggcacgcaccaccaagcccggctaattttagtatttttagtagagacagggtttcaccatgttgaccaggctggtctcgaactcgtgatctcaagtgatccgcctgccttggcatctcaaagtgctaggtaggattacaggcttgtgagccaccgtgcctggccatgactttcaagaagctgtttattctggttacttttttgagcagttacattaaatgtaaaacaaaataaaaatagtaagaataataactaacgttttgtaagtgttaaatgctggcactattccaagtgctttacatttattatctccttgacttgtcacaataactgcaagggaggtagattattacccttattttacagatgaaaaaatgaggctgaaagcttaagtgatttgcccaaggtcactgatagagctagtgagtggtgaagccaagattctgacgagacagtctgacctcagagctctttaccactgggcagtacactggtcaacagtggtggctttttttttttttttgagacagagtctcgctctgtcgcccaggctggagtgcagtggcatgatctcgcctcactgcaagctccgccttccgggttcacgccattctcctgcctcagcctcctgagtagctgggactacaggcgcccaccaccacgcccggctaattttttgtatttttagtagagacggggtttcaccgtgttagccaggatggtctcaatctcctgacctcgtgatccacctgcctcggcctgtggtggctttttattaacagtaaaagtatctcttccagttcttcaaatgattagaagcagttttgccccaacaaatagatttccagcattttaaatttggtagatgcaatgagcttattatagtttttaaagtagatactatttataatattagcaatatggaaaggcagtagagaaagtagtaagtctgtgtctaattagattgaacatcatcatcattccgatgcatgactgctaggaggaatacaatgcaagttaaaatagaagggctccttcctttctgaaatgtaattgcacatcttctgatagtctggaattcaaattgggtattaccacactggcttcttagcataaattctttgtatttatttaagaaagctctcttcggtgaggtgatatggaaatgaattaaaccactgaagataaaactttatctttgacttggtgagggaactcctaaaggatagtattaatgtttctcattaaaagtagtaaagctcaattaggtcagattatgaggactttggaaagtcacatattctaagagagacttccattatcactgcgcactttgtagcattaagattccatttgaacatttgagctttagcatttttataaaatcagtttagttccatttaaaataaattccatagtatttcactttagtgagaatgtcttcataaaatttattaagtgtcaagtcttggtctgtttccagtgtagtacataatgtgggaattctcattctaggttggcatcgtaattggaaggtgggacactttcagtatcaagtagggcttctgatgttttttctgttgaagaaatatttgtattagaatcttacaaaaagccttcaaacataaacaaaattacaaaaacagtgatactgtcaataagaaaaaaatcaaaatgatttttttttttttggatacagagtcttgctctgttgcccaggccggagtgcagtggcg

SEQ ID NO: 61573 - DNA, 1770 bp, Homo sapiens
tggtcttggcttattcagttgtttattctatttctcctgccccttttagagagatacgttgttagggtttttggcactgttattaatatgaaatatttctacaaatagaagataaatgtacatcctacagcagttgcttgagttgtttacacacatgaattagataagtttatttttagattttcttttcttctgttttctccattctgttttctcctcttcagtccccttaaccctgccctagagcagaccctcctcatctgttctgggacttttccaatagcctgtactttatgaaggactattcattagtccatattgttctttgatgtggcaggcttccagaagtctctcagccctaggggaattgttcatagtctcaggcaactctggatcttttttggcagaaatgtgtatattttttatctgctaattatagagcctgaatgtcctcctctctgttgaccttcttagttttcctttgaattggtatcctttgtgttgcagatgtcatctttcttgaagagtgcttgattatgtgtatttaactgaaaatcgaataaatctctaaatattgtaaaatatgctcttcaaaataacctgcattttggaattggtatggataaagtcagttttagaatcactaaagtcagacagaaacctattgtaatgtgaaagacgaggtggatcaaatacttgctgttccagggtcatggaaggaaaaaaattgcagttcatgttcttcttataattaagcttcagaagttcttcacaatagcagtgtctgaggactgcttttgtgagcaggtagtaccagttgttgagacattgttgagagagcacatgaattgtctcaaactagttagttgggtcaagggaaagataaaatgaagggtgaatgagtctttctattgtactctgaggcatgacagcgtgttccacttttgagcttttatcaagatgggacttgtctagacttctaatgaaatgggcttcaggtaaagtagaaacattatgtcaagaggatttttggttgttcaaatgaatgttaaacattcttttaactctttggatcttagatagatttgatagttgtgatacctttactgtatgtaacacatgatcctgtcctgaatgatcagcagctttcaggagttactcttgtattcccagctacatttgtgatactttcagtgctaagaaaatctatattctgtagctttgaagttatttaacagttaagtactatttgctggtttattctgattttgtcttaaatgacaaatattttattcatcctttctcttcaaacattatttaacaaatgtacgttttaatgtttctcaaaaatgaaggtctatattctttttatatgttttatctttgtatgttatttctttcatctttttttttttttttttttttctgagacagggtctcactctgttacccaggctggagtgcagtggtttgatcatggctcactgcagcctcgacctcccgggctcaagtgatccttgatcctcccacctcagcctcctgagtaactgggactacaggtgtgcaccaccttgtctggctaatttttttttttcttttttttgagacagtcttactctgttgcccaggctggagtgcagccgtgtaatcatggttcactgcagccttgaccttcccaggctcaaatgatccatcctcccacctcagccccccaagtagcttggactacaggcacacaccactacacccagctaatttttgtattttttg

SEQ ID NO: 61574 - DNA, 2337 bp, Homo sapiens
ttgttttgtttataaacttccttttcttggccctgtgccttaaactacagtagattaggtgaaactgttctctgatcacactagcatttaaaatatgaacctgaatcttctcaggtactttgatctctccaatctattaatgtttctgagtacataaacatcaattagctcaccaaattaaagttagcaaatgcgtcagccatgtaatttgcatgtgacattttgagttagcagggccaagagggaagtatgtttttgtgagtgggtgtgcttatctctctgtcttcaggtggtgatggaaagttgtacatgtaagagaaggagttgtggcagtggatatgtgaaatgctaactgtacatatgcctctgcttggggcagaagcactttaccagagaagtctccaacagttgcaaactacatattctttttccttatataagtgaatcttttaattagtgtaatattatgtagagtgtatgttttttctgtttttttttaatgaaaggtgatattttgataaatctgcaaaatgagcaatatagacaacattttagagtgaatgatactagatttaaactatgaggctggtctctgcaaagatacaaagtaaatactaatcactggtctaagcaaaatccaggaaggatttttgttaatttgacaagtgggtttagaattctttagccactattttttagaaaccagctttgttcatacatcctttctctaatttgcctcacttttgatctgtgataaaccagctgcaatttggtttcattaacaaacttaactggtcaacagatgttttggctctattttgtcctttctattagaaacagcataggcgtacacagaaaccatgctgggccttttcctgtctgtagctcgacaggcgttacagaagagcaacctaactttacttacaagttcaatttttcttcctcagtatttttattataggtatacaaacattgtagttttgtctcccccatcaagtcggtcttttgttgttaatcttccatctgttagtccagtatacacttctcaccctgctttttagcattgcaaaatcttagcatgcagggaaaaaggtactattgcaggagaggtaattgagatatcagcgactcttccacaattcaagggaaggagtggaactagcctggtgaatttagataatttcttccgtcttctttgatgtcagtgagctgccatatggagagcagtgaggcctgcaggaaggaggtgagccttggtctgggctgcctagggtgttcagagtgacatgggctgagagccagaggcagagcttgactgtttctgttagtagtttctgatgtgaccagccctgctttttgtccaaggtttccctgtcatgcttgccaccctatgggtatgatgaagtttaagaaacagatcataaacattatcttgggaaagagaaacataagaacatattaaaatctagtaataaggccattaaaagatgactcccatttgatatttgaccaacttgttttcaaaattagtattgtaaacacttctgtcttataacaaaacccagctttagctgttgagccttgagttgtgagtaaagcagcagaaaacaggatctgctagtggaagagtattggctgtttgaagaacatcagctgttccaggtagactcctggcagtgtgtgagcagacctgggaaaggcaggcatggagggagctaggaaaatacttctctcctaacctttataatttataaaattagagtatttcataaatattaaaagagtagtacagtaaacactctatttctttcacatagattcaccaattttaacattttgccacattctttctcttcctatatgtgtgtatatgtatatgtttttatacatgggtgtgcgtatatatacagcacatttatatattcacaattttgactaaactgttggaaactaaattacaaatattatatttcacccctaaatacttaataatatatcaaaaatgttctcttatatactatactattacgcaaaaaattcggcagtggaatgagtgttaactgacagtccatatttccccaaatggccccaaaatctcatttataacttttgactttttttgagatggagtctcgctctgttgcccaggctggggtgcagtggtatgatcttagctcactgcaacctccacctcccaggttcaagcaattctcttgcctcagcctcccgagcagctgggactacaggtgcgtgccaccatgcccggctaactttttttatttttagtagtgatggggtttcgccaggttggccaggctggtcttgaactcctgacat

SEQ ID NO: 61575 - DNA, 1149 bp, Homo sapiens
tggcatgtgcctgtagtcccagctacttgggagactgaggtagaaggattgcttgaatccaggagatggaggttgcagtaagccaaggtcacaccactgcgctccagcctgggtgacagagtgagactctgtctcaaaaagaaaaaagaaaagaaaaaatactgtatgggggatgttgtatatttcttcttgtgagataccaggagataaataatttcagcttgtctcattactggtggtgcttagtttatcagttggttaaggtggcatctgctagatcttcgtttataaaggcgccttttcccttttgtaattaacaagtaatctgtgcaatgatactttgaaagcatgtgagtaacctttcacccagtgtgtattagttttctattgctgctgtaacaaattacagcaacttaatggtttaacacaacacaaatgtattgtcttacagttcggtaggtcagaagtccaacatgggtttcttaggttaaaatgaaggtgagggcaaggtaatgttcttttctggaggctctaggagagaatcttttcccttgcttttttgagcttctagaggctgcgcatattccttgactcatgatcccttcctccatcttcaaagccagcaatgttgcatctctctgactgttctttcacagtcacatctgcctcttaccacagcctggacagtttttcagcttttaaaggatgcatattattagattgagcccatttggataatccagataatgcccttatctcacagtccttaactttatcatatctgcaaggttattttgccaggtaaggttctgggcattaggaagtagacatttttgggggagcccattattttgcctgccacacagggtttagtattgtcacctaaatcaaattttgcattgggggttgcaaatcattgaaggttttgggctatggtgaaccatgatcaagtctgtttagaaaggaaagagggccaggtgcaggtagctcacatctataatcccaatgctttgggaggccaaggcaggtggatcacttgaggccaggagtttgagatcagcctggacaacatagtgagatcccatctctagaaaaaatttttaaaaattatccaagtgtgatggcacagaactgtagtcctaactactt

SEQ ID NO: 61576 - DNA, 2007 bp, Homo sapiens
cacctcccaggttcaagcaattctcatgcctcagcctcctgagtagctggaattacaggtgcctgctaccatgcccagctaattttgtattttttttttagtagagatggggtttcactgtgttgatcaggctggttttgaacccctggcctcaagagatccagccacctcagcctcccaaagtgctgggattataggcgtgagccactgtgcccagcatatatctataatttaaattagaaccctcaatcagagaagtctaaataggctgaaaaagaaactcatttatttaaaaaagaaaaatgacatgcagatggatgtatattatattcttttagtttttagtaaaaattcagaaaaataaacatgaacttgaggtaacgagcctctagaattcttcattttatttcatttcacaatgtttcagcagtcttctgcagttagttggaaggttttggaaattctgactaatccagttgttgaagaataactagttagcttaataaatatgttttctagagctgataaaaaagatgattttttcatctgatgagctctgaccctctataaaccttctaacttaactcattttccaccagctacagaaatgtaacaagatgccaacaattacatcctcatggagcatgtatactagcttataaaatcacccctttgttggaaaattgtgtaatatcttgatttcaatttagcatggcatgttggttagcagtaaatcttgctagtgtatgaacacaagcctgcaggcagtttggagaacattgatcaggtgtaaattgtatgtatttttctcgcttctaaaaattttatagcagaatgaaataaagagctagcattgagaacactttttcagttgttttttattttttatttttatttatttttattatactttaagttctagggaacatgtgcacaagtgcaagtttgttacatatatatacatgtgccatgctggtttgtaggttgttttttattttgacatgtatcttgtggaaagtgccttctctctcctgaaatccatgatttgtgtctctgaccacttaggttccccatttagtatgtgacacatagcaaaagcaaacaagcatagttaaaacgtgtatttgtgccttgtgaaatgtgcattataagcagttaatactagatttgaaggctgtacaaaaaacatgcaaaaagatattaatattaaatacttagtgcttattgtgtatattaagcatttaatatatacaatataattttgcatgaactctgaaagataagtactgttattaactgaattttacagatgaagaaacaggccaaataaggtgacttgcccaagagtacacaggaagtattggagctggtgtttcaatcctggtgcacaggcagagtgtagtgtagtcactttatcaccttctgcctctcatttcttcgggcgaaatcaacacatacctagtgaattcttgcaatatataaaacactgtattaggcacataatatggaagttaccacatatctaaatggtaataaaagtgatcagttgaggctaggcatggtggctcacgcctgtaaccccagcactttgggaggccaaggcaggaggatcacttgaggccaggagttcgagaccagcctgggaaacatgacaaaaccccatctgtaccaaaaatacaaaaattagctgggccaggcgcagtggctcacacctgtaatcctagcactttgggaggctgaggcgagtggatcacctgaggtcaggagttcgagaccagcctgaccaacatggagaaaccccgtctctactaaaaatgcaaaattagccgggcgtggtggcacatgcctgtaatcccagctactcgggaggctgaggcgggagaatcacttgaacccgggaggtggaggttgcgggagctgagatcgtgccattgcactccatcctgggcaacaagagtgaacctccgtctcaaaaaaaaaaaaaacattagccgggtgtggtgacac

SEQ ID NO: 61577 - DNA, 4039 bp, Homo sapiens
tggggaaatactgtatcaggtgatttcagtgtaatgtgttagaatgaaagtaaatttttatattaaatactgtttatagtgcccattatgtcttttttaaaccttgtatgttggtttatcatcatcattattattatttggtagtctcgataactagagctagctgcatggttagctgcgtgatgtcctggcttagggcagatgtcagatattgcagtctaaattattattggggtatacttattctattttatgatatgcagtgttgcctgactctcgaagcataataaagccaattgagatctttaaaaaattaattattattgatttcttactctgaagttgctcttgtagtgggtttttgctatatatattttttctttccttctttttttcttgctacattgttcctgctgttatttggaaggcactaggacattttgcctcttgaacaatgaaaggatccagatcgtgtctgtctcacattttgttatcccagtacaagactcaattgaataaaacatattacccatctggcctggaaatctcagtggcactcaaaataacttactaacaagttgttggatcatgatatcttgagattttctgaaagttcagcttctttttagctgttgctaagagagaaatttcattgacatgagggacacgaggacatgtctgcacactgccagttgttttagaggcatttggctctgccgccttgcagatggttagactctgggtggtgggtgaatgtatgctgattatcttattgaattaaggtaaccttttgtcattcattgaattctgcagaccagttggtcagtgagcagctgctccatgtggcttggtttgggttttgaagtacacaaaaactatcttaaagggtggtcagtctaatccaggtattcaacaaagcaatattgaaagccttcttccccttttgacactgttttctgttctgatggaagtgaatgagcaaaaatatttttactttttgctcaattaactaaatgattgaagcaaaggtttatggaatggccgaataagaattttttaacctagtgctttaagttgaagaaaatacactttcataatatttggtgtcagaaacattctacttttatggcatggtcttatgtttgaagatacgtggtagagtttttaaagtttatttttacaaatatctagaaactaaaaagcattcttttttatcatgcatgcttaataacatcatcttgacaaatactagctgcataacttttggtttgtagggttgttttaagatcagttttttgtttgtttattatattttaagagacggtgtccctgtcttgcccaggctcgtcttgaactcctgagctcaagcaatcctcctgcttcagcttcccaaataactggaataaatctgccatattttttctatatggcttccatttcagtttctagaaactctttcaggaggcttcattttaaataaagaggttcttaattgtttttagtaaattgctgaaattgtatggctcatttctcttctcagagatttttatcttgagctgatccttttggttttactgaaggtgcaatataggtaacctcagagaaagtgactttagccactagttgatttgcttattgtcagagagaaatcatttaacagtgattgatgaggaactgtttaatttctccagtttagtcacctgttgggccctagagcctttcgattcagagctcactgtttcatttgcatttatatcctagtaactatcataatgtctaccagtatttattaagcacatattctgtgctgggtgtcgccgtttatatatgctctttcattttgtcctcaccacaactttatgaggcaggtcttgttagctccatgttagagatgatacagcagcctcccagggatgttcattcacttgtctggtatcatgcagatagttaatggctgggccatattggagtccagggccttcagactctcaggctcatgctcccttctgccctgctgctgttttaatgaaaatcagccttgttctgaaccacagttttacaatgaagcttaagattaaactgaaaatgctcaagttctctgttagggcttcagattctatgtctatacttgtcttattaatggtaaaaataatgtaacaacattaaagaaaaattttgaagggtgaaacactgtttagactcttgccaccttaatacaaccgttttgtttttgcttatttccttccagatttgtttatgcgcgtgtcctttcacacaactataatcaaagcatatatacagctatgcagttttttttttaaacatagtgttattttatacatattttctttttaaatgttcttttttgtttttgagatggagtctcactctgttgcccacccagactggagtgcagcggtgcgatctcccctcagtgcaacctctgtctcctgagttcaggtgattctcctgcttcagcctcccttgtagctgggattggccatgcctggctaatttttgtatttttagtagatacagggtttcgccatgttggccaggctggtctcgaactcctggcctcaagcaatctgcctgcctgggcctcccaaagtgctgagattacaggcgtgagccaccacgcctggctttaaatgttgttctttaaaaagacttttcccacctctttgaatttcccaatctcaacgaggtcccttttataattcgaacaaaggaccatatgctttttcttattagcctttattatagtctaattatgtatttatttgtctggctattttgtaacttaagttgtcccctctaaatggaaaagcttcatgaagacagggaccttatttctgctgtatggatgcaagcagttatttattaactaagattaagcttctgtttatctgttacctcatctgtcagaaacagttggacagattttcaccaaacttagaaggtttttgaagggcatctgtggtgatcaggagacacatgacatatattttctgatcctgtgtctgagataacatacagagatttcaaacatgagacctggctgggtgcagtggctcatgcctataatcacagcaatttgggaggctgaggcaggaggatcagttgagtccgggagtttgagaacagcttgggcaacttagcgagaccccacctctacaaaaatacaaaaattagacaggtgtgatggcatgcccctgtagtcccagcgacttgggggtgctgaggcaggaggatcaatcacttgagcctgggaggttgagtctgttgagtctgcagtgagccatgatcacaccactgcattccagcctgggagacagaacaagactctgtctcaaaagacaaaaaaccccacgaaaaaccaaatatgagaccatgagacctatattgaagggcccaagggcagattgtcaagatggcagaccttggtttgcactttagagttgggtagcttcttaacttgggctgttccacatcttaatctaggatgagcagcaacaaggatgtctttatttaataatgaccaacaagtctcccagtcacatactgactaatttcaaataaatgcatttgatcttttcattttcattttgcttgtttaaatataaattgtctattgaaagagtttttttttctttttgagacagagttttgctcttgctgtccaggctggagtgcaatggtggatcttggctcattgcagcctccgcctcctgggttcaggcgattctcctgcctcagcctcctgagtagctgggattacaggcatgcgccaccacgcccagctaattttgtatttttagtagagacggggttttccatgttggtcaggctggcctcaaactcctcacctcaggtgatctgcctgcctcggcctcccaaattgctgggatgacagatgtgagccaccatgcctggcgtttttttgtttttttttttgatatggagtcttactctgtcacccaggctggagtgctatggcacgatctcggctcactgcaacctctgcctcccgggttca

SEQ ID NO: 61578 - DNA, 2525 bp, Homo sapiens
aggtcctgtagtccccatgggaataagaaagcaaaagacaaattcacttgggtggttactgtaggttgtcatatgttgtttatttcttcagtgactgataggctgtaagtctgtcagtttcttagttgttttcttagttgatttttcttttcttttcttttctttttccgagacagagtcttgctctgtcgctcaggctggagtgcagtggcgcaatctcggcacactgcaacctctgcctcctagttcaagggattctcctgcctcagtctcccgagtagccaggattacagccatgcgccaccacacccagctaattttttgtagttttagtagagacagggtttctaccatgttggccaggctggtctcaaactcctgacctcaagtgatccacctgcctcggcctcccaaagtgctgggattataagcgtgagccaccatgcccagcctttcttagttgatttcatagtcatcctgtacttccagtcttgccattagcaaatattgagtacttgctgtgtgcagggttagaagttacttctttgtgtgagatctatgttttgtgtgtgggtggtgtgtgtggggtgtgtgtgtgtgtgtatgtgtgtgtgtgtttgtgtgtttaaaagtagacttttttttgaagagcaattttagatttacagcaaaattgagtggaaggggcagagatttctcatgtactccctacccctacacatgcacaattttccccattatcaacctcccccaccagaatggttgttacatctgatgacacattgtaattgcacagccttatcacccaaagcccatagtttacattagggtttactcctggtgttgtatattctatgggtgtgagatacatgtttaaaaatattttgtattagataaattggggataatagtcatttcaagaacaaaatgttggataaattaaattagctaataaacacagagtgctttaaacattcctagtgcaaaataagatcttgttgtttgtggtggtggtggctattcaggcttaaggtctagattccacttagtatgtaagtaaataatagcaatcctggctgtcatctgtatgtgtaatgtagtaatcagttttgtttagctagttcttatgtgtagcacattaaagcaatcttgaatagtgaggggacctcattactagattaccattaaatggtaatgttaagtgaccctgaaaccaaagtaatggaaaattgtcttcctttttttctttttttttttttttcccttgagatggagtcttgcactgtcacccaggctggagtgcagtggctcatggcaacctccacttcttgggttcacgagattctcctgcctcagccacccaagtagctgggattacagatgtacgccaccacacccggctaatttttgtatttttagtagagatgaggtttcaccatgccggccaggctgatctcgaactcctgagctcaagtgacctgcccacctcagcctcccagagtgctgggattacaggcatgagccactgtgcccagcctgtcttcctttttctcaaacatttaatttgctgtttcttgatcacatatcatccttctttcctttcaaggtcaggggagataattttttactgtatgtactgctgcatcttcacacaaattatcatctgaaaagccttctcagatttgacaaatgaagtctcttttcattcccaggaggaacttgttaaaccaatgaagttcaaaattctaattcctgttcctttctagtgtgcaccactttattcatcttgaataaacatacaacctcaagcatcctacaaggcaaatagattcctttttaattagtggctctatacacagagttttatcatcatgaaatttataaaccaggaagggaacaaatatttacacttgcaacttcatgtcaacattgcctactatttgaagagctctgaaattgtaaatgtatcaccccctccttcttcccccactccccacccctgccggcttttaaactatggcagtagaaaaataggtttcaactttctaggagcacatctctcctatgtggggaatgtggcagattctttatataagtgctctttctttgtgactggcattacttttttttctcacaaagatttgtttcagaagctaatcttcatttttttggttgttgctttttgtagtactatttctaaggcatctccaagtagaaaggcaaaattttattttgagaagttactgctttcatagttacacagaattatttctcaatttaagtaggccttttattccaggacaaaattaagccagtcagaaggtttctgggagaaaaataatgaagagctgaggttttgtatgttaatgtgggcagtctaatgcttgataaaagaaaacttttggctgggtgtggtggctcatgcctgtaatcccagcactttgggaggccgaggtggtcggatcacctgaggtcaggagtttgacaccagcctggccaacatggtgaaactccatctctactaa

SEQ ID NO: 61579 - DNA, 2722 bp, Homo sapiens
tcctgcctcagccttcccagtagctgggattacaggcatgcgccaccacgcctggctaatttttgtatttttagtggagacagggtttcaccatgttggccaggctggtgtcaaactcctgacctcagataatctgcccacctccgtctcccaaagtgctgggattacaggcatgagccaccacacccagccaagaaaacttttaaagatgtgtaaatatgcagtgatttaaaaatctcagttgaagcttgttaaaatgtatcaaaataatttaggaaaaggggggctgattttgccaaaatttgggagatgcatactttttttcaaggctttactgcagttttaaaaaatattttattgttttgtaggcagcttctgaaccagagtaggctcagagactccctttattgcagttttgatgctgcagaaagtgactgcttaatttcagctgttgaggatgttggttatactatgcctggatcaaaaaaatgattttacattgcttagtttgttaaaatatgtttaataggttaatctttttttcaaagcatcaaaaataattaagatgaaatatcagataaaccctatgtctagaatgaataatttagttctaaacatcctggatgctaaggagaaaagaacaagatgttggtttataaaattcttattgtcaaataaagaagcatagaagtttgaagaaagataatttttttgtttttattttttctctctgaatttaggagtaatttatgtttgggttctaatcctatgttatcatcaaagagtaataacattggcaatcttccctcccattctgcttcatcctccccactaaagggaaataccagattgtaaaagaaaaaaaaaaagcatgctggttgtataaaaagaaacattttaaacaaataagaaatatatatattgaaatgcagtctccctgaatgatgctaaacccctgtccaagtaggcatttctcagcccacagaaagggatggcattaaatcacagctcaatggagacatttttatgaggagctgtgatggtttgtgtttagcaaacatgtattgggcatctcagatttgcctgttagggatgcaacagtgagtgagatactatttgttcccttaagaaactcaaagaggaaaggggttgacttgttcagtcagtgacttatgaaatatttcatactcattcatttacagagtactttttgtaggtatagtacagcgtggtcagccagggagactatagtgggtgcattagtaactaaccatacaactaatgctaatgttgcgggctgactgggtttggggtgaacaaatgacccctaaagctcaggagttctagaccagcctgggcaacacagtgaaaccctgtctctactaaaatacaaaaaattagccgggtatggtagcatgtgcctgtaatcccagctactcgggaggctgaggcaggagaatcacttgaacccgggaggtggaggttgcagtgagccaagatggtgccgctgcactccagtctgggtgacagagcaagactccatctcaaaaaaaaaaaaaaaaaaaagacatttgttttggctggggaaggctttgcagagggaggtaacttctagattgagatttgaagtcagagtccatccagaaagtagggaagacattttatgtagagaagtaacaagctacagggatcagaggtatgaaccagggtgcatgtttgggttatggtgagtggtgtctggccaaactgtgtggctcagggtctttctgcttcaccatctttagcatagaagccttccttgtgctcacttgctcatctcattctcacaaaatagctgcttcatatctaggcaccatctctctattcccacaggggaaagagggaaagtgccaagggtaacagcggaaacgtcttcctttttattcaggaaatgagggactccccaaggcttctgcttatatttcattggcttgagctgagccgtacaaccatcactagtggcaggtagtctgggatgtcaagaaagtagcttcccagtctctttggttagaaggcaaaggagaagatggtgggaatcggtttgcatcagtcactctacacattatctgctttgttagggcagcattatcttagtattgttaccaagttcagggtcttttctggggtgatcaagcatcctgggtcgcctgggaccaagtggttttctgggttgtaggactttgagtgctatagcctggaaagccctaggaaaaccaggatggttggccatcctagtctttccccatatcctctgttgtccaaaaatatggaagcaggtcatttcttgacataggagctgccttgactgggcttaaaaaggcctgaaaggcagcttaataatttacaatgagaaataaatgatattggatcaggggaggatactggaagaagagctccatgggatttgcttggtgctcgtgagattttgactgacaagagatcttagggctactatattacccaaattcaggggactctgttcactttgccagcagcctgggattaattctgtagtgctaatgccattctgagaagcctttcaatgaatctgagctcagggttcttagtccccctgttactgaagcttctccccagacagtgtcgtttttgttttttccttcctttctaagcttctggtgctgactagtctccccttctaatggacagtgtttagatacgttat

SEQ ID NO: 61580 - DNA, 4591 bp, Homo sapiens
tgttggccaggctggtctcgaactcctgggctcaagcaatcctcctgccttggcctcccaaagtgttgggattacaggcgtgagccactgttcctggccttatcttactctctctttttttttttgagacggactctcactctgtcttccatgctggagtgcagtggtgcagtcttggctcactgcaacctccacctcccaggttcaagccattatcctacctcagcctctggagtagctgggactacaggtgcagctaatttttgtcattttagtagagatggggtttcaccatattggtcaggctggtctccatctcctgacctcaggggatccgcctgcctcggcctcccaaagtgctgggattataggtgtgagccactgtgcccaaccatctttaagcctccttaaggaggctgtgtctctaacatgccctgttggttttatagttggactctcactggacagcctcgtttttctaagatttgggggttataaggatcagagttgtccccagttggctcctttcacctcgtccataaggttgttgtgaggcttcactgaggtaatctgtataaagtaaggtgctggcctgtaccctgtacatcactcagtagtggtgatttcactgccctttgcctcctgcctttggcttctggctatctccaaacaccccatgccttctgtgctccaccctctgttgaaacacaggaatctaaaaccattcattgatactttttgagtgattatactgaaaacaattgcatgttgtctcatgcagaattttcgtgttaaaccctgtgttgcaaggatgccattaaccagcacacagatggcggtggagattgattgattgagatggggtttcgctgtgttgcccaggctggagtgcagtggtgtaatcgtagttcactgtaactttgaactcctggactccagtgatcctcctgtgtcagttttccaagtaactgggactacagtctcatgtcactgtgcctggctaatttttaaaattattttatagagctggggtctcgctatgttgcctaggctcttctcaaactcctggcctcaaagcgatcctcctgcctcagcctcccaaagtgttgggattaccagcgtgaaccaccacacttggctggggatggagttttagacaccagaggcttccttccgaggttgacctagaaagcacccttggtgggtgccatgggatgggggaatacagtcaaaaggaacctgctcttcccgctgcgcctccacctgaggtggatgtgtctgctggggctgctggagtctccatcttccactttaacttcacttaagagctgaaagctctgccccttcttcaagattttccctgctgtctccccttccctgctcaaccagagattcctcttattcttcctcttgctattagtattaatctggctcactgactcttttccttaacctcatcctaaaactgtctgatgcatattttatattttcttgcatgtttgacttttagttagtattttacagtaatttcgttctgcagccatcctcttatctgataccctggaactcattcctgtgcctatcagttctcacctctggtaattaaactttgtaaaaaagaaatgtgacatttggacatattctcttattagtaaaggtattattgtgtatgagactaatgctgtgcatctataataagttgtttcaccttgtgaatactaatgtaatttggaaataaacctttctttgttaaagactttttctacatgggccacgtttttccagacctatttcctaataatttgtggtttttaaaggtatgtcaatagagatgctgtagccagcatggctggattctgttagataaacattttgtgagattgcttaccttaaacaattgtctttaaaagttaatttcttccctaatgtgtcagtaaggaaattctatagtatttaagaagcctgataaagtccagttaaaacattttgcattgctctttaaacatcttttctgagggttgatgtgttcgtgtttgtttggttcacatagtttcttctgaattttaagaaagctttgtcagaatcagtaacttgcctatagtgtatttttcatgaccatatggctttcttcatcaaaaacagctaagtaaaaatttcagtgaataatagtatatatatatgggaatgtattcctcatcatttgtatgctcttgagagagtgactcatgtactgttttctattgagttcccgaaagtttataaagagatgacaaacaattggctatgggattgaaataatgcacatgtaaaatggaagggaaaacatggaaacagtttcttcctttgttcttcccttaccttgatgaaatttttaccacttaacgtttttcagtaaagtcaaggtcagtatcagagcctagtacggttctgcttgccgctgtctgaggattacctgtcttattacagaatgtacatgctcccagaggagaagatacagtttgatttcaggatgacaaacagctcttctgggacaatagtgtcaagtataaaaggattataaaggttttaggaccatgggatggtttgaaggggaaagggtgaaatgacagttaaggttggcatcaccgaggtcccagttgttggctgccccctacttctcctgttcccctctggcagtattttacagatgtatttcctttgacctttcctttagtaggaagttgtaggctttaagatccagcagaaaaaaattatgagccatttgtgaccctcttgagcagtccttcaggtagaacacatttcataagagctagtgaatggtcttgggtaattaaagctcactttatgattatacagtgtggtggccagcccagagggaacatcacaaatacacattatgaatgtatagaattgagactttatacctggagactgttggatgacctggtcctctgcccccaggcctacccttctgcccatcctcatccaattctgttttgatttttaaaaagtatgtgcttcttagccctctcattgcttcactgtgaggggaaaaacttttctattgaggtgctgaagctgtgctttccaggactcatacttatgtgctgttgaatgagtctcagtgctcctaggagtctataaaaggaatagaagacttcttttctctaactcccttatggtttgtattttatctgctaagagacactggcatttcatggagatgggagagaaaaagacacagcctacttagacagttcctttattccaacatatatactcacttcacatattcatagacaccttccacctagcatcaaattctgaactcatagaagacttaggtgtttttggttttgtatgcatagcttttgaaatccctgggttgaaaattttctaggtgttgtttgtatgctctagtcaagcccaggacataaagggttatgttaaaattactttccttagtgactattaaccagaaattttatctgtcaggagaaaggattcatgcaactctaagaatgcattgccctctgcataggctattagctttggcaaccgaagatagatgagacttaggctgtgtttaaatttttcattgtgatgagacaaatctattattataaaagccctactttatcagtgagagtgtttccttatgttgttttaattaaaggagcagtgtgtttttaaatttaattatggtaccttgaagatctgatactagctgtaagctaaggattctttgggttttcaagattttttttttggagacggagtttcactctgttgcccaggctggagtgcagtggcgtgatctgggctcactgcaacacctgcttcctggtttcaagtgattcttctgcctcagcctcccaggtagctgggattacaggtgcgggccaccatgcccggctgattttttgtatttttagtagagacaggtttcaccatgttggtcaggctggtctcgaattcctgacctcaaatgatctgccatcttcagcctcccaaaatgctgggattacaggcgtgagctacagtgcccagccagttttcaagatttttaatgcatttggagcagcgctatcctaaagaaccttctttgatgatggaaattttctctatctgcaccatccaatatggtctggtaaccaccagccacatgtggctattgagcacttaaaatgtggctgagactgagaaactaaaattttaattttcttgaaaatgtaaattaattaattaattaatttatttatttatttagagacaaggtcttgctctgttacccaggccggagtgcagtggtgcaatcatagttcactgcagcctcgacctcctgggctcaagtgattctcctgccttagccttctgagtagctgggattacaggcatgtaccaccatacctggctaattaaaaaaaaaaaattttgtagatatggggtctctctatgttgcccaagctggtctggactccaggcctcagcctcccaaaggagaaaatgtaaatttatatagtcgcatgtgattagtggttattgtgttggacagcacagatttagaatctgaggaaactctccatttagt

SEQ ID NO: 61581 - DNA, 5977 bp, Homo sapiens
agaagcttctgcatattaataagaaaacactagaataaatgggcaaaagatataaaaaggcattgacagaaagggaacaaatggccaataaatacaaagagatgcttaacttcattaataattagtgaattacacattaaagcaactagatatgattttatcccatcagattggcagaaattaaagagaataatattctttggcggcaatgagaaaaaatgggtgtactttcatattctgagcatataaattgttcagacctttttggagaaggtagtttggctgtatctttgaaaataaaatcacatacttttaatttggtaattttgtgtctagtgaaatacacctgaacacatgctcattccagcactggaatggtgaaatattggaatgattaaatgtacagtggtacagccagcatatagaatgcgatacctaaaaagtgtgtaagagtgtggtatagatctttatgcagctgatgtgggaggctctctcagatacgtttttagtgagaaaaaatataaaattattacatttatatttgtaaacctcaaaatttatatgtatttgtaaattctaaaacatgcttttcagattttttaacatttctgaaatcagcgtatctaacaattggtgacatagtttactaatttaaactcttggtgaagcatagtgcacattacaagtgataagatcttagatttgatgaaggatgatatgtaaatacgtggataaaggactctaagacagacatgggacgagattgaggaagtgtcagtggagactttgtctgtgtcatctatgttgtcaaattttttttacagtgaaattatattccattattgtgtaacgaaaaattttaaaaatacatatttatattttttagacaagatataattttagacaagataaggttgcctggatgtctctgatgtctgatccatttctctacttgggtgattatgcttgatattcagctttgagaactttaaggcctggatggttgatagagcgttcagcttcattaagaagttaagtagctgtgaagattcagtgggagagaattgagaactgaggtccaagagaagggaggagccgaactccagaattcagggccagttgcctcatggggacctttgcatctgtgtaaagaggttgaaattctctccccacaaggtggtgccaggctttttatactggactgggcataccctggagcaaggctcagtggatgggaggcagaaaatagatcaaatcaaggagccttatccaatgtcattgaaaggaaaattcattgttttgggagagagctaagccctagtgggaaagagccaaaggaataaatgggcttttaaatctgaggaatttacacaaggcaggcaggagatgacctgccataggttggaggcaggctctgcttggatcctgtgtaaacagggcatagtgtgagtgtctccccataagtaaaagctgtgttgtgaagatgaactcacagtttagtagtgactttttgaccaaagatgactcttcaagaagggataaggtgtatggagtatagctcattgccaggactgtgggaggcagaggaaggagaggacacttggccaagatgccatttgagctggtcactgtaggaaagggagaatttggacatgtaattttttttttttttttaagacagagtctcactctgtcacccaggctggagtgcagtggtgtagtcttggctcaccacaacctctgcctcctgagttcaagtgattctcctgcctcagcctccccagtagctgggactacaggcacatgccagctgcctggctcattttgtatttttagtagagatggggtttcgccatgttgcccaggctagtcttgaactcctgacctcaagtgatctggcctggacatgtaatttttaaggagatattcagaagaaaagggaggtgagcccaccatttacaaatgcacacaggaggccgggtgtggtggctcacacttgtaatcccattactttgggaggctgaggcaggcagattgcttgaggctaggagtttgagaccagcctggccaacaatgcaaaatcccgtccgtactaataatataaaaaattagccgggccactgcactccagcctgagtgacagagcaagactccgtctcaaaacaaacaaacaaacaaacaaaaatacacacaggagaatgtgaggagctgagtagtacagttttctcggagtacacgtctattaaagggaagcagtaggaagtaaaatagaaaaaggtaggctagggccggaccatgaagagctgagaatgccaagtttagaaatttgaccttgagtcagtgaactcatgttttacatttaatcttttggttaccaatttttttttgtaccatcattggtttgatttttaaaatacagtcactttgttttctaaggattttatgatatatgttcaaatcttgagttaaaggtaaatagaacacagtttgggtttttttttggcatataaatggttgaatttcaaaattatatttgtgttacaaactttgtttttactctctgccttccagcatttgcaaataaccatttctctttcaaaggaaattctagtatgtattcccattcaataaaagcaaagagctgagctctatatgaataagaggtaaaattgaacatgaaaattactgagcaagattagtgggggatgaaatggatgaacattggggaaagctgtgatccttgttacctttgctatagtgcaatttggaatggcttctttattcctggcaattcctgacagcatttcttttaaacctggccacctttccattgccagctcgaccttgatgttagctggtgctgctactgcaagggctgcctttggcaggaagccttcagtcaactttctgggctctggttttggctctgcacatgccttgctgagaagaccttaagaatctgaaatgtggagggtcattttggggtagggaaatgtggtggcaactcttgagttttctgccacgatgtaacttaacagatcctcttgtttttccttaaatggtacaagggtttgcaccgaaatggtaattcatctgtgtctgtgatgctttaaaaaataacagtttcactaatgtgtcacaacatgtattatttatcattttagtaaatggatattttaacaagcaacaatttgcaaatttaagcatggcagttaacatgatctgacattaaaaaattaaataatctcctgccatctttgttatcagccttgcattaaggattttagcccttctgggagcttttatttttttgttgactctgactgatgatggcagattgtggtagtgatcagagctatgcttttataaattattttttagttggaacaatattggcatgtaacgtggactggcagaattaacattgtttatcattaccagtgttgttttgacagatattctcagttctttaaggaagcagatagggaatgtctgtaatggacatctgctgtccactataggttgcccaataatgagtcctggtaggttctaccttctgctgtggaagccagcagagttcaaatgggcattttctgttcttgcctcctaggaactgcaggggtggacatgcttcttaggcttagcctgttgactgcttccacctggagtttgaatctgaacagtgttagaaaatgcagggacaggctgagtgtggtggctcacgcctgtaatcccagcactttgggaggacaaggaaggaggatcacttgagcccaggagttcgagaccagcctgggcaaaaaagcaagacccagtctctacacaaagtaaacaaattagccaggcatggtggtgtgcacctgtagtcccagctacttgggaggctgtggtgggaagatcctttgagcctagaagtttggggttgcaatgagctatatttgccccactgcactgcagcctgggggacaaagagagaccctgtctcctataaaggcagcgacagttagtagtggcactagagttactaaaattatcaagattttcttcctggatagtcctggttgcacacatcagtgttactataggtggacttagcctttacttttgtacatttcgcactgatacctctaaccaccttttgtgcacatagcagctattataccccccatagcataaccaacctgtgtaagagaagagtataagtcagttgcttgcaaggaactcttaggggtagggagctcttgcctgggggaggtgggggtttctcctctttctgtcctcccctagtcattagagaaaggcctcaagagaataactcagagattacggttgaattcaagagggtagattgacatctcattgagctgcacagaggtaccagccaggtgctgctgtgggattagaatggactcctgagaaagcgttcttgagtgagtgtggtgtggctttcctggagtttggggatgtctgtgaatacagaggcaagtatcttcctctcatctgaaagccccccatgtggctggagctgcccctggggacagtgtatggagagaggacagcaaaaacgcttgacatttcctgtgggcctggtggtctacatggaggacagctggcctgagtctttttgaaagacttgtcctgcctgcgaaggctgcctgccagggctaggcccgcagcagaaagaggttgtgggtgaaccacagaggcaggagctgagaggagactgagagctgagtcaaagggcacccgttgcctgcatcaggcagcatggaggtcccagcaaaggggtctcactagagagagctggcatgtggactcctgcaaatggtggaagatattttacaggctgcaggactggaccacagaaaagtgggcagacctttccctttcctcacacttgccgcctttcattccttggacccctctctttttcctcactgctgttcttaggggaaaagcttgacattggataaaatgaatttggatttagactaaatagactttttaataactgaaagtttggctttatttaagataatattttctttttaaaacactgtctagaaatcagtgggtttttttttttgttttttgtttttttttaaagacagagtttcgttcttgttgcctaggctggagtgtgatgacgcaatctcagctcactgcaacctccatctctggggttcaagcgattctcctggctcagcctcccgagtagctgggattacaggcatgcaccaccacgcccagctaatttttgtatttttaatagagatggggtttcaccatattggccaggctagtcttgaactcccgatctcaggtgatctgcccacctcagcctcccaaagtgctgggattataggcatgagccaccacgcccagccaaaattagtggttttaatgttactaaatcctgaaatagctttccatgatgacaaaatcaatcaacaatctcaaccccagtagactggagtggattttagaatttagcacactttcccttatttatactctgcaggtttcaagcatacaacttgccagcaattactgtgttggctgagaaatttgaaattttactagcttgaacactaaatttgttgatgtaacatacagctaataataaaggtcacgtccccatattggcatgagggaccccttatgaattagcctgaaactttgcagcctttaatcatatttttctctcttttttcccttgagacggagtctccctctgtcgcccaggctggagtgcaatggcacgatctcggctcgctgcaacttcgcttgccgggttcaagccattctcctgcctcagcctcccaagtagctggaactataggcatgagccaccacgcccagctaattttcgtacttttagtagagacggggtttcaccatgttcaccaggctggtctcgaactcctgacctcaagtgatccacccacctcggcctccccaagtgctaggattatag

SEQ ID NO: 61582 - DNA, 4289 bp, Homo sapiens
tgagatccttttggctatatacccagaaggggattgctggatcatcattctgtttttaattctttgaggagccgccaaactgttctttatagcagctacgccattttacattcccaccagcagtgcacagagattaccattgcttcatatccttatcaacacttggtttttttttttttgccattttaatgggtctgaggtgatatttcattatggttttgatttgcatttctctaatgattagtgatgttgaacatctttttatatgcttcttgcccatttgtatatcttctttggagaaatgtcttttgaagtgctttgcccattttttaattgcattagtttgttgtttttttgatttgtaggagttatttatatattccgggtattaatgccttatcagatatttggttgaaaatattttctcccattcataagttgccttttcactttgccctttaatcatattattattattattattattatggttaaaacattaattgtgtaatactgaaaagtttaggaaataatatgacagattttgatcaggtcttaaatatcttcccaataggccctatgagtaaggcataaaaagcttgaattaattccatagtttcaccaaaacgctcttcttcttaatcttattccttatttttttgaggcagagtctttctggcccaggcagcctggagtgcagtggtgcaatctcagctcactacaaccttcacttcccgggttcaagcgattctcgtgccccagccacctgcgtagctgggactacaggtgtgagctaccatgcctagctaatttttgtatttttaataaagatgaagtttcaccgtgttggccaggctggtctcgaactcttgggattcgagtgctgggattataggcatgagccaccatgcctggcccttaatcttgttcctatcaatctttccagctttaccttccccagcatgacttcctcttatccccttcctatgtccaaagattccctaaaaatattctagctctgtaccattccacacactgcttttttgttgttgttgttgttgttgtttttttttgcctgaaatatgggatatgtacctttccctcttgtttaaccttgtttttcagactccttctttttcttttcctttaaagactcagcccagatgtgaaaatgttccagtcagccagtcagctgcttttctctcctatagcctcttaggtacagcccaggttagcacacttgtctgaaagtattgtgaggacttttataaaccccctctctccaggaccatatgctgctagatcacctagcttagctttgcctttttattcctctttgtcatgggcctaccataatatctagtccataatatttgtgtactttagttttttatttatttatttatttttgagatggtggtcttactccatcacccaggctggagtacagtggcacgggatctcggctcactgcaacccccgcctcctgggttcaagctattctcctgccttagcctctgagtagccgggactacaggacacgccaccacgcccagctaatttttgtatttttagtagagatggggtttcactattttggccaggctggtctcaaactcctgacctcaagtgatccacctgccttggcctcccaaagtgctgggattacaggcatgagccacaacacccggcctatttgtgtactttaaacgattatgggtagaaagaaagagcaaatgcctttttagaaataagataacagaactttttaccaattgtgcttccaaatatgctttctcttctaattttatctgctaagattttggcagctaattgtagattttatgaacttacattgggttgcctttgtcttctgttataaaagcaataattagaggaaatgatccttttgagaggttgtttaatgaattctgcttgttttaaatgtgctgctttaaatcttatttcacgtaaactgtactaatgcccaaattatctcaccctagatcagcattgaaccaaagtattatgatgattaatttccttctgttaaatcccttatagtcttttctttggtgtgtgtgtggggtcaacaatcaaagaaagaatttattgactttacatttaatatggtttactctacttgattatattgttcaagtgtgaatttgtgtatggtataagattatgccatactgggattctattttctgttaaacaaatagctttgtgttttattaactgccagtgtttaaatttaatggtttaagatttcagagagccctttttgtaagtatttgaaagtttttattataatcctgagcctaaccttcttctggtttcactgcatccttctccagccttgaaacaagccctggcacagacgcaaatcctggcgtgcaccacctcttcctctcccccgctccccactctaacatgacaagaagtgtctgtcccagaagtaatctgattgtgcacctagagtacctgttttctgcctggggaagaatgcacactgctggacctagagcggtggcaaaagtgccctctccactgtgggggccacagtggtaggcacaacccttatccctcagccccattagttaattaagtcattttacctgcattaaactttacgggcagagaaaattcagtaagtcaccactaccaggtgactttcttttttatgttaccccctagcaaggcatgtagtttgcatcctacagaatataaaagatggggccagcatctattctgtgtcttagcagtgaacttcatccaatagatacttgatttttaaatactttcaccttgtgtcatgattaaatcactaaacaggaagtttcagcttttctttaaagaagtacatcctattaaaaatttaaatgtcttcataactgcttacgctcagtaaatgaacactaggaatctataaacaggaatctatggctctaaaaattgaaattttgggggctgtttcattctttagaacttgaaaacgccataggcaattagctataattcatttgcagattatttttgccatgttaaattaggaattttagccatagcaagcataacagacaagcacacttttaaattattttgttcagcaaaacaccataggcccttatatgtgtttgctggaatttttctttgtcaacaataaatctatatgtttctttagttaaaaaaaaaacagcaacaaagtgtttattgtagaatgtttactttttaaacaaacgtgaaaggcattggtacaaaaagggaaaagcacctaggatttggatcctcagtgggtccaggagtacagcttccttgttctgcagttactggaggcagtgtggtgaggggaaggatgtgggctttggactgagctgctgcttctacctgtgctatgactttgcacaagttaggagtagcctttttgagctttgttttctccttagaagatgactaagatcatgtttgcacatagcacatgacacaaactcatgatactggttttgttttttctaacattgtctcagtgggtcttcactgccttctttctacaattttttttttttaagggaatagggtcttactctgttgctcaaggctggagcgcagtggctgatcattgctcaccatagcctcaaattcctattcactgccctcttatatagtggataatgtgggcgttagtctcatgcagttaagagaacaggttcaaaagaagttttgaactgtctgttttattttcacaaggccagtcagtgacagagaaagaacttccacttgggtgtcctggctctgtgtcccatggttttcctactgaaatactattactgtgctatagcagaagaaagaaggctaagacagttctgtgcttacagtcaccttcagtttcaaatgtaatcatatcctgggggaggggaaatgaaactttgagtttcatctcccaaatcattcctttatttagaatcaaccggctgggcacggtggctcattcctgtaatcctagcactctgggaggctgaggtgggtggatcacttgaggtcaggagttcaaaaccagcctggccaacatggtgaaacccccgtctgtactaaaaatacaaaaaaaaaaaaaaatagccgagcatggtggcaggcacctgtaatctcagctacttgggaggctgaggcaagaaagttgcttgaacccaagaggcggaggttgcagtgagctgagattgcgccactgcactccagcctgggtgacagagcagtactccatctcaaaaaaaaaaaatagtatcaatgaa

SEQ ID NO: 61583 - DNA, 3084 bp, Homo sapiens
ctaattttgtatatttttagtagagatggggtttcaccacgttggccaggctggtctcgaactcctgacctctggtgatccacccaccttagcctgtcaaagtgctgggattacaggcatgagccaccgcgcccgacctctaaatgaatttttaaaactccagcatctcacaaatggttcttgaataatttttccttagcctgcagtgtttaagttgggttttgaaggttttgttactcaatagtcacccttttttgggtgtaagtttgtcctctactcctgagtaagtaagtgaccttagggcagtattaccatgaaacagatctcacaaataacattgataccaacatcattatttttggtcaaatgttaaatagttaaaatttgtcatcctagtctatattgaactaatttgaaataccttatatttaagcaaactttattgtttttaacatagcaaaacaattaataaaactttaaatcaattacacatgaaacagtaagaaagcagtgcaagattaaaatctctaggtaagtgttctatagtgtataagtaagttctgtagaacttcagaaaaaagagaggtcagtaggattcttagagcaaagtgtgattttatctgtactttgggtcagaataacttttctgattttttttattactaacatacctaaacacagataatgttaacattaattaagtgaccttagggcagtatcacaatgaaacatctcacaagtaacattgatactaacacaattatttttagtcaaatgttaaatatttaaaatttgtcatccttgtctatattgaactaatttaaaatatcttattgaaatatattattaattaattcatatcagacttagctagagacacctaatgttcaaaacagaaagtagaggtggattgggcccagttggctccagttgctcagaggatgtggtcagtgctgtttttgtacatcttgagctctgctcactctgtctgcgagtaggttttgcgttttgcttgttggctgtcttgttgggggtgggaaaatggctgcccataccttctgccaggtgggcaaccccaaagacttttcttttccagcgcacgtgtaggagcagcctgttggaggcatgtgcccatgctttagactgtcacccaggtcatgaggactgtggtttgaagagtgtgctcactcaactggctagggggtgagggcactgtgtttgacaactgtcaaggactagcgaggttcccagatgaaagggggtgatataccagaagaagaggcatgggtgggaaatgtgcatagcagtcccagccaatagctatcactgcctaccacatagtgctacaaaacagcgtaagaattattcattgagtgcaaatgttgggggagtgggggttaaacagagacctattctaagtgattcttgactgtttgtccaggtgtcattccttgttataggagttttaaaagcagaaaattctcaactgctcattcacctaatactccatgaaagtatatattcttgagtgtcctaagtgtgtgtcctttgaaatgtttatatatataaaagatattttaagtataaaatcttaaatatcttttacacttaaaatatcttttatattttatatttgtgcttttataagttaaaaaatgtgatcaccatgaccctctacttggatgtgacaaccctccattttataaaataattaccgttgaatcaaaatttttgctcaacgtatgctatccagttacctgtcaaagccaactgaatgaatgatgaaaaggttcagatcaaaagcaactggcttaacttcacggaggttttcatgctttaatttaaaatgtgtctatgtctaactgattatctctcacattttataaagaaatattgacgttctgtaaagtatgtagtgacctcacttctggctgtgtgggcaggtttcactgcaggcctctgaagcattgatattcctgtaacctttgaggcaagatgtgtgtgtagtgtattaatgagctgattgaagtgatgtacagtaatttcatccttgggtaaaaacagatgtgaaagattctgttttaatatttaatcagcctccaagcctctgttggcttgtttaagttgacctgacagcattatacctggaaacactttgaattaaactctgagtgcttgaccttgttcaaacagttgtaatttaataaggctgctgtcttggtggagatagtgtcgctaataggcaaatcctcttctgactgggattgttctgtttgtgagtgctggggttggagagattcagagattctcatcagtttgtggggaggaactgggatttgaagaagtaaaaacaaatctaaattaagaaagtgtcttttagaagatctttaaaaacttttattttaatttttagacatatagaagtaatgtttttaatgtcattttgattaggctcattttggttgaaaggaatggaaaatcatttgttaaaaagagagctggaaacttgtcagaaatcaaagaagtgctaggaggactgcatactcactctggctctccttgtcctcctgtccacccatccctccacccacccatccgtccctgcttttctctgtctctgtcttgggcgtcctctgcacgatagcctgtctgctctctcctttcttctgttggctccctcaatctctgtttcgtgtacttctctctagcccatagctcctctttactaatcatttctgttctctcatgccatcagtttgcaggggctcttggtagtttcagctctcttgtatcctttcagctctaagtcttgctgtcaacaagtttgtttccttgttcacgttccagttagctgggtctgaatggctctcctgatcttttttgtgccatatccaaattgcccatgctttccaaagcagggggagctgtggacaagacagtttttggcttgaaggaaagattagttggggcaaataccatgatttgcccaatataaatgcgtgtagatatatattttctggttctaagagtaccatatgcttactggggaaaaatgagaaaatttaaaaaactaataaaaataca

SEQ ID NO: 61584 - DNA, 2678 bp, Homo sapiens
taggaagctgactggctcttctcttttaggagccctcccagggtggcattcattaccttgtcggattgccatggtccagtgtgggtagcagaatcctgagagacccccagtgaccctgccctttgtattatatcttcccctttgagtataggtggaacctatgcatgtttgagatatcacccatgattctactaccttgcttggcagagggagactatccaggtgggctgatctaatcacacaagccccttagaaaccatattctccagcaggtgggaagaaagagtgatctgaagcatgaataggatttgatgttgactgcgaagatgaaagggaccatgtgccaagcaatgtgggtagcttctagaaactgagcatggtccccagctggcagccagcaaagaaacagggacctcagtcctacaaccgctaggaaccgaattattctaacaacctaaacgagcttggaggtgaatttttcctaagagctcatggataagagcagagtctggctgacaccttgattttggctctgtgagaccctaagcagagaacccagctgagcctgactggatttctgacccactcagctgtgagctcatgaatgggtgttgttttaagccactgtttgtggcagtaagactaatatagtccagggtctggctaattcttagctttgtcagattttaacttgattttctgtggatatcaagggtggagctgtctctcaggggtagacttacaggagcctagctgaagaaactggtgtatggaatcaggaggccagcatatttatttgtttatttacctgaaaagtaaatgttccagggactgagatactccatgtggatggtcagtacattatctcccttaaggcagacctgtgtaggaggccaggtgtgtattagtgagcatggcatccaaaccatgagttagatgagcacagtttccatggcatcaaacacctgtctcacaacaaggatggccttctctatgtctggacaatgtttagatgggtactgccagcttctctggagactcactgtattagttttcaattacagtgtaacacataaccacaagttagcagcttaaaacaatgaaagtatattatctcacagtttctatgagtccaggcacaggtaactgggtcccctgctcaaggactcaccaggctgaaatcaaaatgtcagcagggatgtggtctcataagctcactggttgttggtggaattcagtgccttatggttgtaagactgaggtcctcttctcccagaggctgccctgccacatggccctctctacaatgtagcattttgcttcttcaaggtcagctggaaaatctcccacacacttttggtctttacaatctctgaccccctttaaaagcctagccctgtgtatgctcatagggagagattgtacaggggcccaaatcttgagggcattgtaaaattctgctcccacacttgctttcccctcagcatcccttgatgactggccagctttctgtttgacacctcctttctttagctgtgttaatatatccagtctttgggagtccaggcttggttggatatttcacatctctgaagtgactacatagttcttctcacattcagtatgtattgatttttaaaatttaaatttgtgaacttaatcacacctttatttctgtgatcctcccccctttagtaactggggaatgggatgaggaggaatttcttcatcttagtttcagaagtcttcacagcagtggcctctatttgtagtttgatggtctaaggagtttagattgttagagaacttctaccttcactagaattttgaagacgtaacttaaaattacacttactagatgtagaaactggggagacaaaatgagttatttgcacagttaaattattagctagtgaagaagggtttttatttcttatttatatcctgccttctctcaatatgatgatgtccagtaaaaggcatagatagtctaaaagtgaagcaattaaaaatttttctattatgggaatttgacagtacaaaaaaacacagatgtccttgcccattaaagtgaacaccaaggagtccaaaatattttcatgaggtagttttttgccattgcctgtcagttgtgagagatcattgcctcaggccacagcgactaggtgtgtggcagagttaacctgcctgctctctagggaaaccgtcaagaaatgggcaataaattaataagtagaaagtgttctctgagctccaggcagttgttgattgactgatggaaaaggtaggcggtaggctaatagacgatgacatccaaattcagctgttgcctctcagctgaacccaaccctgggcttctgctgccttttgctccttttccctgagtggtggtggcctgcaggttaaacaggtgggcttgggaattgggctgcctagggtaaatcctcattcccccatttaactcagtctgccagactctgttttcttgtctgtaaaatgagggttaaaagagagtctctgtaaagcatttaatacgttgttgggcactagcggtggattaaggagaagagggctgtgatgggagctgtcagccccagcaggcaggagttagaattgtctggaattgccggtgtagggtgataataaaaagcaaactgactcttggtcggtttattact

SEQ ID NO: 61585 - DNA, 1706 bp, Homo sapiens
aggcaggtggatcacctgaggtcaggagttcgagaccagcctgaccaacatggtaaaaccccgtctccactaaaaatacaaaaactagctggacgtggtggtgcactcctgtaatcccagctactcaggaggctgaggcaggataattgcttgaactcaggaggcaaaggttgtggtgagccaagatcgtgccactgcactccagcctgggtgatagggactccacctcaaaaaaaaaatcttttttttccctttttatatttttgtctggatcctaaatattgggacatttgaaagatgtgcatatttagtttaagcaaattctggtggatttggttggttctctctgtagtaagagtagagaagaatggtagatgtgaaaagaatatattctgaaaagaatatgggataagagaaaatcaagaaggcaagaaaataatcatttccacccttttatctactttgaaatcaccacttttcttactttggtcttctgtttcctctataaactatgcttaagagaccagagtgagcagacttcttcgtgaaaacctgagcttgggagttgggatggtttacagtcttggcttcagtccacttttctgacttaacacccagacccctttccggctaaatttattgtctcctgttcctgctgggcctttctggagcgtccgcctctggagtgccctctgctcttgaggtcccaaactgcccatcccacacctacctggtcacagctttgcagtttaagtccccacatgccagtgactgcttcctttctggacccctttactgcatttcagcagtgctgtcaatccttcctttaaatttatgtcactggtttgtagggctcattcttccagcctgcagacgtcagttgagattccactgtgatcaaagcaggatatttaagttctgcagcgggtgggctgcaagtggtagaaatagttattttcttgccttcctgaatttctcttgttccattctcttttcaggatacattcctttcactacagagagttgtctgctctcactacaaacagaaccagccaaacccaccacgatttgcttagacataatgggcaagaactttcagaacatttggaacttttcagaacattgggtggtcttagagactagccagtacagaaatctcttgagagggtgttactgtgttccttctggacacctccagtttctgatttggctgtcctgtttgtcagcagtacatccttcatattgagcccaaaacctccattcattctggtgttcttcagtgcagtcacactgcttcgtgatggcttttcttcagtgcagtcatttgcttcatgtgacttttcttttttctttttctttttctttttctttttttctgaggcagagtttcactgttgttgcccaggctggagtgcaatggcatggtctcggctcactgcaacctcctctgcctcctgggttcaagcaattctcctacctcagcttcccaagtagctgggattacaagtgcccaccactatgcccgcctaatttttgtatttttagtagagacagggtttcacaatgttggccaggctggtctcaaactcttgacctcaggtgatgcatctgtcttggcctcccaaagtgctgggattacaggcgtgagccactgcacccagccatgatggcttttccaatgcaaaacattgcaatagttattcctt

SEQ ID NO: 61586 - DNA, 1360 bp, Homo sapiens
atccacaagtctatatgtgaagaggttgagggaaaagtaaccactggggacatgagaaatctgaaaagtaatagttagaaatggccatcttagccttattaaaatgtaagtaaggccgtgtatggtggctcacacctgtaatcccagcacgagaggccaaggtgggcagatcaccttaggtcaggagttcgagactagccttgccacaatggcgaaaccccatctctactaaaaatacaaaaattagctgggcgtggtggcatttgcctgtaatcccagctacttgggaggctgaggcaggagactcgcttgaacctgggaggtgaaggttgcagtgagctgagatcgcatcattgtactccagcctgggagacagagcaagacaacatctctaaataaataaataaatataatgtaaggcaaggccttttcccttatatctattttagggtttacccttgtgtatacagaaaaattgttccctgtccagcttattatgggctggatagcaggcagaactcctcagtttgggttagcattgcattaacagaactgccacatctttctggataatcttcctttgtgcataagctccaggctcaccttctctgcctcacagctgtgcgctggtttcccttagctttcttgggttctggatggatactggccttctgggtgagaagggggttctttggcaaaaggtgtttttgacataatttaggaccttcttaagttctacagcagacctaaatttcttcccccaagttctttgtctatatagagtactcagcactcattacccattctcagttctgaaggaaatcttatggagcagttgtagtatttatagggtaagcagagtgcccagtttccatgccccaccccaaaccatttagatttcagtcatgtatgtcaagggaggagtgagtacatttttgtggtcagctgcctcttcttttccctaacattctcactttttcatctttcctgctttcttgaggtcatttatctattgaataggatgtctattgaaaggaaaaacctcccctaatcgcctttaaactaatatttcttactgggcatggtggatcacctgaggttgacagtttgagaccagcctggccaacatggagaagccccatctctactaaaaaaaaaaaaaaaaaaatattagccaggcgtggtggcgcatgcctgtaatcccagctatttgggaggctaaggcaggagagtcgcttgaacccaggaggcggaggttgcggtgagccaagatcgtgccattgccctccagcctgggcaacaagagcgaaactccatctcaaaaaataactaaactaatatttctcttttctcaataata

SEQ ID NO: 61587 - DNA, 1278 bp, Homo sapiens
ttaatattacaaaggacttttagactggcttcctcctaaacatttcttcaactcctatcaagttcagtctgcaaatatcctaatttctaggttgtttgggaatgttaattgattgtctcatgtatgtatgtatgtatgtatgtatggatagacagatagatgaaggttgaaggatggatggatagattaaatggatggatggatagatagatagatagatagatagatagatagatagaaagatagatgaaggttgaagggtagggctggaggaggaattccagctttccagtagattttctatcaagcagtcattcatatatataacttcctatattgttagccaaagttcatccatgtctcttgtatttagctctctgtctgtattgtagaaagcttatttattatgtgagcattttgctttctcctatccctccctctttctttaacatcagttataacagctgtgaatacagtttataatatgagcagccatattcagtttttaggctttcaaaatcacaaatacaaaggaggatataatacatagtcctatattttatacaaattgggacacttttcttcatttcttatttcgtggcattgcctaactatagtcaagctaatgacccatgtagatgtagtgttgtacctggtgtccgtgtccctgtgaatgtgtcatgttgtgctggcctgattccccaacatcagccccagggagccagcagctggagcagctgtcatcttgtgaaagcagagtgtccttgttgctattgattgggttgttcagtcaattgcaaaaaagtggatctaactgtcaatggtagttatatgataatcctggagataaataagtgtcaagtgaagtattacttgaatttaggacttgaagagagagaaaggggtatgagtagttggaggggaagatttgctatgacaagctattattcagtgtggttattttgtatgacaggtaagtctacaggtatcttttgttagataaatcagaaattaagcattccctttgtaaactccaaacaagattttgaaacaccatggtccccccttatccacctccaagatctccagtggatgtctgaaaccactgatagtactgaagtctctatatattatgtttttcccctgtatgtaatacatacctgtgataaagtttaatttataaattaggcacaggaagaaattaacaaaaataagtaagaatagaacagttataactatatgttctattaaaagttatgtgaatttgttttctctctc

SEQ ID NO: 61588 - DNA, 2285 bp, Homo sapiens
ggcgtggtggcgggcacctgtagtcccagctacttgggaggctgaggtaggagaattgcttgaacccaggaggcagacattgcagtgggctgagatcacgccagtgcactccagcctgggtgacagagcgagactctgtctcccacaaaaaaaagaaaaaaaaaaaaagtattacttatttagtaagtccatagcattttgttcacacagtgtatcattgtgcttttctgtttcaaagtgtaattatttaatctagaaattttaagtcctgtgacagaaaacaaatgctgttctcacaaaatatgagaaatcaaattccatcttattatttaaattaattcttttttaactgaagaattgttatgtgggtagctttcaacataattttttcaatattagatgcttataactaatgtggatttagttaattcgatgtttatcacatttaattcttatttactacaaaggttaaagcaattttatttcttctggaaacttttaggatcttgtgagtgagggacgtcagccaaaattggcaactttttcaagcaactggctcaagaaattaggaatttctctaataatgagccatcgttttttgaattcaacaatttaaaagggctgcatagttaggatatgattccagtttcccctcagtgcaaattgatatttttttctgttgacacattctactttgttttcgaagactagtttatagtgttcttttaaaagcaaagaaaatatctttaaaaatcccagctttttggctgggtgcggtggcttcatgcctgtgatcctagcactttgggaggctggggtgggaggatcactggaggccaggagtttgagaccagtctgggcaacacaggcactccatctctttaaaataaaaaataaaaaaataaaaatagccaggcttggtggcccacacttgtagtcccagctactcgggatgctgaggcaggaggattgctggagctcagggattcaaggttgtagtgagctatgattgagccactgcactttagcttgggcaatggagcaaaaccttgtttcctttaaaaaaaaaatttattaaaacatgctcttactttggcaaaaatatatgtttcttcatagtgatgataatcataatgatacattattactatatgcagcttataagaatcagttgtctaatgtatccgtgtaagtttctctgtggttttaagaatcattccataggctgataaatgcatactctcttcaccccattgcacatccagcattctgaatttttctcacttccttgaatatgccatgttccatgcacttgtagatcttccatcacagaaggtgcctcatctgtccagaacccctgccatacctctgctccctttgtctagctaacgctcactcatcctttagatcccagtgaaatgtcacttgcatctgggaggactttctgactaggttctgagcttcctttgcattctgtttttcattgacataatgacatcacatttattagtattgtctcattgtaaaccccagtaaggcaggaactgtatctctctgtatccccaacactaccacagtgcctggtgcatgttaaattgcagttaatatttctagaatgaaagagtgcttccatccttcatcatccgtctttcagataaagaagtatctagttacctttgtcttaaattaaaacaatttcaaaaggttgcatgtgctggtggaccagttgaaatccacagctcccatattgctgctcattgccactgttattgatgccctggagatgatttaaaattcagttatgttgcttgtgatggtggtatttaaaaatctataattttggctgggcgtggtggctcatacctataatcccagctctttgggaggccaaggcaggtggatcacaaggtcaggagtttgagaatagcctggccaacagagaaaccccgcctctactaataatacaaaaattagccggtcgtggtggtgtgcacctgcaatcccagctactcaggaggctgaggcaggagaattgcttgaacccggaggcggaggttgcagtgagctgagattgtgacactgcactccagcctgggcgatagagcaagactctatcttgaagaaaataaaaaataaataaataaaatctataatttttatactcatgtgctattatagtgaccctgtgagacatcataatgccttaatgatagcttgtcttgtttttactttcacttacatctatagttccaaatgttttattgaattgtgctttatttgataat

SEQ ID NO: 61589 - DNA, 1426 bp, Homo sapiens
cttatatatctgggaactttgtataaaaactaaacactggcctggcacggtggctcatgcctgtcatcccagctctttgggaggcccaggcgggtggatgtcttgagctcaggagtttgagaacagcctgggcaaaatgtggcaaaaccctgtctctacaaaaaaatacaaaagtgacccaagtgtggtggtgcacacctgcagtcccaggtactcgggaggctgaggtgggaggattgcttgagcctgggaagtggaggctgcagtgaactgagatcacaccactgccctttggcctgggtgacaggccgagaccctgtctcaaaaaacctgaacacttctttgttatgtttctacaatttgacacaataattcaagtcagccaagcactttaaaaattattttgaaataattttagatttataggaaagttgtcaaaatagggtagagttaattatatataaccttatgcagtttccctgataaccacttatataaccatagcacagttataaaaaaattatcaggaaattcactggtataataccattaactaaactgtggccctttttgactttcaccggtttttcacctcctgtatttttctctgttccaggatcccatccaggatcccacattaccttcagttgttgtttctcctttatttcctgcaatctattaaagattctaatcctttctttgtctttcatgacttcagcaaacagttttagttggatgcttagtatataccagtcactgagattggtgcttgagggaagggagataaatgaatggatgagacatggcccttacctaatgaggtgagccaacacatagacaagtaatgctaaaacaatgtagtgcctttaaaaggcctttgtactatctccctagagaagagagagttgctgactcactgaataacagtgttgaggcagcattttcagaagaaatgacattgatctgggtcttaaagaatggggaaacttttccttgtggagaaatggagtggaagaggagttcatcatggacaggcaggggcatttggcatgaaagtgtgaaagactggcttgtttgcagactggcaaatcacttgataggaatggagcatagggtatgtgaagaacacagtgaggcatgaaactagaagagtagttacaaagctaccttttttcattactttttattaataaatatatcctcatatttgtagggtaagttttggcttaaattttttttaaatctcattattcatacttaatgagcatttaattgtaatcagtgtttctagttttaaactgcacaacattaagattgttactgtacttttggaaagaaaaagagaacaaataattatgcttagctgttgcaatagcatctaatagcatttaaattctgttaataaagaatatgaatttattctgta

SEQ ID NO: 61590 - DNA, 1725 bp, Homo sapiens
cttttcttcatattaatttgtgtgtactctaaaaggaaagattatttggcttgctcataaatccaaaattttggtgatgaaaatatgtttataattatttcttttgagcttgatttgttgtggattttttcctttattttggtttaagatcaaatggtttcctaatgtgtatgggtcactgtagtctaaatttttttttttttttttttttttgagatggagttttgcccttgttgcccaggctggagttaaatggcgagatcttgcctcactgcaacctccacctcctggcttcaagtgattctcctgcctcatcctcctgagtagctgggattacagatgcctgccaccacgcccagctaattttgtatttttagtagagacaagattttatcatgttggccaggccggtctggaactcctgacctcaggtgatccgcctgccttgaactcccaaagtgctgggattataggcatgagccaccgtgcctggcctctaaatatttttaaagtatagatgtttttaaacttgtagctcctgagtgtgaactgtcccttgctgttttttgggcatctatcaaggcatttgttctaaccactgagtaagaaggacatcactaagggggttgtagctatacctttcttctttttatctttaattaacatgcattgactgcctggtatgttagaaacagacctgcctattacagtctcattcccttccatactcatccttgcttgtgtggctacctcccaagctaggactgcaagacccttatcactcctgcttactattggtttttgtgtccttttggcaattttctagtggctgcttgaactattggttgtcagattgacctgatttgtttcacttgtaaacaaaatgcttaagccactgttgatttttgtgacagctcagttgcttagagcaaggtgttaatgagacatcggtcataggtccaggctctgggttgactggtaagctttgctctggcccatggccacagaccctgactcccccttgccagctgtcttgcacatgtagctatggctcattatggggacacagcagggggtggagataagacaaggcaaatctgtcatctctgccagaaaagacaactcctactgataggtcagtaaccttttcattggaagaacagcacgttagtattagcttctgtagatgtgtctaactgagtctttttcttaaaataactcatgtgattgtatgggttgtctgcagcaagtttagaatactgctcacattttaaagcatgtttgaatataaggatggctttttagtttgtgaagattattgtccttaatcagggattcttaatatcattctctaaagtagaaaagtgagctttagaagtcaaatttgataaagctctagaaaacaactgcaaaattgctgttataaagaaacctgtcaaatttaggaagtgccctccaggagcccttcatcccaaccaatcctctcctaaaagaaaggaaaaaaagaagaaagatggctaggtagatggaatagtgatcagaaaaaaagaacttttctagaaaagcataccagtgtgctctttaccagagcattttagcaggtaatattttacaaaggacccagcagataattgggcaggttttttctttaggaacttagtgttgatggcctgaattaatctgactaggaatttagacatttcttcatgatatattttgagtcca

SEQ ID NO: 61591 - DNA, 3697 bp, Homo sapiens
acttctgagggaagtgagggagcattccaggcatggagaaggagtgttctagatggagggaacagcaagtgcaaagagcccttgacatgtctgagaaacagataagaggccagtgtggctggcgtggagagagaggggagagtcgtcaagtagtaagaggtgagagcagatgggaggaaggtctcagcacaggtcaggcctctggctttgctgagagtgatggatgcctttgcagggttttgaacagaggaggcacatgatttgacttaacgttttaacaagctgtttcctgctgctgtgttgagaataagctgtaggcggcaccaaggtggcagctgggagggtattgccacaaaacaagcaagagatatgatggtttaggccagtggtaatggtggagagtgtgagaagaggacagattctggatgtattttgaagtagagcccgcagaatttgttgatgaacttgatgcagagtgttagaaaaagagaagacttcaaggttattggcctgaataactggaaggatggagttatctatcactgagataaacagaggtaacagaagtaaaggggagagatggccatggtagaaggtggattacacctttaaatttttaaaacatatttttatttaaaatagccctcactccctggcccagtgcacacaaaggacctgatttgcttttaccctgagtttgtcactgtagatatcctggaatacttcgttaaaaactataaataaagtggccataatacggctcattttgttcagattctaaaaaaaaattccttcataagcagttggcttccaaatagcaatgcatgctgtcagtttggtgactaattgggttagaggttaatagcaaggcagtcctataaacatcaacgggagtggtgtatccaaatgaaagcttgcattaggcaacaattcaaagaatgagaatgactaaataccatgttacaagccaagtgaattatattaagagttttaactttgagagaaagggacgttacccctgaaataactatcttagttggatcttccctacttaatactcatagttgggttgtaaaaatgtaaaggttaccatcaaaacagcacttcttaaccatgaaattgactaactttgtaaaattagaaattctgttacttacttcctactatgctgattggacattccttcttttgccaaaagaacagaaagttggattttgtgccttctagccaagagaaccacacacctctctctctgtagaccagctaaatgcttcctactgctcggtgatgaaatcagatcatggaatcagtcagtttgctatactgaattttttttttttcagctgtgttctaattgaacctttggggaataaactaattcttaacatctgaaagtttaaaggtctgatactagaatttatggggtggtagaggagaccttttagtctctgtatccaaaccaaaatgtaaatttacttttatttattttttattttttgagaaggagtctcgcttaggctggagtgcagtgacatgatctcggctcactgcaacctctgcctcccgggttcaagcaattctccctacctcagcctcccaattagctgggattacaggtgctcttcaccacgtctggctaatttttgtattatttagtagagacagggttttgccatgttggccaggctggtcttgaactcctgacctcacgtgatccgcccacctcagcctccaaaagtgctgggattacaggcgtgagccactgagcctggccaatttctttttttattgtgggataatcattccatacttctccctcctctctagtccccacccccacccccctttttccccccacaagtgaagatgatttcctgtgctggtctaggattagttttgttacagtctgtctttataagaacatttcttttccataatccagaagcattttgtaaaacctatgcctggaaattgagtcactttttattgcttagattttcttcacagaaaaacataggttctgttggatgagtatttgttgtgaaagcaaattattaaggggtgaaaattgtctatacaagttgatgtataggaggatatctgaactggattagttgctcttttatctgtgttttcaaagctctttaatagtaactcttataacacttataacagtgttatcactattgtttgggcatcattccattctgctagactgggaattcttttataatacagtgcctgataggcatccattcattccttgaaataatgtattgagtgctcattatgtgcttgaaatagagtgtgtgcaggagccagagcagtcggcagaacagatgcagcttgtgtcgcatgtgcgtacagcccatggcagggtggggggcaggggacccagcaaacaagatacagataactgcgcagtacagtgccaatatgcacaggaacagtgactgtcccctacctacataaatgcatagacctcatatgtgtattgtgaatcctctataattgttgaatttgactttgaaattaaacacttgatattttagactagtcaaaaatgggatatgttattattttaataaaaacaccattgtatccagccgggcacagtggctcacgcctataatcctagcactttgggaagccgaggcgggcagatcacctgaggtcaggagttcaagaccagcttggccaacatggcaaaaccccgtctctactaaaaatacaaaaattagctgggtgtggtggcacacgcctgtaatcccagctacttgggaggctgaggcaggataatcacttgaaccctggaggcctaggttgcagtgagtcgagattgcaccactgcactccagcctgggcaacagactgagactctgtctcaaaaaacaacaacgacaacaaaaataacaccactgtatccatattgcctacaggagaaaatgcagatcacttattttatgtatgtgttgaatcattttaaataacctgacggaggtcctttcttgggcccatgcctctgcacatgttgggcatgttgtagttgtcgttactagcaagacacacctaccctttaagaccagtctaaatgccaccttgttccctccatgtaatctcagaacttctttaagggcaaggaccaaattacgtctgtgaaaccctagagtttgatctaccacttcacgtggaggcatgggacagaggttttgttaatgagtgaatgtatccatttaataagttccttcttcagtacactcttgagacctattctggctttcccaggaaacagctgaaggagtgacctccaatcaagtcagctctgtgtcaatccttcattttcggatgttttttcttccttttctcacagggtcataaggatcaaatgtaataatgatgtaagagttaagcgtattcaataaagggaggcagtggaatcatcacaatgttgatcatcacaatcaacattattattactgcaccactatagttccttgtaatacacagtccagaaatattatcacaaaatctcactgaggatgtcattgttctgggtttgacctagatgttgatgtaatgaacagttctctatcagttagtgtgttggcctagcacaggtgcttgacaaaggccctattcagacttctgtgcattacttcaaacccctccctttgctcccatagtatagtaatgaatt

SEQ ID NO: 61592 - DNA, 1451 bp, Homo sapiens
agattcagtcccctctctcaagaaactagcagtatgattggatggataagatttatgcatgtgaaacagagaatgctagatattttgggtggtaatcaagtgtaatagtatgtgattttagttataagcgtgatgagtgcaggaagggagatgaaaaataaataatatttagtgaactccactactacagaataaatatttataatattttctatttcatcaggaagaacaatttgaatcactggcttaatcactggtggggggcctggtttttagtctgtgtcttaaaattcttagctcacttatgtcatttgtcatatgaactttttggagaaagaaatatttagtttttatacgtagtttttaagactttaaaggttttataacccttttcttgaaaaattaagacatcaaatcagcaagtatttattgagcactgaccttggtctgaggcatgtacattttttagtttttagacaacagtaaagtaaccctgaaataatgcctacaatgactttgataagtacaagatggtgagttgaggttttagccaagaacctttgttttctcttgctgaatatttttctctttggttatgtggtagaatttagagctcaaaatgttcagactgtttctgtccaagtagcattctcaccatggtcaagatttgtttagtgatttataattaattagataaaagtacgcaaagctttttgggctttgtactgggaagtgctacataagactgcgtggtagtggtttgggcctcattgcttatatctgacatagcttccaggatttatgcctgtctccaccaagattcttttcctctttaatgaatttgaaagtaactatttatcttgaatgaaattagttttttctacctagagctgggagtttcattttctaatcagaatgtctgatttatttatgtgcctgccaaaaaaatcccaaaatactggccgcctgagttctggctaatgtttccaggtgctctgttttgaaaacattccgtttctaccctgtattacagatgctcttgcgtacagtgaaatcttgtgataaatatttttcagtgaacataaagtatttaaaaaataaacgaatggcagtattagtcatacattgaccgaatgccaccagtgtattatttatcatcatatacaggacatagtccaagacacaatccttatttagtggttctgtagtctaattatctgtaaaatggtcatgtcaaaaaaaaccaaggaaccatcagttgggcaaattgtttgcaattatgattaataacttgctgtggttaattaatgggaaaatatatatggcttctaacgggctgctagtttcacatatataagcagtgtgtattcaaaagaatttataccaagtaattatttattactacattctaggtttaattcttacttgtgttttcaagccattcaaggaaa

SEQ ID NO: 61593 - DNA, 1270 bp, Homo sapiens
caagtatttctttagccatgtgaacttacattagaaaataatgaaattcttgagatggttaatttttaaagctgtttaccatacctttcttttaaaagggatggaagatctggccttttagaatatgatttgccagccttccatagagtatactattgaagaaagcaagaaatgtgtgtttgcgggattctgttgctcaggctggagtgcagtggctcaagcttggctcactgcaacctccgcctcctgggttcaagcgattcttctacctcagcctccccgagtagctgggattacaggcgcatgccaccacgcctggctaatttttgtatttttagtagagacagagttttgccatgttggccaggctggtctcaaactcccgatctcaagtaatcctcctgtgttggcctcccaaagtgctgggattacaggcgtgagccaccacgcccggctgaaagcatgttcttgaatgtatatgtgtgttctctccccatgtgatttgtaaaccctccaaggcttgggtctcacattctcattctttgaatcttttatggcataatggatagagagtctgtgctcttgtccagttgaagtaagtagtgggcgctcaaaaaatgttgattggccaaaatatctacatcaagtacagtaacgactcatagctgctaacatcttttgagcaattaacatgcaccgtacactgtcttaagcactttatatatgtcacctcatgtaattcccacaacaactatagttatccccatttcacagatgtagaaactaaaacttagaggagtcagatacttggccaagatcacacgaccagaaaatgatagagctaggaaagtagagacaggaatcaaactcagtgagtctgattccagattctgcagccttgactcctttaccccatgcctggtggatcagtaacctttcagaaaatttttgtaacaagttctgaaaacatagatgaaataggaattttcccttaaactaaatggaaaactaaaaaagtaatcattagatggagcagatttctgctaaatgggaagtcttgggagggcctcattagaaaatgagggaatggggggccaagcatggtatcatctgctacccagtgagaaaaatatcgacttacgctgtgaacccttttattttatacatgtaccacctgaatgaggatggtatatttatgagctctcacatctcattgctgggtgacatcagggagctcttttttgggatagctgtccatctgttctcctcc

SEQ ID NO: 61594 - DNA, 1945 bp, Homo sapiens
actgccacttggctgctggcttcaaaagagcctgaatcagtgagttgcttacaccagggagaacaaacaggctcttctccttaaagtgtctgtaattatatgaccataattagaaataaaaccttctttatacaatttgagctcacaaggaaagactttctgcatacacaccattttttcctgtgttgtttcacatgctgatcaggaaacaggtcacttggcctaatcatccaccattgaatagagtggagagagccagattccccacaaccccctaggttgctgcatgtccttgaggtagtctcctgccctctctaaacttttgtagcattatgtatgatgaggttagtatagccatgtaggaaatgttatgagaaccttagtgcctgctattagttccttggaaaaaagagatagcctagacataagtaactcatgagtagagactaccagttttggtgcagttagggttttgagtttgttatcattttaaacagtaacattgtttgggtggttctgtggtgttcgaagagatgtaggtcaccgttgatttttgcctgatgggttttgagtttgagtagatgttgattaattcatgagccccaactgcaagatagatgttcagtattgattagacacatgcccctggttgtatgctgttaaaaaggagtcagctgtgaaatactcctaaagctaaatcaataaactactaaagttgttttcccccaataagtgtttgtattttatccctttaagtgagaaaggctgttaggaatttctgtgatctggccgttaagaaaactagctgtatctttggaacaatatgctcatatgttagccattccaggtgagtataaattattcatatatacatcttcgctgaggataacaatggcttaatggaggagaaaacacaacaattttctttgaaaaattgtctttattctggtgacataggtagacaactttgctgagagcacacctaagtactaataaaaatttcaagggattgagacatacatcctcacagagtaagagtttaaaaatgcctacaattggccgggtgcggtggcttatgcctgtaatcctagcactttgggaggccgaggcgggcagatcgcctgagttgaagagtttgagaccagcctggccagcatgatgaaaccctgtctctacaaaaaatagaaaaattagctgggcgtggtggcaggtacctataatcccagctacttggcaggctgaggcaggagaatcgcttgaacctgggaggcggaggttgcagtgagccgagatcgcaccattgcactccagcctgggcaacagggcaagactccgtctccaaaaaaaaaaaaaaaaaaagcctacaatccctgttataatcatggccagtaattgctaagcaattagctgtactattagaatgagtcactaccaagttttctgccttggcaatttttttctgaaaactttattgaatttagaacaatttctggatgactttttttctctcaacatacagacattgaccagtcttcataaaatccactaaactcagcaccttctaggcttgtctttctcctttccttgccttctcttccaaattcctagaatgggccgtgtgaacttcctgactgaccatgccggctgcatcctttaaatctttacagtggcttctcatttccttttgcatctactctggctgttcacgccacacatcagaatcgatcaccagcaggctctggagtctcatttccctcatctgctgcgtgggtctccagtcttctccctccattcattcattttcagttcctctaggcagcaccttcttccttgagccttttctcaagagctatcgttttcttagactctgttctctttttttccttctgttccaagtaactcttgaaatcccgtcttccctaaaagtctttttgaattaactaga

SEQ ID NO: 61595 - DNA, 1832 bp, Homo sapiens
cctgactaatttgtaaaactttttgttgagacgagatcttgctatgttgttgctcaggctggtcttgaactcctggcttcaagcagtcctcctgcctcagcctcccaaactgctgggattacaggcatgagccacagagcctggccaaaaatacatctttttaaatgcaaaacataccaagtaaaattgaacaaaatcctggctggtgaggcaagagtttaaacaagggaggagaagcactgtaccagttgtttctacacacctatgaaagatctggcatgaatggcttggtctttgtttaaaagcatagagcgccatgtgtatgtatggacacttgcatgcttttgagtgatgatgattagggtgagagattttccttaggaaagtttcaaaagtagtcacttatctactcagttttaagtaaatagaaaataattttttttaaaaggatagtgtgaggaagtaattttgtttttaaaaggatagtgtgaagaacaccctaaaaatgtttgtagaagaggattattcagataaatctgtagtgagtttatgcatacctcctttaaaatctatctttagtacagccattatttagcatgaagatgatttgttgcttttgttttccaagttttgttgcttgtaaataatctgttaagaaattttgggccgggtgcggtggctcttccctgtaatcccagcactttgggaggccaaggcaggcgaatcatgaggtcaggagtttgagaccagcctggccaacatggtgaaaccctgtctctaccaaaaatacaaaaaaattagccgggcatggtggcaggcgcctgtaatcccagctactcgggaggctgaggcaggagaatcacttgaacccaggaggcagaggttgcagtgagccaagactgcgccactgcactccagcctggcagacagagtaagactccatctcaaaaaaaaaaaaaaagaaattttgtaaaacatgctgaagggaatcctgggccaacaggtatttttaaaaaataatatactattcccaggtttatgttgattatttatatttgaaaatgttgattgtagatactggtagattactttcaaattaatcatttattcctaattgaccagggatgagtgagatgtttatttagaaaacaaataattttagataggaaaattgaatctttaaaaaataatggtgatttaatatatcaatgtgtggtttttgtgtgtatgtgtgtaatattggagcatccaggagtgtgcggtgtgtatatgaccttatttttctactgtatcttagaggttgccacttccatgggtataaaacttaattggatttctcgatttttattttgtttatgcacttttacaacttatgtcattttaggttgtttattaatgccagttttgtataataaaattattagagaagttatgaaggaggatggcatgagaagggtggccagagtttcactgtttcatgtttgtaactttcattccttttgaagtgtacatttattcctagtgatagaaattgatgttttctttggcaagcattagaagcaagtctatgtgaaattatgtaatgtctgaaaagttatattcatgattaattggcctatccaagaatggtatttgtgtgtgtggaataaggcgatcatgctttttatttggcagtgagttaaagtgcccctgctcagatcgggttactccacagggctttttgactgagaattgtatgtttagcttaatctctaaaaagcgtaaaatgtagcttcggagccaaatatgctggaattcatattgtaaccaaagttaatcttaggataacttta

SEQ ID NO: 61596 - DNA, 2513 bp, Homo sapiens
tcaaacatctactgtgtgtataattctttattatgtatagtaattaagataaaccaaacaaggatcttccaagagctcaccatgtactaagctatttaagatatgcaaaattttaccaatgtcaccaaaataatgggctttttcttccttcttcctacagtttacccttagtaggctttctactgtttacccttagtaggctttctactgtttaccctagtaaagatctaggaaattaagtttaaaatcttcaccctcaggggaaggccttgtcatgcctggtatttcttctcctggctttgctgcagcttgtattagtatgcagggaggggctttggttttgtgcagttccaacacaccttacagtgaagctgtggtgccagggagcagagtctgtccaagataatgctcatgtaagtgcccagggtggtgcctggcctaaagcataaggagatttagaaactctgccacaaagggggtctaagaatgagtcttctgctacacagaattaactccaaaaaacaaggtcagagctcttgaccttcaggtagtaattatccacataatcctcttttcctactgcttatgaatactgcaattgaaagggtcagaggtagtctgaaagcagggaaaacaaaagaagtcaggagcatggaaattctgcacaccagatggtttgtgtgcccagagggcaattgagaattaagtgtagtaatggaattacactacttttattggttctatgaggacaagcacttggagtaccaattatattctgcgtggcatactttgggtgctgagtaaatattagtaacttattgaatagcacataacatctcaactgccatgtaaatctctgtgagtgcagggcattgtcagaggtggtggtgataatattattgagaaagtgactagtgtctgacttttctagcttgttaataaccacttacctatgtcccatctcctcattctactttcctgtttggatctaattacattcagttgagttgcctgtgtctcctgagcagttagagcaggtttctcttggcaggattaatagtaagaatgtctacattcagttcacagtgtgcctaggcagtgttttgtagcaccatatctaaattaaaatgaatgccttggggcaactgcagaagctcctagctgcctctagctgatacacagctctactaagtatcagctcttgcttgtgtttcttgtaaattgttgttatgcctatcctttaatctatgcattactattttgcttctagcctcacttggaaaacattcccaagtcatagagatgaattacaatacagaatttctaccaatggcagtacttgcattgttttcagaatctagtgcccaggttttcctactgtttttcttgccgtctttaagacagaatttctatttacatccttgtcgatttttgtatccctaaataaattatagtcttgaagtctggacctgctccagtgaaggttcctacagcactgaagttgggaatcactagagaggcactttgttaattttctttttaaaaaggaatgactaaaggtttgtgacacttgaatgtaagttgattttaaaattccatttttctaaatccagagtagggtttatattgctaatatcatgatatgcttgccaaagagaatagtttgtaaatcctaaacagacttcctgtaaccatgtgttgaatttccagctgtgttgaatcagactttggtccctcttcagaagataaatccaatacctgcagtttctaatggcagaagtggaggagagaagtccctgtccagataagaaactgaaggccctggggcaagcaattgtttcatgaatgtcctttccccagccccgcgccccacccctaagaaatttgtaggcttcatctaccaggaaaacaaaacaaaacaaaacaaaaaaaacaagaaaacacacaccacacaaatgagatgctattgttaaatgcagtatgtaggattagatttgtttccttccaatagaatcactttccttaatcagcacttttataaatggcacacctgcctgattagaacaagttctagactacaggatacagtgtgagcatttcaattaagtccacacaattaaaaactgttgtggttgatgttcttagaaagactttccttctctcgtcttactccgttatggctaagctttattattttatacttctgagtcagcctttgatcatgggactttcccactgtgtggtcatttatatctttttttgtttctaaatgatttctttaaatgaaaaaagaagcgatgtattttagggatatatgtagggatgcttttgaatatttttattttattagattttcctgcttccttactgtcacttaaaatatggagaaccctcatcctgtgacaaggaggtaaaaatacagcagtcacattcaagatctccatacattaacaataataaatccttttgccctgagtaatacagatacttaatccacagagctcggggggatg

SEQ ID NO: 61597 - DNA, 1068 bp, Homo sapiens
attacccacagagaagtataatgagcaggggaggtgatacaataaaaatctatatagggagagtagaattatgatgacagtgttgcctgtgtaaagtcttatagtaagtatatctccaattatcttttagaaaaaaattgtttggtgtctacttatgtccaattcatgatgaaattgcaagaatagccatggaataaaacaaaagggtacaggagtatagagaaaatggcgatagacttgtcgtaaacagagttctgttctaccccgaaggatgtgaagtagacccagggctgctctgagggagtgctgggcatgaacctccctgcagaggaatggctgtcctgaccacagttactgttactgcagatgcagacgggaacaaaataacgctctggaaaaaaaataagatgatttagatcatcacaggaaatccctacttttagagttagtgtgtttccgaagaccatatctgaagcagattgctgtgagggaaaatcctgagtgtgcatgatctctatcctaattaggagcaaacttgatctgttccgacagacatcagttgcataagtgggttaagtggcaagaaataaagtctagttctttattaggtaagtgtcaaatagagttctgaagtagcaaacaaaaaaaccttagtaacaacaggaagcagttttcagcctttgttgcagtgccatcagttgtgaagtttgtggacaataattcattaccagtaataaggcaccaaaatttgtaaaatatttttcttttaaaaatagaccataacaggccagacatggtagctcattcctgtaattccagcaccagccgaggcaggtggatcacttgagcccaggcgttcgagatcagcctgggcaacatggtgaaacctcatctctaccaaaaataaaaaaaaaattagccagtctcaaaagcttgtctcaaaataaattgaatagattgaaatgaaaattaaatttaaaaagactaaaccgatacatagtcttgttataattttgttaccattgcagtgtattcattttacttggcttccttctttttctttttttt

SEQ ID NO: 61598 - DNA, 1017 bp, Homo sapiens
ccacaattaaaaaaataaaaactaagcaaatgaagcggaaaaaaaaaagaatccattccattgctggacagctgttggaaaggctctctatgatgactcctattggtgtaagttttgtactctgtaaccacaagaacgaatctaaccctttcacctggatgaagacacccagcgagtccaccccagtcttttaaagctaagtagcctttgttccttcactaggtcataatattttgttttgttttgcttatactttgtttgaatcatgatcaagatatggttcacacattgtgattggctgatacgccctttaaatgtctattaatctagcgattcttctgtatctattttttgctcgcctattcacttggtctcctgtttaatttgttgaagaaactgggccattttttccgtagtgttttggtactagcatctccccgctctatagattaacatattcctctgtcctctgtatttcctctgagtcggtaatgggcttgagagaccttgatttataaatgtttgtagtccaactactgtcatcctttggcatctgtgggggattgggtacaggacccctccctcacccctctaccaccactgataccaaattccatggatgctcaagtcccttatgtaaaatggtgcagtatttgtgtataacctatgtacattctcccatatactttaaatcatttctagattacttacaataactaatacaatataaatgctatgtgaatcattctattgtctaggggataatgagaagaaaaaaacatatatgttcagtacagacaaaaccatcctttttcttttcaaatattttgcattcatggttggttgaatccacggatattaatcccgcagatatagagggcctactgaaaataatgattcagtttagatcttttttgagagtaaagggacacaattttatccccccccccccaactttttgtttggaaaagttgtaaagatgaggaaaaattatagaatgaacacccatatgccttt

SEQ ID NO: 61599 - DNA, 4613 bp, Homo sapiens
aaacagggtcttgctctgccacccaggctggagtgcagtggtgcaatcacgactcattgcagcctcaacttcctcagctcaagccgtcctcccacctcaactccccaagtagctgggaccacaggcatgcgccaccatgcctgcctaatttttttattttgtagagctggggtctccccgtgttgcccaggttggtcctgcccttttttgggtattatatgacattttttcaagagtacagaaaagttgttacagagaatatcccccaatttggatttgcctgattgtttctttatgattggactcaggataaatgtttctggcaagaatactatataggtggtgctcagtcctttaggataggcacttggaaggcacatgatgtcactttgtcccatacttgtttataaagtgtccaccagatttctccattgtaaaggtaccttttccccatggtaattaatacataatccatggtgtttagtggttacctttttaatagttttaaaaaccatatgccattggtcatgggagaaattgtatggaatagattatgaacacattagtaaagagttattgccactgatggaaagataattttagacatttgttattctgaggaatggaggggaggtagcaaagtaagaaatgggctctcatgaagacagacttgtgtttgagtacagctctacacctgaacctatgcaaccttaaaaatgttacttaacttcttagatgctcaatttcttttctaaaatagagataatactcataccgggcaagattgttaagatgattaaatgagatagtgcaggagcagcctgtagcctagcagctgccccagggccattgcatgggagacaaggagatccttccagagcacagtttgctggatgtattcatctttagacttattcatgagccttccttcttgggattagtttaaaatattcaggcatgttgttgggaaaatgtgatcaacaggttaggtgcctttgtgaaatttcaaagaaaggaattaagaatttggagatttttggtatcattttcagacatcttaaatataacttacctgtagtagatttgtatagaatcaaattgccatttactcagacctttttctgactggaatccattttactttattataagggatttttttaaacacagtttatatgtagtctgattgagaacagtgaatcataataatcctgtgacccatttacatgcgttactgtaaaagtttcatttcgtacaagtgacaatttttaaaagttaattagacttggctacacggaggttagcaaaaagtgctttgaattatcaataattcagcagggcagacatttctgtataatgcagtggttttatagagtattgtgagatagttatccttaaaataaatggttgtgagcatacatcagcatggcggggttcgcttgaatgtagcgtgaagtgataacatctatgctttctattattggacagagcgcgggacatcagtctttctggccatgaactactagcaacctttgtcctttgtgttacctttagttaaaaacgaaaaatgagcatgaatgctggctgatggccatgtctctctcacagctaaaaattcatctgggaaagaaaaatgggtttggagatttggatttgtttcattgcatgaatgatatgtgacattctgtaaattatttatcagtgcaaggatgacagcagtagcttgaacattgttatatcaaatgaaagcaggaatcccgttagtaagaggaccgggttttagctcaaatctatcaggggaatgttgtcactttaaagccagattgttcttttaattgctatttaaaggaacaaaagtgttcccaaggtactgcagttgagcagttgcaagtaataactatggatccataattatgcagtgctgattatctggcatttaaaaaactgtggctacagtcagtgaccaatttgttatagcttgtctcttttcgtttttctagtacagaatgttttataatctactttttaactggggctacagaaatacatttgcatagctacctcagaacgtaaagcctgtgcatattataagaacaaattaagctgaaagtaaagggaagataatgaatgcccttgtaagatgagatttgcagtcatattaaacaatttgtgaatgtttggtcatgagatggttttttgtttttgatgacatgttgtcccaaggaactaaggcatttgttggaatcattataaccattgattttttttgttcttaactagcatatatttccttcatgtattcagttagcagatatattttgagtgcctactatgcaccaggaaatgcattaggcatttgggctagagtggctgaacaaatgaagtttattctatgctgatgtatatttagagagttagacctagcaaaatcttgtttttaatttacatttaaaaacatttgtgattatgttgggtgttcttgctctgaatttttgattcatgagattcaaatatagagacatcatagtaacattcagatggctagcagacaacatgtgtgaaggcttggaatatgcggtaaaattacagttttcgtagttttggctgttgaaaataatgtgaccagatctgtaggcactgtcagctattcctatggatgggaatactagcattgctgatagtagtaaataacaatggaaatactaaaatgtatgtagatttatacattgttaaaagcaattttcatacgagagttaaagggtgctaggggactagacaaatgttttgttgtttcttatataaagtgggaatgtcaggccgggctcggtggctcacgcctgtaatcccagcactttgggaggctgaggcgggcggatcatgaggtcagaagatcgagaccatcctgaccaacatggtgaaaccccatctctactaaaaatataaaaattagccgggtttggtggcacgcgcctgtagtcccagctactcaggaggccgaggcaagagaatcacttgaacctgggaggcagaggttgcagtgagccaagatcacaccattgcactccaggctggcgacagagtgagactctgtctataaataaataaataaataaataaataaataaataaggtgagaatgtcagagattcaaggtttatcttttttgtttggtatggtgtggtttacttttgaagaccttcgtggcacaaaagccttgttaataatgaccttttcaagtgtcccacagaatcctgctcattctattattctgtcacctaaaaacatatagatattttatgtcaaatatttagtaggtgaataatagcaatctgcgctgcaatatttaataaagtcttaacagtctatacatgatattcatagactataatgctgaacgaataatttattttaagcatatagataatagaaacaattgagatgtccaatgaatccttaattatgttcatttcaggcaagctatataatatataaaggtattagatttcactggtttaataaaaatgacttctgagtcatacattatactgaaatgtattcaggtagtactttagtgtcaaataatttaagagatttatcccagcactttgggaggctgaggcaggtggattatgaggtcaggagatcgagaccatcctggccaacatggtgaaaccccatctctactaaaatacaaaaaattagccaggcatagtggcgcgcatctgtaatcccagatactcgggaggctgaggcaggggaatcgcttgaacccgggaggtggaggttgcaatgagccgagattgtgccactgcactacaacctggcgacagagcgagacttcgtctcaaaaataatataagagtttttttactagcagaaagtgtttatttaaatacgttatttagcagtttttctttgttaaagaaagaagaagctttaagtgaaaaatgtaaaaagcttttgattttaatgtttttacttttgaaatggaaaagtgacagtattttttattttaattttgtcatagccccgtgctgatcccattccaatatgtagcttctgtttggggactaaagaatcaaatcgtgaaaagaaaccagaagaactcctctcttgtgcagattgtggcagtagtggtaagttgtgtttttcctatgtgttgtacaatgacttcccattatcatagcttcatgctatttgtctctctattaaaactgtattgttatttaaggcagttatatggtaatagcataggctttaaattttaaaagaaaaagtaaggaatagagaaaaaagcgtgagtatgttagtactgacatatggatattatatatgcttatataatactatacatatttatgattaagcttttattttataccagcattggtaattcagtgtggagatgtctgcattataggtaaattccatgtagagaattctaagctttcaagctgagtacaaccccatctttaaaaattaatagcaaaaaataagtaaaaattaagctttttctgttaatcttcaaattttttccccagactacccaaacttttttctccaaagtcttgttttaaaattcatgactatttctctagttatagtaatctcta

SEQ ID NO: 61600 - DNA, 3123 bp, Homo sapiens
ttgattgctgcacgtaatttaaaatcttatcatcacttatgacagctgcttgatggttgggtagaagaaatgtttcatgctgaggaatgacagtgttgtgtaatgattcttattccttatatgaaggtttaacgtgataggccctttgtggttcagcagctttcaggtgctgactagaagggagagccttggaaataagacatttcaaaccctgcttgaaaaatgcattctgacagtctttttgatgggctttacagattcattaaaattcttttacctggccatggcatcatggatagtgacaaaagggcatggaaacattatctgtacgttcagtttaatacatttcagccccacgatatccctgttttatgctggtgaggtagtgcctcactcatcagttctgactctgtcgttatcttttgggttttctcacgaggctcattctgaatgaattattcttttgtgtaactgcctgatcaatttagtggtgttcacttgtctagggtttaccctttgtggcttttaaggtggtactttaaaaacacccttccctgtttttatttctttaggatctatttgtctgggtgcctagacagattaaagatgtacttaaatgtgggaagaaaagttcccttcatatatttccttacctctggtgatacacttacttgagttgataagaagttcgagatcattatcttctagatcataacttcaaggcctccttcacagggtataaaggtgtaattctaaacaggtagatcttagattttctgatgtaatcaatctccctttgtctttcccggattgaagacctgccagaggggaggttgatctcctttatgtttgaggtcactgaaaatttctttcccctggtgtttcttacttttcgctcagactttttcagggtaaagccaggggtgtttaggtacagtgttatgttttctctgttcaaaaatatcctcttgttttctcttttaacaaatggagaataatgacttgaggatactgtccagagggtttatgtggctggtgtggttttgtgagccagtcttcaagtggagagagccagaggctttggggccaaggtatgggtcatggcagaaattcaagccctggggtcaccatgtctctttgttggggataaaggatgcctcagagtgcttctctggactctgcgatgggatccggctctagtgttgaagttcacttaatcttcccttgagtgtgctgtgccagcctggatttggctgctttagtcaaaaaaactattgttcctaacgcagggaaatgctttgtacatatttattcatctgataaatcagaagaatagactttgttgttttttcctctttaaattgaagggtcaaaataaaatatagttcattttagggagtttgggggttcttgtggttctaaggctctgttttgacaccttggtaattctaaggaaaaaagaaaacaataggccagcatacctcaacagtgtcctcaaataatggcgggagccctgttgtcacagttcagcatttcaagtgggaattacagattagttgggactcctagttgaccttatggaaatggctgccttctcactctcagaagagtctattggttctgggattgaattgagaccgttcataatgttcaaagggatcccaaaatgtaagttgtttatgtgaaaaaatacccatagcagcataaaaccagaaaaaggaaatatagatggcagcctgtggggaggatcattcttaaatgtgtttcccatatgtgcctgatgcttttcagtcgtccctatctgaagtaccattcatatgatgtcacatttagactccgcttagatttcatagatgagagtaataaatgtatccttctgcttacatcataaagtaaagccaattagaaatttatctgtttttaaaggggctcgatgctttaaatgggcagtattttctttaacagtttttttttctactaaaaattctttaaaaaaaaaaatcattcaagtttatatgtagtaaaaacgtgaggtgaggtatgtagtgcccggagctctgaatgtggtgtccctagcctgggttccagttctcttccgccacttgctgggtgtgtaactttggttttcctcatctgtggggtgtaaaggagaatgtctgcaccctccatccacagagctattgtgggatccagtgagaaaatgataggaagatgatcagtaactgtaaaacatgagacaaatgtgaaggattattccagccactaatatgaatgtgggaatcatcagatagtctaggtctgtggaagtgttagaaatgattttacttgactttcatggatcagcctactttgaaattaacactgttatattctctttgcctcattaagaccaaattatctttaattagcttcacataagtattagatattataccaaatgaaattttgtgtctgctgctcagattgctgggtggttaaatcttacttacagatgagttgtgtgcatgtgtgttttcaaattagcaaatctaagataagtgtacagttcaaaattacagcatcattctaagtggaagctcattgaaacgggagacagaagaaaggctgctgtgatgcagctgggtgagtgagagaaatcccttttgtacaataaagggagcaagagccgtggagtagaatatcagtgcaccctcgggagacctgaagtcttccctgggtttgtctttatttgtgtgttaaccctgaacaaaatttgcatgctcatggagggaactggtaggggcagtgtgtggatatatggacatataaaaatattttaaaagaccactagtttcttaaggtcaccccaggagttggttgcttagtcatccagtttcacattgactagatgcagattgaatcattaggttggaaagaagactcttgactagaaagaaacctaaagatatgatccaaagaagaaaagaggccaggcgctgtggctcacgcctgtagtcccagcactttgggaggccaaggcaggtggatcacctgaggtcaggagttcaagactagcctggccaacatggtgaaaccccatccctactaaaaaaaggaaaaaaaaaaaattagccgggcatggta

SEQ ID NO: 61601 - DNA, 1139 bp, Homo sapiens
acataatttcataagtggctatcagttgctcttaggagaaatccatattctttaatatagcccccaaaaacttctggattgggctctggtttaaccccatcttacatcactattctgttcacattctgcacattggttacattgaacaacttctctctccttggatatacctcgttcatctctccctctgttcatgccatcttccctgctcttcccctcttctggtcccatccaatcacattcatcttttgggtctcttttttagggaggcctttctctaacttcctgctagattctcccatatccctaagccaccccattgtaaggcattaatgctcattcttgtttaatgtttgtctttcctgctgggctatgtgatctggaagggtgggaaccatgcctctccttttcctcactgtatccagtgctcattaaatattagttgaagggaggagagatggacagatggatggtcaggtagccagtctgaggggcttagtgtctgagtcgttattagttttccattgctactggaataaattactacagacttagtggcttaaaaacaacacatttttaatcttatagttgtaggttggaagtccatcatgggtctcaccagattaaaatcggggtatcagcagggctggctcctctctggagactttaagtgaggatccatgttcttttttttttttttgagatggagtctcactctgatgcccaggctggagtgcagtggcgtgatctcggttcactgcaagctccgcctcccgggttcacgccattcttccacctcagcctcccgagtagctgggactacaggcgcccgccaccacgcccggccaattttctgtatttttttttttttttagtagagacggggtttcaccatgttagccaggatggtcctgatctcctgacctcgtgatccacccgccttggcctcccaaagttctgggaaggagaggatccatgttcttatccatctgggttattggcagaattcaattccttgtgttgacaggaccgagatcctggttttcttgctgtcaggtgaaggtcatggccaggttctacaggccacccacattccccggcttgcagccccctccccatcttgaaagcctgtgatagca

SEQ ID NO: 61602 - DNA, 1026 bp, Homo sapiens
aaaattaaagtgttagaggaaattgttgagtttatgaaatcgctaaaccagaggtaaggaattacttgatcagtagcattgctttcctttatctaattactatagattgtgcagtagtatatcaagacacgttacggtcttttgtgttattttaaagttggccatgagaaaataaaatggaaatatttcttcatccctcagcatcctttacagaatcatagaaatttagaactgtaagggatctatggccaattctcttgagctaaataaaggtaagattgctgcctaaaggaaagataggctgaagattttagaatttgatagggtagcttaaatagtagtagttgagatacagtattgcttaaagtgagagaaaccattaagagaaagaatattccttgcccctgattgaaaatggctgaaatccactaattttcaaactgcataattattaaaaagtctgtctttcataagatacctgtgagaataaatagtaagctgtaatatgatgtgaattaccttagttactgaatattaagtcacaaagtacaaaagcagatttgaatgtagagaaaaattcagtgcgtgaaattgaggtcatatgtgcccatgatatatgccttacaggaagtaataaaaaagaggggggaagtaagtggtatacttttaagctgatgggatccattttaagggtggaatttaaattgctgttctttaaaagttaagtttttaccctcctcactatataaggggacagaggggagggctctgatcaaagtagacctctcccctccccgcttcagtgtgcttcttagaagtcgacaagcaagctgtctttgtttgccgttcctgagcagaaagaggagattgataccatttttatctattcagactttttccttgcattcatttgaatgagagaagcctcataaaagaacagtgtcacaggttaaatgcatctgcctgggtgtctctcctgcctgaggtcataatcctgtgacaatattttattttctcaacatctta

SEQ ID NO: 61603 - DNA, 1319 bp, Homo sapiens
aatttccttctctgccttcacataccctttgaagggaaatggaacattctgtacatgtttttgtaatgtactttttcctccctcttaatagattataagcatcccctacatcattaaatattctcctaaacatagtttttaataagtatgtagaactccatagtatagagcagggattacaaacctggcaactatgggtcacagatatgctttgttggtacaatatttttacaagtttgaatctgagtcctctgggtggtgcgtgtgtgctccagtttgccacaatctcactactccctgctgtcttacgttccaatttgcttcagtcacatacattatacaatctaggtccttcctggaggtatttgattttccaaccctctatataaatgaactctaatttatttaaccagtcccttagggtggatattacaaatgtttccaattttttccatccacaattatttccttgaaataaattcctagaggaggaactgttggatcaaaggctagatacatgaaaggctgtatcagttttcaggctgtccagcagtatagaaggatacctattttcctgtattgtgaccagtactcaccgttactatatctccttgagtctaagacacatttttttaatgttttaatatttttgaagtcagatgcatcatacagtatcttagatttgattagagtattattatttttaaaattttaccagtttgataatagaaatatgtctgattatttctttttaagtagtcagattgaacatttcttgtgttttattcttggctgtttgtatatcatcttttctaaagtacctctttttatccattaatcatttttctcttgggatttttacctttttcttcctgatttgcagaagctctttttttgtgtgtagtcatattcatgaatctttttatttatggcttcagttttaaatgtcagtcatgcttagattatataaatatccacatatctttcctggtacttataacattttattttttcatattacaatattcatctgtctagaatttattcttgtaaaggataggaaataattcctcttccagatagatagctatttgttctatcatgcttattgaatcatttcatcctttctccactgatttaaaatatgaccttttgatatgctaaacttttctgtaggctttggttgttctggtctttccattcttatccattgacctatttctctatgctagatgtatagtttgaatcattgtagttctgcagtactcaaaacttttatttaaattttaaaattatattttatactgataatttttttt

SEQ ID NO: 61604 - DNA, 1926 bp, Homo sapiens
tgttggtgagaggcttaatgacatgttgggaacagcttcatggaaggattctgagagaggggccacctctgccctcaccaccttcactccagggaaattgaccttagtgatggcttcctaaggaaaatgacaaagggaatgacgcattttttggagtaaagttcagcatacaggcatccttgagcagcttattacagctacaacttatatttaatatcttctcttaaaatgaaacattaaaatatttttctcatatatatattaattcagggatgtggatttgccaagtctgcagaccaaagaaaaagggaagaaaactacttcatgagaaagctgcacaaataaaacgacgatatgcaaaacccattggacgaccgaaaaataaattaaagcaacgattgttgtaggttgagatcttatcaaaagaaatcatttatgttttgctttaaaatataggtgattgttattctctcagattcctttaggggttttttggcatcattttttcaaactcaagggttgaaaaatacttttccttttgcataagctgtggaaattttttgaaaataacatttttaattaccattggcattttggggtcttctgttggcagtagctgtgatactaagtgacatttttcaagcagcaggatggaagcagaatgtaagaattggaaacagtcattcagcctactttattactggctgagcattagagcttaattatgtaaatattttcataggaattttaaaacgagagggatttgtccatgtctatagcaaatctcttttgtcactccagataacattttagaaaaatacctctctcttctgatagtaatgtagcattaccactttttaagatctcttttatgaaataggagcttctgaaaaacctgcagatgaccacttacctctgaagagttagacagaactatttgacaactgcactagtgcagacatatatataaaataatatattcgcagtggcctggaaatctactatgataaccccattttcactatcttgttgctgtataattgccattaaagcccagtagagcatttagcaggagttagttggaaaagcagagaaaagataagaggtgaaatgaatttattttaacctgtgtagagtatagatttgactatcagcattaaggtgtttacgaatgggatcagtagacttgcacatctatagcagttctaccaacagactaccaccatcttttcaggcttagtgaaagggtcattgtgatggagaaagaatacatgctctgcacacaccttgaacagactccaagaatctcactcccttgcttactccttttcccctaattttatctgaagctgctctcactatcttatttgctctcagaaaaatagtattctcccgcacctttatctcctaagaagaagtaagaaatgcaggctcctttctagagttttctatgaaactttgcaaaaaccctttaaccagtagacattttcaatagattttgaaaaaatttctagaggcaaacatgaaacatttatgaataaaatctttcatggtagtatcatttgaagtagaaattatatgtttttgcattcatcctgtgtaagcattgttcccaacatgggtccatatcctcagggcccaattaaaaaaaccaaattaggatataaactttctaaacagaggacacagctgaaaattgcatctggcaccaatcctaactttttgtttgtccaaaattgtcctttgagcttaggaatttttaagacagtctagggagttttcctttttacatgctttataagcatattatcctttctgggcaatcgattccagatacaatccaaatgcagctttctgatgtgaaacatttttgcctggatgagttccttgttggtaactctcactgtgtctctagtgacactagag

SEQ ID NO: 61605 - DNA, 3949 bp, Homo sapiens
gccaggcagagtccctggcagtagagccacctcagatgagcctggtagctgcacctacctccccttcaactaacagctgaaatctggtcattaaatctttgtatacaagatgatcactaaaatatactcttgtatttgtaattacttaagatatttttataattcagtattgtatctttttaaggctttcattttgtcattattcacctttagctaaattgatcattttgaaagtacattcttgggccccagcattgtcataattcatctgcaaatgtttctctattgtataaaactctgctacaaaatgggtagcttcgcaaaccctagcctgaggtgaagacagtcggccgctgttcatgtaagcagctgtgttagcgagtgacctctagtttctagaactactcaacagtatgggcagaaccagggtacaaagattctgacgccaagtgtctgataatgaccatggtaaatgtgccgcttcttcaccagactctccatgtcatgtctgacccgctgtagcttttctttaatcatttcttcagttttttgctattgttgtccttttttcagcaatattttatgctgtagttaattgtcttctctcctaagagagtattattggttatcttaccatcctaagcacaaactgctgagaggaagaggatgtctttttatgttttcttaaaaaaaagtacaaatttatagccatatccaaactctatttatataagtttgcaaattgaattaaaaattacttttaactagagattagataagcttcttcttttgcttctggataacacatatgacttatttcctcctaatactttaaaaaagacatttcaggaaatcataactacttgtgacaacaccaaaggatagcttgtttttatttaattataattaaagcattgggtgttcttttagtctcttcagcatttttcttgcttatattgcccttgggtccacatggattcttccagtacctggtggatgggccctggaagaaccatgacatgtaaatgcagttgctgctgcctttccaacagagaaacatctaggtggtggcacacacaaaaaatacagttcttaagtttaagcccattgaatgcatctagttgcaataaatttgtttttagatacctttataattctatttattaaatgctgatactattctctaaatttctgcctaggtctgtaaccagtgatgaaggatccatgaatgcattcacaggaagggggtcacctggtaggggtcaaaagactaaagtctgtaccacaccttcatctggtcatgctgcatctgggaaggactcaagcagcagattggctgttacagaccccactcggcctggtgccaccaccaaaatcaccaccacctccacctacatttctgcctctacacttaaagttaacaagaaaaccaaagggctcattgatggccttactaagttttttacaccatcacctgatggtcgcagatcacgaggtgaaattatagacttttcaaagcactatcgtccaaggaaaaaggtctctcagaaacagtcatgcacttctcatgtgttggctacaggtaccacacaaaagctaaaacctccaccttcttcacttccacccccaacccccatctccggtcagagccccagttcacaaaagtccagcacggccacttcttctccctctccccagagttcttccagccagtgcagtgtgccctccctgagcagccttaccactaacagccagctgaaggcactctttgatgggctttctcatatctataccactcagggacagtctcgcaaaaagggacacccgagttatgcaccacccaaacgtatgcgtcgtaaaactgaattatcttccacggcaaaatctaaagcccacttctttggcaaaagagatattagaagtcggtttatttctcactcctcctcctctagctgggggatggctagaggaagtatttttaaagcaattgctcacttcaagcgaacaactttccttaaaaagcacaggatgctaggcagattaaaatataaagtgacccctcagatggggaccccctcaccagggaaggggagcttgacagacggaaggattaaacctgatcaggatgatggtaagcaaaaggtcaaagctccaaccaaacctgcgtcccgtccctttctccccaaccctgaaaaaaatcaaccaatcaattcctatttgtcacataggtcttagctatttctcttgttctcacttcactttcatacagaagcagtgaaactttgacctttttctaatgctgactaaacctccaaaatgttgtttttccaactaatactctcccaccttttattatttatttccattcgtagtgacactaggacccccagatgccttcatagcattgcttatggctttgtagtcccgcatgagtagccactgccatgcttctgccatgctctcccccatgtcacctctgcagccacagcgctgttcagttgtgtgctgtcagtgcttccaacagggggtgtttcagctcttccctctgctccattgctttctcatgacaaagttcatcctgcttccgtctcagcaaagcctgatctgtgactctgtgatgtgtgcttttggatgtgagtgtgtctgtgtgtgtatccaccttagggagaaaacggatttcataatttcattgaacaaattggcccattacatttgctaccctttatcaaacaaaaaccgaaactgtgtcatttggacaaagtggtagaatttattatctcaaaagtgataatgggaatgctataactagacatcgataaaacttctaatcttggttgaaaaatatgatttcactttgtattgctcttactttccctcatatatttattaaagctgtaaaaagatgacagtgataaattcaaataaaaatttgagtatagcagggaaaggatactgctggatctatgagcagtgcttagatgtaaaagcttatttataaagctttaaaaaaaatccctatttgcccagtatgctaatttggtgccattttggtaatatatggtggttactcatgattcaagtcagtgaatacactttctgctggttttaaatgacagatactgaaataaaaataaacatcaaacaagaaagtgcagatgtaaatgtgattggaaacaaggatgtcgttactgaagaggatttggatgtttttaagcaggcccaggaactttcttgggaggtaaggcgaggatcccacattgtagtagcaagtataagatgtggcttctaactattaatatggaattactgtgttgattttatagagaatccctttcaacatcctttgtgattctttagccgttatcatgcccatttctactgactgtacattcaaaagcaatgacttagtagaattgtcgccactcttaaaagtaggtatggactcagctggtctcacaaaataaaacagagtagcattagttgaggcagattttggaaaacatttctaggtgtgaaggaatagatttctgatgagttttgcctaaatttagaaaataacaatttaaaatcattaacaaaaagaagaacatcactgttaaattcaccgatgtttcttccaacacagatggccagccatatgaaaaatgtctcatatttttagctcttctgcattgatgaaaacaatattttgtttcacaatcagttgtagtcagttttatttttattgtccagtaatttctttaagtgattccactttaattctgcttaagttattaccacccagatattgacaggtgaggctgtcagacttctcaaagacgaatctaatatgaattgtgaatttgttgtgtcagtgactacattcggtttctatgaccagtgtggtcaggtagactccctacccaaccccacttcctgttttgtggggaaggggttttctgtaggctct

SEQ ID NO: 61606 - DNA, 1095 bp, Homo sapiens
atttcacaattgattatttaattacagttgtgataaatactacttcgtggaggaataggaaactgtaagcttctgtaataaataagcctgtgtaatagccacatcatttataatcacctaatttctaatctgttacaacagattgttaaatccagttctatcgacatttgtatgtatttataccatacttatttcctttgctatattgtttcttagggtattcgtttgctgtgaatcttacacaaaggtaatgttaggttggtgcaaaagtaattgtggtttttgccattgaaaaaattataaaaacagtaattacttttgcaccaacctatttcataagggtctatagtgttttaaggccatgcaaattcacaattaagattagtgttctgatcttgataagttttgatagtcactggtgaaagaaccaaaatgtaagtgaagtatatatattattattttccttttctttctatttgacagaaaatagagtgtgagagtggggtggaagactgtggccggtacccttctgtgattgaatttggtaaatatgaaatccaaacctggtactcctcgccttacccacaggaatatgcaaggtaatggaataagtctggcaggtgtataacttgaatgtcacatatgtgagaaaggaaaattcttgattctaaagcaggaattagggatgattttaggaaataaattttggtagtcaatgccaagtgcttcccaaactattgcttttgccagcacctttttatggtattccttgttctcggtaaattccttatgctccttagttacatgggcattataaattttgccatttagcttctagattgtgctttctttccttggttaattggggaaatgttggttttgtatgaaaccaaattaaaaaaaaaaaaagaaatttgccatggtgaattattgggtagactttcttctccagttgtcttttatattttttaattaggcctgttacttttatctctgatttctggcattttattttcaagtttttaatagaaatttagcaaaagaaggaaaaatgggagaaagtaagtgggaatgggtagtcttaagagacccttc

SEQ ID NO: 61607 - DNA, 2703 bp, Homo sapiens
attttttagtctgcaaagttttcagtatttataaacttgattttcttatagaatagatcttattttttttcgttagcatgtgagtgtctggccaatcacgtaactggagaaaatgctaagtgttttctaaaagttaagtgacaaaataagagtcaagaattttggtttctccttccttataccatttggttgtgtgttcttgaacaattttaaaagactatgagctttaatttgcataggtaatgataagccatgtgctctgaaagatttgaataaaatttgtacataagtgcaagatttgaaagtagtctcacctgtgtctgcctctctcttgaaaacctttttccccattcttatactccaaagaccttgcaagtgcttctaaacattttcttataaataccagccatgttcattaagatatggaaataaaaaatgttctgatttttaaggtggagaaaaagtcagcagggaagagaggtgtttgtcttttactcaaagtaacagtggaattggtagaaaacaaattaggtcttttgattttcagccgtgctatttactgcatttagaccatatataaatctctgataataactttaaagttacctcttccagaggtggaaatggtaacaactaagtttgaggacttttcagcctcatatgtatgcagattgtttaaaataataaattcacttctgagtaagatattatatctataccactaaccatatataattggaaataagatagtaaatgtgaattttgaaaaatatgcttggtcccttgacaggatgatatccttattaagttgattttttagggtggtggttccacatctgtaaagctttctttatataggatatttttaaggaaacaaattatttgttcacaaagtaaagggagcacatattatggattatattaaaaaataatgtatggttgtttttacattctgtctttactattggctggctttctttctttctttcttccttccttccttccttccttccttccttcctttcttcctttctttcctttctttcctttctttcctttctttctttatttttttgacggtgtctcactctgttgcccaggctggagcgcagtggtgcaatctcgattcactgcaacctccgcctcatgggcttaagcgatcttcctgcctcagcctcccaaatagctgggaccacaggcatgtgccaccacgcccagctaatttttgcatttttagtagtgatgaggtttcaccatgttggccaggctggtctcaaactcctgatctcaggtgatctgcctgccttagcctcccaaagtgctggaattacaggtgtgagccactgcacccagcctccaatgttattatacagcctttttatgatgtagagaaaattgaacaatatttaatcttccccccaacagtataatctatctgatagattctatgatttttaaactttaacagattaccaaagctttacctgtgtgaattctgtcttaaatatatgaaaagtaaaaatattttgctaagacactccaagaagtgtggatggtttcatcctccagcaaatgaaatttaccgaaggaaagacctttcagtatttgaggtaagcgcgtgtaaataaaaaaattcagctttttgaaatctagtactcctaattgttgactatgtgctgatttgtgtttagaaggtacaaagtatacttaattttggcactgaaattcagactgccctttaaaacatctccatgttttggaatgtttatctaaccatattaagcaaccatttagactgatgaagaatccctacttcatcacattaacatttttgtcttccccaaaatccctgtctacactagatatattcaccatgaatttatgatctcctcagctctttgtaaattctactttctttggcaggagaaatgagctttgttcagcagctccagccaatgtctggcaggtgctcactcttccagggaattgagcagctgtacatatctcctcaatacacaaccacctgtgtttccatccacttcttggcagtgtggataatccttttggtgagaccctagcagatgttgggactccctcccatctgggtagatggccacccctgaagaactctgctgttcacaggaaccccttgtggccatatgtctgtcattgtgggtttcttgaagacattttgtatttccagaattgatttcgtagcaggcctttgcctctatatagttgcattgtttaattatgtatctgttgtcagtttcagggattccgttaagctgagtcagtttcaccttgaggagaccatgcctttctcacaggttactgtctgtctgcagggcttttcacgtttctcctttatgctcttccctccacttgcacacttctgttgtctgctgcattttctcctctgtgacccattgtggtgtgcattggtgctcattcctaggtgcttgaaacaagcctaccttgtacagcaaacgtgatgtcctctttctctggaatatagtttcacttctggattttctttttctgaattgttcaggctgaaacttattattctgccttacagttctctttatttctggcctgcagtgtcttgccatcctattaaataaagggaaggttgtaggtttctcacatggaccaggctccttctcagacaggtctgggcccactagtttttccccaaga

SEQ ID NO: 61608 - DNA, 2911 bp, Homo sapiens
ctatcagctctttcggtaagcttggaggaagaagggtattgttgctgggaagattaggtgatatattagttcttactaaaagctaggcacttttgacatttcaagctggttagttctttgttgtaggggctatgctatacagcgtaggatgtttagcagcatctctggcctctgctaattggatgccagtagcaccaccaccccttccagttgtgccaaccaaaaatgtctccagacgtagccaaacatcccctgggggcgcagaatcacccccagtaagaaccagtgggctagaaggaaggctgaatgcacgttgcctgaccttcctgttggtatgctatcctgccagccccagccagctgaggtgacagagctgctcacagttgaagcttagctaatgtcacaagttcagctttcctattggctccttccttgatgccttagatcttttcttccaaccaaaacattgtttctcaaagctcaaaacacattgttggccttaagtaattatttcataaatcagcatgagtcagcactgggattgaagctctcataaatccatggaacgtcttctcatgggcaagggaatcagtcttgttaggatggtaagaatgggctgttctttcagggcaggtgcttttggaccatccagagatgagaggggagacatcagaagcatgtatgtaaaattcacttatacgaataaggagttggatttgataagtaccgaggtccctattctagaatctgagttaatagagtataacatttgggcaacttttctcctagcagtttcttacaaaacttataaaataaaggaggaataatcacacattacgattttctggccttccctttctttattcctcttacacttttcacaaccaatcagaattttcttcagcactgtcatctctgtatttttctggttcacagttatgtatatctccatctttcctttttgtaatatactaccatttccaaaagggccatactctcaaatacatgtaaacttcctttaattaaagggagaattgtatcctctgtgcccattgcccatatttgattgtgttgctatgtatgggacctaggttccatccgagggaaatagttatatgaaatctaaaaataatttgtgcaagatgagaacccgtatggtccacaggagacctgagaatggtcaagttcattgtttcagagctctggttagcaaatatccatttcccttaagaaaagtgctagggaaattcttcttgaatctgctgtgttttctattttcaaagagtaactacatttgatcaaagaaattggcatctgtgcctagcctcctgtctatagccatcagtatcacagcttgattcttttattttgaagagaagtagactgtaatcatagtgcttattgtaggttgaaattcatatcactttctctgtaagtattcccaacatagatattttatcttttccaattatatttaagatgatgcttgggataaaaccaaaatggaaacctctttgctaatccacacttctgaggaatcagaataatacagttcatttattttagttttatgtgaaacccttttgaaacaacataaagtttaacttacttgagaagtattttgatctgtttatatttccttaatacagatttattcggttcagatagagaggacatgcctgatcatttttagctcagaataaattacaagtaaaaattactcctttactagtggtttggcccttctttggtagcttaaagagaaattttaactaccttaaatgtaccctaatttaagagaaaatgtggaattctgatttgccagtgacagctgttttctggttaaagctgtacttgcttaatagagtgttttaatctctcagtttaggatttggaaataaaatgatgtactttctgaaataccatatagaagaaacaattttatatggtgcagtatttttatgttaaataatgttgtctgtttctttttgctaggttgatgggaatatgagcaaaatttattgccaaaacctttgcttgttagccaagctcttcctggaccacaaaacgttgtattatgatgtcgagccattccttttttatgtccttacaaaaaatgatgaaaagggctgtcatctggttggatacttctctaaggtaaaacaagagccagcatgaccttcattttctttttcaaaatgtttttggtagagcccaattctttgaacagggctttttcattactataatttgaataagtgacatgtgtttttgaaaagctcaggttcttgttcagagctcattttaaaagatgaaaacaaaaaacatggtgcctagtaagtgtgtaaaggacctcagcactgtgtgccgccttgatgacactctaattgctgccttgtggaccacttagcgtctttgattttctcagtgtttagcttatttccgttttccctttaagtggtgtcaacatgaaggtttcagtttagtgtagcatttaagagagaattctcctttctccttgttgccttccctctgtggtcaacagtatctcagtgagttaggacgctggcatttggacagtcaagctgataaaatgactggttttacacttttgtctcttattctctgtgctatggttttaagttctaaagcaatctcacctttagaaagcctaagtatcagccgggctcagtggcttacgcgtgtaatcccaggactttgggaggccggggtgggcggatcatgaggtcgagagatagagaccatcctggccaacatggtgaaaccccatctctactaaaaatgcaagaaattagctgggcctggtggtgcacgcctgtagtcccagctacttgggaggctgaggcaggagaattgcttgaacctgggaggtggaggttgcagtgagccg

SEQ ID NO: 61609 - DNA, 4480 bp, Homo sapiens
cgagagaccatcctggccaacatggtgaaaccccgtctgtactaagaatacaaaaattagctgggcattgtggcaccctgtaatcccagctactctggaggccgagacaggagaatcccttgaacccaggaggcggaggttgcagtgagctgagattgcaccactgcactccagcctggcaacagcaagactccatctcaaaaaaaaaaagactagatgaaactaaaccatattctcatgtgtcagctggaatctagaggactctggccctttggggctattcttgaaccacattctagaggttattagaactacagttcaaggatagccagagaagggctggaatgacctggaaaggttcagtgcaaattgttacatgcatatgactttccaagcacataatagatggctgtaaacagaaaggaaagaaggattagttattttattcatagcttagaatttagctgtagtaacatgttaagctgcacggaggggaagaaggatcactactatgttggatctcaaaaaactccgaaaggtggaaatggttctggacaaagcaaggaatggtatcaaggatgaattctcttaacccagagtacatttctttttagagagagtgacccatttgtctaactttgcaaaacagacgaattacttgaacctttgccattgatgtgcacatccagtgagggacaattcatcttcttagaaaaactgacacacattgcttcatcctcattttttagaggctccatagacaactacaaatgtgcaaaagttgggagtacatctttttcacaaagaaatcttcaattctgccctgtagggttttttccacaaccatctcctgtgatctttcaaattggttcattaaagatctgggtgttctgaagtaattctttggtgtggtctgtaccatttgtggtcagtcttatttgtggtttatatttggccagagcatccacgacctcaaaagccttttccagatctctgtgtaggttttggcaacttctttgtactctgaataaaaaaatactgccctgatgccacatcccatgaaagttgcaaattcttctttaactgtaagagctgtttcttaccatgttctacccagtcttcctcctggtttcaaactgttcgtaatattttggtctaacctttgtttggaggctttagggtttcttgttgttgtctttttgtttcattttattttgttttcctggtttgaaatgcagattatttctctagctttttacattgactttttattcataggagaaatatatgtgtgcacatctacccacacagatactgttttagtttcactgggacatttgcccaaaggcagaagacagattgctgttgcagagttgtagattattattatatttagcaagatagccagctaaatcctaacttactccactgggtgactccctgggatgttattttctctatctctgaagttatttgagcaaggaaagcatttcttttatgctgtctatattctgttttatttggttcatatatttccttggattctttatgcatattttatggcactgactttcaagaataaagatgtagttgagaggcatgtcagagtcgatggtttgttgttaattgatagtttgattgattaatatagtaggatttttctgcttgatcctgacctaacccattggctttctttagtggacagttttacaaggacagtggcaggtgcagggaattgcccacttcagcagggctctgacatacttgatctgtttctccttccctcaggaaaagctttgccagcagaagtataatgtctcctgcataatgatcatgccccagcaccaaaggcaaggatttggacggtttctcattgatttcagtaagtgaagtactttatttactttcatgatccaggaagctgatggccgttacaggaaacagtaaaatataaaactttatttaacctgcattgttgtttttatcaatagataatgggctttctatttatatttacataggttagaacatcttcctcaagtgaaaaatgtactgctgctcagtgattgtactctaggaaattgagactagatctctcggcagcaggcctcatgcacaaagccattaccctgaatgaaccgacagaattacattccattttgtggtgctcatgctcattagcaccaaaagaggcaattatttgtgattaaagctaaaggaagtattatttgaaaggattttcagctctctgaaattttgcctataatcttgtacagtacaaagcagaaaaggtatatttccatttagaaaaataattttctaggcagcttatcctgggccttgctagtagaaataactcttaccttattttgttaatttcccttttctattatggaaattaatacagtgtttgtatctagaggtttcccaagaaatatttatcttatatgcactcatatcttctgaaccttctcagttaaaaccggcataatatataaaagtatgcacatggataatgtttttaaaaatggtagttttttttttcctccttgtttatattatactggatgtgtaaatgttgtgttaggggtacatttggagaatcaattcaaaatatctagataacatgatgaccagataacccatgataatagtcatttctcgtcatgtaaaaatctgtcactggccgggcgtggtggcttatgcctgtaatcccagcactttgggaggccaaggcaggtgggtcacaagatcaagagatcgagaccatcctggccaacatggtgaaccccatctctactaaaaaatacaaaaattagctggatgtggtggcacacacctgtactcccagctactagggaggctgaggcaggagaatcacttgaacccgggaggtggaggttgcagtgagccgagatggtgccactgcactccagcctgggtgacagagtgagagactctgtctcaaaaaaaaaaaaaaaaaaaaaaaaaaaaaaaaagtctgtcgctaggaaccaggtgcttcttgattaccagattgcagtttatctgattattaactgaaaggaggaaaatttaggactttgcacaatcttcatcagctacatcagatgcaaaaaccacaatgtaaatgcgcttacagaaaaccatgaagaaatatagtgaatctaaatctatattgttaggtattaaaagattaaggtctgattaaagtgtaaaataactgaatagcagttttggactgatttatatgatttattgacattgaagaatatgattcttttaaaagaagaattttgattatttttctctttttagataatatttttagttatttattaattaccctagtcttatctatactttcctgacctaattatccatgaaaccagtaatcccaaggagggccaccttaccaaatgcagtgtaccatttttatttttatagagtcctagctgtaatcatttctgagggcaaaaccatttatcttgttctctagttttgtgtggctaccattcataagtagttcataaatatagtttctggtatgcatagcagccattcaagccttaaatgtttggtcatatctatatgcctacagaataaggcaaactccttagctcaatatttaacgtcttccaacatctagttccagcctgtcctttaggctttttcatctactaatctcctttttctcaaatagtctgagcatggtcctatacctctatttttttgtctattcagtcccttccttgaaatgatcacctcgtcctttcctagactccgtctgttcaaaatcctgcccattgttaagagccagctcaagaatctctgctttttgatcccacctcctggaattttatctcatacctttattttatcttataccatattctatatggtatcacacttacactctgttcacccttttatgataattattgatggaggtttcatacttccaacttctctgtatccactaggacagtttcctttataataatatgtattagatgatataaattaaattttattgatataaactaaatttccaaattgatatatggttgctgtccacaatcattgtctacctaaaattaaaaaggaactggtacttactaggtaaaagttcaagctctaaattcagtagtatcttatttgtacagcatgatctggcactaaggccttctacataagagaacaatctgggtaacaaatacattatcttcaaatgctatgtcttttttttaaccattttagtgaaaactgttactagaaactaccttgtattattaaactacagaacacattgaaaccttttctcagtggctccaggccaccatgatgaatgctgtccaccaggatgtgagcaggcaaagtagtgctgagggtgtggtttttttcttttctctttcctgtacacctagcattgcccctactggagtgagttaagaagtgcagtgaaagatttgaataaagt

SEQ ID NO: 61610 - DNA, 1836 bp, Homo sapiens
tatggtttttactgatcataccatagtaaagttgaaccaagttgtaagttgtaagttgaaccagttgtaagccaaggactgtctgtataaagaactgcaaatgcagggctttgaacactgttcttcagggcagcagagtgaggtggaatggtcatccatgggaccatgtgctgcttgcagagtaagtcatttgtatatcacttcctagaccagcttctctgggatttgtcagagcaaggctccccaggaggccatttgcagagtttggccagagtgagtaaagggcaccaactcccaatctggttataaactccctagtgggttttatgactctttgcccacaattggaatgggtggaggagagagtgactatcgtggattggttgagaacgcattccttcctcttggattctaggattccctttctcagtcagaaaatttgaaagtcttccccatctctgtctgtaaagtctttctatctctctctccctccgtccccaccagacatctcagaacttcagagaactcccttgcccacaaaacatttgcagttcctacttcagagcctcacaccgtcaaggcaaggagctcttcttctcccagccactgctgagcactgggggcccagagtgctccctcccaagccctggactgcttctgctgctggggctgcccagcaatgccttatccatctcactatttttttctttaattttgaaataatttcagacttagagaaaagctctaagaataataccaaaatttcccgtacattgttgcacatgttcacattttatcacatctgttttctgctctattattctcaatctctccctttgtttctcttctctctcatattttcttttcagaatcatttgagagtaagttgaagatgtgttgcacctttacccctaaatattgcagtttttctacaaagatgctctcatatatagccacaatacaaattattaaaatcaagatattaaagtaatttatgcacatttgttcaaattttaaattttgcgagattatactgatgttctttctggaggaaaagaaaaatctcctactccaggatcacatggagtatgtaattatgtccctggggcctcctttaatctggaatagtacctgcttttttgttttgttttgctttgcttcgtgttttccatgattttgatattttttaagcatacaggccatttattttgtatggtgtgcctcaatttgggcttatctgatgtttcctcatgattagatttaggctgtacattttttggcaggaataccatagaagtgaccgtatgtccttcccagtgcatttcatcaggatcatatgataatacatttgtctcatcactgggttaaggtggtaactgccaggcttcttcactgtgaaattaccatttttcgctttgtaatcagtaagcatctggtgagaagatactttgggattatataaatatcaattctcatccaattttcacctcctagttttaccattcacttatggctcttatctaaaataattattactatgataattaccaaatggtaattttctaattccattctttctacaacttactaattggcattctagaaggaagaattatttcttcttccccatttatttaatttttttgtataattgtgggttttaattttattctataggttataacctgtcattaccatgattgattttgatgttccccaaacatcaaattgtcccagatttatttatcagcaaatgtttcaagtgggttcttgtgccttttccacatgcttccatcctgtggattcttccttcctttctgccacagcatgatgttc

SEQ ID NO: 61611 - DNA, 1916 bp, Homo sapiens
aacaaatacatttctagatgacctctggaattagaattacagatactttttattttcttatttatactttttgctgtaactaaaaagaaaagaggccagagtcaatggaggcctgacagtgaggatgcatggaaaagaggcaggtcctgttcgttccgtagcaggagcatgcctggtgcagagtggtgctcagaaaatactggtatttattgaatgcataactgagcttggagagatagtgagcgcagctttatgtagctttcactgtgcgtttggatgtctacgtgcactttgcacagactccagagctcagcagggggtctgcattagagggagcagctgggagtcgtggacatgcggtggtagctgaaaccatggatgtgggtgagggcaaccagggggaagtgtatagggaaacagggctgagggtggagtgcttggagtgttaacatctaagggactaataaagaatgaggagctcgccaaggaaatttgcaaagggcccagaagtcagaagaaaattgggagataatggtgttaggaaaaccagaagaggtcagtatttcaacagtaacagtcacaataatcatcatagctgccacttctagagcccttgctatgtgtcaggcactgttaccggaattacacacatttactcacttagtcctcacggagaccctatggggtaggttactgtgaccatctctcttctgggacgagacactaagagacttgtctaagatcatcccccagagattcagtgccccagagagaaagtcataagaagtattctttggacaactgtatattaagtgcgattaaaagtagattcaaaaagcttttgactgttttattctgtttggttgggcgtagcgtctcacgcctgtaatcccagcactttgggagtctgaggtaggtggaccacttgaggtcaggagttcaagaccagcctggccaacatggtgaaaccccatttctactaaaaatacaaaaatatggatgtggtggcatgtgcctgtagtcccagctactcaagaggctgagataggagaatcacttgaacctgggaagcagaggttgcagtgagctgagatcaccccactgcactccagcctgggcgacagagcaagactctgtctttttttttttttctttttttaaaacaaagcaaaacaaaacaaaacaaaagcttgactgtcaagggctggggacacaggaacctagttgtctttatttttaagctggagagcctggagcatgtgtatgtacatcagtagggaaaagaaagagcagcgctgatggaaaaaatcgaggggaaaacaaaaagcaacatccaggcaggtggtttattacaaagtctgatctggcatttgatgaaattcaacattctctcctaactaaaatacttaaacctactaactagaactataagggttctaaatctcagattaactttttcttttttatcgggggcagacggacgtgtaactaacgctataaagggtaaaggacagctggatccaagtctacagacttacgtctatagtttttagagaccagataaacttgccattaatattaattaatggcaagttcgtcagttaagttaaatatcagttaattgtacattcaggcatttctaaaattagtatgtttgtggaataatcataaaaatgtgtcagcagtttcaatttttggctttctttattcagtattaaaatattgggcagtccttcatggaacaaggctgtaactataggaagcagaagtgattgaatgaattaggcattcacttcggggaattccctttgctggctcttcatatgttgagggtttcaccttagcttttgtgaggtccgtgtgctatttaaaaactgagtctataattaatcagcgctgctagaagatggtgcaaa

SEQ ID NO: 61612 - DNA, 2394 bp, Homo sapiens
attgctcctaggtgaccaacctggacagcagttactgtactggataccgtaggtgttagtggttgtaacataatggtatttttgtatctaaacatatctaaatatagaaaaggtacagtaaaaatatgctgttataatcttatgggactaccattgaatatgtggtccatcgttgacctaaacatcattatgtggtgcatgactgtatttattgttgattgcccatgtctttcaccaaaagtaagcttcatgagagtgtggactttgctctttgctgcattctgatcttctagaagagcctggcgcttagtaggttcttattaattgttgaacaaatgttaaattaattatgacgggaagaacttttaaaatgtgctttcccttctagtgtgtgattcttagggacaattttattttattagaacataaaccatcagcactggtttacttacttccaaatgatgctaggtatgccctgtcttctttcgaggtctggtacttttgctgaaatgcagcctctatcttaagatcatttcagttgcatcagaaagaagatgtcactgcctgctctaaaccttgggcggagaaagcagagctgtgacataatccacatttgtacatagcaggttgaagagacacttaaatcttttgcttactttttctcttatcagataattcatttcttgattgcatttatttttgaaaggaaaataccagctttagccataagaagctgtcaagaaagcttctctttgcttagccttcccagcagctacgctcctgggtgagtgcagtcaaggcaatcattaaagaataataagttatgcttttgaaatggtgctcaagtacttcatagccttttctaagataaggagcctcccacctttgcccccatgacacttgttggaaaatactggaccagcagctatatccttgggcttttgctgggttttggaagacacattttgacctatgtaatcaagtataatgatgacatttattttaataggattctagtctgtaatataataaggaaaatggctatttttccttattttctcattataatatgttacactaaaagcttctgccattactgttttattatattggtctgaggtacaatatattttaatatgctaaagataacatcaaggttgaaaattgagctctcagtgatttattcagaggttgactgttgctgaatgcattgaaatgagttgcatgagacagtgcggctaacgatttatttgtgtatctttttttaagctaagcttgtcataaataagagcaaataaatagctcttatagaatagtttgtattcattgcctcaatgaaaacattgtaaatatgaaacatacggtctgcagtctctctcattttttctgaaagctagtgttttgccttacatagctcagaattttttcaagttttggcatgcaggtggttggttttttttttttaccaaacaaattttttgtctgtttggatttctaacgttgactggcatttgcattgagttattttgaaatccactactggacaaattccattcaaataattggtatgagaataacctaatcttcagcagaactggaacaaaatgaaaccttagtgggaccatcaagagggcaggaacttggtcattgctaaactccaagccatgagcacagtgcctagcacatagaggatacagaataaaggattgttgggggaaatcaatgaatgcctgagtctagttaatccacttctttgtatgactgtcaacacctgccagatgcatccagctagcttttgaccagtagtgcttaaactcagatctcctctcagtctttgttttttacactttatttatcccttcatcccatccttcagcaaacatgctttaaatacactgtgccagggatggtctaggtgatgaggacataaggatgaatgatttagtccttgcccatagggaagtagagggtcagacacaaaattcttcccagtcctgcaatttcaaatttcagagaggctgtggcagtgcagaggaggaaatgcttccaactctattttccatttacccagttaagatatatagaagagacgcatttttccttgcttttctttttaaagactgggtctcactctgtcacccaggctggagtacagtggcgtgatcatagctcactgcagcattgaattcctgagctaaagtgatcctcccatgtcagcctcccaagtagctgggattacaggcacatgccaccattcctggccatttttcagggggaggggtggggggtcagctagagacaggctcttgctttgttgcccaggctggtttccaactcctggcttcaagttatgctcctgcctcggcctcccaaggcactgggattacaggtgtg

SEQ ID NO: 61613 - DNA, 2834 bp, Homo sapiens
ttgtactctaatattcatgctacattttcatgtttaccaatataaaaaccttttttgtaattatttatatggagtcctgctttgagttaacatcatagaggaacgctttttttcagcaaaattgttttaaattaatgtttctaaagtgtataaaaatggttgggtggattaaaagcaattcagtttcacatgaaccatttgtccacatggaaataaatatgcagcacaattacacggcagaaggtacgaaaaggtgttgctgaaatcatgagaaaatgtaatacaggcggacgtcagtctccacaataaatttgcatatgtccttttttgggggcaaatacagtcatcattttaaatgaagtcgaagagttatttctgtaaacaaaacaaaagtcctccttgtcatactagacagcaaggaagcaaaaattgttagggtcatgtcaaaaagactcaggagtcaatttgaagaggttctgaccagacaataaatataataataaagataaaaaattgcaatttattgcaacttgtcaaatgtttaaattcacaagttcataatgatactaaaaaacaaactgatttagaggataataggaaccagtttattttcttgaaagctgcaaaaattgcaattaaaacatttatcctgcctttcttacataaactgtacagtgaagtaatcaagtagtaaaggaggggaaacatcattttattttttaaatttttaaaaattttttgagacagggtcttgctctatcacccaggctgtagtgcagtggtgcgatctcagcttactgcagcctcacctcctagactcaagagatcctcccacctcagcctcctgagtaactgggacttcaggtaaacaccaccatgcccagctgattttttcattttctgtagtctctttatgttgtccaggctggtcttgaactcctgcgctcaagcgatccatctgccttggcttcccaacgtgataggattacaggcatgagccactgcacctggccagaaacatctttttataaacatattccagctaaccaatgaaaataaaatgtacggtggctcacacctgtaatcccagcactttgggaggccgaggcaggcggattgcctgagctcagggagttcacgaccagcctggacaacatggtgaaactccatctctactaaaatacaaaaaattatccgggtgttgcggcatgcacctgtagtcccagctacttgggaggctgaggcaggagcatcccttgaacccgggaggcggaggttgcagtgagctgagatcgtgccactgtactccagcctgggcaacagagtgagactccatctcaaaaaaaaaaaaaaaagaaaagaaaatgacagaattaaaatataaccattttgtaatccccaccaccaccatgaattaatggatctagacaatgaacaacatcaacagttgcaaaaaggacaaccagaaattatctatcttctgatcaaggatatttgtagtcttgccagtggatggaacccaagtctaatcaatcaagcactggatctagttaccattttgcaagagatacagagtaaagaggagcatactgagctgcagtgcaagtaggagatcagcaaaatccagagtgaggacagtataggtcaagtggccccagttcaaccacagatagattacaaggaaaagaaaggggtgaaggtggaacccctagattaaaatgacattaagatttttttttttaataggcaagactgttctagtgcctggactgttttggtgatgaaagtataaaaaaatgcaagagattattgtgaaagtcaggatagtggttacttatgagagagaaaggagaggtgattggctggagcggatagaaagttttctggagtagccggcaaacttctatttcttgatcctgggtgatagttacaaggacagttgccttataataatccattaagctgtgtatttgttttttgtcattttatgtatctctgttttatttttgttttttagaaagcaatcatcttaaaatgggaggtgacatcctatggtatcttagtgcttgggtttttgtaactcttgaaactgaaaacttactcgatttattggtggcatcctactagtcatgttttaaagagagacacagttttcaccttgactgcttgaaaatgaaaacttgagtgcacaagtatttagtgtacgggcatcaactccatgtcagcctttgcagagccatttttatgtgaaggaaatgtactgaaatttacttgaatcaaatcctctgaagtgttgagtctagttcattagagaacagcattcctgtaaatttcactttcactcttaaacttagaaaaacataattgaagggttgtgcgttaacagaatgaggatgaaatggaggattcggacaaggaatggtgatgcagagtgaggatggagtacagagaaaatatttaactgtgagcccgaggagagaaagaagagacactgcagcatgagaactgttttcccatttttctttttttgtgggaagaacagcaccagcagacactgtaagatgtgtacaggaaaattgctctttcctcctcctaggttgctgagcagttctaaaatttgtggtagatctttaggcactagaaacagaacttagagaaaagatgttaaaagttagatttttaagaaagggaagaaaaaggctacgatgacttaaaatgtcctgaaatgaggctctgctatttatcagaaaaacaggcttccttcttcttaagaaggtgattgtctgttcatagactaggagtcctgccctggggttcacccagcgttggagctt

SEQ ID NO: 61614 - DNA, 2263 bp, Homo sapiens
ccctgtagcttttgagttgcatccagttaaaaacttgtagaacataatgaatgtttttagagaggaaataaaatgaatgatgcccgtgaatttgttttaaacattgtttattttacctaataatttatataaatcttccttgaagaggaagagaaattaccagatttaattaataattggaagctttttagaggatttactttgaaatacctccctgccaatttttcataaattaagcataaactttctttgacctcatcacacataattaaatagctgtggaagggttaaaaccaactaaaaagcaattctgtatctcaatctccattctcctgcaaaacttatacaggaagtttgtttcagttctcaagcagggtaattacaagagacagttacataatttacacttccaatctacttgtctataatcacacacttctacctagttgtatatacccccatgagtatgtgtgttgtactttgatttgtaaatgatgattgcagtgtgattgattccttgcaatgtagcatattgaattcattttttaaaaatgaactttagctgttaacatgtctatttgagttcctgttatttacgtagtttgtggttcttgtgttcagcagttgcataccagctaacaaattaaactcccagagctttttttctcattaaatttggaaaatagagtgtctgtatacaacctaaatagaaaagtacctagtacctagtaggcactcaactgttggacatagcacaaaaccatttcaagcctttgcaggtggaatggagattctttgattaacataatataaagtctcatggggataatattagtatattgtggtgaagctctgctaatattaatgtattgttactgaagtctaaaatttagccaaacagtggacagaatagcggttcattccaggggcttagagaaatgtgtcatctacaacctaagaggtagtcattgctgtctttaatgctgctggtgacgatactgcatatgtgtttgtttttctaacagctaacatctactgtagccagtttggactttaagattccctaagattaaaggctaagtccctggccgggcgcagtggctcatgcctgtaatctcagcactttgggaggctggggcaggcagatcacctgaggtcaggagttcgagaccagcctaacatgaagcaacccgatctctactaaaaatacaaaattacccaggcgtggtggtgcatgcctgtaatcccagctactcgggaggctgaggcaggagaatcacttgaacccgggagatggtggttgcaatgagccgagatcatgccattgcactccagcctgggcaacaagagtgaaactccatctcaaattaaaaaagctaagtccctacatgacaccaagtccatgggcaaaccagccagtcacttgtctggcccccctcccaccctagctccgctacccagggtgcctttgtgctgcacagcttcagagggggctcagcaataaccctggggggacacaaccattgatctccagaggcttcttacctcaaatcacgtttcaaagcatttgggagataaataaaaaataagcgaaaagaaaagtagaccagtggagtgggattgtttgtctagataacctgaggacaactagcgacagtttctcttacatttccaacagtggttgatcagtcagattaggtgatgggctgtactttgattttagaaagttatctccaaaactgacagattcctttttgaaatgtactttgtttgaaaacaaagaaaatttctaaggagatttgtattctcattttttctttcttcaatcttgctgtgtatttttgtttgctgtgtgaaagctcatcatccagaattggaattacaacatactttgtcctatttttaaaaattacagctggtacatacacacaacactcccttccacatatacacacagcattttagggggcttgtaggagagcaaatggaaaggcaagttgctattccaaccatcctgtctcccaaacctggttctgaaatcagtggtactgccatgattatgtaaatagcacccctctcccaccctccaccatcggtctgtggggttggaccagaccagatgactagatattagaatgaagtgtctcagctgcctcagtagaacctcagacctataaaagtaggcaaaagaagtctcagtttttgcatttagtgatttagttaaggaaaatgttcaatcgcagtgttttcgcagcaggagaac

SEQ ID NO: 61615 - DNA, 1728 bp, Homo sapiens
aaagcattttaagtgcatgcagtcatttgtttggcgcagatgctttatttaaagtgtatatgtgttcgattaagtttgccatcttaaagcctttcagtggtaagttcttgttaccagaattttgtaacttagacatgaaaattttatccaagtttcaacttggggagcaagcctagggggagccaggtatttaaaatgctttcttttagtgaaaactgaagaattaagttgtcttctatttcaattgtgttattttctatttcaaaaactatttctttttttaatgaatctctaatgtagacttttgcctatttataagagaggaaataattttaaaatgccaaattacttcatctttaaatttttaaaaataaatgtgtttttcctaaaatatcctagaatttaaaagtggtttgaactgtggaaaacttaaaaggtcaaagaggaagaccttcctctgcatgcctttctaatttctgtcatgctgaaggccatagcactggggctttctcattacctaactgaaagtgcctctgggtcacaaatcagagcattaacttagtttggtgataggcaatgggcttcgtgaacaatttggttacttcaacaatttggtaagctattcttacatcaacatatttttaaaaattcttgccttccccaattttagtttgggcataaatgatactgacagagtataacatctctcattccatgatcattttatctgtgtggcaggtgcctcattttcctaacaaggaaattgaaggatgaatctatatcatagtcagtcaccttattaaaaaatttttattcttctaatccactagaccaggaactcggttgtggtgacacaccatacactcacaaatactcctcagttgaatgtttaatgaaatgaaactctgtgaagtgtatcacacagttgtttacggagtggccatcctcccctgcgtcagttcagagatttgcctgctgctgggatttctcattaggcaccactgctaccactatagccctgtgaggtggcaaaaatgaagaagtggtgctgtaccccatttaatattctggcccaagtatagtcccccaaggccctttccttactgggacccataatatatctgaaaccaggcaagtcatgaggttgggtggaacacagacatctgtggctttttaaagccccaagtgagtctgatgtgcaggcagggtcgagaaccactgggctatacttgaagacagaagaaggaacaataggccaggtgcaatggctcacacctgtaatcccagcactttgggaggccgaggcaggagggttgcttgagccgaggagtttgagaccagcctgggcaacatggtgaaaccccatctctacaaaaatacaaacattagccaagcatggtggtatgcacttgttgtcccagctactcgggaggctgaggtgggaggatttcttgagcccagaaagttgaggctgcagtgaaccaagatcacaccactgcactccagcctgggtgatagagtgagaccgtgtccaaaaaataaaagaaaaaggagcaattaattctctcactgggtaagagaatcaggtataaatgccatctcacacagatgtctctggccctcaggctgcttccatgtggcacgtgctatcctggcacctccggctcaggagcacatccacagaggtctacgcttctcaacacaggggcggtgcagagggagggaagt

SEQ ID NO: 61616 - DNA, 1664 bp, Homo sapiens
actgacatgcagaatgaccaaccccgcaagggagtccacacctacccacagaaccatggaaccatctggtaaatcccagcatggtcagtcagctcagagacacaggcacaccacacggcatcggggagtcacactcctgccatacatcttccactgtgggagttgaaggaagaccattccactctggaatggacttgaaaggatggggacattcagtaagaaaaatcagtggccctttggggaagagctcagcagtggaggtctgctgaggaacttgtgggatcccagagaagagagatctaagagtggggcttagagtaacaggctggtatgtgacccagggcagccagcctccttccccaaagacatgctgtgtccatgctcagggtttcactgggtcaggccattttcccagagacacacttgagtcttgttgaatatttgagtctttcatctgtcttgggactgtccctgggctctgctgaagccctaagcagtcattgtttctgtggttggatgggctagccatttcctaagggtagtccttgaagttaaggactaaggggccaaagggaatttgggggcacagaactgtgtttgctgggaactttgttgccatttcttaagaccactcctgaggcagaattttttttcatagcctctttctttaattcaattgatatctgggtggttagctggggggaggggagaggaaggaagggtgggatgagaggagagcttctgtctgagttcatggaatggtttttaggttcctcaggcaaaagtaggaaaacaaagttagcttttctcaatctgattctatagagcagtctgtctctgttgtttcccttctgtccaaattttatttctttcccctaccttaaggatgtttagttacccaaatgatcaccttgagacttgattcattcagtatgttgaataataatcatagctaacacttattaggattactgtgatgcgtcaagcactgttctgcatgtttcatattaactcaatccttaccagaactgtaacagttaggtacagttattattcacatcttatggatgagggatctgaagcacagagaggttaaataaaatccctgaggtcacacagctggtacatggtggaccccagattccattctgggtagtctggctccagagcccatgctttccacccacccatagagcctctcacgatctgtcgtattgtatgcaatatatgacatattgttttaaaatacgggtgccctgttacccagctttaaaaaactcatctttgtttagtgcacatggtctcaaagtatggttcagggagtctacaaggtcataattattttccaagtagtactaagatactctttttcctttttactttcattttctcatgagtatacagaggagttttccagaatgtcatgacctgtgatatcacagcagactcaataccaaagcaatctatgaaaatctagcaagctgggtgcagtggctcacgcctgtaatcccagcactttgggaggctgaggtgggaggatcgcttgagcctgagagtttgagaccagcctgggcaacatagggagaccctgtcttcttgaaaaagaaaaagaaagaacaaaataaagagagaaagagagaatctaactggcttctcttaagcca

SEQ ID NO: 61617 - DNA, 2439 bp, Homo sapiens
aatctcaagccccacccctgacctactgaaccggagtccatgctgttaaccagaactagtttgtctgcacaatggaagttgagaagcagaggtgtagaacatctgcacgaagcgatttggcaactcagtgacctctagccaaatttcagtctggtggggctttggcgagtccattctccaattatcttgcatccaaggagctgagtgaggtcttacctatttgagattcttcagtcctactgtctcttaagtggccacaccctcatcaaagccagcagcttcagagcagggttctagtggtggttttcaaactcgggtacatcagaatcacctgggggacttctgaaagcacagatgctgggctctgcctctccccaccaaagatcctgattcagcaggtctgagataggttctgagaatttaaagttctagcaagttctcaggtgatgttgatgccacaggtctccacactgagatcttgataaacagcatttattcaagttcttatataattatgtcatgcccataggacttatgggagagaggtcttaaacttgtttcaacaccaatctcttaaaagtaaaatatatgaaaaattcaaaatttccgtctttgccaaggaggcacctgtatcttttaataagtggaaagcagtaagatatcaggcaggtcacaggtcatttagagcacggctgttctcttaaaatgatgtgagaactaaggttcagcatccttctgcactaattgcaaaatcaccacaaaatttaaacgaggagatataaatagcctgtcaagttcatttgtcattatttaaactgataacatgccattcatccagttggtcagtgctgctctgcaccagaaaccaggaacagatgagcgtacaaaccagtgaattgccatctccaagcatgagataacttggttagagtcatcagatttcctgtgctcaaaagctgccataaatccctggcctcgtgtctgttcccaggcttgcaaacccagtgccgtcgactgatacagacctttcagcaggatttgctgagctaaacaggtgtctgatgaaaagtgtgtaatcctcaaagattatcatcccctaaaagcagctggtgaccccaaactcacataatccagagagatggaagttgggagtgagtagcttgccaaagtttacactttggtgtttgaggaggttcatatggtttggtttggttccaggtagtggaagatggaggtgtgcaggggtgagggtgtctgcccctgtcgggggagatccctgtccctatccatgcccttgcctgagaacattattctactatggtccatttacactcttgaatactcctagtttaaagggaaggaattttcattttcaatgagcgttaacattacagttattatgctgggaattaaatttaatttgggaatttgggtctgcaaaaacatatcttgaccttgtctagatagttccttccttatcctaatagatctgtctacatgagataactctctaccacttttattttctcccactgggagagagttaaccatttcaaactcagggctagttaacatgagatttgattcttttactgcaagtagttaagccttaacagaggtgaggcacactcgggttccatgcagtacagcttagaaatgcttactttttatagacagaaatcacattgttcttcctttccctttaagcagacatcttgacaatcctttgaattgattatgtggcctgtatactgaaagtcagatgtcaccttccccaggataagtacttccagtaaagcaaaagaggaagccagcttttgctacgatcaagatagttgatgtggatgaggggtttatgggctaccccgttttcaattacaaggctcccactcacagagtaagtgctgttggccagcacctctggctcacagacaagttccagggaataatttcaccagcgattaattatactgcagctactgggatttgtcctccaaacatcactttgttttccatctgaaacagccaggtttctccagggagagctgaggttttctgattgaaagtatcccgagttaaggagaagtgttagagcaccatgggaatctattcaccaggggtgtactgtacttgtttcagatgcttcaggataatacaccagcttctaagataagtgctttttttttttttttttttttgagatggagtttcactcttgttgcccaggctggagtgcaatggcatgatctcggctcactgcaacctctgcctcccggattcaagtgattctcctgcctcagcctcccgagtagctgggattacaggcgcacgccaccatgcccggctagttttgtgtttttagtagagatggggtttctccatgttggtcaggctggtctcgaactcctgacctcaggtgatctgcccacctcagcctcc

SEQ ID NO: 61618 - DNA, 1302 bp, Homo sapiens
aattatgttgtgaagagcctagaaaaaaatagaggccgggcacagtggctcacgcctgtaatcccaacacttgagggactgaggtcaggagttcgagaccagcctgggcaaaatggtgaaaccctgtctctactaaaaatgcaaatcttagccaggcatggccactggcgcctgtaatcccagctactcaggaagctgaggaaggagaatcgcttgagcctgggaagcggaggttgcatcgagcccatatcgcaccattgcactccagcctaggcaacagagcaagtctctgtctcaaaaaaaaaaagtacaaagaaacaaaaggtggcaagaaattcgttttttaaaacatcgcatgttatgagggtcagagtagtgaagtgccaccagctgcagccttctgagaggaagtgctgctgctggttcaaatggaattctgtcctacatccaccaagcacgccagtggagtggacatgacacacacttttcttctaagctgtacagtttaacatattacaagtgagttcatttaactagtaaggaatcagaaatgtatctttgttcattttgatcgttttgatggattctgttttctcttacgtgagtagactttgtggacttccaaatggctcctggcataagtgccagttcctgctattagttccttgagggtctcatgagtcagagaggagagggaaaaacccactgcaagccatgcaggggtcccttcggatagtggccttgtgcagtctgcagtgtcggtgcacgtcatccctgcacacccgcctgctgtgctctggctggagcttgggtttgcagttgtcttctttacagcacccagggaagcatggcctcctggcaggtgttggccactccctgctttctcctggcctttgcaagcacagtgcaagggtgtttgctgaaaaagaccactgggctttcagtgtacccacacccatcagggctgatcaccctgctgccacctccccaggactcttccgtgactatcagtcatagcctgaagtctgtgtccaagggagtgtctcaggagacagccacttaacatggtaggagtagcaggtgctaaaaggtttatgcctaaatgctccccatggaccccaagttgcctgctggtttgagtggcctaacccatttaggctcaggccctgacagggtgtgtgtgcaccacttcggggtgtgaaagcatgaacagctgcggaaagcgtgggttttctgatgctggctgctgctgccttccggattagggactgtagcggggagacagaacaaaggaacacatgt

SEQ ID NO: 61619 - DNA, 3118 bp, Homo sapiens
tgggggattttctgagcatacatgcaataggttgttttaaggagtttgttttgttttgtcttaatttgtaggagcaatattctgggattggattgtaaattaatttctatgaaagaggtgaaaatggagctagtggagctgatgggagttgcagcagttgacttgaaagacattcttttattagtcctaaaacaaagcttcagatcaacctgctagttaaatgtaacaagcaatatagactctgagtcaacagaggtccttctctttttattaagacccagctgtcaaagggtcattaggtccttcctgtggaaaacaacttgcccattaatgttgggggtggtccctcgacaggatttctgagtaagtgcctgacatttcgtttttgaaagaatctaaagctgtgggagacttagatgttgagacttagcaggagtaatgtcttcaaccatagcttttagtctttgttaaatatgtcacaatatgtgtttggaatgctgctgctagctgcgtgaattgacttagagtgccactgtcaaagattcaggagcgtaaacttcacggagatcaaatcactataactgggaagaggctacattcctaaagcgaatgcacttctctgttgtgatgtttttaccttgtcactactcatattatttctagtggctcctgttctaagctctgggaatgccacagtgaggaatgcccatttattttttctgccctaggctatttgctttctagaagagaaggccaagcagggtctcctgaaaagcctctctccgatctgggccgtctctcctacctggcatattggaagagcgtcatcttggagtatctctaccaccaccatgagaggcacatcagcatcaaggcaattagcagagcgacgggcatgtgcccacatgacattgccaccactctgcagcacctccacatgatcgacaagagagatggcaggtgagtcctgggaccctgggcagctccgtggctcaggcatcccacaccagaaagggtccctggagataggtgcattcattccagttaaagactgaggttccctaacagtattatcaaaccttttctcctaaaaataacacatgaaatgacacttttttactggttggattccagtgttctgtaccctctcattgaggtgctttctgatttttcctaacgcagataacattagtgctagcatatgtccgtatgtgaagctgaagtgaaatttcagcttgtgattacatcttgttctgccttatcacattacagatttgtcatcattagacgggaaaagttgatattgagccacatggaaaagctgaaaacctgttccagagccaatgaacttgatccagacagtctgaggtggaccccaattttaatttctaatgctgcagtgtctgaagaagagcgagaagctgagaaagaggtaatgattgtctttatcatcctaagttgtgtaacttcaatcttgtagcattcttaagctaagaaagtcattaagatcgttgtcaaaagcttggttatgtagagatagcatgtgaaatgatatggcactaatttatcctaactgaggttgcatggtaagacatgataattttattgaattgagtatgaaaaatgaaacatttatcattgattacaaagcagcatttttcactactgagagcatgtaatcagatcaaattcggtgctgagctccaaggctgcagtgtcaattgattctttgtgtttatgaacttgcttaaagtgctccttgccagtgagcatgtaatgtagtgataaaggactcaaatcaattcgctgcatcattaatactgttaaatatcccatgaaacccaatcttctttgatttgttatcctaactgatgcaaaaggttcctgagatgatgcagctggaatgtgcttggctggctggctgtcctgatcagaaccgacttagagacactttgccattgatcctcagaggctctggctgtgtaactgccctctcactggccaccatttttaccctccccacttaggctgagcggctaatggaacaagctagctgctgggagaaggaggaacaagaaatcctgtcaactagagctaacagtaggcaatcacctgcaaaagtacaatcgaaaaataaatatttgcattccccggagagccggccagtcacaggggagcgagggcagctgctggagctgtctaaagagagcagtgaagaagaagaggaggaggaggacgaggaggaggaagaagaggaggaagaagaggaagaggatgaagaggaggaagaagaggaagaagaagaagaagaagaagaaaatattcaaagctctcccccaagattgacgaaaccacagtcagttgccataaagagaaaggtaggtgtctgtttagattttctgtgagtcgcgttcaatcaaatcttatttgtcattgcagacattctgtctattagtatttgtttcactctctgttctttagtcgtagtttatgtgtacccagtcccgctgatcatatatcataatcgtttatctcacagtcatgattatgtttacttttcaggtttgttagtgcggtgacaggaaaccagggacaggccagcctcctagtctagtagtcactgccacctgctggtctgcaggagtagagtaactgaggtttatgggaacaaaaaggggccccagaaagcacttaaaccaccctccaagacctagaggccaggagacttctctaaggtcatatgactcattagagatggaagcagaaccaaatgcgtgctcaagactctaagcctgggttgggcgcagtggctcacgcctgtaatcccagcactttgggaggccaaggtgggcagatcacctgaggtcaggagttcaagaccagcctggctaacgtggtgaaatcccgtctctgctaaaaatacaaaaaattagccagacacggtagtacgcgcctgtaatcccagctactcgggaggctgagacaggagaacccagggaggcagaggttgcagtaagccgagatcgcaccattgcactccagcctgggcaacaagagcgaaactctgtctcaaaacagaacaaaaagactccaagcccagtgctcttcatgctgtttc

SEQ ID NO: 61620 - DNA, 1051 bp, Homo sapiens
agaataatgtttccatttcttaggaggagtgtgtattcatgtgttgtatatataataaaagaaatttgttctaaaactatcaaaaaccagaatcatccaaggcatgatctgaactggactcaacctgaagaaaaccagttctctaccttggcttccctcatattagggaaaattctcatggattaaagagggcaggcagactggggggaataataaccgtaaatgtttaattacagaatatgattaactggctacgtgtgtgcttcagtgagcattcagagcgttaacaaaagtaagacacaagaattcttggaggccggacacagtggctcacgcctataatccccacactttgggaagctgaggcaggaggatcatttgagctcaggagttcaagaccagcctgggcaacaaagcaagactctgtctctataaaaaataaataagtatttttaaaataataataataataattgaatacagtttacctgaaggttagcttttaaccaagcatattgaacccttctttgcagtgtattttcaataatttggggggcaacaattacatcttagcagcaaatctacctgctattcctctatttgaattttgtgtcattaaaaacttttttgctgggcgaaaaacattttataattacaattatggacagtcatttgtgccaacctttagtgcaaacagaaaaaatatttttaggccaggtgcggtggctcacacctataatcccagcactctgggaggccaaggcgggtggaccacttgagctcaggggttcgagaccagcctaggcaacatggcaaagccctgtctctacaaaaaagaaaaataaaagaaaaaaatatttttatatcatacaaataagacatctggcatgtctttaacatttttagattccttctattaaaatattttgccaggttatcagttgctcacatctcagcagccaccaatacttgactttgttaacattttaaacagtaatcctttcttcaggtacctttcctttccttttcatagccctgaagtcctatggaa

SEQ ID NO: 61621 - DNA, 2328 bp, Homo sapiens
atgcatatatttattaatatatatttattaatatgtatatagctattcatctgcttgtataaatatgtacatatttacatttatattaacatgtgcatataggttcagtaaaaagctcacctgaactgaaatgaacttcacaattatggtttgtttctaagtgtctttaatatgcaaaccttacatcagcaacatattgatccagaattcagtgtggacagaattagtgttaaaaagaatacctgtattttaaatgttcaggaatttgctagtaattacattgtagtttgtatcatgcaaaaatgatgatcctaaaaatgatgattacaaatgcatttgttttgggtatttagttatttactgatttgtttcagaggtacacagcttatttttatgccagagagaacattcaaatcaaagtaaataaatcatgtcttccaagatcatttacatcctataaatgtccacaaacagaggtttactttctctaggtagatatgagagttaaggcttctagtcatttttccaggacagtaatgatttgtatataagctagcattaattcctttcccctatatttcctaatttgtaaatgttcaaattgatttttttttttacactgtggaactctgggcttttgcatcagagaatgtcttgttcattaaattcaaataagcacattagcattgcctatatccatgtgttcccaatatgttactctcccaggcctaggttatttacttggtttataacacaatattattacacattagccttgattatgtctttaccatcaacttttaacatgccaaattgaaagcagtgtttgctaattaatttagaggaatgaattcaagttgcccatggttatgctttctaagactgttttttttccttcccgtttttgtctcttcactaagacaatatgaatgatgattcaagtaacttgaaagaaggcagtaaagacaatcccgaacctctaaagtgcaaacaagtgtggccaaaaggaacaaagcgcggtctatctaagtggaggcaaaacaaagagaggaagaccggatttaaactgaatttgtacaccccgccagaaacacccatggagcctgacgagcaggtaacagtggaagaacagaaggagacttcagaaggaaaaaccagccccagtcccatcaggattgaggaggaggtcaaggaaactggggaagccctgttgcctcaagaggaaaacagaagggaagaaacatgtgcccctgtaagtccaaacacatcaccaggtgaaaaaccagaagatgatctcatcaaacctgaggaagaggaagaggaggaggaggaggaagaggaagaagaggaagaagaggaaggggaagaagaagaaggaggaggaaatgtagaaaaagatccagatggtgctaaaagccaagaaaaagaggaaccagaaatctccacggaaaaagaagactctgcacgtttggatgatcacgaagaggaggaggaagaggatgaagagccatcccacaacgaggaccatgatgccgatgacgaggatgacagccacatggagtctgccgaagtggagaaggaagagctgcccagagaaagcttcaaagaagtactggaaaaccaggagacttttttagaccttaatgtgcagcctggtcactcgaacccagaggtcttaatggactgtggcgtcgacctgacagcttcttgtaacagtgagcccaaggagcttgctggggaccctgaagctgtacccgaatctgacgaggagccacccccaggagaacaggcacagaagcaggaccaaaagaacagcaaggaagtcgatacagagttcaaagagggaaacccagcaaccatggaaatcgactctgagactgtccaggccgttcagtctttgacccaggagagcagcgaacaggacgacacctttcaggattgtgccgagactcaagaggcctgtagaagcctacagaactacacccgtgcagaccaaagtccacagattgccaccacgctcgacgattgccaacagtcggaccacagtagcccagtttcatccgtccactcccatcctggccagtccgtacgttctgtcaacagcccaagtgtccctgctctggaaaacagctacgcccaaatcagcccagatcaaagtgccatctcagtgccatctctgcagaacatggaaaccagtcccatgatggatgtcccatcagtttcagatcattcacagcaagtcgtagacagtggatttagtgacctgggcagtatcgagagcacaactgagaactacgaaaacccaagcagctacgattctactatggg

SEQ ID NO: 61622 - DNA, 2757 bp, Homo sapiens
cagagcagctgtgctgtcacccagcagatgtccaacatcagcgggagctgcagcatgctgcagcaaaccagcatcagctcccctccgacctgcagcgtcaagtctcctcaaggctgtgtggtggagaggcctccgagcagcagccagcagctggctcagtgcagcatggctgctaacttcaccccacccatgcagctggctgaaatccccgagacgagcaacgccaacattggcttatacgagcgaatgggtcagagtgattttggggctgggcattacccgcagccgtcagccaccttcagccttgccaaactgcagcagttaactaatacacttattgatcattcattgccttacagccattccgctgctgtgacttcctatgcaaacagtgcctctttgtccacaccattaagtaacacagggcttgttcaactttctcagtctccacactccgtccctgggggaccccaagcacaagctaccatgaccccaccccccaacctgactcctcctccaatgaatctgccgccgcctcttttgcaacggaacatggctgcatcaaatattggcatctctcacagccaaagactgcaaacccagattgccagcaagggccacatctccatgagaaccaagtcagcgtctctgtcaccagccgctgccacccatcagtcacaaatctatgggcgctcccagactgtagccatgcagggtcctgcacggactttaacgatgcaaagaggcatgaacatgagtgtgaacctgatgccagcgccagcctacaatgtcaactctgtgaacatgaacatgaacactctcaacgccatgaatgggtacagcatgtcccagccaatgatgaacagtggctaccacagcaatcatggctatatgaatcaaacgccccaataccctatgcagatgcagatgggcatgatgggcacccagccatatgcccagcagccaatgcagaccccaccccacggtaacatgatgtacacggcccccggacatcacggctacatgaacacaggcatgtccaaacagtctctcaatggctcctacatgagaaggtagacaacgtgggcagtccacaaaacctacggggcatcactattggattgatctgcacaaatacctttgaagagtacgatttcaaaaccagcaattggtgtgaatgcaaaaacatttgttggcaccatttatttaaaaaaaaaaaaagctgtatgcagcagaaagccttatacaagttgtttttctttttttcctttttcttttttttggtaccttcatttctgttacttttatataaaattctctgcaaaggaaggcctctctttggactacaatttggaggcagccacttgttgtgcctgcttctgttaaacaatgtggatatcaagcccccccaaattatctgttttaatattgaacctagagctttttttttcccttccctgtccactccatgtaaatgcctttagcatttcagttattgtatattttgtttaaggtgacacttcagcatgccgctaatgtctttgttagtgacagtgcattttgtagtactgtacaagtgttgtgctaacagtaagccatttcttaagttttttgccttgattagggtgccctaatttgagggttttaaaaaaaactatatttttgttaattataaaactgtaaagagctataaaagctattcccatttggttagtcaaaagggttttattgctaaatgtttggtgtaaagttgagacccttttccattttggtgacagatttctttggggaaaaaaggcagctttctgttttataaatgcagacttctgtttattgaatgaagcatatctcagtgtttatctgtcaggttttgaaacatttcatatatgtccaaatacttggcaggatttaaaaaaaaatagtgaatttggtgtaaagttgctattttatggaaatgcctctaactttacattttcattccatctgtagatttttctatctttataaaatattggagttattttttaaggaaaaatagaaaagtagcttgtgaatagctcaaactaagcttacaaatcgcatgtaaaaaagcaaaaaagttatttgtgtctgtttatattgcttccttttttgtagcctttgtacctgtacagggtgacagtaagggccaagcaggagaggcgtaatccttgtataaaataggatccagcgacactcttgtatttatctgttctctttttagtcagtcacttcaaaaaaacaaaaaacaaacaaaaaaaagctgtacattttaacataaaataaattatgatgagccatttttagcctcttgtgtcctgtcatattatgattgatagagaatgaccaatggaactgtatcatgtgtcacgcctcagaacacatacacattttgggaaaataaattatttagtgtaaattggagttatgggattttctgatttgttttgactttgggggaggggttggcaataaataagagtaatatctaataaaaccatcacatataccaaatacctatttaataaattaatttataatggattttaatgcttttcatgaaagtttattttatgcgagtgcataccttctgtatgccaatcattgtctttaaaataaagtgaaattgtttttttcttttggactttgatcttcatttgcaaagagatcccgcacaaatatccagctgcctcactcgcacagtctgtagaaacatccctccaagcctcgcaccagggt

SEQ ID NO: 61623 - DNA, 1407 bp, Homo sapiens
ctcacccttatcgttattttctttcacagttacaaagtgtattgggtttagtgtcacaattttatcttttagtcccttccttcctcaactgcaaagtcaatgggggtaatatatgtaacagctgagggagggctttcaagaagacacgtctgaagggccgtcagcacaaagggaaaagatccatttaagctgctgtgctaataggaaaagaaacctatcagccatcctcagagtaggaagtggtggtctatgcctgcacaaatcgaacactgcgtccattcaggagtggccaaggactgggcagcccagtgggccacacatcgggcaagaggctgcccgagccctggaggtggggttggggcctggaagcaatctgatcgggaagcagagccccgaacgggctccgacctgtcacatattttgtctctttcctcttgggttaagattctctgggggctgagattcccctctgtgttccctttggccatgacctgctaatcacaccttgtggtttgtgcgatgtctgagttcccataccctgccagcctaacagccctctaaaggagcttgtggaagagtcccaatcattgccccagacctgccaaaccctaatcttagaacagtcccagggacacctcggttgcccaggctccttaaggactgcagcatagctaggactaggagcttccgtgctggccccagtcccaacattccttgatggaacagaaaggcttagcataggaaggaaactgctgatctgagatggcctcagaacaccctgccctccacctcacccactctcactagagaaatcagttcacatctgaatgtgacgccaaggatttggcgaaacaggaacttggattcatcaaagctgaattcattcgattgagattcattaacaggccacatcatttaaaccctaactgtgttctattatttgtaagagtcgtaccaagtggtggtcagttgccagcctcacgttttaatagttgcaagtggtgcctacgccaggtgggagggcatccaccttcctcaccaacattctattttagaagtaatgactcacaatatcgtcacaaagctttcacaaactcctcccacacacccaccctgtgcaggaaatggggccattctttccaatgtacagatcaggatgttgaggctcagattaagctacattaattacccaaactcacccagctaaaatgtgtgagctgaaacaaacccaggtctttccaaatcccagctctttttttctaggacactgtattctgaaaggccctaatttgtcacctctctgatttaaaggcttggctaatgaatacatgttgctgtaaaaactgttaagtgctatataaatacagatccctttgtggctgcgagcaagccttggtctacaatcaa

SEQ ID NO: 61624 - DNA, 1027 bp, Homo sapiens
ggcttaagtgatcctcccaactcagcctcccaaagtgctggggattgtaggcatgagccactgcgcctggcctgtttctggtgtatttatgtgtgtttgtctttgaagaaattgttaggacatactgaagcttttgttttgttttcctgttttctctctacaggcagcggaggaggaaatggcaggtcctaatcaactctgcattcgccgctggactaccaagcatgtagctgtgtggctgaaggatgaaggcttttttgaatatgtggacattttatgcaataagcaccgacttgatggaatcacattgctaacattgactgaatatgatctccggtctcctcctctggaaatcaaagtcttaggggacattaaaaggttaatgctctcagtccgaaaattgcagaaaatacatattgatgttttagaagagatgggctacaacagtgacagtcccatgggttccatgacccctttcatcagtgctcttcagagtacagactggctctgtaatggggagctttcccatgactgtgacggacccataactgacttgaattctgatcagtaccagtacatgaatggtaaaaacaaacattctgttcgaagattggacccagaatactggaagactatactgagttgtatatatgtttttatagtatttggatttacatctttcattatggttatagtccatgagcgagtgcctgacatgcagacctatccaccactcccagatatattcttagacaggtaagttttgtttctagttgctaagtttgtaggatgttgctataattaacagcaatgatactatatttatgataattatattgtttcttattgtggtagatgtatactttccatttgctttatctggcggtataaaatgctttgaaattacctttttcacttagagtaaattaggccttaagcctaggtgtgtgagaaaaaccactgctcttttaatttttcaatttaatttaattttaattttaatttaattttttattttgagacagtc

SEQ ID NO: 61625 - DNA, 2799 bp, Homo sapiens
ggctggagtacagtggcgcgatctcggctccctgcaacctccgcctcccaggttcaagtgattctcctgccttagcctccctagtagctgggattataggtgtgcaccaccatgcctggctaatttttgtatttttagtagagttggggtttcgccatgttggccaggctgatgttgaactcctgacatcaggtgatccacccacctcagcctcccaaagtgctgggattacaggcatgagccactgtgcccagtctgatttcatttaattaccaaaatatttctgagtacagccaagctttgcccacccattcttgaagtctggctggaattcattagactgaaggcctagatgctttggcttagatcttatttctaagttattcagcatttgaatttcaataggaatggatgttgggaagttcccacctccctaagcatttgaagcactaattcataacttttcttcatagatatatggcagtgtatgggagaaattacatcgagcctttgccatttggagtggctttggtatgaccctgactggcgttcacacatgtggagattacatgtttagtggccacacagtcgtcctaactatgctgaatttctttgtcaccgaatgtaagtatctttttagtgcttctatgcgtattaggtaactagctgcagtgaaggctgtgggaagggtgtcagatcctgtgaagaatggcaaaacagcctgacctgagaaacgtgactgagaagcattggaaggaatgtagctttaaaatgatctttctgtccttttcctagatacaccaagaagctggaatttcttgcacactttatcctgggttctcaacctctttggaatcttcttcatcttggctgcccatgaacattattctattgatgtgtttattgctttttatataacaacaagactctttttgtactaccatactctggccaataccagagcatatcagcagagtaggagagcaaggatttggtttcccatgttctctttttttgaatgcaatgttaatggcacagtacctaatgaatattgttggccattttcaaaaccagcaataatgaaaagactaattggatgaatactatctttctaatgaatttgtgattaaatatataatagttgttgaaaatgagtaactttgcgttctccccctaggttgttcttagatgcctggcttatgtgttgacaaagtaaagttttctgttctgagcaaagttatgattataaaaagcaagaaagaacaatcaagagtccttatgtagctatttgaacagaaagcttaagtagatgttttctgccccttctctttaggaagacttaatgttgtgattgaagtcaggctgtacccttacctgttgagtatttgcttattgaactttaaacaagtcaacttgagcagtttgctggttgaggaattttcattgatttccagtagggctctagtcaagaaataatatgttttgaagctccttattacctttagaagaagaaaccctaacaagtgacagtacttgttctttggactaatctttgtttcattttaaaaaatgcaaccctgggacatgatctgttttactgacaaagagtttttgccttctgaaccatctttaaatatactgagcataccaggatgcctgaaataagaagagaatgaaagaggccatagatgacgtgacagagtactggctaggatgccattggtctcctcattaatgcaaatgtagggctggcatatttcaccaaagatgcaacaaaagatgcagtgccagtgtgaccctcagtgagtattcatgagggaaaaatggctgcatccataaaaataaatgggcttaatgttagtggtataggtacccagaataacttctttgtgctatagttgttagatgacagttcaattttatgcttttttaatggtgttattaaatgagccaaataggagtgttttaccagatgttagataaagttcttaatgccgttaagtagggaggtatgcatgcaaagaattgttttctcctgaaaagaaacttacagcacgcaaaatataactttttggtttttgaaatttatcattcttggctgttggaagtaaacagtctcagacatacttggatatgaaaaagtttcgttgttttttacttttaaatataatggtgtatatacattctttctatttagtcttaatttggcagtcaggaagtgatataacttagctgctatttacaacactagaaatttagtactttaagtaatttcacatctatgataacatttgttactttatttttaatgatttttttacagtagttatgacagtaggatggttatggaattggaatttaaactcccaactaatgagcttaagctgcttggaatattaattatgtagtttttacattccattttaaaacaaaaacttagaaaaggtgctggcattctgaggcctgcaattaggccacatagcagaagcttgctccttccttatctgggtgaaatattttatttttgcactttgagtcatattcccacccctgtataagctacataggagcctgaatgaattgggtaggaaaggaaattatgcaaacaagtctcagctagtgctgaatgaccccaatttgggtctgctgtgaacatcatttttgtatttctcacttgagaaatgctgcaaggcaattcaacttttatgcttttaaatctcacaactcagaatctgatatcttaaatcactgattctgttacatgctaggaacaaaatgccaacatctcatgtaaagaag

SEQ ID NO: 61626 - DNA, 2171 bp, Homo sapiens
acttctagctctatttatttgtatcctttgaaatcagaacttatccttagaaccagtcagttaaataatgcggactatgcctataatcccagcactttaggaggctgaggcaggcagatcacgaggtcaggagttcgaggccagcctggccaatgtggtgaaactccgtctctactaaaaatacaaaaattagccgggcgtggtggtgcacgcccatgcctgtagtcccagctactcgggaggctgaggcagaagaatcgcttgaacccaggaggcggaggttgcagtgagccgagatactgccactacacttcagtctgggtgacagagcgagactccatctcaaaaaaacaaaacaaaataaaataataatgtgggctattcagaagaaaaagtcagtgacagagagaccagaacccattggatcaagagacctgcagggattataactctttactctgtgagcagcggtgtttcgtgccctgtctctgcctgtgtgtttttactaagaattccagaaatcctgtaatttgtaaatgggaaacagaggaaccagattgttttatagctgataagaaacagtctgttttagaaacatctgtttggaaagtattactcatgtattcacaaagtcatatttataacactagtcttctttgactgtattcaacaaaaggcagtttcaccattaatttcatagtaagcttttttaaaggattctagatctaaattgcctaagaatgttaaccacattcttgttttaaactctctaatttaataaatgtaattattttatagtcttttatagacttacattttcttcatactaaaggtaatgataatatagtcatttgccagtactttaaggtattcaggcatttgagacaagaaagctgtcttgtagaatagtccaattgctttcttaaacagtactggtttcatttagacagtttctaagccagcaaaggtgtcaattttaatgccaacttgacagtttaacagttagtgtttgtaagcagtttagcctgaattatcccatactgctgtagaggagaattgttagtaacatcaaaggtcagaatgcttcaggtgactaataagaatggaaagagactgagtaggttttttgtttcttttccctgtctttgagtaactttgaatgactaaaattagtatgaaactaggttttggacccccttctcacctcacccggatgtaatgccaccaatttcaaataactaaaatgtgaccaattactttgcttcaagttctatacaaatatctctgaaatctgtaagccatatttcagctattctggtttttataatacattctaccctaaattaaccaaaggactttttattcagtgtattccatgtttcagcataaggaaagtttgtgcctgatatggcaggagaaagaacactatggtaatttcattgttacttcaggtctctttcaatctgaagaactgggttgtctggagaattgaacatagccaagcaatattatcaattagtaatgtcatcttaaaaatgttcacttttactaagttttattcagaggatctatgtattattagaaaaatgaagtatttctgacatggaacaaagaaagtggaaactggtacttaatgggggaagcaaaattagctgggactaaaacggacatgttttgttttgtgaattctacctaaatgtctctctatccacagagaaactagtattacttgaagatgtgaaagttcctgtggtagccataccttgaagcacagtgtttgtacataagtaaatatcttgattctaaattaaatccagatttaactaatatatattattttatatctttgttgtattaaaatgtttaaaaacactaaaaataaaacatttgaaagttggattacagtttcttattgaaatgtctttgcattattaatggagctggtcagttttttatataatgaattttagtttttgcaaatgattggccaggtgtggtggctcacgcctgtaatcctagctctttgggaggccaaggcaggctgatcgcttgagcctaggaatttgagaccagcctgggcaacatggtgaaaccccgtctctacaaaaaatacaaaaattagccaagtgtggtggtgcgtgtctgtagtcccagctacttgggagactgag

SEQ ID NO: 61627 - DNA, 1025 bp, Homo sapiens
tgagtgaaacacacatggcagtattttttccaagtttcaatatttaaattcccagtattaaattctcttcccactccagggtgttggttttcccctcagcgaagatattaaaggacgtatcagggtaaagggcctagtcttaggtttcggttttatctaatttagttaaatcagctcatctcagtgaattttggcagatacataaatatccatacacacaaatacttgtttgattctttgtacttgtccagtcctaggaagtgaggctgtaggtaatagactgtttttccgttttgaaacgaattccccaagtttgtataatcatggttatctgttttagaaataattcgttggtggtatctcctttatgggtcgttatagttctattgtagctcctgaccgcataaaaaacattccaacaaatgggattgcttgaattttaatatcagcagtgggtcatgctcttgttcttggatagaaggtgggagaatagagacattaacactggaatgttttttttctaccagcaatgtgtattcctccatcatatgctgaccttggcaaagctgccagagatattttcaacaaaggatttggtaagaaccttatttttaaaacgttttagataaagagtgaaaatgtatgtttgggttgcttagcgaaatcagatcaatcattgcaaattgtaaatatcttgctgctttaaatttagagttacttatttttttgagacagggtctccctctgttgcccaggctggatgcagtggcatgattatacctcactgcagcctggacctcctgggctcaagcgatcatctttcctcagcctcccacgtcccaagtagctgggactacaggcacgctctgccacacctggctaattttttttatttttcgtagaggtggggtctcactgtgttacccagtaaacacagtggcctctcaaagcctggttggattacgttacagacatgagccactgtgcccagccttgtattaattcttctattagaaacttaagat

SEQ ID NO: 61628 - DNA, 1097 bp, Homo sapiens
cgaggtcaggagatcgagaccatcctagctaacacggtgaaaccccatctctactaaaaatacaaaaaattagccaggcgtggtggcacgcacctgtagtcccaactactcgggagactgaggcaggagaatcgcttgaacccaggaggtggaggttgcagtgagctgagatcgtgccactgcactccagcctgggcaacagagtgagactccgtctcaaaataaataaataaataaataaataatttgaaagcattcttttgtgtaccaactaccaaaaactagacaaagcagcatagggataattctgccctttataagccagtttacaaaagacgaatttgtaacaatttcatttaaatattgtatattaacacatttttatccacctctgaatatgtggaatctttttgttttttatgtatagtcaacaattgctatgcatctttcatacaaaggaatcattttgtttcttttgctgtctatttgttgaaggttttgggttggtgaaactggatgtgaaaacaaagtcttgcagtggcgtggtgagtgttactgttgaataagttctattgaacctttataatttttcaacttgtaaaatggtcataactgaaagatgtctacctgttttgtcttaaagaagaggcagaagttaactttgttttaagagatttgcgtgtaacctgatttattttggccttgaatgtgatttctgattttcatgtggtctttcgtcatattatgtatgcacaaggaacttaggaaagaccagtcaggtggtactctttactcgtaagattacacatttgaaggcagggaacccattattagacttttttgtaaccctttgtcaacaatgctcgtcagagttatgggcataaaaatatcaggaactcattaatttgagtgtactaatcatttatataatgtccattttctagcagttctccctggagaagatttccacatgtattttatgagtttagggagtcctgatctgaattttttttttttgagacggagtctcactgtgtcacttagactggagtgcaatggtgtgattgtggctcactgcaacctccgcctcctgagtt

SEQ ID NO: 61629 - DNA, 1390 bp, Homo sapiens
ggtgtgagtcaccatgcccagccaagaatatttttaaagaggttaatattttggtatttgggtgtcttgatagttcaatgaactgtttacaaaggggataaactaatatttaacttttttcgagacagggtctcactcggttgcccaggctggagtgcagtgagtgcagtggcacaatctcagctcactgcagcctcgacctcttgggctcaagcaatcttcccacctcagcctcccaagcatctgggagtacaggccgtatccatcatgcctgagtattttttgtagtttttctagagatgacgttttgccatgttgcccaggctagtcttgaactcctgagctcaagtgatccacttgccttggcctcccaaagtgctgggattacagatgtgagccaccatgcccagctagtaaaatttaactttgtgaaattttttttacttaaaaaatttttgttttgagattattttaggggtgggtgtgtgtgcacattagaatactataggttattttgatatatgtatgtatgtatatatatagagagagagagactttttttttttttgagacggagtcttgcactgtcacccaggctggagtgcagtggcatgatctcagctcactgcaagctccacctcccaggttcatgcctttctcctgcctcagcctcatgagtagctgaaactacagacacgggccaccacgcccagctaatttttttgtatttttagtagagatggggtttcaccatgttagccaggatggtctcaatctcctgacctcatgatctgcccacctcgggctcccaaagtgctgggattacaggcgtgagccaccgcgcccggcctatatagacatttttgatgtagtgcatgtaactgatatttatttaatcgtattgtagtttttttgttttgtttttttttttttcctctgagacgcagtcttgctctgtcgcccaggctggagtgcagtggcatgatctcagctcactgcatcctccacctcccaggttcaagtgattctccggcctcagcctcccaagtagctgggattacaggtgcttgccaccatgccccgctaatttttgtatttttagtagaaacagggttttgccatgttggccagtctggtcttaaactcctgacctcaagtgatcccaaagtgttgggattacaggcgtgagccacagcgctagccctgtagtttaaaagcctaggcctgttggatttctggggatttacattgatcatatctgtcgcttggtttttttggtctgaaaggaagcttaggtgtttagttatgattggatgacttatttggccaagttaacaggttacagagcagtgatttttagtgttttttaatgttcccattgttagtctat

SEQ ID NO: 61630 - DNA, 1032 bp, Homo sapiens
gcccctagtgtatttgttgaaacacaaaaggccttctaaaaaagattcagtccttgtgtttaaaaagcttactttctagttggagagacaaaataaactgagagtactgaggtaattaatatcaaatattagatcgttggataatcaaatctttgttggaaaggaatagattgttgtgtatagggttagggaaagttttatggaagtaggtttaagagcatgaaggatatgtaggagctggattagatatagcatgtttttattcacatttaatacatgtaactcaacaaccatggtattgatcctatagtatgtctctggccccagataagtcccattaatacctggctctgttttcttacctgaacagcaaagctactgaagccaccccagaatgtagaagccaaaatttctggtggtaaagggtatgagctgtaatctggcccaactctggtcccacagggtggtgttggctttgtttcttgaggcttccttggcatgtgtatataggctggctcttgatctgtgggctgatgaatggccgtaggtggggccccaagagtcattaatgtcattcaggattaaaaatagctactcacacattccccattcaaactgctagaaaaacctgttccatatatattgttttagtaatgctttccttttctgtggagcatatgaaaacgtacaaactttcacagtgtcagttcaatttaatcattcggaggtaggctttgtaattatagttgcagaaacagacccaaaaaagttaagtgaggctggtcacagtggctcattcctgtaatcccagcgctttgggaggccaaggcaggaggatcccttgagcccaggagttctgagactcacctgggcaacatagtgagaccccgtctctacaaaaaaatttaaaaattagctgtgcttgttggtgggtacctgaagtcccagctacttgggaggctgagataggaggatcgcttgagcccaggagtttgaggctgcagtgagctatgactgtggcactgtactcca

SEQ ID NO: 61631 - DNA, 1032 bp, Homo sapiens
tgaggcaggagaatcacttgaacctggaaggcggaggttgcagtatgccgagatcacgccactgcactccagcctggcgatagagcgggactctgtctcaaaaaaaaaaaaaggtgtacagtttgttcacttgagaattcactacaggttaacttgtgattgattggaagtgtcagctgtgtatgtaaagtggcagtcagttgctcaaaggcttatttgtcactcttatatatgcttagagagtagcacagtgcagaaggatacgagtgtttaggaagctagaaaaaggattcatgaatttaccaaatgtttcagggggtttgtgtgtgtgtgcgtgtgtaaggcagtgatgaattctaggcttatgagaatgttcatgaagttattgattgtcttgttaggaattttcaacgtccggttcatctaatacagacactggtaaagttactgggaccttggagaccaaatacaagtggtgtgagtatggtctgactttcacagaaaagtggaacactgataacactctgggaacagaaatcgcaattgaagaccaggtaacattttgaaaattttagtattaattttattaatttatttttgtatttcaaaaaaagaaaacaaattacttttctttcaaaatagatttgtcaaggtttgaaactgacatttgatactaccttctcaccaaacacagggtaagcacagacatttttatctgtattacatttaaaagtatttctcttttgtatatttagaaaaggtgtacatttactgtttgatagcttattaagctaccttgtggtggtgaaatctctgtatctgcttttatttatttatttgagatggagtctttgctgtgtcacccaggctggagtgcagtggcatcatcttggctcactgcagtctcagcttcctgggttcaagcgattcttctgcctctgcctccctgagtagctgggactacaggtgcgtgccaccacgcccagctaatttttgtatttttagtagaggcggggtttcgccatgttggcc

SEQ ID NO: 61632 - DNA, 1570 bp, Homo sapiens
gtttaagtgattctcctgcctcagcctcctgagtagctgggatcacaggcatgtgccaccacgcccacctaatttttgtatttttggtagagacagggtttcaccgtgttgatcaggctggtcttgaactcctgacctcgtgatctgcccacctcagcctcccaaagtgctgggattacaggtgtgagccaccgctcgcagcctgtttgtttattctctgtcacccaggctggagtgcaatggtgcgatcttggctcactgcaacctctgcctcctgggttgaagcgattctcctgcctcagcctcctgagtagctgggattacaggcatatgccaccgtgcctggctaaatttttttgtatttttagtagagacgggatttcaccatgctggccaggctgatcttaaactcctgacctcaggtgatccgcccgcctcagcctcccaaagtgctgagattacaggcgggagccaccatgcctggcccatatctgcttttagaatactatggttgctatcattggcttgccttcaaatatttgcctctttgttgttgcactaacttgggcaactaatgtgtttctaacaggcttttgtgactgattgtttgttctgcaaagcagttttcctagatggctgtccagttgcttcatgtgtccttgtcttgtagttcattgagctgacttttttactccctgttattgtattgctgatttttactccctggtcatactgcagtttatttaagtctgttttgtgctctcttgtgcagaagtgtgtgtaaatttttcccaatgacatcagtttgttctttttccagaaagaaaagtggtaaaatcaagtcttcttacaagagggagtgtataaaccttggttgtgatgttgactttgattttgctggacctgcaatccatggttcagctgtctttggttatgagggctggcttgctggctaccagatgacctttgacagtgccaaatcaaagctgacaaggaataactttgcagtgggctacaggactggggacttccagctacacactaatgtgtaagtatttctttcataggatactgtgatgtgggccctcagaggatgattttgatgtctgtcatcttattgatctgggtgcaccctaaaggatttctcataacatttaaaaacaaaatcattcttggtcatttctagggtgccccttgaaagtttatagtagaagactgttagtctgacctttggtgctgagagagtaaatgttcattttatatggggtttaatgtgctttgtatttttacaagaggcattatatattggcagactgctaccagtacattcattttacttaattattttgatgtgtgagatgctgacttgataggattgcctaaaatgtatggtgttttgtggttgggtttttttttctttttcttttttctttctttttttgttttggttcagacagagtcttgctcttttgcgatctcggctcactccaacatccgcctcccgggttcaaacaattctcctgcctcaacctcccaagtagctgggactacaggcgtgtgccaccatgcc

SEQ ID NO: 61633 - DNA, 1035 bp, Homo sapiens
gaagcacaaagaagaaaacctacgtttcttacaatcatgccagctaggtatataatctttgttaatgttgtggttcacctttttatatgtgtgtgtatatatacttatatataaaatacgtaaccaaaaggctgtttgagaacctcttgcatgtttaatacagtgtgataattccactgaatggatattctgtggttcattttaccaatccctgtatgggtatgggttggggaaaaaaacctgttaaaacttgcaagttttcagtggaacactaaagacccacttgagctgtggttttttatttaaatgtaatgctacaaatcagcctgtgccttagacattattacattgtctattctagatctactaatttaaaatatcttatagcaatgatgggacagaatttggaggatcaatttatcagaaagtttgtgaagatcttgacacttcagtaaaccttgcttggacatcaggtaccaactgcactcgttttggcattgcagctaaatatcagttggatcccactgcttccatttctgtgagtacttttgtggacttagaatgggggttttggttgtgggaatgagtctttgggtatactgaattatgttgaaaatttgaactgatttcacacagtccccagtttacagatagattagttttagattttgaaatgcgcttttttgatggatacagtgttagacgttttatttccaggccaggctggtggagtttgtttaacctcaaaagctgccgagttaatgttgatgataaccttgagccataggcctgtctaagtccaggtatagctggtgtttggtccctgagtggttcttactgtgtcagaaataatagtgcttttttaaggctctctgttgtcgaggctggactgcagtggcacaatcacgactcccggcaccttgacatcctgggttcaacctcagcctcctactattcccaactaattttttgatgtttttttgtagagatgggatctccatatgttgcccatcctaggctcaagctatcatcctg

SEQ ID NO: 61634 - DNA, 1255 bp, Homo sapiens
tactctttactatgtcttactcttcagggttcattccagcccttgaagtcggtaactaagtcctaaaatgttgggattgtgcaaggaaggcaggggcctggattggtacatgatacctcactgggacctcctcccaaacgcagtggttacatacagccagaactcagcagcaccggcatttatgagaggtgtaagaatgtgaggataaaggattgtttgatctgattcttcagaggaattacttgtcgtttggagattttttttttttttttaaacattcatggttttgattctttaggaagagtcctggaagtagtaatgtgtgtaactaagtcatgaatttaaactttataccctgtgctttaaggctgctgtgtgtcacctctagtgagcctgacttgtaccacattttggtctggtttgttgtgctagactagaattaacaaagatgatttttatgagagtgcttaggcttttgtgctgtatggacagtttggggtctttggatacattccagtggctatcaagagtattgtgtcctactgagaatttgatttttgagttgaatggatacgaattaaatagtacctggtttgtttggcttaatacataatattgaattttattgtctcacgtgaataaaactgaacacttcatgattacatgatggggaaacatgtaggggctttgtctctattgaaatatttttcttacagttgtttttgtattttattttaggcaaaagtcaacaactctagcttaattggagtaggctatactcagactctgaggcctggtaagtattcttgataaagtaggattgttttgatagtattaaaaaatttagttttcattcttcagcttacttttcagacctttcaagcacacagaagagttgaaagaagagtacaataaatacgtgtttaccttttaccacaattttttatttctttttctttgctttttttttttttgctgggccatttggtcatgacacttctcttcagaataaggcccgtctcttcttttctgcataactataatactatcacacctaagaaagttagtgattccttattatttaatacccacttcctgtcagtttcctcgcttgtatctgaaatgttttgtagtaatttttattttgttgatcaaagttcactcattgctttggttctgcctatagtcttgttgactttatataatattttgaagcgtgctgtgtctagaacagcgcttctccaacttcagagtg

SEQ ID NO: 61635 - DNA, 1041 bp, Homo sapiens
aagactataggcagaaccaaagcaatgagtgaactttgatcaacaaaataaaaattactacaaaacatttcagatacaagcgaggaaactgacaggaagtgggtattaaataataaggaatcactaactttcttaggtgtgatagtattatagttatgcagaaaagaagagacgggccttattctgaagagaagtgtcatgaccaaatggcccagcaaaaaaaaaaaaagcaaagaaaaagaaataaaaaattgtggtaaaaggtaaacacgtatttattgtactcttctttcaactcttctgtgtgcttgaaaggtctgaaaagtaagctgaagaatgaaaactaaattttttaatactatcaaaacaatcctactttatcaagaatacttaccaggcctcagagtctgagtatagcctactccaattaagctagagttgttgacttttgcctaaaataaaatacaaaaacaactgtaagaaaaatatttcaatagagacaaagcccctacatgtttccccatcatgtaatcatgaagtgttcagttttattcacgtgagacaataaaattcaatattatgtattaagccaaacaaaccaggtactatttaattcgtatccattcaactcaaaaatcaaattctcagtaggacacaatactcttgatagccactggaatgtatccaaagaccccaaactgtccatacagcacaaaagcctaagcactctcataaaaatcatctttgttaattctagtctagcacaacaaaccagaccaaaatgtggtacaagtcaggctcactagaggtgacacacagcagccttaaagcacagggtataaagtttaaattcatgacttagttacacacattactacttccaggactcttcctaaagaatcaaaaccatgaatgtttaaaaaaaaaaaaaaaatctccaaacgacaagtaattcctctgaagaatcagatcaaacaatcctttatcctcacattcttacacctctcataaatgccggtgctgctgagttctggctgtatg

SEQ ID NO: 61636 - DNA, 1176 bp, Homo sapiens
ggagaactgctccgcctactacgagcgctgcctgcagctgctgcgacccggaggcatcctcgccgtcctcagagtaagggatccactgcgggggaggagaaagcaccctgtcgggccgggtccccatcttttcccttgactcctcttataccccaaagccccacccagtccagtcacgtaggctacaccccctccggggctccggccccggtacccaggctttcctccgctttggttctgtctccagctctggtcacctcctgcccgggcacctccctccgaggccccgcctcccgcccagacacctccctccgagaccccgccttccgtctgggcacctccctccaagaccccgcctcccgcccgggcacctccctcccagtcccccgccttccgcccgagcacctccctccgaagccccgcctcccacggcccggttggccccgccctcccgcaggtcctgtggcgcgggaaggtgctgcaacctccgaaaggggacgtggcggccgagtgtgtgcgaaacctaaacgaacgcatccggcgggacgtcagggtctacatcagcctcctgcccctgggcgatggactcaccttggccttcaagatctagggctggcccctagtgagtgggctcgagggagggttgcctgggaaccccaggaattgaccctgagttttaaattcgaaaataaagtggggctgggacacacgacctcctgagcctccgtgtgtggcgctggatggggaagggagggaaggcccagcacagacagctcctgccttcagtgaaaggggccttgagattcgtcccctccctggcgccaggtctgtggcccaactgcaggaacctccagctggcaggaggcaggttataaagttttaactggcctggccacgtgtaatggccagagaccccagcacctcgggcttgtctgcctcctacatctctccctcagggcaggcgaagctctggttctgagcagctgggactggtagagagccacgtctggtgtctgacaacatgaaagaggattgcaggggaccacgggtgtcacttgtgtgcttttgtaggtgatgccagttctgctggcggcttgctcatgtcttcacagcacagtcagctccccagcctcacctctccagtggaggccctggtgggggaacatcacctctaag

SEQ ID NO: 61637 - DNA, 1068 bp, Homo sapiens
agtgccccgacaaggtggagcccggcgggcccgcgagtccgagacctgtcccaggagctccagctcacgtgacctgtcactgcctcccgccgcctcctgcccgcgccatgacccagccggtgccccggctctccgtgcccgccgcgctggccctgggctcagccgcactgggcgccgccttcgccactggcctcttcctgggtgagcaggacctggtcccggcgggcgggtgggcgggcgcagagtagggcgcggcgtggctcaggttaatccaacaccctctccccgtcagggaggcggtgccccccatggcgaggccggcgagagcagtgcctgcttccccccgaggacagccgcctgtggcagtatcttctgagccgctccatgcgggagcacccggcgctgcgaagcctgaggctggtcagcagggcgcgggacggaaacgggcgtccctctcgacccctgcgggtcccacgtggctgtgtgaccttgggctgggccctggccctccctgggcttccggcttccctgggccgggtgcggtgggcgttccgaagggccagtcccccaggccacgcccagaaccgcgcccctggggcttgggacccccagggcgaaggtgggtgacctgcatggctggtgccaccctctcctttcacgcagctgaccctggagcagccgcagggggattctatgatgacctgcgagcaggcccagctcttggccaacctggcgcggctcatccaggccaagaaggcgctggacctgggtaggggcacgcggccgggatcccggagggccgaggtttccgggccgacccccactctgggctgagcccgtctgtgtcctggtcccaggcaccttcacgggctactccgccctggccctggccctggcgctgcccgcggacgggcgcgtggtgacctgcgaggtggacgcgcagcccccggagctgggacggcccctgtggaggcaggtgagcgcccgcgcctagctctgcagccccaggcgggggcgcaacggctgacccgctccctccgcaggccgaggcggagcacaagatcgacc

SEQ ID NO: 61638 - DNA, 1885 bp, Homo sapiens
tttaatttttccaccccctcccctttttgctactcatttcttgtctcttgcatggcggcaccagtatctcagctcaccaggaagggagcaaagtgtcgcctccgaatctgttctagggctttttcctagaagcctgggggctgaagacagagtgggttttgattcttctccaggcagtgggcctggtagagggtggggggagctgagcctccccaaagggccttgtggatgtgggcagcagcccccaggggagggaatgggcaggggaggtcatttccacctgtctcaggtgcgttttggccaaatgccattgccccattaagcaccaaggaacctgaagcctcatcagggcagagaaaatgggcatcagcacctgcacttaggcccccaccaggcagagagggggcaggctgagtagactgatacagacagacgcagatagcctgacagtcttagctgaactgggtcactgggaacagctctccacacaaacaggtctggaacagacccctgagtttccatcctactggtcccactcctatttctcatagccctgctagcatcacacaggctgggcgctgtcgcccgagatcccccgggactgagcagggcaggaggcagaaggtaaggtcgtagaatcaatcctaagggattggagttcagatgttttttggggccaggcaggtgaagtaagcagggcaaggtgatagggggtggtgggtactggagcactccagagctcaccctccaccaggggacatggtggccacttggctttagccttggatgccaagtgggaagatgggcccagtatggccagagcttccgattccccaacagaggttggcaatatggctttcagtgtgaaacttcacaattttaaacatcggggtgtgtgtgtgtatgtgtttaaacactgttggccaaactgaacacatatttgagcttcatgtctgctctggctcatgaggcaccagtttcctctgactctgagcatgaatgagagaagttagggcttgaagtggagtcccctagagtgagaagggcctcagtggccagcagaccaccgccgatgtctgggtgaggtctactgggctccccaaggaggacagtaccttttacctaagacgtcgggaggcagggctgtaactccaggggctttaggacggttcaggccaagtgcactgacacaggtagacacagacagatggcgacttgggggctcctggggctcctcacatgagctgggagcatgacggggccacaacctggtcccacctcctctgtgctgagatcctggggagctgaccctggcagcgcccctagtgactcactttcctcatctggagaggctgaatgggaaagctacagcatgggctttagaacagatggacttgggttcaaacatctgccccaccactcactttgcagctgagtaagctcagagtttctgagaaactctagaaaactaggaaatgggcatgaaccttctgtcttcgttttccattgctgtacagcaaactgccacaaagttagtagtttaaaacaacacccacttgttatctcgcagagcgtaggtcagaagtctgacaaggccgggttggattctctgctcagggtctcaccaggttcaagacaaagttctcccctggggctgtggggcctctgccaagctcaccagttgttggcaaaattcagttccttctcttgaaacctttccatcttcaaggccagcagaggcacctggcatctttctggtgctcccaattgctgtcttcctcttttgctttttttttttttttgagatggagttgcgctctgttgcccaggctggagtgcagtggtgtgatcttggctcactgcaagctctgcctcccgggttcac

SEQ ID NO: 61639 - DNA, 1125 bp, Homo sapiens
ggtaagtgcatctgctgtgtcttttatgaggtaatgtgcataccagggtactggagggcagtggaggagagggagaagaaggggcagaggagcaactgttgcaaaagcccctgagtgagagggcgattgttgcggttatatcaatgtgccctgatattcaggtttcttttggacacctgaatctggccaattttagtccaatttccattgtcctgggattagtcttcatcatgttaactgcaccaggaaaggggagctgttggtggagtccttggagcccccaaagctgatttgatcagggaaacagtcacaagtgtggcctttttgtgtgtgagaaacatgtgtttcaagttgcagaagcaatcattggatcagtaatttcagggttgggagcagctgggtgatttccatttgccacattgtttctgttccatttaatttccaggtgtcctacataggccaggactgcagagaaattccagagcaccttggcagggactgtggacatttcgcaaagaggcttgatctgagctttaaccttctgaggtatgtaaccttcacaagatgtaggccaggcctgggaggcccagtcctcctgggtactttagggccaagcagataaaagtcaaatgttccaactccacatgggttgtccttttattcagcagaaggctctgagatgcgtggaatcacaccccaaaggtttcactgtgtccggtgattccttggctgcctttttttgtgctgctgaagaggcaggcagcatattgagcctcatccatttcacacgagttcctatgagagagccgtcatattttcactgtgttcttttcatttctcacggatacctgtgcagacaggtcagaatactcttggggaaggaatgagatgaagcctgcaagagtgttttggggtgtctaggtgtgctttcttaggataaacacatgtcccaaaacattcgtcgagtcacaggtagggtgtgtgtatgtgtgtgttctctttcttttgtctttttatgaatgggagctttaaatatttgtgatgataatttctcccggatggtgtttcaaagcaatttaaatactgctggtgtggagtgggtgggaggaaaactctctgacaact

SEQ ID NO: 61640 - DNA, 1061 bp, Homo sapiens
tttatctttacttggctttctattacaactggcagggctgtttttcttggggtaggggaagtggaggggagaaaaattccccacaaggattgtttacaaataactgattttgttttgaagttgcttttgacttactacacttcatcccctaccctgcttctaaggggaaaaaaagaaaagagagactttaaatgccaagggaacattttgttaatttagctacatcaagctgaatgctgcagctaaggcgaggcaggatttagctttcgctacgtcttgaggagttataattttttcttctcagctattgctctggtaaaaaaaaaaaaaaagcatttttttggtgtgtgtgtatgtgtgtgttctaagtctccatcggtgaggtggtgctgtgctggatagtacatttgggggttatatgtgcatgctaatttgctcaattctgtgccgttggcttggtgtaagaagtgggcatgttttccttggttcagtcccacttggtcttgttatgcctttttctttcagtacccaaggaagggacggaggaaagaagtggccagcgttgttggagaggtcaagggaggggctccagtgcagaccctctgctcacttcctccttcactacacttcaggatttgcctggggtcctgggctgtcacactcctgaggctgcgtggaaagtttttgttggcgtctcgatgcccatttattttgagctggtttattctgtgctgcctggagccctggttagtggtgtttatcgcgcgtctctgttctttgttcacccttttcaacgtgattgctgttcacgccgctaagggagaaactgcatgttttgagacttggggtcacatcatagccttgttttttcttgcaaattttagaacaggatttttttttcccctttgcttcttgccacaagataagggctagtggccagagccttttttggatcgggttttaaagccttacccttgtcttacccaaggttaaaactcagtgatttcaggatatgacttttttttttttttttttaatgtatccagtatccattgtcaacc

SEQ ID NO: 61641 - DNA, 1089 bp, Homo sapiens
ctgttcctttatggaccaccagtttttggttctatctcagatatgttttagtcctcttgctgctgccgtttatctggacggcattttccatcagttacaggcaaagaatattgtcctcttttctcactcctcagagtgtttctgggttccaggggaaagaggtgatttgaatgcaaatgcactttaaatcactaacactacataactctaatgcattactgccattttttctttttacttttaattgagaaactgaactcttgctagtttgaagctcagagtcattgttggagaccaagaagctggggtatttctggctggaggatgatctagtagaaaatcaaggagatcattaagacacaggatgcctgagtattgagtattgagtatttgtctttgttccatcacaaatcgtctgtgaaatattgagtaggtcatttaatctctgttgtcattctccaaatgggagatagaaggagttgtgaagaccaaatgaaatactaaatgtaaaagagttttgttcctgtagaagatatactgaaagagtagatatcccaaaagtagtttatttcatttttgattcttttgactttgagcaggtttatctttaagattattttgcttggggtcctatggcattggttgtttataggtttggttttgcaaagttagggctctgtggggggtctacttcctgccagactgtagattgcaaagttatggacttgggtctgaatggccaggtttcccttgggcaaggacaactgagagtataacattttccaattcaattatgttttaaaagggaagagggaggaagcagaatcttcattagaacaaaataaacatgatgattattagcagtgatagaatactaaataaggtatgtcattatagtaagattttaagaaagccaaacgtcagagtaaaattccatatcttacttaacaattttgaggcatgatttttatctagttgtacctctgagctcagagaagaattttatcacctaaccctctacagcagtttcaacatagatgcaccccacccttccccaatttgctcttccacagactgtacctgatggga

SEQ ID NO: 61642 - DNA, 1051 bp, Homo sapiens
gtgtggcagttagttgcccatcacatttggtggacagtggtcctcctgggacttgctgtcatgtggtgtactttaaaacagaagttaagaaaaaacagtgaaaaatgctaccattgaattgggtggcatttaagactgtttctagccgtcctgactcttagaactttgctttctcggcaatattgtgggtgcatatatttggcagggggggattctaggtttatgagtcaacctgaggagtaagaatggaagatgacaatagtttctgatctttagcttttaagtcaaggactgctttccaaaatgttcttggcaggcaagctgcctttgaacattgttagacatagacatagcctcagaatagcatctgaattacgatgtttttgtcttcttttccccaacttgtgatggctgatagacagaaaatgctcataaaaccttgactcaaaccaccaaatggctgaataattcaagcttgagttttttgaagaattttgaatcccaaaataagactcctaaggaaatagatatgatgtttctttcttcctccccttttaagcctaattagggtttgtacttaggtaatggagggtcagattcaggggaaagtcttgctagtatgagcttaaactatacaccagaatttctctatacccataagcttcattaaaaaaacgaaaacaaaactcagaaccccaaataaataaaaacacatttatttgatgatgtctctgtccaccatgaagaggcttagtgttatgcttgttgtagaaaaatattttgtgaatgtgtcttacaatctttcactatttttggtaaaagacagttctttttatcttctaaattagaaattcattgtcatggattttttgtttttgttgctttctttagcctgtttttcagggatttttttttccatatcaggattgcactgtgattggaacattctcacaaagatttcaaccaagtttttcttctcaggattgacacaccatcaacaacctgaaatagtaagccttttctgctttctaatttcctccctagaattcca

SEQ ID NO: 61643 - DNA, 1032 bp, Homo sapiens
tggtgtggttcagatcgtctttgcttgcctcgcgtacgactcctgcgaggcttcatatgtaactcctttcgttctcctccttccgcggtctttcttacgcatacctagtatatagagaaatttgaaccttttgctaagaagttatggagggggcaaaaaagcatatttctgaaaaataaaatcaaatagacatgaagggccttactttttcaatgtatgtggcatttagcaaagcacctgggcttctgtctagatgtttaagcctttgcacctttggacagagtgtccaggctttaatcagttgtatgatttccgctgattttgtgcattccttgtccatcaggtggcaaagaggagaggaggtgggggcaggggcaagggaagaggccaagaaggggagaggtggctggggatggaaatgggaaggtgacacttgaggagcagtcagcaccaagaggtaaaaaaattaatctaagatttccatctagccattaccggctggcgttcacggcctctgagcctctgagctaaaaagtctgcagagagtctcctggcgctacagagtttgtcttgtaaaagtgcagctgtccaaaacatgacagctacagcattagcagggccattaagaggtgtagaacatttccagggaaatgatttgaaaaatgacaatgctggctcctgtgtgatattaattataccctgtactcatggcaaataagctaaaatcgctggcaagaaagactaagtgaggtgtcctggttctgaccgtcattcggatcaaacagccgccaagctggtgagggctttatggtccacaggtaattgtagggtgagaggtacatgctggaaaccatcagtcagggctgtgtctggaggatggtcttatggtgagtatggattgcaggcagctggggcaaagcaggatgtccatggagacggcgggtagtagaaggtaaaaggttggcagggctgtcctccatccatagcatgtagatccaagctgcgctgcccagcagacctttctgtgatgat

SEQ ID NO: 61644 - DNA, 1048 bp, Homo sapiens
aaagagatgtacctgttatggaataaaagttgtacaattcaggcatgtatgcaaaaactgaacacactttcatttaaaatttgtgatgtagacagaacatttcattaaaaaatatcagccttgataacctaggtgtatgtagataggtctcaggtttaggagctggctgattgttattggttctgctgtgggttttggctgggggttgggcttctacagcagtcattttaggttagtattatttcatgtgccctaatgcatgatcctggttgtgcagaagtggttcttggaggttgatgccttgtgatctcactcctctggtctttggtatatacagtcttgctcactttgaatggacttccctttccttttaagcaatgtgacttgtcacactccatcactccaattttgacttgcttttcaagacctggttcaaatccatcttctttgtaaattcttccctaagtgccccatcttagtgactgtgagttactcctgtaataatggcagggtgggtattacatttggcaattaattcttatgactttgtggtctctattctattgccattttgtttttgcttttttaatttttaacttttttatttcaataggtttttggccaacaggtggtgttttgttacatgaataagttctttggtggtgatttctgagattttggtgcacacatcacctgaacagtgtacactgtgcccagtgtgtagtcttttatccctcaccgccttcaccatttcccccgtgtccccaaagtctaatgtatcattcttatgcctttgtgtcctcgtagcttagctcccacatatgagtgagaacatacgatgtttggttttccattcctgagttacttcacttagaataatagtctccaattccatccaggttgctgcaaataccattatttcgttcctttttatggctgagtagtattccattacacacacacacacacacacacacacccacacacccacacacacaccacattttctttatccactcattgattgatgggcatttgggctggttct

SEQ ID NO: 61645 - DNA, 1028 bp, Homo sapiens
gtgttacccctaaacaccagcagcactgacaaacagccagagaccctcaaataactccctttaggtctcatccttcatgaggacagcatcatggggtggtcgtttccaaatctttttttttcctctttattttaacctttgaaactatttttccaagtaagatttcttccacagagtcccaatacaggatacagaccaaagagaagatgctctggctaaagaatggggtggaaagcttgaatcccaactgcttcagagagtgtctccatggaatcctcaggttcctaggaacacggtttgagaatctacagttgatggcagaaggcaggttttcagtggtgtgggatttatcatcttggtttttcctgttttaactgagtgactgctggagtttgcttcccaggtttccttctcaagcggctttcagagcaataggcaaaaggttgagaatagcatcaaaaattaaaccaagccctactgcaagccaatttgtaaaaactgtgttccaaacggctttggggaagaggatgtgacactgtgtaatgacttcttggaaaatttgttactttttcccctttctctgtctcctttctttcttctctcgctctgcttcccccacccattcctgatttgatgaaaccgtttgtgatgtccagcatatattttgctgcacactgtgtgttgttgtactttagcaatttataactatgatcaatgttgtgaccttagggaaattgcttatataattatagaaagtttacagtcgtaagacaaggaatggggaaaatatatcactgtaaaatataaatatgtttaaattacatttaggatttggaatagttccttgcttgtgttttacagagtaatctgtgatttaaatcaggtttagttgtgttttttcccccctaaattgggtattataaatcaagagtagatgctggatatagcacacaagaggatttcttatacattttaatgttgcataagtaagaaataccagtagttcagcagtaaaattgcaaatgtaa

SEQ ID NO: 61646 - DNA, 1033 bp, Homo sapiens
ctggagctcgcagttgtggtttgcctgaagatggggtattgaaaggaatggtttccacccttgcctccaaatgataccaaatgctacttctcagaaagggagcacaacttccctttgggtggctcagctagtatggcttagggatataacagggaacctgctgatgttcatactgtgatactttgtttttctcataactgttatatcaggatgtacattaagttaagtaatcttcacaaccaccctgttaggcaggggctgttctctttatttaacagatgaggataacaaggctgaatgtttgagaacttgccctagatcatggtgagtggccaagctggagttttaaccaaggttctgtgtctctgaaacctgatgcttctcaccctgccacactgcctcttgctagcatggtgtgcctttccctacaacttgggctgctcagtggagcagaattatctgcttgagaatcaaagaaaacccgggaaaagtgtttttttcctgtgtcctatttcgactttctaagtagagactgtgcagggggctcttataggaaatttattacttgcattcagattttgtgctgctccacatatgcaaatatggaccacgtgggcctgggtcctggtctgcttggggatgtgagcagaaatacagtctcattatctggccatcaagccctacaaagactctggagcctctctgtgcaaaacatctagagcaatcctgaaatcaaaggaagctgccaattacctcacagcaaacctgacaattaagaaaaaaggaagtttcacttttctaagttggaaacagagagtatttgctctggggaaggagcaggtaactaaggtttattgaatgcctaacatgtgttagggatgataccaggactccctggtgctctgtctcatttgggtggtgggcatattcccatatcaaaaatgaagaaacagatgttctgagtagttgaaaactcgaacttccagtgcactgggctatggaatgattgtttctcctgttacatgggctgtgg

SEQ ID NO: 61647 - DNA, 1048 bp, Homo sapiens
ttaaagtacccctctgtgccttagtttctttatctgtgcaatctgtacaataatagaagtacccacttcctatgattccattctatgaattacctattgttggttgctgttgttactgtttttttattgttctcttacttgaggacttcagtgacaaagagtagcagtccccgtgctttgggttactgaattttaaactcttttgtaaggctgattgagtgagggagtctttgcttggaggcaggaagatgactccccaagcccctgtttgtcccccattattcctgtcctccaggactggcatgccctgccgttcatttccttgttggaggagacaatgatgatgccttttctacacagacactctcctcagctgcttgcttttgtgagcaggtatctcctctgttaagagattagaatcttaatcctaaatgatatttcatggcctaagacttaaatttatatatcaccatccggaataatgtattggattgcattaaacagattgtagattaacatgcaactataaaacaaatcatcaatgtgttgttgacaactctaagtgcaagttcatatatttaactacatttggggagtattaaagtgtttaaagcggcttaacgggttgatgtaaaattaagcatcatgttctgtttcaatttgtgagccagcccgagagacaataaaatggaggcataggcttgagaggaaggagcatggaagaaaatttggaatcagacttggcaccagggaaatcctggcatggtcaaaacatattgggtagcagtagaaggctgtccatttacatactcagtctatgagcaggtatttgaagcctcaaggagtttatagtccagttgagataaaccaaccagcatacagaaaacaatggtgaaaaataagagacttagtgtcctttagcactgagctgggtgaaatggaccacctgctgtgagagttcacaggaaatgacagtggcatttggagtggtcagaaagatcttaaagatggtggcatttgagctgatcctcataaggcaatcagagag

SEQ ID NO: 61648 - DNA, 1057 bp, Homo sapiens
acccttatccaggcaaaagaaacacacatgatgtacagattggcctttcctatggagggaagagtgaaattgagactttaaagacccctttcattgaactttgtaaaaagttgcttaaaacagctgaaaaaattctactccaaaaaaatggagtgctcaaaactaaaataataataatgataataataaaatggattgaggcttgggtttcataaggctgtttctcagttccagtataccagacaaattacagcctgtgaaagtaattttgtttccccctaccctgtactttcagcctcctaagtaggataggaaacctggagataagaaacagaaggaaaaatgtaaactgaggaccttttcttttggccaaattgaatgttctacttttaaaggggaggaatttagctgctttttttttttctgccaaaattgcttgagttttccattcattgtcattcattttacatttcaaagtgcaaactgcaaagtgtaaagttgtatggtggtaatacacacagtagaattttggttgacacttccagctctgatgaagtagagatgaaataaatctgaaacacatctaaataggcttggggtttgcattctatcccatctaagggaagctgagtagatcatagacggatgctactacaggtttcgttattggtaatccttcggaaagcgacacggaaacacattagaactaacctccactgccttccatttcatctaaacagtggggtgagggtctgggtgggaaggaattttattgaaaacaaagtctgaagtaaaagcaacaaatctttactagtgaaaagtcacctaattaatttagataaaaactttatcatcccacatgcaaaaagaatatgtggttttccggctttgttatttacattaaaaattacttgttcatgaagttaaaaaagcgcaattaccctgaatgaggtgaattaagaaaatatttcatcagtgtagcttgtcttttcaactggctgcctttttggagtctcttgttgatttatgaagtgaaaattctgtcttgtctttggtg

SEQ ID NO: 61649 - DNA, 1030 bp, Homo sapiens
tatatagctaaacatatacatatacacacaccataatttattatccaaactagtatactttactaataattatggcaatataatggatacaaactagaactctcctagtcaaaatgagaggcatagtcacctacttatatagtatattgtcttccattatgagacaagaaccgcttataaaaagattggttattctgtgctggggattttatacattcattctcatactgtgatggtggggagaagtttaataaagacttcatgtcccttaatagaattagtcactttctactgagatattgaagctaatcctgatgctctcatttatagtactggcgggattattaacagatttgcctttattggttttctccagaagtcttccttgtttgcattttttatgaaggtaattcgatttttattagtataagtagtagagaagtttggcaactgggcactccacagacatgctgtttcctcttcttcatttgcttttctcttgttaaagtcatcaaaatgttgacagctgcataagtctttgtaaagcattcataacatgacagatattacagatatttgtcattttacttccagtaagtgacagtcaaaattagctttttgtagtattggaagatagtgcgggtatagtgagtccagtcaaatttgtctctcatttctttaatgtacaagtgatttccagtcttgttaaggaccaaggactcgaaggatgtggggagtggatctggggttttactggaaattaaacgggcaggacaatggtatttcatagcatggtaggtttcagcaacgaaagagtccctggggccacatccttaaatcacactcctgatgctcagtccctacctcaccatcattaaacacagagccctcctcctctaagtgaagaccttcagagttggaggttcagtccttctgaagcaatctgttctgtttttagaaagcaccatttgaaacctgtttattatattgagcctaaagctcccactgtgtaatttctacccactgctcc

SEQ ID NO: 61650 - DNA, 1053 bp, Homo sapiens
cccaattaacattattgatttgagtcatactcatcaagatcaacttattttgtgttaatttccttcaatgcagagagagctgaaaccaagaagagaggagttaagacagaatgattgatttggctatgaggagcatgttttgtaccataatctcattttaatgcttcagtagttaagttgtgccaaattgcttttgaggaggaagtcattttctggttgagattctgcttagtccttatattggtcagctatttccacaataatgctacataagaaactacctcatttattctcttgctgaggcatttgcaggttgacggtggtttggctcatctaggccgggtggctctgctccagggtgcaggacagccagccttgatgccaggctgtgtgttggcttcaggtgtccaccatgtgtgtttgttctggggcacaggctgacccttcagggacagaggtcgcatggagcatgctcttctcatggtggatcagtggagtaccagagccacgccaaatagcacaagcacacttagggcctctgcgcacattacacagcgaaatttcgttgtcctgagcaagtctcatggcctagaccagtatcagtggagcagggaggtaaactctgcccacagtaggaggggaaacgagtgactgtttgctgaacaatatgggccttctggccctgtaactcttaggtcagggtgctgagttatttatctcatcatcatcatgttatcaagccaatttcttgacctaaaccgggagaaagcgcttttgaatttttcccaggattaaacttgtgatctgactcagcctcttgcccatgagctaacctgaagatgcagcagcttattgaagactctcttccagcctatcaccaccttcctttaggcgggtctaactttgctttcagctttcttgtgacattgtaactccttctttaatttgagatggggtgttttccaaggacttcagaatctgccaggtgagatgcaagacctaggttgaaattaaacctaggattaaactcagaattctacctaggagtaaaca

SEQ ID NO: 61651 - DNA, 1047 bp, Homo sapiens
ttcactgattcagtctcaaatgatccaagggagagaaacaattgcttggaaaatggccgtaggggataatggctattgacagcagatattggctcactctacacaggttcactccctccctccttccctccttccttccatccatgcattttttttttttatctagtcatccatttagccaagagttctttaacacctactaagtatatgtagattattgagggcactttacataggctagtaagaaaagtcattgcaagagaggacatttatgctgaggcgcgtgaatcagaatggaaagacctggggaggaacattcccgagagagggcactgcccttgccagtgctgcaaagtgtgaaaaagcctggcgagtttgaggaccagaggaggtcagtgtggctggtgagtgagaggggtgatgaggctgaaagagctttaaggtgaggttgaagtcaggaagcaggagccaggttggtcagggcctggtgggctctgcttaggagttggaattttgctctgagagagatgagatttgagtatggatcttggatggccttctgtttctgctttcagactttccttataccttccagttcctactttttgagaatcaggtgtggcagtcagacagaggtgggggggttttgtgaagaagggtgtggcacagggcttgaatcaccaggtgtgggaaaggcaggttgggcaagaagctgagactgggagagggattcagcccgtcttgcagctctgtggttgcttcaggtggtcagagttttcagggggaggcccatggtaggaaggcaattagtactggaaaagatcagctaaagcaaagcaacttacatggaaagcagtatgtaatagtaaatctagaaaaaaaaagtttggaatttaatcttgcaagctgaaacccaaaaggataaaaatatttggtatcaaaaacattttcagttgtagctgcagctatgctctaattctcagaaaagcaattcaactattaatttaatttttctccataagtgttaatgacagaattacacgctgg

SEQ ID NO: 61652 - DNA, 1013 bp, Homo sapiens
agtcactgttctggcacttgacgtgcagagcctcctggtagccttcagtttagtgcagtgattgagagcacagcctgagagctggacccatttgcattccagcccagcctcagccccacaagctgtgtgatcagaggcattttaccaaacctttccaaggcttggtttacttatctgtcaaatgaagatggtggtgcagttttcaggctgcaagtgagtgtgtaaggtcacttagctcataatatggtgacacatttcacaggtctcatgatcagatgaggaagcacatagtatcattcggccttttatacaggtccactggttacctgttcttggtaacagggtgaaggctggggtaacaagtcctgccgggagactgtaagaggttgcatggcactgtgggtcagagtagcatggatccagaccgcctgcatgtacattctggctctgccacttattagctgtgtgccattgggcaaattatttaacctctctgtgtttcagtttcctcacctgtgagatgggttagtaatgctacctattgcatagaactgcagtgaggatgaaatgagttgacccatgcagagtccttagagcagtgactggcacttagtaagctgcatagaagtattgtctattaatacttgcattgattgtgaaacataatttagcattgctaagaggctgtcttttcaggagcatggagtccaagtgcccatttcctgtacatttggctcagatacccacccctaaccactgcacgcagtctcttttctgtctgagtgggacacatctctttcccctgcagcacaatcactctgcctcccgctccgtcctggtctgccatctgctgacccattcgctgctcctgtcacgtcaaagatagcgtggcctttgtggagtgcccaggcagcgtgtcatgtcccagcgctgttgtacatcttgtttcagagatattttgctgtaatgttctgtgaccttttccattgagtgaggtagttggaaaggcactc

SEQ ID NO: 61653 - DNA, 1015 bp, Homo sapiens
gcacaggacagtccccacaaccaagaatgatcaagtctgaaatattgatagtgttgaggttgagataccctgatctgggcaattgttgacttcatgtcaggttttacagagttccttaacatatctaggcaatacttcaccagactccaaccctagcctcatcttcttcaagagcaagttctctctttgggagtctctgaagagtccgtcaaaaacatttcttaacatcctaagacatgcctctttagggttggataaagatgattttctaattttaaaatgccttcctagccccagattttgtgcttatattgcagagaagtagattgaataccggagggaaggacatggatcaaggtggaaagtcagacgtaagcagagctacatttgcagaaagtatgagttcagtttagtttttgcttatggaccacaaagatggccctcacctctaaaccttgaagaattccagaatttttctgggagaggaacatctctatcacatctgccacagcggaaggctttgtgcaggataacatatcattggcttgagaacagagtgagcatgtgtggaagggcctgtaattattaatatgacattggccataatttatcatgtcataccacccacttacagcagcctcatcctatgaaatgctaaatgcctttcttatcaacacttgatgggaaaatgctgttctggcatcttcctctaagggaaacagaaatctaaccatgttccttacagcctagaactctgtacacaaagatcagacttgtttttctccctgaaaatttataggtatttacaaggactcatatcctgtttgctatttagaggggcaatggagtgagaaagaattatgtagcaagtttctttttcttgagatttgctcaagctgctctatgacttaaaaaaactcagatattactccccatttttatgggcagcttgctgttttctattcttgctttcctcaccgactttcttggcaaagctatgcttgagtactcctag

SEQ ID NO: 61654 - DNA, 1043 bp, Homo sapiens
gccaaccttggcctcccaaagtgctgggattacaggcgtgagtcactgcacccagccatatatgtacattctgatgtattcatggcacttttgccctggtggcctaaatttagcctgatgttaccacttgtggcaggtcacaggctggatgccgtatctgggacctagggttttaatgacttgcctggatattggtgtagtatgcatgccaactgatattcaatcaacatctcctgccagcataaaaaagtttaaggaggtgagttactacttctatcctatgaaaaataacatcatttaacaaaacatctccaggaggcctactatgtgccacacaccattctagttactggagatgcaatccctgacaacgactgctctcacagagcttgtgttctagcagggtggggctgggggaagaggagttatctctttgtgttctagcagggtggggctgggggaagaggagttatctctaggtagacaaatgagtacttaataacatttcagatatttataggatgctttgaaaaaagtaaagcagcattgtaggctagaaagagactgggaggtgctgtctggaaagtatgatccaagaagccctctctaaagtaacacggctagagataagaatgacaggtagggccagctacatgaggatgctttgaggttgtgtacccactgggcacgggaaactaactactttggggatttgaagatataagagatagtcccaattgtaatttcctggattaattagagagaagatataaaatgtaacccatgaaacagtgtatttaaagctaagtggtaagaggtgcaaaatgctattgaaatgtaggggagaaggactagggtgtgtttaagtgaccaggcaagtcccgtcatacacacataggttgtgcttgggttgggcctggaaggatgcatgggaattccagatacatagagaaatgatcagtttctctctctagtgtgctttaaacccggcaaaatcagacacaccggggctgaggctctagaattaggatattcataaggtt

SEQ ID NO: 61655 - DNA, 1259 bp, Homo sapiens
gtggcagaaccagtacctcaaacacctttgagaaatggtgttcagggctggaaattgggcgaggtgagagaagcttttgccctgggcaccaaatttaagaggagacccaaaacctcaggaatcaagataaatgatagtttcatgcaatattttcaaactatcaaaataaaatattttcaaaataatcaaaatttaaaaaatccaggatgaacagaatgtcataattttaagtgaagacagtataaatattgatttcaaagctgacatttaagtactgaattcactaggggtggaaacaatgaggacaccaggaaactagcagctgtagccatgggtgtgagcccttccagggtgccaggagcagtgtttggtatcttacaggcatttttttcttgatacacatcgggggacctgatttgacctacagtaaatccaaatctatttgattataaaccgtcttagaaaaagagttcctttacaggctccataaattccattacagtccactttgtctttgttaaatgtatgggttggaaattacaattcttttattcacaatgatgattttagacacacagctcagaaagatcagcattcacttaaaaaatatattagcatgcttgtatctattaagcactattgctttgtaagctccagctgatgattttattaagtagactgcaaaaggggaagaaaaatcaaggataattataaattcataaatacataattcattggcataaaatgatttaatggaatggatgtggaattatctatttcctcaagaaaataacagagatattctgattaagcctataatcttgtgtatgtgaaattctagccaaactgatggggcacattttcttttctgaaactacctttgataagaaatgcattacaaactcatcagtttggcttcctgttaacaaagagacagcagccgtctggatcattctggattcacagtgaaactgccacaccatgtatcctccaactaaagctgtgcaagtttgacaaggggcagatgaatccaggagttattgtgcagaggtttaaatctatgcggcagctgacggttgaaataatcatctatatatcgctctgagctagctggggaaaggttgaagctgtatattttcaacatatctagtctaatggttaatctgttgtcttgtacggggctctcgcagggtggactggcagcacacgctgacagcttcgaggaattgctcacggtagatgtggttcgccttgctttc

SEQ ID NO: 61656 - DNA, 2076 bp, Homo sapiens
ggcagagaagcccacagatagtggctgagagttgaacagcttagtataacagactataaaagttaaatggagtcaatttgtttaatttctaggtcatggaataattgtcccaacagaaataagccaacaaaaataccaagagacagctatatctccccagaacattgatttccatcttgactatccagtaggccttgcaaaatttgtgtgtaaaatgaggaaattggaaggtcatatttctaagtttcctttaaactctgagactctgattatcttccttcttctgattgagaaaggctaaaagtcctttttgcttcaatccttactgttataaatccttctaaaatgctgatgtctattacccaacatcgtggtaggtcctgtgaggaacaattatgtgtgtagaaacctcgtagtatatcagtgttagtcttctgtctgtgagttcgcagcttctagggcaggaactgggcgcacagggacacaccgaaagagcccagaagattcttacaggtttctactttattgtcagcttgttttcttccaaggtgtcttttattttcctcaaggaaagcacagaaaaaggccctctccctaacccggggtcctggtattatctatgctccagtgatttgggggttattagtaatcagaacattgtcagctactgaagctatcccagaccagttcatatgcagtgtctctacaaatggccctgccctcccacaatgaatgctaactgttgacctccccaaagagcctcctcatcatatttgttacaccttgttttgttattgccaggtctccaggaatgaaatcgtgtagcaggaagcatatagggccaaacggggacaccatctccaggcaaaagaggcttcctagttggaatagtacagatttgatggatgaaaataaatgtgtgtcttagattttagcccagctgttagaatccttaggtcctgggatcattagaaaactgtgacttcaggtctcatcattcctcatccccctgaaaccccttctttatggcttgtccatccctaaaataggtctggagatcgtcagcaaattcaatgtgtttttgggagagggagggaaagttggaacacaaaaagaggagaacagatggggaaagaagacattcctgtcctttcaaattccatcaaaatttcttttttgatgatggtcttgatctcaactcatctttttctgttgttattgttgttttttgagatgggacctccttctgtcacccaggctggagtgcagtggtgtgatcatagttcactgcagccttgaacttttaggttcaagcaatcctctcacctcagcctcccaagtagccaagactacaggcgtgcaccaccatgtctggccatatctttgaggtccagttggtgttgagacttcacatcatcacctttcctaccttgctttatgagtagctgggctctgtttcttgttgattttgtaattaattagatgagtgcttggagcaaggccaagactgggcccaagtttttcacccatgccttaccactatccctttctttcagcagacctgatgtgtggataggtctagggatgagtggaatgagtatcaatatgcacatttgaaattctgagttttaccctgtaacactctctctttcctcctaccgatggccaagtcctctgatttggcctccagattacatttcgaaccttttctcaccattgccagtggcactgccaagctcacatgctcatttcttcttcagctagtctgccattgttgcccttcaacctttcaattagttcctcttgccaccaaaccaccaccaactttagtattctaaagcacagactttgtcatgttatcccattttaaagagagagaccttttgatggttccttgttttttaagaggataatttccaactttctgctattaaaatggcattcaaagcctttgcagtttggcctcaaccagtttccctagttccgttctccacataagcatccatcatctaacaattctctagaagcgtcttattctcattactttacacatttctggaaccttttcctgagact

SEQ ID NO: 61657 - DNA, 1105 bp, Homo sapiens
tataatttaattttacaacttaagagtataattttacacagagagtgttcaattcttctggaacatctaccaccagggagacaactcctcatcagcttttagttaaagagtttgttcatgatttgtataatggcccagaggagagctcttcctggccagtactcatatccttcaagcctgatgaatcgctccaccagatgggaggtcttaccttttaagaaagtggacccagaagtctctaggtgaagatacctgacagggagtcaatggaaatggactatgccagcagtagcgaaaaagagccaccttcccagttggtggcaccttgatctagacattctgattcatgaaggtttgtcaacatgtggggctcaatagtttttaactgtttctgtcttgtctttgagcctctcattgatcgttcttgctgattttgtgtgtgtgtgtgtgtgtgtgtgtgtgtgtgtgtgtgtggtggcacttgtttgtcttttgagatttctattttgcatttggtgtgagtgtaaaaatgattgggaaggaatgacaagtaatagcatgttttcttttttatgcatatgctgctttggaatgtgactgcttataattaacagttaatcttcttatagcacatggttttttgctgcttcgattaccagtttcagcctgttcctgcatgctaacaataagaaattttagaacaatgcatggtcgccagaacggctaacaataacagttgcaaacagtccctgagagccactggtttgtcactgtgtttcctcctgaactcatatcaaggaggaggtttacatcacccattctgatctgtttgcctctgaacaaatagtttcaaaagttatttcatccccatcatccctccccttatccttaaagacggtatatttataagaactttctttctccacaaatgtgtcagattctattattgtacataaacccaaaatggcagtatggaaatgaaaaccagggaccgttgctaatgagaagcatagcattccagagtttgatgggcttctcttctgctacagcatttgattaaaaaaattgtttttcaaaatgatttatctacggtgaagcaaaaaaa

SEQ ID NO: 61658 - DNA, 1061 bp, Homo sapiens
ttgcatttctttccatttcttcatagctctctatcaaggaaaagagtcaaattcagctgtctggccgaggagcaagttctcagggtctactatttactcattttctttttctatataacaaaccttgtctaatgatttacatttcttcccccagactctaaaagtttgccaaagtgtggactcctagtggacaagtaatgtctagtttgatgtgtttgaaggaattttctttgacttcaaatcattgacatatctttgatttattttttttctctttgctgccttggaatacggcccctactctattttaactgcacactggtagtgatatattgtgagtaaaacgggttcccagcagcccggagtccagttccccctgtctttctctagaagagatactcttttaattttctgtacagttttagtttcccttttacttttggtatttatgttgcatgtagcagtgacatcatgccccaactccttcatcccccaatgcagtctacagagtagcctggagccagagagtccccagggagcctgctctccatccatccaccccagtccccgggctctggccagcttcgggcactgtcttatttttctatttgaaaataagaccttgacaacagtgtgtttctcttgaaggccttgtctcaggacttttaagggacactgattaggctgaagtaattaccactataactccagatgcttcatcagctggggtaattgtcatgcttgcctttgataaattatacttggtctcctttgttattgagcttggattcctctcctaaaggaaacacatatgccacatatatattcccatgttgtgatacatatatatatatatatatatatacacacacacaatatgtaccatgatgtatcagagtatatgtacattcttatatgtaaaaattcatatttttacatataagagtagagatattccatagagtgatgtatttattgcagtacatgcttctctgtatgagaagtgcttgctagataattaattggttactcaactttgggactgtaagtatctcaattgt

SEQ ID NO: 61659 - DNA, 1035 bp, Homo sapiens
tccaattcttcctataaaggctgtacatggaatcaatttccatgtccttatcaatgtcatgaagacgttcagcttgcttccgcattggttacgggtgtcttgtaccattccctgcggtaatatgtggtgtgtgtacatgatgtttatgtatatctataggggtcccattaatgctctgtcatttaatggaaaattgttgtagcaatagcttcatcaggccaataatgcttccgtgttgaccaccaatagcagtttcaaaaggaatttattctgatggactttgcttcaaatcatgtgcccatgatggcagctagactgctccattatataaacccaggccctaataccttgatttgctttgatttcctcaactgggagcatgccagcctgggaagtaagcagtagtgcttaatgatggcattatccaactaaatgtatggggcagtggacattggactctggacaaaatctttggggaaagctttagactagtgggccccctataaacacaacagtatggtgtagccttcaaggttttattcagaacatgacctcacaaatgtatcttctctgtttgtttttgttcactgagcagtatattaattaatcctggaaaccatcttaagatccaagaaggtactttaggatttttcatcgcaagtgatgccaaagaagttaaaaggtaagagtttattttcaactggctttctttctggcccggctgtagacaccttgacccacggaagtaggcaggcttccataaccccaaaactccttaacatgtctatggccatcaactggtgtaagaaaaacttccacggactccagttcatgtagtgaattccacatctttgaatgagaataataaaattttagaactaggaagcctagttacctgctcatttattttgtgagggagaaaatgggggctcagagagctgaatgactgctcgaggtcatcctgattcctgatgattcagaacaacataacaagacaactggctccttatctagtgctctttacttaatattatc

SEQ ID NO: 61660 - DNA, 1038 bp, Homo sapiens
acttgtgcatattttattcagaaatgatttctctaacaatatattaacttgtcagagaactcaaggtaactcatgatctaaagctacagagacataaaactttgaaattcaaagattatttaaagtacaaaatttaggcagagaagatcagggttttgtttgtacaacacccaaattcaggatatttgagaatatgaagatttcattggcatttcattttcagttttaatcaatgtgtttggcataatataaacatttcaagtagcattctcaaagcctcttcaccatcaacactatttcaagggcctagagtgccttacccaacattttcatcacctcctgaaggatacccagtccctgcagtaggtatgggtaattgtgcacatgtgcgtgtgtgttggctatttcatgtatgttatgatggattggagcatctaagaataggggtttgggtgtccacaaccaagggttcagtgagtagctgaggcaggtaatctctctgagttggagggattagagctctctgggctcttgggctgataccctaaatcttattcataagggagccctcctgcagcccagcctgcctcccaaggccactgcctcctcctcctttcctttgtgtaaggtcaaagctgcttagagacagggaaggcctgagggctggtgacgctcccatggcctttgggatccccagctctctcctccctctcacagccccttgcagtttcccccagaggtctcctccctgagtgtgattcattccactcctggttagtttatgagaactgacaagatcgtggtccaaggtcacatggccaagggccatggaaaataatcagtcacagagaggaatccatctgctgtaacccccttgttagagggagtccagccgggagccacccagaccttgtgtttcccatgttgggacttgagtgactcaagtttgaggcaatcctaggcccaggtgtttgggacagagagaatgggatgggtttggattattctactgattcctggtagccaaatgctgacagg

SEQ ID NO: 61661 - DNA, 1154 bp, Homo sapiens
ccaataattttagccttgctagaggtctgaaaaaataggtggggattaaattatgaggagcctcagctaacaacttgtggaatgtggatattttcctgtttatatttttaatgtttcccctctctctgtctgtgtcatatttttgtttacactcagtaccctgggaagggagactttcatagtcactctgggctgccttaacaagatatcaaaaactgggtggctgaaataacagagatttattttctcacagttctgaaagctggacatctgagatcagcattccagcatggtcaggttctggtgagggctctctttctggcttgcaggcggctgccctctcactgtgtcctgacatggcagagagggagaaagagcaaactctctggtctctcttcttataatggcactaatctcatcatgagggccctatcctcatgatcttgtctaaacctaatcactccctaaagtacctcatctccaaataccatcacattggggtttgggcttcaacctacgactttggcagggatgggggtccataatgtagcctgtaacagagaactaagagggggctggggttggtaatgagagaagatgctgaaaacaatgggacaaagaagcagggggtgggccaaggagctctaatgagtgtctcctcccatcttcctctggatagcccagaatccctcttcttcctcagtcctgtatgtaggattagcagaggatttgcgtatttgggttatgttagtggtgggaggtggccacgacaggaggagtaggacaattcagtttttctttcttgttgggcatcacatcctctaagggaatcctccttatgagtcctcagttgttaagcaggattactaaaataaaagaaacgacttagtgggccccaaactgcagcctctctcacactctattctataccacttgatttgaggaattatagccttttctctttctatccccctaaaccatgtccaaaggagcttacatggttatttccagcgtgaagctgattgatcagctcgcaggacatcgtggatcagagtgcttcccccgcccctcttaaccgcctttctgatgtggctgcgtgcatccagtgcccagagcatgccggggttcttgcaagagggactggagggtgaggg

SEQ ID NO: 61662 - DNA, 1030 bp, Homo sapiens
actgattcaggtcctccctgtagtcaacagagataaaagtctcaataatcaaacctgtgggtacttcagtgaccagggaccaccatctgtcccctgtgggtccagacatcaggcaggaggaaaagttggggccatgtgtcagcgtcccagctggggctcaccatgggaagtgggataagggaggattattccagttctcttctttgagttcaggtttttatctacgggaagaagagggagattggacgaggttagattcacttgtctccaatgtcctgcatggggttctgggacagacaatgcctcagaaatgggaggtccaagaggatggtgactttcactgctagctgatgatgaaagggaaagggatgagggaagaatgggctgaattagaggctattccacccctctgatggttagctttcagggggaagggaaggagggagggaggctggtggggtgggagacaaagacgaattggagattaggaaagattctttggaatagtcaaaccagagaccaagcaaagcatctttttcccttgtaacttgagacctgtgcaaatgacacaggcttctagttcccaaacttaataagagtaagtgcgtgaagaagagacctgcagacacttaattcaaacagtctagaattctgggaataagttatagtacaagttatatgtggctggttatagattcagccttgatgtttatgttccctgtttcaagtcacacacatcagattactcacttgtcagctaaaaatagggccatcactggcttgcaagtcgagttaggttttatttctctatgtgcttcattgttcgttcttttgtgctccctcctctgtgcctggccccctctgccatgcccaggtggcttcacagtcccccttccccatggtcaatacttctttctaactgagggataaatgactctgaaaaggaaatgtatttcaatggggaccaatccattacacccgagagagagaggccaagtgcagggacttctggaggagaccaggaatgagt

SEQ ID NO: 61663 - DNA, 1019 bp, Homo sapiens
ccctcccattatgttgagatatatatttaaagtattatggaaatggctattataaatggcatagatagtttatatttttaagcctttgtaaagcattttggtctcatgacattcctgcacatcaagaatccctggtggttatcgaacttttatgtgcaggtaggctccccttgagaagaataacaagtaaattcaaaagagaggctgagaatcaactattctcagcacaaataaatttttctgattacaaaagtttccatcacaatgcttttgttgaatttatgatagggtttagttcataaatcaatttgatctacacataattttcaagaaagcatctgcagcataaattgaggtgcaactgcacttcataccactttttttctccttttgtttctcattttccactttgttctgtctgtgtcatctgtaagtatctccatgttttcattcggcagctcctggagacttcatggcaaaccaacatattgaatgcaggaaattccagggtggccaagaatattctccagaaatgtactgtaattcctattcctttaatacataccagttgatgttgggagaagttggccatgtgagaagtaaggcctgagatgatgggattgatgggcatctacatctctaaagctgacagaggaaacatttggcttagaaaaaaatttagtttttttttgtttgtttgtttagtttctttttttttttttgagacagagtcacccaggttggagtgcagtggcatgatctcagctcactgcaatctccaccttctaggttcaagcgattctcctgcctcagcctcccgagtaggtgggaccacaggcacctgccaccatgcctagctaatttttgtatttttagtagagatgggatttcatcatgttggccaagctggtctcaatctcctgacctcaggtgatccgcccgcctcagcctcccaaagtgctgggattaaaagcgtgagcgattaagattgcacctggccaaaaattcagtttttgctc

SEQ ID NO: 61664 - DNA, 1065 bp, Homo sapiens
taaccttgacctctttggctcaagtgatccttcagtctcagtctcctgagtagttgggattacaggaatgcaccaccatggctggcaaattttttttttttctttgagacagggtctcactctgtttcccagactggagtgcagtggtgcaatcatggctcacaacaacctctgcctccagggctcaagtaatcttcctgccttagctttccgagtagctgggactacagctgggcaccatcatgcccagctaattaaaaaaaattattgtagagatgggggggtctcactgtgttgcccagactggttttaagctcctgtgctctagcagtcctcccacctcagcttcccaaagtgttggcattgcaggcgtgagccactgtgcccagcctggattcgttgttattattcgtcatttattattatatttattttcttctgattttaaagaagttaaaatttagacttttttgtgtcccataagtacagtggcctcaggcactgtgcctgcactgcctgctggagaaattgactttatttctccctttccaacagccccatccttctggaaattttcacagataagaaaacatgctcagagacagatgccttatactaaaccccttcaatgtggtctaattgtttcaaatgagaaaattaaaataagcattttattttaagccctgtctgataacttggctttgggaaataggaacttcagcaacccagcattcaaaacaatggatacaacaaaaattttaagacaacttaatagtcttgcttttctcccgagttttggaaaaacatgtgccttttccattcttttatctgacaatgagtcttactggtttaagagatctgttcgctgagagtgcaacagtacaaaataacatttttttcatctgatgtttgcaaattcatctggacagggaagggcagacattggaaatgagtgaggcggatctggtgaggactgcaatgagagctgaagcctcacctgaagtggcttcccaggtccagctgattgttcctatgcagaaatgcaggctctagtggccagatctt

SEQ ID NO: 61665 - DNA, 1048 bp, Homo sapiens
gtttataccgcaagagggctgcatctcctccctgtcacatggcactgggcctttccctatagtcacaggctgacatgcattcagagactgctgagagatcaggataggagccagctggagcgaaatgttatagctcagaacagtttaatccaaacacaagggcagtgcttgtgcctaacacaactgtggtaggggtgtggtgtggtgtgtggagtggtggcagcttttacagctttatcatggggttcatgggctggaggagatgtgaactcttccttgtcttttaccccttgtcttttgacctgacagcctgacacatgtagctttggggagaccctggttggtgatgagtcatttgtggcttaaaaatagaactctcaaagcaacaatgcccttgggactttttgatgcatatgtctttgttcatagaatttgggagaaaagagagagagggagagaaagactctgtgtgtgtgtgtgtgtgtgtgtgtgtgtgtgtgtgtgtgtaggaaacaattatgtcctgcctaaaaattaagtggagaagaagagcatgggggaattggccaccaggctcatcacagtagcagagatgaggctgagagctgtctgtgtacctgtggccttaaaggtaccaatcagataatagctctccactgagtacaaactgtgtataaggcattttgctaggtactggggaattttgagtacttatgtataatgctagatcttttccattaagacatttaaattatacatatttttacaaggggcaggaagtccagccatatataaaggaaaaataagataacaaaacaagaacaagtaaggcatcgctaagcaatatatcaatgactaatatgagcattgcacacagtaagtgctgaaggttgaggagttgaaaagatagctggatgctataacatgttttggctgtaggggagattttgagttgaatagacagaaaactcagtctgccctcaactctaggagtccacaagagaagactctcattatggcctgtactcgggctttgtgattttcagta

SEQ ID NO: 61666 - DNA, 1043 bp, Homo sapiens
actatgtcaaagctcttaaaactgtgcaatgaaagatctccacgcattttctggcccttgtcttgccaattctttcactgtgtacctggtgtgcctggtctgctgaactatgaagcatactcgaacatcatacacatgatcttcctttttaaaaatgaccttgagaagataacaagtgacattctacagacagactccatttcttctcttttgtttgcaaaagtgtgaggctgaaggaggaaggaaagcttgggttacctgaccacattctcatccacccaccctcaaacaaatgccccacacatgtagaggatgtggttttctgactgtttatctccagtgagccagagctctaggtcccctgtgctagagggggcacagaggcattattatcacccagtcctcactgggtgagagggagaatggtgagaccattgtaggaagcaaggtggaatcaggggctgtgggccaggctttcgaaacttgcgcgaatacacatgcagaggtttatgctgctgactctgccttccaactttccaggctgtaggagtgggaatttattgagcatgagggatgctatcttgtgaaactttctacttcattcgggaagggtagtttgtctgtaagaattcaattgtaaatacaaaaataccatttatttctgaggtgagggcaggaaggagagatgtcagaagtagacaggttagggctttctctttggagacctggatttcaacccactgaaagtcttaacaaagaggcatgctagtatcattcttagcaagcccagtccattgttatggtcagattcgattctgcagaggagaaaatggagtgtgacatgtttggtgccaggaatgtgagcatgcacctgcacagccgatgttggtgtcatatcgtcagctgaatggtcatttagcaattttggccaactcccttgacactatagggcttagatggcattgctttctgggatgcactgataagccttttacataagccttttacaaagtaagaccttggtgccaaaatccttgctgtag

SEQ ID NO: 61667 - DNA, 1101 bp, Homo sapiens
ggaaacaaacacaagatggcagctatgttgttatcatcaacagaaccgagaataatcacgtatctgtaatagttatcagcatgctctgtacgagactcacactgtcttttctcaatgagcttgcctggggggcaataagagacaggcaggaaactgtgaccattcctttgtgagtccccaaaacagcctggctgcagctcactaagccattgtcttcctttacacacaaccaaacgtaggcacatggctaaataaacataatgaaaagaaatgggcttggtgtgaaattcttcccagatgcccttccctgccttttcagattattaggtactatctagttcagtgtcactgtgggtcatggtccatcagtagcttgtgaaatctatttaatgggtcatcaccaacatcataagaaatgaagcagaatagaataaaacatcatagtacatcccattatatatagtaaaggtaaacattgcttcgtgtgtgtgtgtgtgtgtgtgtgtgtgtgtgtgtgtgtgtgtgttgggggtgtggtggtgtcttctgaaccatgttgtaaagtacatttcttcctgagggttgtggtcaaaaacatttgaaaaatactattagttcaagctgtttattcacagacgagagggcagggatgatgaaattaccctgctaggtggatgcaggcttttgaacagataatgtgagagcttttaggaagagagttggtgagcaccaggagctaacatgggttcacctcagccatcacccagacaagcttcagaccagactcaaatgtgatggtcttcatgccacacaccaggggtcatgaatgggctggaacttacataaacacaatcaagatggataacgagcaggtacaaagcaacatcttaggagcaattgttaggataactagaactattcctgctcttctccaagccattcagcaggggcgcaattgacattctaaaatctttgaatgtttgtcatgtggaaaatggaatcgatctcatctctatggccccagcacttagatgggtgttttgatctaggaaacattttctttttctttctataacatctctgatttgccctaattcctgc

SEQ ID NO: 61668 - DNA, 1002 bp, Homo sapiens
ccacttgtcactaaaggaaagattcaactcttgagtcttggtgtacaaatgaggggacctattgcttctttaatgtaccagtctgtcctcaacatggagaccagtttcatctcctttgccttccatcagatgtggatgggagccctgtattctgctgagctaatagaatgcctgtgtccctactggaaggtgacagggaagtatgcatccagcaatctatgggaatatcaaggccacattcccttttttaaaatgaggatggcagtgtgttagaatagaaagagttgacatgaggaacagctgtgaggttatgaattctgatcttggtttggtcccagtcaattacgtggtcttagttcccatttaaatgctgaataagtcaatcctcaggggtaaattctttcaaaatgctcataaattgtgaaatcctagtgttggtggggaccttggatattcctttagtgcaatgactgcaaaatatgactgtgcattggattgcccagggatgcttgctaatatgtcaatagccaggctctagcatagagtatttaggctccagcatgggtattttttttttaacagtcggtcctccttccagtgtttgggaacaatgatctggtttatctgccagctcccaggtagaggaaaatttgcaatgaaatcttcccagcatggctactcttagccagtccttactcccttcccctcattgacaactttcattctgtttctaaggagtagggctcttaccaaaatgtcaatgtgacccacctccagtccactcttttcttcgcagagcgtaagaactagttctgtctggcactcctggaatagtcataggacagagaaaagagaggaaacttttgagttctgataaacacatctgcagcacacatcttgtgagttgctcagtgttctgtatcctcttgtcttttctggtgaggatttgatgatgaagttggagcatggtcttcaagggctgaaatccaagagtttctaagt

SEQ ID NO: 61669 - DNA, 1064 bp, Homo sapiens
taagattgtgggccttggccactgcagcatgcacatccctgaatccacactcttatggtatcgaggccttgggcaaatgactgaatttcccttgaccttcccttccacctgtaaaatggggacaatgatagtagttatctcacagggtaggcgtcagatttaatgagctaatagatgcaaagcccttgcatgtgcctggcatataataaatgctacattgtgtttttatcattaaaattatcttaatattattttgctgttgctgttattattgctgttgttattgcttagattggaacatgtctttgctatttataactgtgtgaccttgaacatatcacttagcccccatgtgccatgacatttgtaaaatggggaaagaggagtctgttccttggtgcagctgcaaggatgtcagtaggttggcacaggaaaggcctttgaagcagcatcagtgcagggcaagtgttgtgggttattattggtgacttgctcccctcaccagaggggtcttttgggtgctgtggagccagaggggtctgtccatggtgggttaggattatgcacttaggtcttgctttccatttgggacagtaagcatctgagagaagagtttgtccctgactataccaaattccaagttctgccaaggaatcctggggtaggccagaaagggaggcaggaatggagccagtggtggacccagcgtttccttccaaagcttttagactcagctgctaaagccagtcatgaagtggacgtgattcctgaggcagggcagcaggcccctctctcactacccccttcaccagccccaaccttcagcaacttttcctggcaggagaccacatcaccatcccctccccttcccatcacaggcatttcagaacacaaggggatctgggggacccacgtctaaggaactgtgactgagagcctgggaagggctttctcttgacctgggagagggaaaattaggcaaattgctgtgtttctccactgtaaacctgaatgggaatgagggaggagggagaaaaagccagacaaaaatggagacacatgca

SEQ ID NO: 61670 - DNA, 1976 bp, Homo sapiens
ctgcaagatgctggaataggagggagggagggaaggccagtgagagggcaagattattaatatgcttttcttactaaattggctttcagaatcaaggggaagaaccaaggtgggttgttaagggagtactgatttagatgtgctgagcagttgaaatgtttttgtttctcaaacatgaaagcacttggctttgcatgactgggttttaaattgctcagcaaagcatcacttggggctaacctgagtctgtgaagttccacaattcaggaatgatggttactgcagcactcttgtgtttcaaggttcgtcatgaagactagcatagattccactgttcaattaaagcaacgtttaccatgatattcctattttccatgatgcagggtcctgggaagcatctctttcaggaagggagtatgtattcaaggtcagtcagtatatgaatgtgtctgagacttggatggctcaaggggatagagctaggtgttatctggcagtcgcaaaagtgagagatgatgacaaggccaaggtaggtaggagaatggggatccctcattcatttatcccatcattatttattgagcaccaactgtgtcccaggcattgttcaaggttcaagcacaaagccgtgttcaatgggttcaggtagaaacatgcacagttacatcacaacagagtaaaccatgggaactgcatggtgcagagtagggggtatttgcatggcagttgaagacctgtgtcggacgctgatgcttctataataacccaacttggttcctctccacttttagagccaattaattaggaaaaacactttcttccttccctctctgtcattctatgttggcatttgtcccccttgggttgatgggcagacacaggtatgaaacccataacttcatctctctgggattcagtttctgggcagagtgggcaagggaggccagggtcttctagactcactaagtcagaagcatctcctcctgatctttggtttaatttttcttttgaaggtactcagtccatgatttcagattagggaggcaccacctggcaaagggggagcctgacaatgcagggcagttctaagtaccaggcttgggaccgattctatggagatatggtagatgggactaccctcaactgaataatgtgtgaagagaatttaagaccatgcctgatacatagagggtccagtgaaagttgaaggcaaataaccctggtaaagaaggcaggaaacacaaggaagccattcatttatttattattcattcaatcaacaaatatttcttaaatatttataccaacaaagcatggaacctctagccaaactctctggtttcaaatcctggctgttttacaatatctgtataaccttgagcaagttacttaattattctctgtgcctccatttcttcatttgtaacatgggaataatcaaaaagaataaatgaagattgttatgaagactaacacatgattgttattattatctttttgttcatttatttagctgtgtccttagtctgttgcttgattggtgtggtgttggggatgtggccaacggagacaggaaaggtctccgtctttacccaccttatattacaatagaagagtcagattataaaaaaataataaatcaataaataatactttaaggtagtgatgagtgatgcaggaaacaagagaagatgattgtggagtgagtgattactacgggtgaggtccaatgatagagaggactagtgaagagggaagacagtcagtctacacaaagatcatcctgttgaaaaatatgaaatatgcaagtctttggaatttacccaaaaaaaaaaatagagaaagcatttcttgagtttccaagagaggcaagcaggatgagccaccaaaaataagtacggttaaataaagattgattctgggaccaaataagcttcaagataattatttctcatggtagtgaatcagtatgtctc

SEQ ID NO: 61671 - DNA, 1054 bp, Homo sapiens
gatgacgatcatgataatactacactaatagtagttaagagttaccaattgcctattctgtactaggagcaatttagacctcatcacatgtaattctaacaacatccccgcaagacaagcattatagtcctttcatagatgagaacatctgtgcttagagagattaagtaactttcagactcaaacagctggatggtgactgagctgaggtttgtacccatgtcttgatgactaagcccagctgtgcccaccgggacaccttgacctagtacttctgagagccccagggtcactattcagaggctcccagagctgccagtaccccagatcattgcggctccctcatcctggcagtgaggaggctcaggcctccgtgctagtgccccactccttgattctacccgtccctccctccctgtggcctgcagagattccgactgctgctttgtttcacccagagcacctcttctgggctgagtgctgtggaaagggccaggtaggaaaggagatttaaagtagcttgactcagtttctcccctgagtttccctttggagacccgagaaacacatctgggaagtgaatgggaagatgagaagaagtaagcaaaactgggaagagtgaaggccttggaagtgcagaggatgccggtcgtcccaggtgctccggggagtatttctgtttagagtggcatgtggagggagtgctctcctggtacagcaggcgtccaggcagagtgagactctgctagactcaactctttcttcttctctgaaggaatcagagactgaaacaaggatggcttcatcagtttggccatagcctggaaagactgggaaacccagcagctctctggcccctgggctcacagacgacatagttcttggaagctgtcatccctgcctgtgatgactgacctgcctcttgccaggcttccatccttgcttcaaggcctgctaatcatcagctccactgggagatctttgcaggctgccctggaatcatagctccaggcctttgttctagaacatctgttgcattgtattgtacctattg

SEQ ID NO: 61672 - DNA, 1051 bp, Homo sapiens
actagtgtttatgaaggatttactaaatgccacctacaataccaggtgatttttctacatcacctcattaatcctcatatccctactatgagagtaggtaccgcattcatccccattcagtggagcccataggggaggaaactgacgtgggaggctggctcagttcccttagtgatggcagtctgatggaggtgctgacccaagtggacaccaaatgttttgtattgaaacataatacagtgcagcattatggggcagggatggggagctgctggcccatgagctggatatagtcttgatgtgattttatgtcattaaggaaacaattactaagagtaacacaccctttactcctgtagtcataaatctgtagtctacttttaaaatctactgataagcttccaaaattatgggttcctttaagaaagtttctctttagttctaattttattattgttgtttgtttgattgttttcttttctgcctacatatgtctgattttctcttcacaactgcatcctagatgccttccttagtctcttctgcttctcttctgttactcttgttttctgcttctatatatttatctgctgttttcctttctgtacttttccctcttctgtctgtacccattagtatcccttaaatgcctgtgaaaaggaattcaagtgagttcttattgcttattgggtagaagagggttttatgctttaatttaaaaatggttgaggatttaatagtatttctgtctttaaaagataataacattacattgcttttttactttatttgtattagaaaaatattctgactctccattaggcagttgtccttgatagagtgggaaaaaggctcagaattccgtcaagcaggtgtatcaagaagttgctatttggtctgttgtctttcctggttattcattattcagtttaacacagaaatcattaaacatacactgttttctatggtgccaaacatcaaatgaaacatgcttaggcctgtgaaccaagaacttctagaaaccagacaattaccaagggcgtcaaaatgt

SEQ ID NO: 61673 - DNA, 1039 bp, Homo sapiens
ggagcagaggcagagtcctcagtttcatcctgggagccataaaagttttctaagagtttatcatctccatcaagatgaaaatgggatttcaaggcttcaaataggaaagataaataacaaggaaaactccagcttttgtcaaagcaaagttctctttaccagttttatgagtctacctgttgtgcctgcaccctggcatctgtttcactgtggtatcagacaaagccttctccaggaatttatgcaaacctacgactggatagagaatttcaggcaattggtagagcttggaagacggctgacaagtcatattcttgggccgtaactcactctcagactcctcattcgttcctcaattcttcctcttccccttccagcataatgggaattggaatagaaagccctattaactgtaaggcctaggctgtgatttataggacattataacaaacgggactatggttcgttgtacttggctatcttttgcatttgaggtggccaggattctttgtcaggattagattttgcccccttggcctcagtaaatggctgcatgcaactaggaaaggctcagccagtgtttccagctgctcaagatgaccccatgtttcctttgaggaaagcagtgctatagagcacccatgtgccactctggatggccacgaaagtgcccagtgagtgctccttggaacttgtttctgatgtgaaagttttggtgggaaactcggggagacatattacatcctggtaggaggcacgtcctatggatttgcccttgatgcttctttttccattgtcctggcttaagccctgtgaccccttccttcactcattatagcagctacatgtcactctcctcatttgtcccatctccccgcttcagtccatctttcatgctattgccagatgaattttccccaaagccagctttgcttaggtttccccatggctcagagaccttcagtggctttccaaggtctaaagcccaaacacttcaagcaaatggtcagggcccctatcctctttccaacctgtcctt

SEQ ID NO: 61674 - DNA, 1006 bp, Homo sapiens
tcgtgcctacgggccccaaacagcccaatttggtgcactaaaagcctcatttttagactctgggtccagagtgaggctttttccagaaaaaaacaaacaaacaaacaaacaaacaaacaaacaaaaaacctacttcagggaaatgacaacaacagaaagccaccatttgccctaaaatttttattgtaaaaactattctctcctgtttgagtagtgagggatctaggacataacagtggcttctctggctttcttaaggaatcagggcacttggaaactcaattaaatgtacccaagcctcttaagcaccaaggctatctttttgctcatccagttaatttcagtttgtaaaattggccttgtgctgacatgatggagacggggtgagggtgggaagccagggtcctctgtgagcggaagcttgcttctctgttcacaagcctccaagggcacacatccttccctggggcatcaagggggaccattaaacctgtttgcaccacgtccctgggagagcaaacttctgggccttccttgtttactggaggttggttaattcggaaggtagatggactgggcatattggttccccactggcaggagcagcccaggattcagcaggttaacgcaaaggatcgagaaactatcaccttcctagaactgttcccagacttttagcaaacaggctgaattttgacctttttcccatttttctttttaatcctccctccccacatgttttgtggcttttggtgaaatggctgtcctaagggaaacaggacagttcattgaaaaggagagagaaagtaaagacccctttcccacaccaccttccctcagatgcagcctttgcttacactaaaaatagcttgaaacagaggctgaatcacaaaaaaaaaagtggcatttcaggggacagaggctgccagctccctggctgctgctgaagtctgttgggtttgttggtctctgagccccgacttgcccaggaaggcgtggggtttgg

SEQ ID NO: 61675 - DNA, 1043 bp, Homo sapiens
atgctacttgcttgaatgtatagggatgatttatcgatgtaagaagaaagaaaaatatcagcctctctctttatccccctaaatatgttgcatgtgtggcattttacattaacgttatatacatagcctggaccatttcatctttatctccaagggcccaaaagaaaatatgtgtcaaatatgcctttcaaataggaataatcctattggtttaacagagttaaatagatgtacattcactgatgtgctgtttgcgcatgaaattagactggttgaacccagtgggagtacacatgggcacacacataatcaaatatatcacattcattgcattcacttctgttaggtgccctatggaggttgtgacatttcccatcagtatcctctacttttctttctcagtggtgcctggtggcaaattcacacacacttctctctctctctgtctctgtctctgtctctcacccccctcatctatgccccagcttttattatattttaggcaaatctatgtaaaattcttacatcattggccaatgccttgtgtagcagaaagactagaggtttcacaggactgtacttttagtaagaatgtcccatagtgaataggtatgtcctgctctctgctattgggaatcagttggagttttattggcattgttttaacactcctaagggaggcttctgtttaaaggaaccatatgataatttccttccaggacttaatagtggttctgtatttcatcccatgcatagatactgaaatcacattatgggtatcagtcaaaaagtcaaagaagatacattctttttttactattaaacatgaaattttgtctttatctaatgaaagatacactagatttgcactagatttgttatttttgactcaacatcatttacccagatgagaaaacatgagtcagagaaataattgaattgagcagtctcccccgacaggtagtgagctgcctgttactagaaatattcaaagagcagcaggatcgcatttcatagtgctgttgctgacagttggttagact

SEQ ID NO: 61676 - DNA, 1031 bp, Homo sapiens
tcccactacagagacgctgctattctcagtactctaccaggtgctctgtgagcttgaggtttccactctggctggtgggaaggtgaaccgttcccagccctgtataaactctgggaaatgttctgtctgctcctttagggtgtttctctcccccaccttggatagctttcacacatgcctgtgtccaccaatacttagctaaagactcaagggggtccctctgctgacctcaagtattcactgggcagttctttttgctgccctggcctgtgaattccagcctccttggccttgctggaatccagccttcatctcctcaactcagggagacatctgggccctgctggggtcctccttctttctgctgtgacttggacgctctctccagacaggaagttgaggcaactgtagggctcacttcgtttctcctctctcagggattgctgtcttcccctgactgagctccagtgtctgaaaatcattgtcttgtctgaatttttagttgtttcaggtgggaggagagatctagtccatgctacttctttggagaatctttgaatggtgagataagattatttatttatttatttatttatttatatttatttattttttacctctagcattctggaacttcttgtgcttgttagaatttctcagtgggtgtcagaagatggatgctgtaatctgtattctaatgatgtcgtggcttatctctggaaatactcttgattggattttaaaactgagtgcttaggagcccttagagaggcaaatgctggtcacaggggccaagctagactctatgcaaacaggtcaggctggaatccccagttatcaagggactgaagttaacctgaaacgtttcctttaccatgacttaacctaaggtgcatgataatgagtgttaactgggtaccaggcttgcctttacaccaggttctgtccttatagcaaccccgtcagctaggtacccccatccctgttttccagatgagattaaggaactttcccaaatttagggtctgaat

SEQ ID NO: 61677 - DNA, 1050 bp, Homo sapiens
tctgaggtactgggcattaggacttcaatgtgaatttttggtggggaacataaatcagcccttaataggcacagaggggctaagtaacttgtgtgtagacacagagctataggagaagatggcaggcattctgactccagaatcccctggttctgacagaatcccctgacagttctgacagttcgagaccagcccggcccacatggtgaaaccctgtctctaccaaaaatacaaaaattagccaggcatggttgtgcacatctgtagtcccagctacttgggaggctgaggcacaagaatcactggaacccgggaggcggagtctgcaataagccaagatcgcaccactgcactccagcctgggcgacagagtgagactctgtgtcaaaaaatttaaaaataaataaaaataaaaataaaaacaaggaaacaatatgattgtactattcaaaggataatacttaatttgcaaacttcatattaattcctagtgtactaccagaatgagatctggtaacaggataaaagtttaaatcagatgatcaatgccatattttttccttccatgaatacatctccaggaatgtgtacataacctaatcaggaatagcttcaaggtcaaaattcgtggtccctgtgaatgtagaactcggcgagtggccaagtggccctgctgtgcctccctgcccttttggagcagcctttcagaaacttctggactctctgaccactgtcctctctcaagtctggaaacttgggaactaaccttgacctcgagttggctttccctaggggcaaatgcaggcgctggtggaaaaggctatggcctttatagtctctggcagctctgtgtgtccacacaactgtgatgctgtgacatagagttctgccactggattctatgactgaggatgaagtccaactaaattgccatgtctggaaccctgttggatcatcgcactggcaccctggagtcccttgggatcccctattcgctcagcattacatctgctgagcactgctcagtcaacattagtgaagacaactgct

SEQ ID NO: 61678 - DNA, 1363 bp, Homo sapiens
gcccagctaatttttctatatttttagtagagatgggctttcactgtgttcaccaggatggtctcgatctcctgaccttgtgatccgcccgtctcggcctcccaaagtgctgggattataggcgtgagccatcgtgcctggccaggcacctgttagtttctaaacaattgttaatatcattcattactttatttctaaaacagcatgattgaattgagcatttccttggacttggaaaggtatgattttggaggagggtgaacctgtgtaggctgttgcagggagttccttgacattatcaactgaccagtccatcaacaaatttatttgttcatttatttattaattcaaggatgttgggtccatttttcagttagactctggaaagataagtgattggtcctatcccttaagggaaatatgctttcattggagaaataacatgtacacgctgtgtgtatgtgtgtgtgtgcacgcgtgtgtatgtgcatacacatgtgtatcttttttttttttttgagatggagtctcactctgttgcccaggctggagtgcagtggcatgatctcagctcactggaacctcccccttccaggttcgagattctcctgccttagcctcccaagtagctgggattacaggcgcccgccactacctccggctattttttttttttttttgtatttttagtagagacaggatttcaccatgttggccaggctggtctcgaactcctgacctcaggtgatctgcccacctccgcctcccaaagtgctgggattacaggtgtgagccaccgtgcccggctgcacgtgtgtgtctttatgtgttcaccctatggggagagaaaaggttcatgaaagttgagattactgtgggtagggttgtcagggagggctttgccgggagggggaagctgcgctaggcaagctgtggctccagagtcttggaggcgcctgtaacagtccctgcggtttcaaaagaattcagagaggggagccatagcctggtctccaaatgtgcagcaccttctgggcaagcttagacttaaaggatatcattgtagataatgatttgcttatttcttgctctaggatatggggactgtttctttttttctgggatgctttaataggatagtaaaagtaaacgtgtccctgtctgatggcccttggctcagctggaagaagatcagctctgctgcaatttaggaagagataactggggtccatcacgtggctggttcagaccagggttttatgactgggatttgcctgctggagccctgggtcactgtgccagactcaaccacaggtcacaatctggaactggatccttgctgccagatgggaggcgggcaggg

SEQ ID NO: 61679 - DNA, 1097 bp, Homo sapiens
caaagagtggttcaaggtaaaagcaaggtcaagatacatttacaagccagtgtgttgtctgtacgtggcagccctataaggactggggttctgtgtggtcctagagatttcggtcctggagatgaaagactgtgagtatttacctggaatggaggcccagggaggaatgaatttccctactcctgtgagagctgtatgtaaatagactgtttctgtgttggaaagagcacaggcagagtctgtgactttaggcaaactgcctaatttcttttcaactgctaaatgtgaataagcacagcaccaacctcctaggtctattgtgaagattaaatgacataacctagtgtggtcttagcgtgttgtaggcactctacacactctatcgttagtagtagtcatattaatattaaactagcaaaaactgtttgcccaagaagttccagtaaatcattcccttcaatcagggtgatgataattttattttttagtattattaagtcattgctgtctgtaaggccatcaaagagctggagccacttgctggaatcaggctaggtcaatttctgaatgctggaatgaggttgaggggagtgaggtagaggatacatttttaaaaagtttacatgtaatcaaaccctggtcattcacatctcctgttagattcattatgggagttggatatttaagaggaatctttgccacaaattcatgtgtaaacccaataattctcgactgttaaaagtggtgggagccctagatattaggatatagggtcatttaaccccgtggttctcaaccaggcatgattttgcctcccatgagacattggcaaattggggtgggtgctgctggcatccggtgcgtagcggccagggacactgctcatcttataatacacaggataaccctcctcaataaagagtaatctggaccaaaatgtcaacagtgccggggttgagaaactctgtcctaacctgaagatgagacaactgaccaccaggaagggggagtgacttgctgaggttaggcagcacagctgcaccagagctgggatccaaagtttgaatcaattgaccagaggccagaggccagacaga

SEQ ID NO: 61680 - DNA, 1023 bp, Homo sapiens
cagatcagcaggggctgggttatgagagatgaggagtgggctgatccaaatgagaggtcagcttgagcagaggggaggatgtgggaaggcagagagtgtggaagccatgtgttgggagcagggtctgagaacatcaggttggggacagcccacgagggaccttcattagcagtgtggattttcacctgcactctgtcggcaagcactgaaggttgtcattagcacactggctgtcacagaccagaggggcttcccattcagtcaaatcttgctgcccatccccagtgaacggagcagtaggcagtgaggcgggaccggcagggcgtacaagatgctcgcccattccctccatttgaattgggcttgggacatcccaaggggctgctgcctgggccctgaacacatctaagggctatgggtttatggtctttcagctgctgtttatgtcacaaatgcctgtcacagaaggggcattaaaaataaccgaatggctaataccatttctcaaaataactacttgcaaagtgctttgctggggcaaatggctactaaaattagactccctggtggtatatgtagggtgtgtgtgtgtgtgtgtgtgtgtgtgtgtgtgtgtgtgtatgacttctaaacccatttccccccagggtgaggcccacagtttgcacccttttgttctgtggtcccttctgtcatagctgggtgtcccagaacagtgttcacccagtcaccccaagatgccctctttcatcctgcagtcctcagcaaattggagccactgccctacattgccctgttgtcctgctctaaggagcagaattttgaagaatcttggagggcggggtggcctcattgtagcagtggcctaattccttggtgtgccaggtaataatagcacgccgtggggggaatctcactcagcatgctgtccgaggggaaactgggccatggaacaatgtggcagccccactcaaggtgacctagtaactgagggcacggacacacgattttccaggccccagt

SEQ ID NO: 61681 - DNA, 1041 bp, Homo sapiens
tctctcttctgcagagacgaggggcccagatcgggtcagcctctgctcagctctgcagtcttgccagggggaggaggaatcaggctggggggcagggatagagggccgtgtgcatcagggaaggaggccctgagatgacaagctccatgagtcactcaactggccgctccagccagagagcatcaaggaggggtttatgacactgcctcatgcagcagtgatcagccatgaggtggcatccatccattgtcaggggacagtccatcctcctcaggcacatgcacagaggattgggtgcagaggagttcaccctcaacacctctgggtgttgggaggcaggagagcagtggggctggaggcacagctctgccaagcattcctgaaccaaagcaagccatcaatgagtgctcacaccgtgcaggcactgtgagcctgtgtccacatgatctcatcttgtcctcagggccatgccaagaggaggcactattcttcttcttctcagtttatggatgatgataatggaggcatagagaggttaagcaacttgtttgatgtcacccaacaatgctgaaatggggcaggatttggccctggccctccagagcctatgggcttaattgttgccttggtgggtcttagccttgagcctgcattagaacaacctggagggcttggccccactccagagtttctgatttcggtcaggtctgcgataggtctgagaatgtgtgtttttaataagtttccatttgaggtaaagcccagggaccacactagtctgtgctgtactgactcatcatcccgtctcagtttccaacctccaaaaccagagggttgagctttctaccagttctctccagttgaccagttaacgcagaaattccagccttctaatcacccataattatgtttagttttggacaacttaatatatgagagagcaatagtacttcagtaaactcctctactgctactgggtttctgtcacttgtctcctcttatttttgacaatttgatgttttgtgttgtgaggcttccttt

SEQ ID NO: 61682 - DNA, 1155 bp, Homo sapiens
ggattgctcaggatcactgagaaattcatttggcaaaatattgtgaatttaatggcctcttcaatttgaaataaagccacccggctttttgaaatagagcttcctttgggagcttagaactaaattcttggcttcatagaatgccctagctgggtggacggagaatcccaacatatagatgtatctagaatgtcagaagtgaagtgatctgtctctccaaatcattggtgctagggagaaagaggtgagcatgctgtctttttaaaggattcaactaactctcagagctttggaagaaagaaaaaaaatccaaaatgtgtactaggtcagtttttatttggaagatggattttattgttatatttttaaactaggaagtctcttaccactcccattctccttccctggcctagaggggtgggagttcagatccctgcaacattttaacccaaaaagctcttacctgtttacctttctttgatagagttgccaagtggtcttggttttgttttgtttttcttttagaagagaggatctagctatgttgcctaggcttgtctcaaactcctgggctcaagcggtcctccagcttcagcctctcaagcagctaggattacaggcatgtgccgccacactcagctcaccgagcggtcttgaacaaaaaacccaaattggtccaagtatggattatacactaatgatatttatcaccatcactatcgttgtcattatcagttttattatagtgacttccagttcggtatctattgtgggtgcttggagcttttgcacatgtaatcttatttaatcctcacaccaacctaggaggaaggtattattattattgcccttttccaggtgggaaaattgaggctcggagagttgtaagtggcttgcctgatgacaaagggtgggtgagtggtagaggcaaatttgaactcagtgaagaaagagttcaggctttgctgtcagatggactgaagttcttctcttggtgtccatgggggtgccagagatgtgggggttcttctttctccttccaaatcagacgcaactgaaagtctgaggactcagcttcaatctgagctctgatttctctagagtatccaggatggaaaaggggatggtaagatgaagtttgcagggagggcttcc

SEQ ID NO: 61683 - DNA, 1072 bp, Homo sapiens
agtagttgggaagcctgggggccagctgggagttgtcactgcgttgggaatctgcctcctgggcctttttattaaggcgtggagttgtgtgctgttctcttacctctggtccctgcttggaggaagaggctgaacttgtaccacctgggcaagccagtttgctgtgaccacacatggattaggtgccagatgaccacctggggaatgtgccagtcaggcagccaggatgcaaagtgattcgcttcccccttgccagtattttctagggcgtggtgtttgcccgcatcttctggtgaggcctggctatctctgaggggcagaccagcacacctgtgggtgcagcagctcacaggagtctgttgggcggcactgccaggccctcgggaccctgagtaaggtctgacgcatcagggcaggcagaggggaggccacatttcgcctgccactgatgttagcggggaggccccagacccaggtgccaggcgggcaaattgatttttcagcctgcgaaacttctaaagataggcacgggtggtgctctgtgctggcactgggagtgacaggccatctgtgagtcacagtcccgcccgctggaggagtgcaggtcctgggcaggcagcactgcggtgagaggggcccagatgcaggaggggagggctaatgcaatgagcttgagtcagccctgcttgccaggccaggatcctcctcccaggccggcaccaaggagagtgttctactgcctggctccaggaaaactgctgctgcctgtaatttatgcagtttctatggctgagtggagcagacatggcctgaatggatcattggagtggtttgtgcttccctcgccctgtggcctcacatatttaacaaaattggttgcttggtttatttcttgaatcatcacttgaaatctctcagcttcattctgaattcctcatccctcttctccccttgtttcctattttctttgaattatttggctggctctttttgatatttgtgacattatcttacatttatgcagcactttacagtttgcaaagctctttcacatacattatccaggcaacac

SEQ ID NO: 61684 - DNA, 1101 bp, Homo sapiens
ggggaccctgtcagtatcatcaggatagcccggactcagaagttagtctctcatagagccaataggaaggttttggcaaatctggattttttcacttgcattctggttttggttctgctattgactatcagggttactttgaaaaaaccatttgcttctttatgtcttgcttgctttatctgtaaaatgaagaggttgtaaaattcttctgtaaatcatttaattaccaccctcttcccccatggaaacaaacctagaaaatcctaactttgctttaaaaatattcagtacatggaatattttagtgttcatgttttctcttttgagtggggtttggccattggctggttcttggataaaatttggagggaggtattctccaggcttaaatgagtgaaaaagtctgggaaaaaataaaccaaccctacctccttcccacccaaggagtgtcctttgcatctggcatcgctgtgttttcattcgctggtcagtccctcatctgctgccaacctcttcccttcctggcttggtcagaaggtccagagagcccactgtactggcggggagaatctgtcccttttgcgcacatcattgggaactcaaagtcatctcgtgttggagtcaaatgacgtgttagcacacgcctgcttgggggatcctcctgcagttggcatattgcgtgacacacggggggattctcatcgtgctggaatgcatggccagccccttctttctccaagcacagttcagtgcattttccccccagttgctgcttctcgtaggagattatttctgattcgtattgagttgttactggaaaacacttcagagagataatgagctgggtagttttcctcttcatttttctttgttgttgttgaattcatatgggtaactgggctctccacttacactttattgattcctgaatttagggcatagctctgtaattggcaatttcctcagtgccacgtgggcagagagaagtactgtgcctggggctgctgactctgcaggaagctgtaggggcacttccttttagccctggactgacacagctgagtgcccgtgggcaagtcccttgttgcctctttcttggct

SEQ ID NO: 61685 - DNA, 1048 bp, Homo sapiens
atagcgtaattttttccccatctgttctgggcaagggatgataaagcattctgttggaagattgtgtgtaagcatcaaccatgagtctcactactttattgcgttgcaatgtctactttgttaagatgtcttgaaagaaagacttcttccatcctcctggcacaactgaatgtgcttggtatggggagacgtgtctaactgaatctaagcaactaattggaataggcaaaggaggaagtgatgaaagtgaagctgcagtttctgcaaaggtggctttattgtataaggtgcaggttattaccccaaatgatcaattactaaagttctggattgggcagtgacaagtgtctagagggaatgctgggcctagggaattgcattgtcatgtgagaataaggctggggccacctttacattttcattaaaaaaagatctggacagtacttgactgtggtagtagactttgtaaaggttattatggttacagctttgtttgcttgagatcctctatttttatagttcaatattattaaggtatgaagaaactgttttatggatgtcagttttactgtttctgacaacagcttgcgaggaagtatacatttgtgcaacagaccgctttggatgttaattctaaatttagaagccgccttcaatgggtgtggaaatcagttacacaaaattcaggtgcttactaaaaaaaatctgaatatccatgaagcttgtatggtccctggtggaactttgagcagctgagcctctctgaagatcctgaggttgtcagggtgtggcacagcagctgggggctgggccccgtgcatgcacatcagcatctgtgtattgaatataatcagcacagatagggaagaaacaaaccaccaccaccaaacaccctaagtaccaatctgggcatctgggcaccctggattttcattttgactctgtcatttactagttctctgaccttgggcaccatgctttgcatagcagccttggtttcctcattggtaaaatgaggctgttgaattctatatggctcaagagttct

SEQ ID NO: 61686 - DNA, 1080 bp, Homo sapiens
tggacaggtatacagggtgagtctggaagggtcctgagtacagaagcttctgtccctgttgagcgaggtacagacctattctattctattctattctattctattctattctattctattctattctattctattctattctattctattctattctattccattccattccattccattccattccattccattttcttaaaaaataattgcttataacctgttacatagatttcctggtcaaccagggggttgaggcctgccatctgaaattgctgttgtagtccagctctcctgctgtagaggaggatgctgaggttttgcctcatattatgcttctcttagtcacaaatctgaggccaaatgcaactgtactgagggccacccctgcccagcctgcccctgctgttacacctgaggctttgttaagagtcttcctgggtcatgtctgacctatcctgtggttttatgcctacacatccccaccgcccatgcacacactacacatcatggctcccggggaggcccactgggctctctctggccatcaactgtttcatgctcctctcctcttctgatcactgttcttttctgccccttctgagaatcagagtgaagattttgagacttagtgggaaggacttttaagctgatggatttaaatataagatattttgagagatgacttatgtatccagttctacaccagctcattcccaacctgaagtcccccaaactctgaaaagtgagtgtttttacctaattcatggaggggctggtggtgagtggaagctgccctgaactgcgaggcagtttatggtcttcattcatccagcttagtctgaattgtcgtgtgtcattgaagaaatgttagtgtgtgtgactgtgatgtgcagcccaaacctcagagattcaccttaataatttcctaaaacccgaaacaattggaattctaaaacacatctggttttgaagattttgagtgaggaatcatagagctggagatatatttgcagtgtgtgcatgttattgatttttttttttttttgagacaagatctcactctgttgcccaggctgg

SEQ ID NO: 61687 - DNA, 1076 bp, Homo sapiens
agggcctcctgagggtctcccagcctctggaataacaccttcactggtccgttctttactggccaccagagaggcctcttgaagacgtaacccagatcttgtctttctttttcttaaaacctcccaaaacttccccattgcccacagcaggagtctaccggccacttctttttgtatagtccatgagctaaggatgggttctatctctttaaatggttgaaaaaaacaatagacacattatattttcgacatatgaacatgataagatattcagattcaaatatctataaataaagttttattgggaaagagccatctgcattcactgatgtatcttttatggctgctttcaagcttaccgtggcagagttgagtaattgtgacagattgacagcttgttacagagaagtttgcccacacctgagctgtaggataaaattcaggcttcttcgcacacacctgtggccatttgtcactgacacccctgcctccctgatccctcctgctttgataaccttccatgctcttagcaactcccagctgccggcagatgccctgcatgggccatttccacctctgtgctttgccccttctcttctctccatccttgctgcttccttggctagacatcactgactcatccttgaagaaatccccttctccaagaaggcttcctgacctcccctctttccctttcatcctgtttggtttagtggctccctccctgtttggacaggaaaaacagaagcccaacgactccgggaggttggcagctgggcgctcagcacagagaaaggaggcctggggccaaaatggctcactgagtcagcagacccagtgcctggtatatgccaggtgctctagatgtgaagagcacagatgcaggccctgcctctgtggggctcacatcccagtgggagatacagacagttaatgcacattttaacaaatatataggggatgagagtccatgtcttgggagtgccctggccagtggctaggaagtggtggcaggtggattttctagataaggaacccaggaaggcctctgaggaggtgacatctgagtcccgaga

SEQ ID NO: 61688 - DNA, 1114 bp, Homo sapiens
ttccacatatattaagttgtttatgcctcataataaccctgatgcaggcatcattatttctgttttacagaggaagaaacaaagatatgaagaggttaaataacttgccaaggccaatcagctagcgagcatcagagctaggattcaagcccaggcagaccagctccagagcctgagctagactcaatgtcagtgatgatgtcgttgaccttcggggacagattctgcttttgccctggtgggtctgggttgagatgcattgcatttgatcttgctggagaaatttccagtcttctcagccctgggaaaatatgtatattggaacctcagagctacaccctgagggtatgtctcctggtttgctgaatttttaaaaagaggttttactctatggccagctttcttgccaggagatcagagaccgatgacagctggcagaatcggcctctgttccagctgtctcctacccttcctaaaactcagatgctctttgaagctgtcttcctccattgaggagcatgtgcttcttcagtgacagccggagagtgggactgggctggcccctgtccttctaaggccaccacctgcagcactcctagtcaccgttccaaggtcactgtggaggaaacagaagtggccgagagaggaaaggtgcttctcaaggaggctgagagtggagggagtaaggcaactgagcacggcagttgggtgggcccaggccaccaactgtttgtcctgcctgagttaagagtccagaattggggctgggtgtggtggctcacgcctgtaatcccagcactttgggaggctgaggtgggtggatcactaggtcaggagatcgagaccatcctggctaacacggtgaaaccccatctctactaaaaatacaaaaaattaaacaggcgtggtggcgggcacctgtagtcccagctactgaggctgaggcaggagaatgccgtgaacccgggaggcagaggttacagtgagccgagatcacgccactgcactctgcctgggtgacagagcgagactctgtctcaaaaaaaaaaaagtgttgagaattgggtatcaaacagagcctggtgtctgtcctggctttggcttttagcagcct

SEQ ID NO: 61689 - DNA, 1066 bp, Homo sapiens
gcaaccgaatggtgaggggtgacagtattgctactggtaggaaagcttggatggcagggacagaacggctgtaaacctggcacctctgggggagctgccccctcaccttgactttgaccattgtccctttcttttcactttcatgggacactagcgttgaaaaattggggcctttttcttcacactcccatttctctttatttaattattttaaaacatctgatgctgcagtgagatcagctgtgatacatcatctgttctattttgagctgcagggagacaaatggagaatactgctacctcccctcctggcgaggactgtgctcccaggagcccaatggatggaccgagccaaggcagctctgggcacaatttggatgctttcccctccaggggaatgcctgggtttccttattgtgcagatgccttgaactaacctggtcaaaaactagagagacaaaatcacagatggttgcacaggttgttggagtagcaaagacagcaccaagcagcagaaagaagatgaggcattgagtcctacgctcagggctgagcaccgtcactcctaattgaatggccactgaactttgtttcctcatctatgccaaagaaataacatttttcctaccactttcactgggttcttatgaggatcacacaagataatgtgtataaaaatgctttgtaaatggaaaagcactctgcaatttaagacattattatattaatagtaacaattaccatttccaattctggtgattcacttggggtaggagcccatagatctcatcactgctaccattactaccccacattgtacttcaaagctgcaattaccttgcacaatttcatttgatacattactgattatgcagtgttagaactggaaagcatcttgaggattaactaatccaaatgtatcgctttatagatggtgacctggcgcctggaagggagagacttatttgaggtccctagaactcaggactgtgggctgtcattcctagggagtaggctgttttactttggattatggttccctgtcctttctgaagggctagacatg

SEQ ID NO: 61690 - DNA, 1077 bp, Homo sapiens
cttcagtgccagggcagacatgggagacctgggaagcctgcccccagattttgctgtcaggcattggtgagttttgtgtccctcacaagtgggaatacattcaaaagacccctcccaccaactgggatggtgaaaagtataaaggacagtctcattctcagtgccatttagaatagggcagttttgatgaggagcaaggtgagtttcttaggtggtgtggctcttctcgaaatcaagggagctggagctggactcctgctatatcccttgctcagaactctgtactgcctggatctgatcattagcagagtctgcgccacctgctttggctcttggtccaaaaaatttgctgtatccttggcttagctactctgtgtccttgagggccaggaggttgccttgaagtccatgtggttcctggttgagtcactgacaaataaagtggccttggtgcttaccagggcccggggagaggagacaccatggtaatgacctcagacaataaacagaccattgggattggactgtggcctccagtgtcttgctgactcctgtcttggaaccaaatgcagaagctactttgtcctgcagctgatgggaataagctgccagcagatattttggtgcctagattatgaaaggagagtcaatatgtaatccacgggtataaaggtcatcacatggtccgagtctaaggcgatggtgttatttgtgcttgattggcggaatcttatgctgactgcttcttcacttcaccatttagagagtggacatcacacattagtcaatggcacacatttgggtttgaagataggttcaattgtatctccgtgttttcatgacatcttagagatcgtccgtccttttcactcatgaggctttggggtggagatagtaaaggtggctgatgtccctggatgtgagtgtgctagttcagcatgggacctcaggcagaaccttccccacgtgagccccagtgaccttctctgccgagaccctgcctcttagaggtgtgaagctcaaaggagatcatgtttctgaatacattttgcaaaggtggcaagggctgaccgtaaa

SEQ ID NO: 61691 - DNA, 1153 bp, Homo sapiens
aactcctgacctcaaatgatccacccgccttggcctcccaaagtgctgggattacaggcatgagccaccgcgcccggcgagattttaggtttttgacttgaagtgaagttaatttccatctgttaactgctgaagtctgggaccatgatgtcttttgcaaaagagtttttaaggcaagactgtcagtaatattctttccagggtcacttctaactgtacgaaactattcagccacgatgggtctgcatctttgcatatcattgtaaaccaaattatctacaggctgttgggctgcctgtatgtgcatttcaagttgggagtataagatgagtatttattttattttctggttccatgtcttgttcttgctccttcttcccttttagagactggacagtcctctctgtcttcatctttgggagtgaactggggctggggggtgggatcgagagtggcctctgctggctgggggcttcaggtttgtagattagtagacaacaaatagcgacctgatttaacaagtgcagaagcgcatggaactataaattcacagtggtggaaggaagctttggggcctcaggccctgtgcgattcctccccagtgctggaagcccaccctaccagtgtgtttatgatctcctgaggccactattccactggggacaaacccaccttacgatgaacttggaaagatctttctgtttgcactagtccttgtttgcttctagtctgtgtctgggacatgcagaacaagccttggtggatggtagatttcaaattctaaatccagttcaggaagggacagagctgggtggtgtttccatgtccgcagtgttgagacgtagaatgaccttaaccttaacttgtgtttcctccatgaaggccactttatttttctccctgatggcttccctgggttcttcgtcctcctgagacagtgtggtttccctttgcccctttgcccagagttcagaaaacgacccattctggttgtttcttgaagtttgccttctgaggtctcttcggtcttgtcagcagctgtgactggaggcttttgactgttgctgggccataaattcacctccttatcaatgtcacgtgccttgtatctccaaggtttagcccccttctcagtttcacgtgggggttgtaa

SEQ ID NO: 61692 - DNA, 1031 bp, Homo sapiens
tcaggcaaacccaagttcaaatcatggatctcacatttattagcagggcatctttgactgccaaccatgttgagctttggttacatcacctataccaagagcatactgatgcttactttgtagggttcttatagggagcaggaataatgggcacatagcaccctgcaaatgccagacacttagcaggcctcttgtaagtggtaactatcatagcttcatgaagtgctgagtttattttccctttgattcattgaacttatagcccctgaagggcgcagactataacaaataaagtttttgagccaaaaggaggctttagatcctgaagtatactgtcatagatcaaaaaaccatttagagtcagactgagacatgggcttatggctcttggctgttgcaaggctggaaagttagggcagggcagcagaggtaggcttcacggatggggtcctggcaggatggttacagttttgatggtggggtatcagtggacgaacatcgacagtatgggggaccaggagctgctgggctggcagaagggaaacactgtggcatttggtgggcaggtatggttgtccagcattgtacccttgaggagggacaaattccatccctgttatcccaagtccagaactcatagacctgtctcccaagtgatgtcacggtctcttggccaggacactcactgtctacccagaccagcttttccaagacaccccctaggccaggtttccccaagtgtgttctgtggcacacctgccttttaaattaccttgtgaaaaaaaatcagcaggcatggcgtggctgagcttcccctttggagggccacatcacaggcttggcggcatcctgctggtagagaaagtggttaaaatgccctcaaatgtgctacctgtgagcagtcttgcttcagtgtcaggggtgctgtgcagtgcccaaggttcagcctgtgatcctgggcaaagacgtcatgcctttgtgcctcagtttcctcacctgcaaattgaggtctgtgatagagcacagcctca

SEQ ID NO: 61693 - DNA, 1049 bp, Homo sapiens
tagaataataatttttgtgctagatttcccaagaaaacataggctgcctttccagaaaattctaccagccctcagatgggttcaccctcaccctccttcagccccaagatggtttgatcaagagctggagtccagaggaaagcaggtctgaaattctgtgggagataaaattcagcaaggagctccaatttcatgagcgtttggtctctgggatcgcaccaaacctttttgatcaaaggaacccaagactgtggacatgcatcgtgggacatctcttcattagtacctttggcctctgaatctcaaacagtgaatgactttagtcttttgaaaagagtggcatgtggactttttcagaaagtgaagaagaaaacattacaatttcctcctgttgggaacttggtcacagtcattccagtactgtgttctttgctgtactttttcacattattgtttttttccttgtgggatttcatcagagctctctattcacttgggtgtgacgttgtgaagttcaatcctgtcatagactatattgaatagggagctgctctggtagcctgaataaagccatgactttgaagaagttatttaacctctctggtgtctatctttccttgtgtataaaatgtggggattgaattctgtgagttctaatgtcccttcctgctctgtgattcgatataggagagagggaggagttgaggaatgagggttaaagtttctagctcagaatgtgttttgcagttccctagcaattcctttaggaattcagccttgggacagttacatatctttatttccatcttctgctcgtcttccagcatgtggtctacttctctttaaataactggggaaactgaggccaacttcctgttggagctgtggtttgttgaggggcctgagtgtggctgggcatagagttatttccattctcagtttgagctgttggccttgtagaagcttgggcttgatcaaggatggtctgcgtgtaatgaattatcgagatgttgtctccatggctgtgcctgagaaaacaacacgttttc

SEQ ID NO: 61694 - DNA, 1982 bp, Homo sapiens
tgcagctggccgcctgaggggacaccagactcagctcttttctagcgactgaaagtagaagtctgtccgtctatgaacatgcgggggaaggatccggaaccaggacccagaagcacctcctttgtagacagagggccacggctgcgtgcgatccaggcccaggcccacacactctgcccgtgtcacacgtgtgctttaacacaaaacagataacactaaagacgggttcagcacccacctttctttagccagctgatcagagatgctgcaaagagaacctttcggatcactcgtttacaagccttttctaagtatttggtggtttatgtttacttgaacggctccatgttgccggtgcccagcccctgtcccctctgtcaaccccctgtcgctttggtgttggtttcgttcccgtcttcagcaaaacgaccttggaacctcaatgggggctgctttgctttgggaggttcttgttggtgggaccagagctttgacaaacctcctgctccttggtggcacctctcctggaaggacgtcacaactccaggtgctcagactgcctgtggcagcagaaccagtgcctttggcattttcctcccacaatggggaaggtgactttggcattcttacaaactcgtctctcggcctttctctcctgccttccacagcctctcgtttctcctccatctgtgcttattacttgaggactgtgtctgctccgtgagagctgcgtgggcagggctgcagtggggtccaggtggtgttcagctgtgctgatgcctgccattgggtcctccttaggctctgtaagtcgtgacagccttcatcagtgcaatgtttgcagggtaattcttaaactttttagagggtggcaggtacatcagttctttttgatatgaaaacattcatgtttcagacattgaattgagagcttttaggggaagcataatggttattgtcactatcaacagtctaaaaagaaaaactgaggtctttttaatcttgattacagcactcacggcatgcaccctactcagtgtgggtgtcttcgtttgggggctttttttttttttgcacttctgaggctagatatgtctggctgaagatttgatgtggttcctccttaagctatgcgtcctgttaataataggtactgtactgggctctgtgtaagtgtcgttggggtaggacctatattttaatactgttcctaacatttcattttactagcgagaaatctttgatttcattttattctttgtaattctagacactagattgtagtttagccataactgatgttttttaaaaagggatatattttcttgcacagttgttcaaaaaagagacaagtttcagtcctcaatgctgtcctttgttttacaggtacaagttttctagctcagacaaactatgaaaaactgtagactattctcaaggtattaactcgcagaccctctgggggtaggggctgttttctaagttacaggcagagtgggactgagatggtacagtgtgcacagacaggtactgagctgacagactgggattttctgtactaaaatgttactttgtatcaaaagttaaacaggctttagtacaacaaataaaggtcaatttctgtaaggctgtgtttgaagatgtgagtttttaatctcttcctagtcagtcagctttcctgtatttctaaacttgagacagcttctcctctgcagcacgtagctggagttggctgatgtgtaggttctttctgtctcacatgacaatttgcagtccctgctacccgctgcatcagcctctctctcactccttcctgcccttccctgccacccatctgtccagtgtggcatgaactggtgactgcagccaggctgcccatctgtgtgagacccagattctgccctctggccctcacattcaattctgcaggcttgggaaaagcaaaagggagtgagctgagtgctctgggtagcattctcagt

SEQ ID NO: 61695 - DNA, 1123 bp, Homo sapiens
tcctcagagccttcactcgggaccacatggggttccaaggtggtgaatgtgaccaccaaaccctcctccagttttaaacaacagagctgctggtcaccaggttaggaagtgctgtgtaaaagactgtgtggatgtatgtggataatgatcagttttattattttatttatttttattgagatctagtcttgctctgttgcccaggctggagtacagtggtgcagtctcggctcactgcaacctccgcctcctgggttcaagtgattgttgtgcttcagcttcctgagtagctgggattacaggtgtgcgccagcacacccggctaatttttgtatttttagtagagaaggggtcttgccttattggccaggctggtctcaaactcttgacctcaagcgatccacctgcctcagcctcccaaagtgctgggattacagacgtgagccaccatgcccagcagtgatcacttctaaaaaacacacacacagggacagggcaagaggagaggagagactttacttactccctgagtttgcccacaggttgctcttcatggagcctgctgctgcagctggcactgtgcttgtgttctcctgagccttctgcctcctggtccctgtgcctgctctgcagtcactccttgttctgcatatgcgtacagatccctccaggccaagcctctcatggacccttcctcccaagcctgcagtcatcttgtgctctgccctccccatcatctccatactcatcctcttgccctgctctttctggagactctcatcccacttccctcctgggcctgcccaagtggtcttttcaccctgtcatccagccacagtgtctactgaagcccgccgctcctggaattgccaggcagctcttgcgtgctctcttgctgttcatgtgttgctctgttgtgactctagttaaagtgtgtgctttttaatggcaggaactctgtgttctattctttattatgtttctgagattccagcacagtgacttataccagggagacgccaggaagatcttgctgggttttagactgtgtctccctgcaaggactttattcatttggtgcaaggggaggtttactgcatgtatcaactaggatattggtttg

SEQ ID NO: 61696 - DNA, 1125 bp, Homo sapiens
ctcacacgtttaatcccagcactttgggaggctgaggtgggtggatcacctgaggtcaggagttcaagaccagcctggccaacatggtgaaaccctgtctctattaaaaatacaaaaattagccaggtgtggtggcatgcacctgtaatcccagctacttgggaggctgaggcaggagaatcccttgaacccaggaggcggaggtgcagtgagccaagatcacgccaccgtactccagcctgggtgacagagcaagatcctgtctcaaaaaataattaaaaagaaaaggcatgttttagctgggtgcattgctggcctcagtaagaggttcagttactgaggaagaatggagggatagctattgggtaggcaagaagcaatctctgctgagtgccttgcttgccatttgtttttaggttcttacaggctgcttggtagtgaccaagagctgtcggtttctgcagaacttcggcatttctggcctcagtcctgtgttcatgaacaagtcttgtataatccttatggagcaagatgctagtccagggctggagttgagtgataggagatgtcagacatcccctggtagacagcccttgtggaaaggatgcatttgtcctttaaagcaagaggcccttaggaacgtggctcccagggccctggtgtgtgtctactgtctactgtcctagaatgtgccctccctggcaatcaggtgtgggggtggcagtgagcagcagagtgtagggcagctggctgcctccctccctctcttcgctttttacaatgaagaccttaggcctagggagttcagtggatcacactgtagttcatggcccactgtcactatcagctgggacaagggttggcaaactattggccatggaccgagtctggactactgcctatttttaaatggtctgtgagctgagcatgggtttttacacttcttaaaatgtaagatgtaaaaaagtctattagccctttgctgataacaattgcttaattttgccgttttgccttcaaagcctaaaatatttactatcttgccccttatagaaaaagtttaggccaggcatggtggcgcatgcctgtaatcccagcactttgggaagccgaggtgggtggatc

SEQ ID NO: 61697 - DNA, 1001 bp, Homo sapiens
ctataccagagtctgtcacattggaacttacctgctgcaaggttttcctcccgggctggcatctcccctgaagccccctgtatctgtttccatcgctgtcccatctcactccctccatgtgttcagcagcttactttcagcttcccttccttgattgtaagtgccttgatggcaaggggcccctcttcacaagttagcagttgctggtctatagaagcttcttcgtagacatttgctgaatacattgctgtgctctggacagtgaggccaactttacctttccttaggaagtactaagttaggaaaatgagtgtgatccacatgggagggaggccatcctgatctttaaggcatgagattgatagccgggcctgggagcaggggcactgatttacggttttgactgcccccgctaactggctttggacctggggtcttgccttcatctccagtgcaccttagcatcctgtcccgaacgccgagccagtagaactagaggccacctctcagctccctgtggttctgagaccccaagaagcaggcagaaagcggttagggcattggccactgctttgtctttttgtgcctcctctttgtgcacagttgaggaactttgtttttttcctgaaaggattgcgggagatgccaacaagaagaccctggagccacgcgttgtcttcatcaaaaagtcccagctggagcttggggtgcacttgtgtggtgggaacctgcatggggtgtttgtggccgaggtggaggatgacagtcctgccaagggtcctgacggcctcgtgccaggggacctcatcctggaggtgagttctgagctgctgagcaggccaggcctccatctacctgcacagtgggcttgctgccatctcaggtggcaccaaagacggaggagtacagcctctcatctggtgagccagtcagggctgacttttgttgttgttgttgaggcagagtcttgctctgtcgcccaggctggagtgcactggcac

SEQ ID NO: 61698 - DNA, 1496 bp, Homo sapiens
agacattatgcaggtaatttccttctttttgagacagagtctcattgtgtcgcccagactggagtgcagtggcgtgatcttagttcactgcaacctccacctccgggttcaagcgattctcctgcctcagcctcccaagtagctgggactacaggtgcatgccaccgtgcctggcttatttttgtaatttttgtatagatggggtttcaccatatcggtcaggctggtctcgaactcctgacctcgtgacccgcctgcctcagcctaccaaagcgctgggattacaggcatgagccactgtgcccggcccagataatttcagaaagtgttcaaagttaagaaaactttgactcttctttgagttcagagtgaccagagccatgagaaaacttatccattagggagaagcatatgtgttcatgtgtgtgtgcatctctgtctatctgtctcttttttaaggggcaggtggcccattcctgaccattgctttacctctggggatggttttcagtggcagctccaagtcctgccatctcactctctctctcactcctctgcaatccctgcctaggtattccctcagagctcctcgtggagtggccagaacatttttgaaaatatcaaagactctgataagatgctgagttttcgagcccatggcccggaggtccaggctcataacaaacggaacttgatacagcacaataactccacgcagacagacatcttctacacggacaggctggaagacaggaaggagccaggccccccaggaggcagcagctcctttctgcataagccattccctgggggacccttgcaggtctgcccccaggcctgtcccagtgcctctgagcgtagcctgagctccttccgctcagatgcctctggggaccgtggctttgggctggtggacgtgcgtggccggcggccactgctgccctttgagaccgaggtgggcccctgtggggttggggaggcctccctggacaaggcagactctgaaggctccaacagcggcgggacctggcccaaggccatgctcagctccacggcagtgcctgagaagctctctgtttataaaaagccaaagcaaagaaagtccatctttgaccctaacactttcaaacgcccccagacaccccccaaaatagactacctgcttccaggtcctgggcctgctcactctccccagccctccaagagggcggggcctctgacacccccaaaacctcccagaaggagcgactccattaagttccagcacaggctggagactagctccgagtcagaagccactctggtgggcagctccccatccactagtcccccgagcgccctgccccctgacgtggaccccggggagcccatgcacgcatcaccccctcgcaaggccagggtccgcattgcttccagctactaccctgaaggagatggggactcctcccacctgccggccaagaaatcctgtgatgaggacctcacctcccagaagg

SEQ ID NO: 61699 - DNA, 1033 bp, Homo sapiens
atgtggtagtgctggagcacaggcctgccaggcaggtggggggtgcttcatgcagaggagagccaccccctggctccccaagttggcattagaacagtgagtgtgtgcagagggtggtccttaaccccaggcacattgagggtgaaacagggcattgggaacctgacacttgttgccgggtgactgtgggggtgtctcttccctgcccaggtcctccacattccctctgtcatgcactggggctggcctaggtggtcttacccctagattcccaagtgttcctgtgcatctggggatgggataggtgccggcaggtatttggagtgaggtggccagaccatccgctgcagaccaggaacccccttccccatgcctcttgagatgaccttgtcctctgctccttccaccaggacactgtgtgacaacctgaggcgggagcgggaccgtgcggtgagcgagctggctgaggccctgcgcagcctggatgacacccgcaagcagaagaatgatgtcagccgcgagctgaaggagctcaagtaggctcgggtgggcacccgctggagtgggcatgcatctgggagcctggggcccctctcccttctgggcaaggcaatgctgagtgcattggccagggcctcatccttctgcgtcgagctggctgtttgtcccttcacttcactctgccttactctgtcagtgtgtagaatgggttcgaatgtcatctccatgtagggttaattagaaattcttaggccaaaaattcttagacacagggcaggcaccatgtgccaaggcactaggaagggaggaccctgttcccaagcagtccatctggggcaggcatgcatgtgttatccattcattcattcccctactcactcactcactcactcactcactcactcgcagagattttttaagtacctgctctgtatgggccagcctccattagaggcactggagaaatggcactgacaagcataccaagtccctttcctcatgggctcacagtgcgcaggaagagacacagacc

SEQ ID NO: 61700 - DNA, 1059 bp, Homo sapiens
aaccagaggttaggagttgcagggaggcggagtagctcccggtgagcacgaccctatcccaaggagctttcacttgtggagcaggccgagggtggccgtcatcgtggtggaagcaagcagtacggggcctgatctctctctctcggtcttctgacccgaggatcctaccatgttatgaaggctggggggagcagctgaaaggacctcgaggtctgtgacccaccctgtcgcactgggaattcgtggcccactctcacggcccttgctggcagcctgattcacacggccctgaatcatccctggattgtcacacaggcccggatccaggcccctcaaggttagccattcaggggactgcaaagaggccaaaccatggtatagactcctgattctgccgagcacttgtggaggtgggctctgcgggctaccacccagaaccgggctttgtgtcatttcaaggctgcctttggaatgagtttgtttctgagctgggaaggcgggaagccgctgcaggagagcgttggctcgtctccccgcggctgccaccttgtggggaactcaggcaatgacagcctcctttgttccccagcaaagcagactcatttggagccaatggggttctcacttggcttaggggatgtttagacagtaaaacatttgaggtaatttttttttttgagacagaatatttctctgtcgccaaggctggggtgcagtggcacagtcttggctcactgcaacctacgcctcctgggttcaagtaattctcctgcctcagcctccggagtagcagggattccaggtgcctgccaccacacccggctaatttttgtatttttagtagagacagggtttcaccatgttagccaggctggtctggaacttccaatcttgtgatctgctcacctcggcctcccaaagtgctgggattacaggcgtgagccactgcgcccggcctgaagtaatttttaattggcatttttgaggtattgctcaccaatcagggcaatccagtttagatgctggacctttccagatgtgggtagaaggcgttggttg

SEQ ID NO: 61701 - DNA, 1156 bp, Homo sapiens
gtagagagagggtttcaccatgttgtccaggatggtctcgatctcctgacctcatgatccacccaccttggcctcccaaagtgctgggattacaggtgtgagtcatcacacccagccaattcctgttattcttaatttgtttacttggtcaatcccccatgtgtagctgcctcccatgccctctgcagtcccccatcctgttcccatctcctcctgaccctttgtgggctcttccaccccatgccttctctctgtcaggcctggtctcctcatgccatgccaggacccactcctctttccatgccagctgtgatatcccctctggggcgacctgccctagtgtaggtccttgtcttgctctgctttgcctaatggctttaaggtttaattgtttagataaaaggagtattccatattccaatgaaactgtattccattgaaaaacttgcttctgttgaaaaagttgctgtttattttcctttctccgatattgattgaggttttatgtggagtaaccagggcaggctcagcaagagaccctaagatggatatacttggagctattagaagtattttttatgtgccctctgattaggggaattggtcgtgtgaggtcaggcccagtggctggggcaaaagttggtatttagcccataggtcttgactgagccttggtaatggaaagccggcagcaggaagactgtcccttctcgcacctgctgcatggcacagagaagctgtgacaacatgcttcccaccctttatagattcaggaggtgggggtggtgctcttggagcatttctctaaggatgaaatgagagagtagaaagtgccgtgctagctctggtcagtactgcccacaacccattccccctgcagggacccttccttgtgcatgtcagtggagcttcctggagcaaacagatttaaagactgtaggttttcagtttctaaagaggcaaaaatatttttaacctcaaaagaaatcctgtggaggaatcttgcgtgtgaagcaggtaaggatggcggtgctgtgtcaaaacaaagctcccaggaagctgcccgaggggatggccctctaagggtttgagccccttctctgccctggggtgcgtggtaacttcccccacctgagggcaggcggcctctcccggc

SEQ ID NO: 61702 - DNA, 1050 bp, Homo sapiens
actgcagcttcttcctgtagggtaggcccaaggggtgtttccctttggtctcccagcatccctctgagggtctttgcctgcccacctgctgatatctgtccaggccccagtatttggaggcactaggtctgtaccagaggggcctgtctcccttccctggagatacatgtgccctttttggtgtcaggtttgtaagtggtgatttggatgtttctggaattgggctgttagcaggttttggcttgcctctgagtgctacagacctacctgccattggctcctgtccgctgtatctacgggaagtgttgggacctgaggctggtgatgccctggggtggggcggggtgtgaggggctggctggggctcactgagcatgtaccgggtgtttcagcacactccacagccggctcctgagtgaccagactcggctgaaggatgacgtggacatgctgaggcgggagaatgggcagctgctgcgggagcgaaacctgctgcagcagtcatgggaggacatgaagcggctccacgaggaggaccagaaggagatcggtgacctccgtgcccagcagcagcaggtaggcccagcccctggagactggccatttctcccaagtagtcctcattccttttaatggagaatagtattgagaagtaaatgctgggccgggcacgttggctcacatctgtgatcccagcgctttggaagaccaaggtgagagattgcttgagatgagcctgggcaacatggcaagatcccatctctacaaaaaaaaaaaaaaaattagctggacatggtggcacacctgtagtcctagctactcaggaggttgaggcaggaggatcattggagcccaggaatctgaggttatagtgagctatgatcatgccactgcaccccagcttgggcgaaggagtgagacgctgtctctgataaaaaaaacacagccaaccaattgctggatgtgcttgtagcttgggttggcactgtttcccggccctcttagtggaaagaagtagggagtagctaagtgtacacatacacacaggca

SEQ ID NO: 61703 - DNA, 1068 bp, Homo sapiens
gctactccctacttctttccactaagagggccgggaaacagtgccaacccaagctacaagcacatccagcaattggttggctgtgttttttttatcagagacagcgtctcactccttcgcccaagctggggtgcagtggcatgatcatagctcactataacctcagattcctgggctccaatgatcctcctgcctcaacctcctgagtagctaggactacaggtgtgccaccatgtccagctaattttttttttttttttgtagagatgggatcttgccatgttgcccaggctcatctcaagcaatctctcaccttggtcttccaaagcgctgggatcacagatgtgagccaacgtgcccggcccagcatttacttctcaatactattctccattaaaaggaatgaggactacttgggagaaatggccagtctccaggggctgggcctacctgctgctgctgggcacggaggtcaccgatctccttctggtcctcctcgtggagccgcttcatgtcctcccatgactgctgcagcaggtttcgctcccgcagcagctgcccattctcccgcctcagcatgtccacgtcatccttcagccgagtctggtcactcaggagccggctgtggagtgtgctgaaacacccggtacatgctcagtgagccccagccagcccctcacaccccgccccaccccagggcatcaccagcctcaggtcccaacacttcccgtagatacagcggacaggagccaatggcaggtaggtctgtagcactcagaggcaagccaaaacctgctaacagcccaattccagaaacatccaaatcaccacttacaaacctgacaccaaaaagggcacatgtatctccagggaagggagacaggcccctctggtacagacctagtgcctccaaatactggggcctggacagatatcagcaggtgggcaggcaaagaccctcagagggatgctgggagaccaaagggaaacaccccttgggcctaccctacaggaagaagctgcagtagggcccctggacagagacccagaggcctgcctgagccctgc

SEQ ID NO: 61704 - DNA, 1065 bp, Homo sapiens
agaaacctgtgatgaaatgtctcttctctgtaggctcggcgtgacagctcgtgcctgtaatcccagcactttgggaggctgaggcaggtggatcacttgaagccaggggtttgagaccagcctgagcaacatggtgaaaccccgcctccacaaaaaaaaatacaaaaattagcctggtgtggtggcatgtgcctgtagtcccagctactcaggaggctaacgtgggaggatcacttgagcccaggaggtcgaggatgcagtgagccgagatcacaccactgcactccagcctgggcaacagagaggatcctgtctcaaaaataattactaaataaataaataaataaataaaagtaaaatattaaagaaaagaaatttctcctctctttagaacaatgactctcaatcttgggtacacattaaaataccaatgcccaggtcaattacattagcatatctgaggataaaacccaaacgtgaggattttttaaaaactccccagggtattccaatgtgcaaccaaggttaagaacactggccatgagcagtgatctcagagtggggttcccagacctgcagcacagtatcacctgggaacttgtcacaaatagacattctcaggcctagccccagccccagccctcctgagtcaggtgttctgaagggagggaaagagaggcaatgatctgtgcattaacaagctctgtggatgattctggtgcatgctcaagtttgaggaccctttttctagagcagaggtcagcaaactttttttgcaaaaggccacacagtaaatactttaggctttgcacactacatagtttctgttgcaaccactcgactccacctttgtagcaggaaagcagtcatagacactttgtaaccaatgagcatggctgtgttccaataaaacttcatttataaaacaggcagtgggcccgtgggccatagtgtgccaactctcatgtgctagcacatccacgtcttcactcatcctgccttcgggccaactgactgaggggcatatcctcatgaatacaagctcagggatcaggctctgcagct

SEQ ID NO: 61705 - DNA, 1057 bp, Homo sapiens
gaaaatgcagattcaactcttactcttcacactttcactaagcatttgccttgctcagggggcagggagagtagagcagccatagtggtgcaggctggagggtcccagtccattgagatgagactgcctgcagagctccctgcaaatggccagagggtcaggagctgcaggaggctggaatctttgggggctggcacactttgattccatttgctgtactccagggtcgtggatgtggattttggtttttttctctttgcacaagatagtgaatgaaatattttccctcgttactcaagatcaacttttctgagcattgcccacgtgtgaaagataatctacatccctttatgcatttgaaatccttctgtgatctcctcttccattttctgtggttgacttggggcaatttgaaggcattgtgtgtccagattttgcttggagtgttttagggggagctcctctttctgcatttaaacaaagagtagcatgggcctgttttctgagcgtaggcatctaagaatgggctcatgctctagctgagggcccatgtgagcacttgaatgtactgagatgacaggtgtggaatgggtcatgatgaaagcttgctatagggttttagggcgaagaatgcttgtgctgttttatctttatttgtggggggataggaggtgacagcctgagtgtatagtacccaaagtctcatttaaaagctcactcctgctctgggtgtgacaaaggtgagcgttggatacctcagtggatgtctgcaggtaagtgtgtgcagcgtcctttctgtaaaacattggaaagagtcccagcagtttcaggaatggacttctgaagtccgccatttccaaaatgcacaccgagtactgtgaaaatgagggtgaaccctcctggacggtgttactttatcggagaggaagcatgtttggaacatctgagggcccgtcttggattggaggatcatctgctttgggcagggctgcccagagcgcctctgatagccaaactctcagactttctgtttctcggggcctcaaaagaagtcgat

SEQ ID NO: 61706 - DNA, 1039 bp, Homo sapiens
aatctgcctctaagtttccccttttcctcatcaccaccttttgggcatgttgtattttttttcttcttgcaactcttggttcttccctgccttccacatttgttgtggctttgtgctgagtacagtggttcaggtatggtcagagcagctggggtagatggaactgacttcagtatatctcagtggatgctcttggctttgggatcttctgcacttttgggatgctcaccatctctggctcccacctacagtgcccctccctatcattgtgtccaccgtaccatgtctccacacatttccaaatacttcctaggatggttgtcaaccactggctcaattctcagattactcctgggataggttctagcctcctccttgtaacaccttttcttttcttgccctccaatgtcagagggtgcagtgcttagcataaagatacggaggcagatgaagtagcctgtgaccctgcctaaccccttcttgggtctggaacctgcattctgtccattctcccagcctagcaggtgacctgctggagctcagtaactcgacaccgccttgctaattgtctgctgaggtcacagtgagctcttgtcaccgcccatccagcaggaccacagtccccgactgggttgactggttcagccactgttctggacactcatgggaaacaagtggcctttgtcatgagctggtggacagagtgcgctgtcagcacgggtgagggctggatacccagagtttttggggaaggctgcacccagggcagccagctcagagctgggaggcccagaacagacctcattttctctgataatggggagcacagagttgcagagacttttttttttttttttccctagtgacttgtgtcaacagacttcattggttctgcttggcagaggcctgggaggttacctgtgggcttgtgaggcctgggagtttacctgtgggcttgtgaggcctgggaggttacctgtgggcttgtgaagcctgggaggttacctgtgggcttgtgaggcctgggaggttacctgtg

SEQ ID NO: 61707 - DNA, 1020 bp, Homo sapiens
taatcccagcactctgggagcctgagtcaggtggatcacctgaggtcgggagttcaaggccaacctggccaacatagtgaaaccccatgtctactgaaaaatataaaaattagctgggcatggtggtacgtgcctgtacttccagctgctcgggaggctgagataggagagtcgcttgaactggggaggtggatggtggagtgagccaagattgtgccactgcactccagcctgggcaacagagtgagactccatctcaggaaaaaaaaaaaaaaaaaaaaaagtggagcgcagcactgttgctgcccatcctgaacagtcgacctccttgggaggagcctcagccagtgggagaaggtgggattgatggcattttgtaggccagtgcatgacatttgtgttccagaagtccctgacgattcaagaaagtgaggcctcacagtggagacttatcaatgagcagttgtttccatttcacaccagtgatgcttacggtacaagtgcttttcctgccattcccttagcaggtacggttcagtcaggtttggtaagaatccatactggaacacaaccttgagctcgatcctgtttcacctcttagactggtgggaactagaaagctggatgctgcctatcagcagtgggtgtggggatgcaggaactcttgcctttgcagttgcagctgtcctggagcctctggcagggtaccagcaaagccctgacccagaagcccctcccatgggtgtcagttccccaggttctcatgcaggtcctaaggggaaggtccagggtgttcactgcagtgttgtttgtggtggtgaggtagagctggatgtccattcctgcagagcaaatgggtataatgggtgggtatgagtctgtagtcccttgcagcaattccaagtgactggtgagaagcacacgtggcaggcagcatgatgtatttaaatgcacagtgctcagtgaaaacataagaaatagagcatggatggtgcagtgctattatgtagattgctgata

SEQ ID NO: 61708 - DNA, 1019 bp, Homo sapiens
aagaccctgtctcaatcaatcaatcaatcaataaaacactttaattcttaaaaaaaatatatagtggccttttcagtattcatggtaacctctattctcattccaagtaacctttcttctcatctgaccagaacttcttttcctgtttatgttttttttttttttttttttttccttcagacagaatctcgctctgtcacacaggctgcactccagactagagtgcagtggtgcagtctcagctcactgcaacctctgacttccaggttcaagagattcttgtgtctcagcctccccagtagctgggattacaggcgtgtgccatcacacccaggtaatttttggtatttttagtagagacggcgttttatcatgttggtcgggctgatctcaaactctgacttcaggtgatccacctgccttggccccccaaagtgctgggattacagatgtgaaccacgacgcccggcctacatttcttaaggagcctatgattgttgaatgccatggctggaagggatcttagaaaccactttgcccaaactccttattttacaaatgagaaacaggtctcttcccaggctggggttccttccaagacttctttaccaggagcaggctgggtgggaagtctcagatccgtggctagtttttcctgacattctcctggctttgtgggcaccagcctttacagtgagggtgagcaagtgacacagcatcccagtttctggacttgagctacagcctttaattcctgatcaatgaaaaaaatcttttatcagcctctgcaattgatatttatcttttacagatgggcacactcggccagtagagtttggtagcctgctcagggccatcagctgctgagaggctaggcaagccctggagtccttgtcagttttttgataatgactacctttactcggtactgcaggccaccctgtgaccatttctgtggtctgagccttgcctacctctccacctctcttcgtcacagcattcgtccattcattcagcag

SEQ ID NO: 61709 - DNA, 1433 bp, Homo sapiens
ttcactgtgctatttgacaatccatggtaggaaaaatggaagagcattttgttaccctgagtaatatagcacaacagtggcagtagtagacagcaactagccttagaaccagaaaactgggaatctcctggtgtttctgagggttctgtgggagctccttgtatactatgccaagcaggtgtcagagctgtcctccctgagctgaatttgctgttatagtcctcatgcccagaatagagcctagtacaagataggtgttcgataattttttgttgaacgaatgaatagtcagctgtgtgtagagtgaatgatgtatccttgtccagatcatcttcaaatatacatgcagattcctaagtggtgacctcatggtggcagaggctgtgggagaggaggaaggcttgagcaagccccagatgtacacagggatatcaccgcccacggtatgtctgtgatggaagcaggtggtgtgacattgatgtctgaagttcccaaggttgcccatcaggtactggtggtgtggagctggctgccaggagccatgtggagcacccacgctgtctaagagtagaaagtcattccctttctacacatagaatttgaatgtcaacttgatgtcctcaaaagaatactgaggaacttttctttaaaaaaaaaaaaaaaaaaaaaaaaaaaagccctgaactggagatctgttcctaactgcaaaatcttgaccttggcagagccttttagcttcctggtgcttgttttttttttttcccccagttcaacagtcaaaacagaagaggttgagcattgacgggagacttgctcattcctgtggggttttgagcacttcccaggtggcatttggtccaaggaggttgggtgattgggttggactcgattttgggggcccttccagctctacatcaggattgctgttaatctgatttaatgttagtgttgagtggtttttgatactctggttttccatttcctgaaaaagtaagcagagtaggataaatattttgtttcagttttttttttgtttgtttgttttgagatggagccttgctctgtcgcccaggctggagtgcagtggtgcaatctcagcttactgcaccctctgcctcccaggttcaagtgattctcttgtctcagccttccgagtggctgggattacaggtgtgtgccatcacccccggctaatttttatatttttagtagagacgggattttgccatcttggccaggctggtctcgaattcctgacctcaggtgatccgcctacctcagcctcccagagtgctgtgattataggcatgagccaccactctcggccgttgtctcatttttttttgtcccacctcattccaaccacctgtatgttctgccccatgcgagggggctctatagtcgtttcctgaaaccctgggaagatgtgagcc

SEQ ID NO: 61710 - DNA, 2952 bp, Homo sapiens
cgtcgggccgccgcagcccgccgaaggcgcgggtgagtggcagacccttggcccccgcctctgggacgcgccctccgcttctccctcctgctggccgagggtacctcgccggggccgccgctccacctggcgatggcctcggtggactcgctcctctggcccagttggggaggcggcggtgcgcggatcccgaagtcccgccgcctcccccagtcccgccgttcgctgtgaacaatgccccccgctgaaggccttcactctcaggtgcctcgacgacagggtccccgggggccaccaggtccagtagcgggtagggggtacctcggaggatgtccatcagtcccttttctgaggctcctcaccgtccgctagctttggcaccctgtgctagcctttaaccaagggtaccgtccagaagaatgggacttgggccaggacccctactcttaagttttggtcgctgccatcctgtgccggggccacaactgctttttcattttctggctgtcccagctcctttttctctgctcagagcccagtctctcccagactggtggctgattgtgcacaacgcctgcctgggtttctttggaaactgggcccggaaaagttggggaagttgcattgcaccatgggaaaatcctagtagtggctgctggggctaagttctctccctgagagcacagagctgcttaacgaggaaggctggtgactggttcccttgagggtgccttttggaacccctgtgtctttggtcttggggatgactgatttgtaagtgtgtgtctgggtgcaggaacggatactggcgggagtttctgacaagtggtaggcttgtcctggcctggccgtggagtgtggaagccagcctttttagacaaggcagctggaggaagaagacatggcactgagggaggaggagaactagcatttattgggcatctactgttgtggcaggcgctctgctttatcacgttcagttgtcgttgccactatgtgagctttctgttattctttgccagagagaaaactctggcttggagtggttaaaatgctcagaaagtattgggcaccaggaattttgaattataacctattgtttgatttaacttgttcagagccaggaaacaaagtgccatctttctaggtcttgtccctgttttaacagtgaatcgataggtacagtaaaaataaataaggatatatgtataaaagaaaaacaagtgaaccgagagggctgagaaactgcccttagcaacctgaaggtcaaaggctgatgggacccatttatttggctgttaaaagccccacttattaagggaatgattttataaggcattcctggtaacagctctcttacgttggccatcttaacctcaatttttgtagctgcaggaaactgacagagagactaaattgctggccacacagcaggtcatttcattggtggccctcccgtctccactttgagcttctgacttgcatctctgtccctcaaacctgcattctttccccccagttgtggtcatgtcagagttactgggcaaacctagtcctttcctgggatagtgctttgggagatgctaggaagggactgtcagatgtggccatgaggataaggacagaggggatctcaacaaagtaatttttttctttttaattgtatctatgtatctatctaatctatctctgaatgaagaagttaagatctgtttctgaaagtctttcgtaaagcacagaacttagtacagactggaagtctgcgttgggaagcatgtgaatcaacgctcgccttaatctctgaaaattgattgatggatcaattgccattaattaggtctcaccctttccgtgtctggtggagaatgtggggcctcatggggctgaagttctaggagctagtcttgacctctaaggaaggcagagattagggtttggattttatcccctagggcattgatttcagaccccagttttaccacaatgcagagttatgtgactttggagagggtcatgaaatccttagaaaaatacttttcaaggagaagttaagttcattttacttaatgcattagaaaaacgctggttgggtgtggtggctcatgcctgtaatcccagcactttgggaggccgaggcgggcagatctcttaaggccaggagttcgagaccagcctggccaacatggtgaaaccccgtctctaataaaaatacaaaaattaactgggcgtggttgtgggcgcctgtagtcccagctacttgggaggctgaggcaggagaatcacttgaatctgggaagtggaggttacagtgagttgacatggtgcccttggattccagcctaggtgacagagcaagactccttctcaaaaaaaaagaaagaaaaaagttaggacagcatttggtatggcaagatgccacctgaagcccctggggaagagggtgacatggtgtgtcagcaaacagtggcgtgttgggggcttttgtttttttgagacagggtctcactgtgtcacccaggctggagtgcagtggcacaatctcggctcactgcagcctccgcctcctggtctcaagccatcctcctgcctcagccccgcaagtagctgggaccacaggcacatgccaccacaccagctaatttttgtatattgtgtagagatggcatttctccatgttgtctaggatggtctcgaactcctgagctcaagcgatctgcttgcctcagcctcccaaaagtgttgggattacaggcgtgagccactgccccggcgcaggggaggctcctttgtgaagggtaaattgctgtgttgtaggtctccacttttttgcttttttttcttttagccaggaagtattccttatggtcaaagctcagtgcataagagagcggctctggctgaaggaatggaagtcttcttccttgaggagccatagtcaggaaaacccagcac

SEQ ID NO: 61711 - DNA, 1042 bp, Homo sapiens
ctcctgggctgtgagcaagccctgcccttccctgaaagtgcagaatccccctgtctgcactccacagccaccctttttagatgggaaggaaagggatttgccaaagttcagttgatgtggagtggcgctgggactcacatcctaattttctgacacttaagccaatagtctttcttcgtgaaaatgtaccttgtgtttagaggctctctgatgttcattctggttggtttcaggggtgtctgagtgcatcatcatgggaatcccaatgaacattggaaccgggctcttcaagctgcttcacaaggctgacagggacccgaaccctcccaagaggcccctgatcttcgacacaaatgaattccacatcccccttgtcacatagtccaaagaaagaggggaccatgcctgaccttgactccttgtcctgtctccagctgatgtataaagagttttgtgctccctgggacgggggtcctgaggtccccacctatgccagcaatcagagaagccctcttggcatccccaggagcagcttctcctctgatagggtgcagctcacaccagtgaccctgactgtgccacgctgctcgggagagctgagggttttattgtttgcttgcttgaaacctaatctatagacggccccacagctcgtgcacacactgcttccctggacttaaagcccagccaggtgtcatggtccatcccagctcactgcatacatccatcggctccccatggtgtcttcacacctgacgatgagccaggcctgagccccacacaggccagggcacattcttggattttccattccttggtcatgctggaatctctcaatgtgacatacttatgtaaatattgttactattatttatttgttccatttgagggatttggaatttttgttattttagttttatttttgaaaccaagcatctatagaaaccaagaaagtcagcatgtaagcgtcactggaaaaactggtttaagcaaatagagccgtctgggatttgtaactgaggtgcaactgtcatgaggccca

SEQ ID NO: 61712 - DNA, 1034 bp, Homo sapiens
agattttctgcatccattacatgctgaccacaagcagccatgcagaattgagttgcactgctgccccctctctgacctttactttcccctgtctgtacctatttctggtctatgccaggctttttctctgtcacagacataccctttccgaccctaatagcatctatattctctgttgaaaggtgataaccagaagcctctccccagcagttttgctggacttttctttggcatgctgcaatctcatccatacctttgccttctagggcacagatggagccaggttctgcagtgggtgctctgtgtgcccagagcattggtgagccaggcacccagatgaccctgaagactttccactttgcaggtgtggcctccatgaacatcaccctgggcgtgccccggattaaagagatcatcaacgcttccaaggccatcaggtgcctgctttcatttccttcttgttccacacatgcctgtcctgtttcctgagaaacaatgatccccgtgtcacatgcatatgtgtgatatcctcataggactgtgtcttaaactctgggtggcatgcttgctgtgttaatcctattttggtttttaaaaaagccactcaagaaaaagtctaaactggatacagtcaaaatagaagcaatggttttgttatggccacaagtaacatgaagagagaaaatgtttaaaatgactggaaaaattggagcaatgtgtcagtggagatttcatccttttgatgtcattattccagcctaactaggcctgactgaaatgtctgccacttgccctgtggtcatattctgtgagcccctggtgatttcatgatgggatttctagttgatctaaggctagaagaaatagaaatgtattacaatgccttcgatgacaaaaataatgatttttacctatgacctatatttaacaaaatgataatacgtagcattgaatgaaagatagtcggctgggcgcaatggctcacgcctgtaatcccagcactttgggaggctgaggcgggcagatcacgaggt

SEQ ID NO: 61713 - DNA, 1071 bp, Homo sapiens
tttattttaaactgctctttcttttgctgtattgtggatcaaaaatccattgaatcagccttttctattcttccagggagctgttactttgataccctcttaaggttttttggttcgtttgttttttgttttttttttatggttctgacctgctcaggcagctccttcatgtttataatcatggttaggatcaaaagcaaagggatacagaaatcagtaaatggtttcctttgtgtactaaatagtaattcaaatgtagcacaagatcagcaggccaaagaagaatgtatctctttccgtagatcaaaaataaaaacagcgagtgaagcttaaataagaatatttgtgttaaggaagctcctcgcttcttgtgttcatgtgtcaaggtgtgaaaggtgaaaaagagactcttccagattttaaaatcaagagtgtggcaaggctgggtgcctttgtctgtttttctcctccaaaggctttcttattctttttttttaactaacaaattagagttgtaatttggtttttcttcacgctcatgtttacgtatttatctgtttgtcctcaaagaccttaactgagacaggttatgaaagctataacgaggtaacgtacttagcatgctgtgaacgccaacagaaagggcccactccagcagcaccccagcatttgccagcgccagagagagcaggtttctgtcccggttctggcaaacactgctttgctttggactggttcctttcttgcccttgaaaaggtttaacacaggtgacctcctacccggcagcatttgtttattcagtgagcactggtttagccctcaccatatgtcacacagtccacagatcctggggatgcaaggatgactaaacatgtccttgccaccggcagctcacaatccgatgagctcagatttgctgagagggtccaaaatccactggccagaacagatgtgtctgagcccgtgaaatgttctccagccctagcccgtatcagagctgaggtgacagaggcactcctgagtggcattgagcccaggtccctgccagaggagaatgcccgtgctcatag

SEQ ID NO: 61714 - DNA, 1073 bp, Homo sapiens
agtgagctgtgattatgccattgtacaccaacctcagcaacagagtgagatcctgtctccaacaaaaacaaaaaaaagataaactgtttgccttatacaccaattttagaaccttgtagaagatgtacatgttcatatagccagggcattttgctcctctaaggttctgaaacatttactgatcggaaatcgggcatcttgcctcagtattttcaaatttctttaaatgttagattgaacatttgtaatccacagagacaatgaggacaacccaccaaggatctccttttctcccactaggcactgatcctgaaggagctgtctgtgatccgtgaccacgctggcagtgcctgcctccgggagctggacaagagcaacagccccctcaccatggctctgtgcggctccaaaggtctgcatgcccctctctcacctgctggcagtgtgttctccgtacaggctgtttggctccagaaaatgtgatagtcacagctccaaacagacatttcatttatttaagggatctttttaaatcagagagagagacttaattatttgcattttgggaagtttaactgctttgaaggaacttgttggtaatgtgtctggattctgagtttgagggtgctttgagcaacgtggtctttaaaaaaaaatgaggccagatgcagtggctcatgcctgtaatcccagcactttgggaggctgaggccgaggccgattgattgcttgagcccaggagtttgagatcagcctgggcaatatgccaaaaccccatctctacaaaaaatacaaaaaaaaaaaaattagctgggcgtggtggcttgtgcctgtcgtcccagctaatcaggaggctgaggtgggaggatcacttgagcccagcaggtcaggcaggttgaagcagaagaaagccagggattttttaatgtacttaatgatgtggcataattcttctattttgtagataccgaggccctcaaagcatttggttttatgataatgcattcaaattcaaaacctctgtgcttctatttctgtacactttttttttaaacaggataaagtccagtctc

SEQ ID NO: 61715 - DNA, 1015 bp, Homo sapiens
tcatttggttgttgtataggctgtacatgatggtacctttgttaatatttaatatcttatatgagtaacaaattatttatagtttatagagcacttcactgtatgttatttcatctgatgctcaaaatatcccataacataaagatgacaagtgcttgatactgttacccacagttcacagatgaggagagtgagggtcaactggtatatttcagggttaggactacacactaactggagtttctatatttttcaaaaattcccaagttttcctttaaccccccctccctccccccaaaaaaaagctttgaggagaatttctgtttgttctgctttaagtgtcagtatgggaacatattttctcaactgtctcaaattcattttggaataaggcaaagtaataaataattgttgtctaaatatataatcattcttccagatgttacaatccagaacagtgagttgatgagtggcagcatggacaaaggaaccctagggtcaggatccaagaacaatattttttacattttgctgcgagactggggacagaatgaagctgcagatgccatgtcacggctcgccaggctggctcctgtctacctgtgtaagtatctcagcatccttcttttagttaaagctgcaattgttagagtcttaagggtttacgttattttgttcttttactgccatttcatccccaccacacatatacatacagaaaaagatactcattccaggctaaatcatgtgtgctgttattaattaaattaactcagtactgaatagtttcacaacagatttgaatttgcttttcagttctcttctcaaaaccagcagtagctccctacggtcttctagacagggttagattataaaccatccttgatgggctgcttccaaggtccctgtggaagcactagaacacttggggctatccatgattcagttctccaagattactcaatatttgcctactatgctttcactgttctattttgtttgtttgtttgtttgc

SEQ ID NO: 61716 - DNA, 1024 bp, Homo sapiens
ttataaacacatgggtttttatttagttggtttattttaatcaacttctgctgttaatctttttgatacttgaaaccatgacatccttggccagtgggagccttcacactggcgcctttgttgaaattcactgctttggttcaatctaataaagcttctcgaatgagtctttttttttttttctttttttgagatggagtctcgctctatcacccaggctggggtgcaatggcgcgatcttggctcactgcaacctccacctcctgggttcaagcgattctcctgcctcagcctcccaagttactgggattataggcatgtgttaccacacctggctaatttttgtatttttagtagagatggggtttcaccatgttggccagactgggaatgagtcctaaatgatatatatcacttgacagaacatactggaaatctactttcttaagccagtgcccagtattccaggaagccatttttaatgtttcaaaacagagaagcttttggataaatgcctaagtcctcttcctgttttgttttgttttgtgttccacaggccagggtcaagccccaccggaccttcagatttaatgagtgtgtctgtacaccctataatgctgactttgatggtgatgaaatgaaccttcatcttcctcaaacagaagaagctaaagcagaggcccttgttctgatgggggtatgtagggtggcacagcccagcttttgcataacagctccttgaaaggaggcaaaggaaacttacatgaaaacaccaccacaactaacaacgccaaagaagccaggctctttctgttcttaaaccgaccactaactgcctatatatctctctttttattggtttcttttgagcctttgaagaatctcttagaaattatagtatatacatgagagttagggtctgtaacagatgcgttgaggggattttctggcctataaatgtgggttctgggagaaaatgtatacatgagggccagttatgacaaggtaagaaaagaatatagca

SEQ ID NO: 61717 - DNA, 1687 bp, Homo sapiens
cagcctccagctaccaatattttatggaccttttttatgtcaattgctgtgtttgtctagtatctttttttccccccaatggcttgctgcttttccacatagggatataccgtgattttatttagccaataaactgtcaggctctttccaacttttcactgttaagaacagcttttattaccttcctattctgtcacacggataaaaaataacaaaaaacagcttttgtgaacattcttgtagctaaatctttgtgttcatttctgaagttacaccccttggaataatgagaagtggaatttttggcttgaaaaattggaataaaagacatacacaattttaaggctcttgcagcatagcgtatcatccatagaaatctctgttgtcacttatccttagtgacagataggttagaaaacatagtgaaggaaaaccttgcccaagctatggaaaactaacatagtatctccatttctgcctttcttcgtttccataggaaaacttgaatcccttagtagttctgaatttatttaaacgaatcccagctgaagatgttcctctacttctgatgaacccagaagccggaaagccgtctgatttgattctcacacgacttttggtgcctcctttgtgtatcagaccctccgttgtgagtgatttgaagtctggcaccaatgaagatgatctgacaatgaaactgacagaaatcattttcctaaacgatgttattaaaaaggtcagtgcctcccatttccttgtaagtttcatagtatatctatccaaaaacttctggtcaagaaaatgtgagaaaaatcaaactgaccaggtttgtttctgtttgggctgtgctggttttagcatcggatctcaggagccaagacccagatgatcatggaggactgggatttcctgcagctgcagtgtgccctctacattaacagtgagctctcgggcattcccctcaacatggcacccaagaagtggaccagaggcttcgtccaacgcctgaagggaaaacagggtaggtttcccacaagatgtgcagaagccagcccactctctttggttcctttttcaggagtgtctgtccagcttctctgattggaggtcacaggctttcctcagtctctccgttcttattgttcccatgagcacatggtatgccatggggacctatgacatgtttttggctatttaggtcgatttagaggaaatctctcaggaaagagagtggatttttctggcagaacagtcatctcgcccgaccccaacctccggattgatgaggtagctgtgccagttcatgtggccaaaattctaacttttcctgagaaggtaagtgaccactcagctgctcaattctttgttttaaattcagtcttttacgttatattttggtattgcaaacaacaggcagtagaaagtccccagtaacccactcaacccacagtttggtttatatgagtgtatgtgtcttcccagtttgctttatacatagttggtggtatatattctgtaaaccatttgcagccacagttgtttctagtttcatgtgtatttactcatatatatgctatacttttttgcaactttttttccaattaataacatcttgaccgagcatggtggctaatgcctgtaatcccaatacttagggaggccaaggcaggtggatcatccgagcccg

SEQ ID NO: 61718 - DNA, 1020 bp, Homo sapiens
ttctggagtgattggtcagggatgctggaatgaacttaggaactgtgagtggtgggggatacatctaggggactcttttatactaagtacataatattttcatctcacactacgttaaatcactcaagaattatttattttgtttatttaccttgagaagatggtagatacgtgttcttaaaaaaataacaatagtagtaattcaaacaatacagaatagcacaaagaaaaagataaaggtaacaaagtctgcctactggctgtgagtactgctaatctagtgaacacaggcttcctctctgcatatccatagtatagagccatttgcagatctgtgtatatggtcacgtggttaagggtacaaaacagggcgatggcatttttaaaagaaaataatttttcattctcacttatgcttttatctgtcttgcttaatttgaaaaagatgatctgcaaaacctgctgccacatcatgctgtcccaagaggagaagaagcagtttctggactatctaaagaggcccggcctgacctaccttcagaagcgaggactgaaaaagaaaatctctgacaagtgccggaagaaaaacatctgccatcactgtggcgcttttaatggtgagtggaatgcacagaaggctaagcaatagcccttttcactcactgtcttctgtttagtttattaggtttacataatgttcgggagtcagcttttctccttataaattaggcttaagagcccaacaactgatgtcctattgggaaacggacctctcatctttcattgctatagtagtttcagtaatttcattaaccatactacaatctctggccaatctgagaacataattttttatttcttggtaaataaactaacccttataggtaccgtaaagaagtgtggactgctgaaaataattcatgagaaatacaagaccaacaaaaaagtggtggatcccattgtatcaaatttccttcagtcttttgaaacagccattgaacataataaagaagtggagcc

SEQ ID NO: 61719 - DNA, 1380 bp, Homo sapiens
gattacatgtaggtagtgagtacaaggtttggggcacatttgtgcaagacatgataaacacagttcattgagtgacctttatatgagccacagcagtttttaccccagagaagtgattctcaacccggagtgatttttctcctaagggaacagttggctaagtctggagacatttttgattgtcacaactgggaaaggtgggaagtgcttccggcatctagtggttagagggctgggatttttatagttattctaaaacatacagtccccacaacatatccatatggaattatccatatggaaatatcagtagtgctgaggttgagaaaccctgccccagagatacacataacctagtgaagtaagttgtacagattcatgtgtaaaaccattgtgttttcctggtattttatgtattccttaggtgtatcctgtgagtttggccttgcccagtgggttttatttactttagttcgctacatgactaatggctacaaattggactgcaacattctaggtcttggaaaatcacagcaaggccaagaaaagttggagtagttttattaaccagagtgtttatgttttcagaacgacaccgtaactatccgcactagaaagttcatgaccaaccgactacttcagaggaaacaaatggtaaggaagggcacatcaatctttgcttaattgtcctttactctaaagatgtattttatcatactgaatgctaaacttgatatctccttttaggtcattgatgtccttcaccccgggaaggcgacagtgcctaagacagaaattcgggaaaaactagccaaaatgtacaagaccacaccggatgtcatctttgtatttggattcagaactcattttggtggtggcaagacaactggctttggcatgatttatgattccctggattatgcaaagaaaaatgaacccaaacatagacttgcaagagtaggtgtcttttcatttgttgatcagctcctgaagacctattttttcaatagcgttgtgttgtgagtgtggtaaaaagggcaagaccaagcaatctgggatacaactctgaaaggattaagagaaaaagttatttcataaaatgcacaggtggagtacgggggttcaaaattgaagtctgacatttgagctgagttcagaagggcagctgaagtagtgttcttggagatgggctaggggtaaggattgttttccagaggagaagtaaggggatgtgtttggaaaggtagcctggcaccaaattcacttagtttggattaagtctgcatctgggcttaaacccataggtagtcaggaaccaggaaaagtttttgattgtatactgagtgtcaaacactgcagagtgaactacagcagtgatct

SEQ ID NO: 61720 - DNA, 1848 bp, Homo sapiens
ccccaggaacagcaagtgcaaaggtgggcagagtggagatgagtagatccggaatctccatgatgtgggggttgtaaatgcttgtctgtcataagggagtaatggggagttgaaatgggaagagatcccctcagccacttcggaggtgccttgttttggtagtgcaaaagaagaaaaaatagtgatctgtgagctcaagtctggacaagaacagccagtctcccaaactccctgttgagagaatgttgagtggaccatttgtttcctgtgaggctattccatacctaaaatcccttgatgatcctttctgttccagcaaaaacatgcattaaatgtacttgaaaagttttggtttagaaagctgtgtttcttaagctcagactgggtcagtttccctaccagagtggtgggtaatgattttaatgtttacaagtcacctggatgtactcttttctcattcagcatggcctgtatgagaagaaaaagacctcaagaaagcaacgaaaggaacgcaagaacagaatgaagaaagtcagggggactgcaaaggccaatgttggtgctggcaaaaaggtatagttcattaaggaaaatatagaaacgtcattaattgtaggtctttagtttctaggaaagaagggatcttattaatttttaaaataacttttcttaatgtttcttcttttccctcttcttctggattacagaaggtaacatgttttaagaaactatgtagcatagtgtcttaacacctcagtaaagtagcttggcccaccccttgtcagctcacagcacaatctggaggccacattggttcattgatcccagctggtgggcacctttcaagcctatcacaagaagttttaattttactaattggcatagaaccttcaatgcagagcggatcccattccctgtgattttacttattaatatggacactggtttaagaagcagttggatcaatgtggcccgtgttttcctggcacactggaaaggcaactgagatctcaggattgctttcctctccagttggccaagacaagtgattttagcgataagcagctttttaccagctttgctagctgtaaatagttggacattgtaaatcattgaatagaattaaggtgttgggttgttaaattaacaaataatcaagtgttctgtgaactttttttttttttttttttttttgcttttcctctctactttcttggatttcttgttcatcagaaatgaagtgtctagcaggtactgagattgtaagcacggtgtggggatgcatcaccttcactgagtttgctttgatgatgctttgcatgttggcctttggacgacagttttatagtatggtcgattataatgccagtgctatttaggctggtgcaaaagtaattgcagtggcaaaaaccacaattacttttgcaccaacctaatatgttttaagatagtatattatgagcaaaggagaaaacgtttaaaatcatgtttattttgtaaactccaaaatgcatgttacatgtgaagtgactcactggaggaaggtgagtactttaccaagtaggcacttgggaaatgctgtgtccacatacttaggaaatggcttcagttaacactgggcttgggaagggctctcttatccaaggagcagtcttctctggagccatgaaaccagcctggcagcactggtaataaactagtctgtgaaatctggcaaagcctctgtcctgtttggatatacgcaaaactgccttttaccatttccattgctttttattacttaatctcccaactttgtgcctggtgtctttttttttttttttaaaatagaaaatttttgaggtaatt

SEQ ID NO: 61721 - DNA, 2274 bp, Homo sapiens
tattttttgagacagggtctcttgtcacccaggctggagtacagtggcatgatcatgggttactgtacctcccgggcttgggtgattctcccacctcagcctcccttgtagctgcgactacaggcatgtgccaccgtgccctgccaattttttgtagagacaggatttagccgtgttgctcaggctgctcttgaactcccggacttgagcagtctgcttgtctaagccttccaaagtgctgggattacaggtgtgagccactgtgcccagcctgttacctcatttaaaacaaattttgcacatctgaacagcctaaaattgtaatgtgataagtggggtaggagtggggtgggcgtagtgggattttgaatcaatgaaggcccttgttcttgtggcatccttttgcagtgattccctgccaggcaaggcagtaaacctgggattgcctgcccaggactgtaatcacattgatgtcccagcgccatggagtatgtaatgaatgaactgccagcagaactactcactaagaactactccctgtttgtgaggattgtacctgttgagagaagttgcaaaaagaattagtcaaaagaattagtcaaaatttgtcctctgacctaggtctgaaggacatttaacacattgattgttctcttcatccagcctttgagccctatgagttagtgcccttagcctttgagtcccacaggtatggaggagctacctgtggggacctgagccatcactattcctgcttcaagttacactggtgcctctcactagcactgctctgaaaagccagctggaaaaatcaatgcatttgagtacataaattctttggctccaaagaaatgccatagcaatattgcttttaattcagttttgtttagatgttagaattggtatttgttcttgctttttggttgcgatggagttatatactaagttacttatactaaggcattagtagtctcatatctgaggagcaattgtatttttagttcagctaaattaatgcctctttttaaatactaacttgtactacttttgtggctgtgaatggtatcttttattgaactgaggcagcttttaaaagacttgcctgatcatttagagcactcccattgaggttaaattagacttgaatctgtaatgattctcgtaactgttcctggtgtgtgtccagcacaatgttgctgggcagagcagaggggcagaggctcaggtatgtacttcattgacaagtgggcaaggccatcctgggtaccacattggcttaatgatctcttcattgtgaagtccggctacctcgtttgcataagaactacagtaatcaggcaaggcattgtcagaattgggaggaataaaatcagtgagtctggaaggagtgctctgtatacaattgcaaagaacaaaatggtcatctttaaggtacctgattgcatgcacttaaatgcagattattttggagtttgaaaagggactattaatgaaatctttcttttccctcctttctctttttcccttccccgccactgattcagtgagctggagattggatcacaggtataattcaagcttttcatgtagtcatgtagatcactagactccttggtgtactgacgtagcaatttaaaagcagatcatgtgtagtacatctagaagtagatttacaaatattctgaagagttgtaaccttttaaaatactaacagtgacatggttttgtttttaaggtttagcaatatttagcccattatttttgttttattcttaacttgaatgtttgtaaattttatttcttgatgctttcattgtgttatgataacatcaaaataacttgatattctaggttactaataattgttgtgcatgagtgttactacttttggaattgaagactttaaagaattttaaaggcagttgttgactaaacttctttctcttgattcacagccgaaggagtaaaggtgctgcaatgatgttagctgtggccactgtggatttttcgcaagaacattaataaactaaaaacttcatgtgtctggttgtttgaaatgtatttgcagtttcctgggactgctaggaggttagtctgctgatttcagttgctgtccaagttcacatgctccatgaagcattcagtgaaaacttaatgtcatggggtggtgtttgtttgctgcttggtttatagcttaggtgggttcatctgggagtcaagcttgtaaatgctgtgttaagaaccatgtccgcggtggacgcagtgtagtggctc

SEQ ID NO: 61722 - DNA, 1036 bp, Homo sapiens
tcccacctcggcctcccaaagtgctgggattacagccgtgagccaccacatccagccagctaattgttttttatttttgtagagaggtgatctccctttgttgctcaggctggtctcgaactcctgagctcaagtgatcctccctccttggcctctcaaagtgctgggattacaggtgtgaaccactatgcctggccagatgtgacttttgcttgaaatgtgctccagagccctgcctaagtcccgctcctctgagaagccttctgtcccaccaggtctggagggcaagtgccaagaaatgctctgagctgtttcttcctgaaagtggggcagcttgggctgtcagcatggtttctagcaccgttggggccatggaaagaaatctgtcttcctacagagtcactggctttttatccttccccttctgtccgtggacatgtaccctcttgggagagtattgatcagaggggacagcactgatcatgcctttgccggaggtctgtgcacacatccgcatgggcacctgttagcatgtgcttgctagagctacagatggcttcctgctgccccacaggtggggttctttaccttactttgccccttggtgggtggtgaccagtgggctccttcctggaatatttatgcatgcggaaaaaacatgaacttacaaagaaaaccaagtctattcaagtacacttagcaaaattaacatttgtgatgaagtaacaaatgtttccttattaatgcaataataactatcttgtggcaggtctaattactactataattcaaagtagggatggaggccctagtgacatttgaaatatctgtaacagctgtgatgttatatgaaaatatctgtgatttctactggccacaaagtctctggaagtgctcaaagtacagggatttattatctacattcatgatggaaaaatcttagaaaagaaccaaaaaaacacacaaaaaagaaaaaaaacaaaaatcttggaggtcagggctgggcgcggtggctcatgcctgtaatcccagcact

SEQ ID NO: 61723 - DNA, 1120 bp, Homo sapiens
tagtggctgccgcttggccctggttgtgggcagtgggcttagagagaagtggctttggggtgtgtctccagggcagagttgataggtcttgctgaaaggatgggtgtaggaggggagggcaagagggtatttgaggacaacgtacaggatcgtgaccttgagccactgggtggacggcgggagtagtgttcaccgggagaggagttggaggtttgggtggaaagacagagttatgctttggtctggctgtttctgaaatgccttatggacagccaaatggagctgccaatcaagtgattcatcttggggtccccagagaggtcatagctggagccacatcactttgagcatctgtccttggagtgaggctgatacctggtacttggcaggtgccttgtcctgcccacttgcctgagggtgccgctcacagcccctctctcatgttcactgtgtgccttctgggggttaggctgggtagggattaatgtacccattttatggctgggaagacagaggctaagggagggcagtgattggcccaagaccacacaggcagagcccggaccctactcctactccaggggtggattctctttccacctgcaggccacttctgcataactgggtgagtgagggaagcttcagtcttttctggatctctgcttcttcctctgtaaattcccttttttgttttcatgatgcatccaaggtcaaagtggctgaaagatgccagagccagggctattctggctgttctggtgaccagtgttggccaagggctgcagtcacccattggtgagtgcacaaaattgctcctctcctccactttgtaagggaagaagtgaaggatctgagtcgtgaggataagggaaggacctctgaaagtcatagctcacagccgtaagtgcttataatgctctgggcacggtgctaggtacagcaaagtgctacagaactggagagtgagtactggaatcatatccatttcatgaagaggaaacgaggcagtcttagtgaaatcactggctcagcttcacacagtgaggaccagagctggaattcagacccaggagtttggaatacaaagcccaccccttagccacatcactccacagtggtg

SEQ ID NO: 61724 - DNA, 1060 bp, Homo sapiens
tgatacattctagggtgggtgacctagcagggagcccagcctggcccagggggcctgaattacctctgagatgtgacgcctgagacctgaaggagaagttggagtgagccggggtgtttactctacataatcgcctacgagataggtagctgctatccctacttgacggatgaggaaaaagattctcagataaaacaatatagaagcggctttcctatggtcacccagtaggtagcagagctgggatctgaacccttccttgtctgacttcaaattccatcaggccctgacattctccagctttcatggtgttcctgcaatccaagtgccgcttatctctctacaggtgaggttaggggttgggaggatgtcctgagcagggagcaccaacttctctggctgcaggaggggagggagggggtggccggctgccctgggtgccctttctttcccttccatccagggctggaagaaagccatacttctgactccaggaagtgctttggtggagctggaccggcttctgagctgtctgtggcgtgaggctgggataagtgtttggtcacctgggatggggagccactggcctgaggtgacacagacaaaggggagccaggagaacctgtcctggctcactgtggagcaccccgaccctgctcccctgcagcaggctcagctataaggcattgccagcctagccccgcggtttcttttgctgggataaattcagtggaaggagctgtgtaaaggcacaggccctgccccacagagaatccttgtcacttacatgctccaagaggtctcagaactaggggacttcctcccctccctcctccttgtctggagctggcattaggccccacatcttccagacccaagaagggcatttactccaggagatggctgggcagaccctcagtaggtattccacgaaagtgttcatggcttaaacccaacacttgatttctccctgagccagtctctgtgaatgtcctcaccatcgtcctgtgtcactcctggcctcctgctaacaaccaaatctattgactctccagatccc

SEQ ID NO: 61725 - DNA, 1060 bp, Homo sapiens
gtctggctttcagggctgcggggctgctcggccggtgctggggcttcgaatgtgacgttcaggagctgcgacctttatttggcagtggcaggacggtatccagtgtctcgagtagctccacgttggtgggccagttccatcttccaggagatggcagccaggacctagaggtccatgacgtgggtgaggggctgcccgcagggtcagagcttggagctcactgccccctttcttgtctcccataggactcacggcagctgtgttctgatttcgtactactgctggggctgccacctcctcctccagacgctctcagcagacttgagtcctggtccttctgcagaggcctgagcaggtaagtgggatgggctggccctctggtgctgtgcacctgctgacgtggggcagacagggagtgcgggctgcccagagtgcatggtgctgtttcaggggcccagagggctggggaggggaaggggcttctttctcagtctttatttgttccttggccttttcctctcaaagaaagccacacagtggagggtggtgaatgtcctgacttgggacctggacatgggattttattctgctgccaactcccagtatcgccttgggtagccctttccttctagagggcctcagctttctactctagtccatggaaataacagtaatgatatcctctaacccgacaagcacttaactgtattctgggtactgtgcaaagtactatagagttattacttctttcagcatcacagcagccttatgagagcattgctgtaatcaccagcattgtacatgtgagaaaactgaacgtcactcactcaggaagtaacttgccccaggcggcacacctggctgagcctagggttcaagtccaggtctgtgtggctccagtgcgccagccactgcccgctggcctactctgcctctggccttgctcctagcttctttttgggggtggggatcagggcaattatgggtgtcttcagaagtgccagatcctgtcccaacttaagaaaaagggagaggggcttttaccaggtgacaggctcct

SEQ ID NO: 61726 - DNA, 1002 bp, Homo sapiens
acggcacccctcccttgctcagtgcatctgctacaccacagaccccaagtcctccactgggccaggcacttttctctatcttggagtcttcacatatgctgttccctctgcctggaatgctgtttgctgcatcttggtctgcctctccctggcttgttgctcaacttcacttctccagagaggccacctgggaccttgagtctctgctgtgtggctcctggactcattgtttgtttctggcaagcactgcttttacttttgtatcatttgattctttgctctcgtctgagtctccgcaagggtagggatcactatcacatcagcatgcttgctgaatgtttgttgaatgaatgagtgaatgcgaagtgcctttgtcattgcatctccctggattctcccggtgaccttgagacatactttgaccccactttgacacgtgaggaaattgaaccccagagagtctgagagcatatctgtaatcacataaccagtaactggcaggtgtggggagtcaggggcctgtttatgccagggcaccccatcatgtcccttcagagtccccctctgtcagatggggatgatatggtggcagtgggcagtggcctcatggtcagtgccgggcctctactgtgggtagacccgctgacctcccactttcattgcagcaggatggagctggagtgaggtggaggggccgcaagctgctgaccggcgtgtggaacactggtggtttgcagatcactgaggtaggtgtgccacggggctggcgggaggtggctgggtcggacgcaggtgagtcctcatgagggcaggtgctagccctagcacgctggacctttgactcgggcctcagccctgaggggcaggagcgggcacaagccacctttgctgggacctcatcatgcccccaatgggctgtccctctacctggcacccagggacctcttggcctggcctttctctagagcagctgctaggggtgggggctgcaggtctgcccgg

SEQ ID NO: 61727 - DNA, 1053 bp, Homo sapiens
gcctcaggggagcggtagacggtcccagaacagccgtgaggcaagatgtgcttgctgtttcccaaactggagctgaagaagggtgagaagcacttaatgggggaggcagatgtgagcaaaaagcttccaaaggctcagcaaccataaatttcctgctctccgttaaccagtcagctccctgggggctctagaaagttttctggggcccagctcacccagcagccagggtggacggacacctgtgggggtcacactgaggtccctgcctcttctctcctcctgcactggccacagcccagagctgagacatcagtcaagcagacctgatacccagggagcagggctgagagcgtgaccatgcgccacacgatgcacagcattatttctcgtggagtccgcacacagcctccgaatccttcttaatacggcccacaagcacattaacaactgggatgctagacatcaccttgttgctatgcccagaggaagctgagggtgcacaagctgggtgcctgtctgtggctttcagctgcccttcaacacagaactggccagggactgtgctggggacatggttcatagcctgccctgagctttcaaggagtatacagtctagtggggaaagagcagatggctggcttggaggaacagagacaaaaaaaggccatggggtgcctgtgtgcagatgaaggagggaatgggctggggaaagaaaggggggctgttggctcagtacactcaaactccgcagcccttgctggtgggaggaggtaggcccccgggggagctccgctttgggtagtggcaccagccctgtctgcagtggacggagacgagcacctgaaccttccatgactccctgccacactgcctgagcagaggcaaacaagaggtagatcataaatggagcatacagccaagtgcagctgaagggggcttgcaggtaacaaagaggaaaattggctccagagggtagagggctctggaggggctgttctgccgccagcctgactcctaagaaacaccccactttgggagaactctctaggccag

SEQ ID NO: 61728 - DNA, 1156 bp, Homo sapiens
agaatgtttagaagaaaaggggaggttctggggaggtgagcagaggggaggattccaggaacctctgtcttccttccaccatcagggacagaaagcgctggccagagtggctctccctgcccctgcctctccttccacccctctcccgatgtgcacacacagcattgtgagctgtgagcgtgagaataggccttggagactggcaggtgtgactcatggctctgccatgcacttactgcgtggccttgggcaggtcacttaacccctcaattccctctattgagggataattgtgcctgccccacctggcagctggagaactaattaaatgagataatgtgtgtggagcacttagcacagctcccagaggcgcccggataagtgccctgcaaatgcaatcacccgccccctctctgcctcctctcctccctctgatcctcactcacctctctctgccttcccacacctgatccatggactgtgtctttccaggccagacctttcaatctttctctctgggaagatgggctctatgtctaggagatgccaatggagccgtgtgagcgagtgtgaatggagggagagatgagtttagaaatcccagcctgctcttctgatccagttcccctgtgccagccgcacaagggccaaagtgtgctctgcatgaagcctggcctttgctgatccattgctgcccgtccccgagtctttactgcctcctcagggtcctcagctgctgtcagatgaaggcttgcttccaagcagttcctggatttttacctgctcagccataaagccctgcaaagtgatgaatctagggatgagtagctgcttgcacaagtgcaggcaggagagacggggaccagagcccatatttttgcagagccaacatttttgcacctctcctacccacctcactgcccaggcgagcaggacggtgaagccttggctgtggataattgtcgggagcatcccaggccaagccttggtctcccatcagaactttggaggctggacttctctgttgccagggaaaccggtgtgttcccaggaaaggaaaccacagcactttagctgttaagacgcccccctccccccgaaatgagttccctccaaaacggattcgccccaaaattgttgagtcggcagcatcctg

SEQ ID NO: 61729 - DNA, 1082 bp, Homo sapiens
aactgggagatgggactgtccaccttcgggctggccccacgtggggtcacgggcagtcttgtctggaggccggcggctggactgaactggcttctggacagaaagattcctggaatattaagggccgaaggtgctttcaggtcccctatctacccgctctgcctcaactggttttactctgaggagcctggggcccatcagtgttttgttcaaggccaaggggcactgggctgggtccaggtcccaggggggctttgctcccaggcagggctgcagctcacaggaaccgaggggtgagtgtctgggcttgcaacacctgtgagacccaagggtgggtagatggatggcaggagggacatcgcagaccacagggacagcgctgtgtcctgtgtttcttaataaaagaacaaatggctagcggattatggaggcacctacaggtgaggtgacatttttaaactgttgaggtcaatgatggagaactgcggttactaaccccaggaatggaggagatggaggctccagtctctggagtaaaagggtcaaaggcctagagagcaaagggtctcaggcataaagagaggaagggtgcgctgagggaggcatgcaagagacagcttgttgaggggcaggctgggatcttccatttgttctacacctgctatgttcaggcaccaggccaggccctatgcagtgctaattttcttcatccttaaaaggctcagagaggtgaagcaaattgcccaaggtgacacagccggaaagctgctgggctgagattcaaaccctctacctttccagctgttaatgtgctgttctttgcactccccatgactggcagtcagagcttcctggtagtccccacctccggctgtgactgggccccaggagatgaccttcttgttccacccaacctgcccaaatccagtcacttacatcactgggctccctgcacaccggccacctttgggaggtgacacgcacctggtggccagcagaggtcgcccttcgccacaagagcgccactcagctgggccgctgcctccgcctccgggctcctggactcctttaagcctttacaa

SEQ ID NO: 61730 - DNA, 1009 bp, Homo sapiens
cacacccagcgtccggggccactgtctccttgcggtccttagctcctgtgcacatccaggatccagcgctgtacatcagtagcttcctgtcatcccttgcccacctgggtgtcagcccactacactgacttgaaggacaggcggttcgtgacttgcatccacgctgggtgctgcgtaaatgtctgtcagatggccagcccggagcatgaggacatggcggccctggtcacccaggcaggaattgaaaggctcgaggtcttggcccagctctggctccccagcttgtctgtgtgatgtgaggggtgcctgcctttcttgaggtccctgcttgtaaggagcagcgtgggatttactgtgctgtccagtatagcagccacacatgtatttaaatgtacattagtaaaattaaatgaagttttcagttcctcagtcacagtagtcacatttcacgggctagtggctaccagattggacagtgcagtggtggaatgttcccatcatggtagaaagatctgttggcagtgctgtgcctgaagtggtcactctgtggcccgcgggcctaccctgttggcagctctggtgactgctcctctccctttccccccaatgcacgagggacctccctgcccaactacccggggctcttaaaatggggccacccggtgtccttcccaagccagtgtcagacagtaattatgaaacccacatctgtcatttaccaggtgactttgagtaagtcaccaaggttctctgagcctctgtttcctgatcagtgcagtagagctacttgtccctgcctggcagggttgcagtggggagtaaatgagatggggctaaaaggcgcttaggttggtatctggcccatagtaacgtctcagtagctggcagctttcatcactgtcaggtggattcatcccctcgcagcatgggcttagttccaaaactggctgggcattaggttcccctcaagttcctgagcccgagactgggttctctccacccagctcca

SEQ ID NO: 61731 - DNA, 1036 bp, Homo sapiens
ctaccttccaagtccgaggcttcagtgtccaccagggcactggcaaggtcctgtatccacttgcctggcagcgccctggggaatttgggatccagacgcaggaggctcacttagatccaggactttgtgagaggcccctgagcaaaggaaggatgactgtgaccccaaagatatccatctgctcagtgtccatcatgccctgtgtggatgcatgggcctgcacacatggccccacacacaggtacatgcacacacacacacacatgctgacacgcacactcacacacacactcatgcacacactcactcataggcaccccacccttggggttttcctctccgttcagaaaacttaattgtagcttaaatttttattttcagccaactttgtttttaatgttgagtagctatcacttgtttgtatatacttcagaaacaaagtccctgggagagaaggaggctgttttcttaagctgaatcctagaactccaattaggagtgattgttccacttctgaggttttccagccgcttcctagcaagccctgctgagcccctaattaggcagccaggggcgcccctgttcagggcccagcacatctcagggtggcctgtttgagggccagtcttagggaagttcagggccagaaccccaagtggacctgcagggtactggggatggtcctctctgttcagggagtggactgaggtcattgcccgccatcccagggccctggctgcctttggggacatcagtgcagggcacagaagcagagtcagggtgccctgggtttagggaagccccataagccgggctggacggcccttggcccaggcagggtcccatggggaggctgccgagtgctgctcttgctctaactggggatccacccacgatggggcctggcccgctggtctctattcactgctaagcaaactaaagctcacaaaagtaccacaggaattagagccagggccacccctcaggcaggtctgggtgaccaagtcctgccttgcagtcagcgtgatattccatg

SEQ ID NO: 61732 - DNA, 1100 bp, Homo sapiens
agaagaagaaaagaaaatagttaaatggaatttaaactcaactcctcagttgcactggccacacatgtgcagtagcacatgtggcccctgcctcctgtttcgggcagcacaaatcaacatttccaatactgcagaaattctgttggccagcagtgtactgtgttatcccatttcataggtgtgaagttgaggatggttggtgattgtcatgcgtagggtctcagttggatgaggcaaagtgggacataaacctgtgcccatcagtgcaacatagctttcagcaccaacattctaggctctccaagcccagcccagatagctcccctttcatgagccttccatgagtctgaaggccatggactgttttctctgcatcctgatgctgagcccaaggcctgccccagggcaggcactttggggtgagtatctggagtgggtgatggaaggaatgactgactgaacatggtctgctgaaactttggggcgaactcactcccctcctgatagaactaatgtggggagggcagagccagctgctgaggagtgatggatggcccctctcccaagataaatgtggcagtcaaggtaatcggattgtgtgtgacggtctaatttgtaggcgaggggaggaagcgcccagccatgcctcgccccagccgcccgtattagtttaatcaaatgcccagtatctaaatgactgggcccaagtgatggatgatgtgagctttgttaaatgttgttgccctgtcgagccaaacttcccaaggccctgcccggctcctggactgtttaatttgttttttcttgcttggttatctctgcgtggggcagggaagggggggctggagctctcctgtctgtcttaaagcctctggtttttcatggaggagaagagagaggaggccagacctaggggaggagtgggagggagtcaccttctgcctctcctgagaagccttcctgggtcgctgcacagtcttgaggagcccaactccccagaacccttcaacagggcttcatcgtgcaccgtgtggcttcttctgttccatgcagactcaccctcaccctgtgcttctcactccattaatggggtattttgg

SEQ ID NO: 61733 - DNA, 1044 bp, Homo sapiens
ggtttgggaagatttgtgggtgttttctttgtaataaacagtgatgccctaggctcaccacctccccaaggcttagtgtcagcaccgggcccccaggacagagcccatactctggattcatgagcccaggctgggtggaatgaagccacttgagaggtcctgggggttgtcactggcaggaaaaaccaagggcttggaattggacactaagggttgaggtcaaatcaaatcaagggagtacatgacaaggtctctcggtgctcaaacacatggtctcttgccgtctgtgaagtccggacagccatgatgtgtagaccccagggtctttttgaccctagggaaggcccagcctcactccaaccacttcttcttatgctgggtgggagaggacacagctaaactgcctacacccacctgggaagggtaaggaggggacctcctcagaaaagtaaattatgcagggaagaaattgattcacataacccctccttacccttccatctccctgagagccagcaacgggcagtgatgtttagccccgaggaaaaattacatgcggaatggaaagcaggcgctcagggtggctcctgctggaatgagagctggagtgcaggctccgtggttcctgggcatgcgggtgtggctcagttctcaccttgcagatggagtgggactgttgacccaggccagcctggggactgcctcctcacctccctgcgcaggctgaccttgtcaccttgcctcttgagcttgcctctctcctgcccagaggtccttggagcaaaatggaggtcgagaggcatttggcactcacgcctcaccacggacactggtgcattcttgggtacctcttggcctcaatctattgctgggggagggaggactgaggcccattgctggggccctgaatgcagggactgtaaccacccatccccttctcagggcacctctcccctctccagcacgcttgctttgctattagtgctacctaatttcctactgaggtggtctagagctcctccgccattgccctgccgccagcaa

SEQ ID NO: 61734 - DNA, 1021 bp, Homo sapiens
gtgctagcctcgcctgcttcaccgcagtacctccagaacacacaaggtgctcagcagccagttgttgaatgaacgttgggtgagtgatagaacaccttggtactgtaggttagaatggatcgaggtgagggagtctggtcacaaggatgcagtttggagaggtgaggggagctcagtgggttcactttagacgagttgggtggtgcgtgcttttacgttttacgctgagacatttgaggagtgcttggaagtctggattaaggctcagcattggcagttcgagtctgggatgattccctgctgctgtcccagccccagctgtggtcaccatgaggtgagctggaaggccccaaggtcctcggcaccagcccctggacaggctggagaggatgacaggggatggggcttggtgaggagcctgagagcccagtttctggggtgcctgtacccagctcagcacctgcttgataagaacctggtgccttgggtgatgggggagaggggatttgtttaggggtcagaagcagtgcatttgcaggtggttgtgcctctatttctcctcccccaaagaaggctgttacccatcagagatcttgctggaggagagggggcagtgggtactgccatagctgtactgtcagcttggctgacggggggtggtcccatgggcctctgtggccagctctgcaggccccctcctgaccctaaccccctttctgtggctgaacctctgctcccaacagcccctcctgcttcttggtttcttttttctttctttctttctttcctttttggaggggaatggagtcttgctgtgttgcccaggctggagggcagtgacgcgatctcagatcactgcagcctccacctcccgaggtcaagcaattctgctcagcctcccgagtagctgagattagaggcgctggctaccacacctggctaatttttgtatttttagtagagacagcatttcattatattggcaaggttagtctcgaactcctgacctcaagtgatctgc

SEQ ID NO: 61735 - DNA, 1037 bp, Homo sapiens
tggggagaagccacgctttgcctctgatcgaagtgtgagggagtgagcttccctgagggggatctggggtggtgggcagctgctaagcttgccctgactcaaggtctgtgtcaggccccctcactcctccagtttccacttggcaccatctctgccacccttcccatcatcctgactctccccctctttgcctccacggaccactacttcctgcacgcgggccattctgaccccctcttcatgacagaaacttttgtatcctccttcaagggtgtcagtcccatcttacagttgagaatactgaggcctcccaagagggctgagtaagtcttctggcgtcacacgaatctgggagcaaaaccagcatggatagcacccagtctggggagagttgggggggggtcttggtgtggcagagcatgatgaacaagcacccactgactgtcctgtccttcctgcagccttgttgtcctcctggtgcgaagagctcggccgcctgctgctgctccgacatcagaagagccgccagagcgatccccctgggaaactccccatgcagccccctctcagctccatgagctccatgaaacccactctgtcgcacaggtaagtgggtgggtgccatgggtgcaggtactgagcagacacccctctggtctcagatctccttggacatgtccctggggtgggggcctctgtgcaaccatgaggatgttgcattttctaaggtgcagttgtttttttacatcttcgtgggtgagccctgtttctccctctcaaacaggttgaaagcactgagtttgtcactttggtggaggctgtttttcttcaggttctaggcttctggcagaacgttagaaattctgagctcagcaccttccctctttcttgaccagggtattgggcaaacccagagaaaccaggggctgacagggatctcaggaaggccacggggttggtggttccagccaagatggggacagagccagcccaggccagccaccctggagccaagtaagactgggctgggtccacca

SEQ ID NO: 61736 - DNA, 1053 bp, Homo sapiens
aagggtattttcccaggcactggggcacagccaccaacaggacctctgggcaagagagacactcagatggggaagaagaaaccactgactcacaggatgtcatgtggccgtgagggtcacctgattttccagacagggaaggtggctggagggtggtgctctctcctcttctctaaattgtctgtcccgggagaagttgtcttgttccttcaccaacctggctctcccacctcctgcacaggtggcaggttgtcgatggcccagaactgaacactaggtgtgtgttctgctctgaggggagtacgaggacaatgccacccaagttcagccttggaatgcaggggcacagggggctcctttctggaattgcatcctgttgactgtgttcctctgtcacattggggtacacattggggagcacagccctaacccaggcaccaggagagacacaaaggtcgggggagttagaatcaggcccctcataatggtgtgagcaagaggctctgaaagtgtccctggagttcaggggcacatgtgctccaggaagaacggcctcaaggggaggtggcctatgatctggacaggcagaacaaaatgcccctggatgtcaggacgagaaggggcccaaagcattatctggttttgtgggtgggaaacagcaggagcaaatgaggagaggcgggccccatcccgttgttcaggtgacctggctatgtgacgttggcaacattgaacgtgtttcccctctcctttctctcccaccacagcccaactatggaaaccagcaatatggaccaaacagccagttccccacccagccaggccagtacccagcccccaaccccccgaggccactcacctcccccaactacccaggacagaggatgcccagccagccgagctccgggcagtacccgccccccacggtcaacatggggcagtattacaaggtgagtcccagcctcgccaccacccacggggccccttccctcctaaccacctcactcccctaactccaccgggatcactctgaccctgcgtgtgtttgcccca

SEQ ID NO: 61737 - DNA, 1078 bp, Homo sapiens
ggcacaccagtgagtcatggcttcttcgattctacacggccccgccccagcgactcatcccctcttcttccacccgcctccttgcatccttccatggctgcgtatagattttcctcccagcctccaggcgcccaggcagcagtaagaaaggctgtctgtgagctgcctaccccgccttgagtgtgcccctgggtatctcacctgctctcaactctctgccccttctgatgcccactccccaggcagcctgactgcgaagcccctgctcccggcccactggggggcccaggtggagctgccaagagagggagggagggccctcacctgggggtggtggcagagcgctcatatttggcttgatgtcaggcgggaagggtggtttgacgtcttggctgggggacaggtatggagggatgctgctcccaggggtcatggggggtgtggggttccctggaacaggtgagtgggggtaatttgccacaggaaccggcctgggaggctggagggaaagaaaagacacgcacgagttatgggattacggagacagaaggggccatggctatggacatacaccgcactcatcccaggggcctggagccatgcccctcgggaggagagcctcctccagggaaactcttctctctcgcagatctctgtcctgctcagaagacagccctgggaagggcctccccacccttcatctgggtctcaccactgagctcctgtgtcaggtgcctgtggagacccttacccatccctgtgataaatggggacacagaggctcagggttggggacttgctcagcacaacccttggaggacaggacagcgggaatgaagcccaggcctcctgtcacccgagcaggtgggcttcccacatcacgactcaaggccacaccctctatgcctaccccatcagggtccccaggtggagtcggggcctgcagaatctggggcccaggttccccaggaacccctctccctctccttgttttcaagactagccaggctgacactttaccctggggctcaccccacctggagccgtggattctcagtcctgagcatctctgtcccca

SEQ ID NO: 61738 - DNA, 1011 bp, Homo sapiens
gtgctcagaaccagaaatggccgtggcctgggaggacagctcccagcaggtctagagatggggttggctggcctcacagcaggtcttgtcaaatgagtgcctgttcatttgcccctctgtctctgtcctggggatccaggagttgacccctacagggaggacattccagggagatgggagctagagctgtggggtgtgatgggaatgattggtgtgcgggggtcttgggggcagtttgggtgtagagggagtatccagaatgggagaggagaactcaggctgggggaatcattggggtcagggatggggtcctgaggatctcggaggttgtggtgtgtttagaggtgtgtgacctggctcggggtcacggaggccatggacagccccctggcagagctgccctgagcaccctcgttccccacctaggtctgacctggagctgcagttcaagtgctaccaccacgaggaccggcagatgaacaccaactggcccgcctcggtgcaggtcagcgtgaacgccacgcccctcaccattgagcgcggcgacaacaagacctcccacaagcccctgcacctgaagcacgtgtgccagccgggccgcaacaccatccagatcaccgtcacggcctgctgctgcgtgagtgtggtgggccaggggcagcgttggcacaggcaggccctgtttcacggcatgagagtgcggaataccctgccccactctggtcctcagccttgtccctgcgtcaccacccccgtgcccacagccgccaaagatacagcgtccccttacctgtgcccagggcctgtgcaataaccttcaaaccgttgggccttcaaagccactgtgccctggcttcagacgtggcctcttcccctggacactcagcctccgtctgttctccacacatgcttccgattcacccctcctggcccctcctccctacccttcattcattggtgcagttctgtgttcctcaaagccatgtcctgcttgcctcattcaccagcagt

SEQ ID NO: 61739 - DNA, 2327 bp, Homo sapiens
ggaaagacaacgtctctcgggggccaggggtcatcggtttgacccctgacctataagccaagataccccataaacacactcagaaagcagagaaaaaggacaagagtctgtgtttgagagggggtctgccattcctgcttggggactggtggggaagagggccaggacatcttctgagccaggacgtccctgaggctccacctccaagctcagacagggcccaggcttggggaacagagagagcaggtgtacacccaaccaaagtgattgtgcccttggttggggggcgcgggcatataacctgtcagaagcaaacaggagcggcaacttctaactttgctccaagccactctctttttaaacagcaacaatttaaagctatgaagtcacctggagaaaaggaacgttgctcttggacagcaagcaaaccatttctctccgtctgttctgtttttctcctagtccctctcctgccacctctccaagacttccgtgggacacccacttccctctgtcctagttctctttgtccaatcagatggcaagggcagtgcgtggaaaggccggggaggtgcagaaaccagagcccagggcaatggtgtctgtccagcccctccctctgtccctgtgctccaagctgcccccggctgcagcccaggccatggacatgtgcaccagtatgtacctgcaggcatgggggggaggggggcgtgtttctgggcctgccccagacactgcccttggctgccagcctaccctgcctgcactcctccaccatcacaatctcacccaaactcctgctcactcaagcaaaagcagcctctggccttccctccaccgctttgctccatctggcttaccactctccagggcctcctggggagcctgtcctgtgttcactttgtttcaggctggtctgtgccccgtgagccacatggcctagggtgatgccaggttgtcccgtcactggggtcccatctgtaaattctttgcgcccttcccggctgctgcctggggccctttcctgctctcccgtccgctgtgggtggtccccagctctcctctgtgggttttaccggaaaggtggccccagctgttgacttccagtcactgtcccagacggcacaaggttttctgtaggaaagctgccattgccccggccccttttcttcctttgtcccgttgtcgaggttttttcaaatagcgtgttgttcagtatgcaaatcaattattttaagaatcgcttttgtaaatatctttgtgaatattttagtatcgtctttgataatattcaacattttcatgacctggttatagcctttgctggtgtttttaaaatacctggactcaatgacaaagaccgagtcttctttttttttaaacaaaaacaaaaaaagcaaccagggctatttgtacagttgaaggggtgaacagaatgggcggctgtgctgggagttggaagaccgggcagcccgctatttagagccatccctcagtcagctggcagggacaagccaacgccaggtagcatgtggccacccttgcccagtgtctgtggcctggcaagtggccacgccctgtgtcagaccatctgggaattaagctccagacagacttacagatgccttccttaggagttcttgcttcttgcgttgatactttgccccagaaaggcctgggattcattctggttcttatcagggtgtgtccacactctgctcacaggtggatccacggctttccagtgcggagagtcgagatgctccctgcagcccaggccccgggcacctcctgcaaccatctctgggctcagcacctgaggcgggtttcctgggtcccctctccagcaagcctccaccagcaagctcggcccagagcttcccttccggctggctctgaaccgtgcgtggtgcctacagcctgcagtctggagacaagctcttccggagtgctctgggagccaggccagggtgtgagggaggtgcagaggcatccggggcgggagcaagccccaggttgtgacaggtgcaggtagacaacgcccataaacagagatggtcctgaactctggagagatccttccctgatcctttcggacgactacttggagccataagtaacctcagcaaaaacgaggcctctgcaagccacttttccatgccaagcatccacccggcccacaggcatgtttctgccgccactccgcaagatggacagggagccagcaggcaggcgggaagggccaagtacaggcaatcacccccatcttcttggtttgaagctttatccatgtatcatgttccgtgtagccattttattttttaaga

SEQ ID NO: 61740 - DNA, 1035 bp, Homo sapiens
agttctccacgtctgtctctctcgctcatgtaatatactctgaccctgagtggaaaggggtttttgttctgtttttattttacctacatgtactatttagcttcagtgtactagtcctgccacctgtgtatttttagggtgctatggaaataatgaaaagaaacggggatttcagaagaaaattgtaaccaaattcatactttgtataatttttgatatcatgatcacaggtgattcacacgtacacacataaacacacccaccagtgcagcctgaagtaactcccacagaaaccatcatcgtctttgtacatcgtatgtacaatgcaatcatttcatactttaaactggtcaaaaaactaattgtgatttctagtcttgcaaagctgtatgtagttagatgatgtgacaacctctaatatttatctaataaatatgtattcagatgaaacctgtatattaggtgttcatgtggttattttgtatttaaagatcaaattatttgactattgctagacatttctatactctgttgtaacactgaggtatctcatttgcccatgttaatttttttctaaataaattgacaaaaacaaaggtttggcgaattagctattttgtggatgttaaggagtggtttgggtgtttttgcttttgttttaaaccacaccccccgccctgttaccctctgcacacacaaaaaagaaaggcaggtggtttgggtgttgaattggaagaacccctgtccatgggggtccctggaaccagtccctggtggggcaagtgcagtgtgtggccggatggttgggggagttggggtggctgaatagggccaggtggctgcagggtgctaggggcccctgtggcatgtgactcagagtgtgcaacagtgtcccatctttgatggtcccttgtggattatgctgggtttaagtagcaggaagctattcatattaagccacagagggtgctgttcagagcacacaggagtgtggcttcaatggagagtgagcattcactgcacccatggctccct

SEQ ID NO: 61741 - DNA, 1072 bp, Homo sapiens
tctcctccctcttgcgcctctagctcactaatcccgcctctcatctcacctttctctaaccctctcagactgcaggacctagggcagcagggaagcttatttggcctgagccttacctgcaaagggctcaaaggtagacttttgctattatattcaaattgcaacgtatagatgctcatattttggaattaattacgttttagcagtttttctttttttaaaaaaatctgctggtaccttaataaacatggaaccagcaaccttttgccaggtgtctgttctccgggtctctgggcctggaggcgggagtgtttcaaagcacttcacgctccgcggccccaccggctggctgcgctgcccgctgcggccggcaggggtagtccacggacaggcctggaggaggcgggacgggggcagggccgggaacctgggcaagccaataaaggctgcggcgcgcggctgcgcgggactcggccttctgggcgcgcgcgacgtcagtttgagttctgtgttctccccgcccgtgtcccgcccgacccgcgcccgcgatgctggcgctgcgctgcggctcccgctggctcggcctgctctccgtcccgcgctccgtgccgctgcgcctccccgcggcccgcgcctgcagcaagggctccggcgacccgtcctcttcctcctcctccgggaacccgctcgtgtacctggacgtggacgccaacgggaagccgctcggccgcgtggtgctggaggtgagaccgctcgcagggccggcctgggcgcgggacacgggcccggggagagccctgggccccgggcggcgcggtgccgggcgcgctgggtgaccttgggcctccccatgccgagctctgggcctcagtttccccatttctgagaatgggcgtcagaatgatttcttccggcctccctcggagcactggagcgggggagacgggagggagggcacgtgtggaggagaaagctcaaggtcagatcgcagagagggagggctcagcacctctgggccggcccgggcacgagggaggggctccaggagccttctggggctgagcctagatcc

SEQ ID NO: 61742 - DNA, 1180 bp, Homo sapiens
cttatcttgttattacggttttattaattttgtagagggacagggagtgggcaaggggaagaagcagcttatttgactaaccagcccctctgtggtccaccagcgtcttggcttggtgggagggctctcaatcagcagggccccaggagggaagaagaagtggggcaaagcctggcctcgccgctcgggagctttgccatctgagccacgcctcctccaggccatgctccttgaacttggaaatgtcaaccggagcccttacaccagccctccagcatctaatagacttgaatctactctaaacgaatatttaatccaacctcactacattgtagctcagtccaacgactaaccctgaaatgggggtgttccagccttcagcgagatggccaagcggtcccctgggggctgtggcagcgggcttatccttctctgttgccaaccttgccgtccgacctcctccgcccccatgcggtgaccccgtccgtgtctgtgtctgtccatacgtgtgagtccagctaaaaagacaaaacagaacccgtgggcccagctcggaaggtgcgtggagaaggctccgacgtctccgaagtgcagcccttgggatggcattccgttgtgtgccttattcctggagaatctgtatacggctcgcctatagaaatatagcctcttcatgctgtattaaaaggacttttaaaagcaaaagaggctcacaggtttccttgttcacgcaagcatgtagggaggctggactctttcagaggcaggagacggggcaggcatcagagagacttggggctggcctcagctcccctgggtctgggtcatcttgtcattgccctgcctccatgccattgatttgcctcctcccagcctctctgcccccaactgtacactctccagggcaacggccctccccaggttggccccagactgggtgagattgtcggcagatgaggtcacgcgttcactcagcggggggactcccgggtgaccatatataggagtgaatctgcctcagagacggcagccctgggccgctcccacttggcacactcggccaagatcaggatatgggcccagacagggagcatcacacagtgagcaaacagatcagtccaggggagacggggcaggggcccctcttctgaccaaagcctgggctgtcatgaggtggggc

SEQ ID NO: 61743 - DNA, 1696 bp, Homo sapiens
agcataacactagagagcagagggcccatttcagctctgttgttctgggattcaggctggccggtgctgtgtcctggagctttatttggggagtttcacccagaatggtgggagaaacctcccaggtgccaggtaccccgcatcgtgacccttcacttggtgtcttaggaagtcaagctgagggatgctgagtcctcccctgctggcccctgcagccccagccctgcttttcatcccccacccctgcaaacatggaggagccccctccttctcacctcggtctcctagcccctgacatggagaaccctgagacaagccacagaacccctcttttctaaaatggagacaataatttcctacctcccaagggagcagagaggcctcgtggcacgtccgtggccagggagcccactgtcctggctggcggcgggatcgtgcgctcctctgtctcccggatgagaagccccgtttccatggtcttgacccttcctttctcccggctgtcagaactgggtctcttgattttgcccctacattatgcctctgtgggaaaaaaaaaaaatcagaccaagaaatgagcctgaaattcagtgtttaccatggctcaaggatgcccatctggtgtccagttgccttttgtattcaaatgaaaatgctttgtacaactgaggagttacagtgaagtgttaaccaggggtccagggagcgagttgaaaagatggagtgagtgtatttgcagccagggagctgcagggtggatttgaggggccataccctctgagcacttaaaaaaggtatttgctccaggccaggcagcaggctgtggacacccttgccaccactggggactgccactgaggactccccgagcacgttgttccccgtcttctccaaggtgttgaggtgagctggggttggccccggcccaggcttctgtcccaaggagaagctgccactgacagtcatcctaccgcactgctaaagagaatgttcgcagtggtgggcggcgtgcctgtgccaacccttccagggacccggccatgggggaccttggcccaaggatgcctggggcctgccagctgtgctgcaaaggtggggggcccacaccctaaaactaacccaggccccagaccactggaggccagggcttccctgcacgggctaaggggagttgggatatcaccccaaagtgaccttgccagtgagctgttcagcaggtagccactgccctgccatctgtgcagagccagccaccttgggggctggggttcccgctttgaggcccaccttccatactccccttgactcggctctggctgaactggggaactctcttgtggtcagcaaagcccctgccatgcaggccaggtgccattgagaattaagtgctcagagggccaggagcccaggggatgggaaagtgtgtggttttagtacgttcaaaagggacaatcgcttgcagttggtagatctagcgatctagttgggagataatggtgtttaccccatatgaagtattcaatagttctacttgtgaatttgtatttattttgagttatacttgacacagaattccttttttaaaaaaatatgtgtgtattttggaaaaaaaattcatagatgttaaaatttctgcatggttaccagtttttctcacaacactgaatttggtagcttttcccgaaaaaatcttcac

SEQ ID NO: 61744 - DNA, 2214 bp, Homo sapiens
ggtcccagctacttggaaggctaaggtgggaggattcactgcactccagcctatgtgagagtgaccctgtctctaaaaaagacagtcagccaggcgcagtggctgatgcctgtaatcccaatactttgggaggccaaagtgggtggatcacttgaggtcaggagctcaagaccagcctggccaacacagcgaaaccccgtctctactaaaactacaaaaattagatggatggtggtgtgtgcacctgtaatcccagctacttgggaggctgaggcaggagaatcactcgaacccaggagacagaggttgctgtgagccgagatagcatcactgcactccagcctaggcaacagaaatgagactctgtctgaaaaaataaaaataaataaaaaataaaaataagacagtcatcttatttacttctctatcacacagacacacacacacacacacacacacacacacacacacactaggaaaaagtcagtgaatgttattaacctctcacccagatcccaaaagggcaagttgaggttgtggaggagaaagatccttcccaacagcccttagctgataggcggcagagctggcatgcaaagctctgtctatctgactttggtgatatcatgtcatatggagacgttgcagaagacaccagacacagagttttccagaacagtcttcaaaacaagctggcagtgaccccttcagtctccatggaggttctgccctcagtcctgggcctgcaaaacctctgtcagccccagagatgaagactcagaaggcagatgccagtcagggtgggtgcagctggcaggtgccagtgaattcccaggggagagcgctgtgcctgtgaagacacgttcccctccatcaaacacaggagggtgctgccctggggacagaaagccagggactcagacgggctgggagggagtgctgcagtctggggtgggcactggtcacaagctggccctgagccccaatacagtgtagccagtggggccagctgcaggcggtaggcagtatgtccctgcagtgcagggcttggaaacagcatgtgtggctttccagccaccctacctaccacctcctcactgcaggccccagggatgtccctaacgtcttggagcctcagttgcctcatctgtggaaactcccttccccatatatctgtgacctgtttcctccctgtgccactcacagggaggtggtgacattaggtggcgacattaggtggcctgacttaggtggcagtactttgccacataatgtgtaagccatggggagtgagggttgtgtggggcctgctgagtctggcctttttggcctgtcctggaagactgggtccaggaagaggccctggccagtcaagggggtgggggctgcaaaccagctttgttttggtgtgctggaggggacacttcacgactgtactgatcagaccgtcctttgggagccaagcagagtctgtgtggctgggatctccaggatgaggtgacagggacccagattctaactcaaggtgggaagtcttcttacagtgcaggcagtaaactgagcggtgggctctgccagcaggcagctctccagccctgagggcacccaagccccagatggaggagctgttggaggtctccctgggacgtccaggaaagcagggaacgtgcccttcctaggtcctttcaccttgggatcttggcttaattttgatagccctccaccagctggtgtccccctcccaccgataagacaaacgacagacagcttctgcatgccgggctgtttgtattcattatctccattgagttgtctggtgagaacaagcccatgagaaagctgttatcagcatccctgttcacagatgggagcatggagaccagaggggacaggtggcctgcccaaggtcacacagctcttaggtagcagagccggcattcgagcccaggtctgacaggaagtccaactcctctcttccctggccaggatgaaagctggacagggaagccagtcacctgaaagcctcttgtgatgtggttgacgtgcctgtctttccctccaggccttggctttgtgactttaagcctgggagcacagggatgggttttatgacccctgggccaggggcagaagggtggtccctggatcagaaccctcccaccacagtctccccacctgccttctagaaccttctgactcttccattcccagacc

SEQ ID NO: 61745 - DNA, 1021 bp, Homo sapiens
tgtctgaaattctagcaggctatcaccaagtggtagtaatggcgcctgggacaaagaggcatgattactaaaggaagaaactatgtaccaattttatataccactttttgttctacattaataaataacaatggcattaatattcctgttttgtcttctgtgtgccaggcactgttctaaatgttttgcatttactcctcagctcatttaatcctcagaacagtcttatatggtagttactatccttatccttgtgaagtaacttgcccaagatcacagagctgggatctggatccagagcgtgtgcccttaaccattatgcaccacttcataaatgggcagttccccaaggaaagttactatggcaacatcatctcatagcccagcacttctttaacgtaatggcatatgaattctctggggctcttgttaaaatgcagttctgattctgcagatccaaggtggggctccagactctacatttctaacaagctggtggtgctgtcgctgttggtccggggaccacactttgaataaccactgtggagagcctgcatttaagcctctccaactcaaagcctgcgagggcctagtagagaacgtaaattcagctctagttggtgggagcagaggtgatgtggaggaagcacgtgcatgcaagctgatggggcagccactccttaacctcaaccagcaaggattctagaccagtgtggtcgtatttctgtgtgaaatctcccatttgcaaatattagggtaactcattcaacttttaagaacacttgcagcttgcacgtgaatgttcataatagcattattcataatagtcaaacattagaaacagccccagtgtctatcatctaataaatggggtaataaagcatggcatatccatacagtggaatattatttggcaacagaaaggattgaagtgctgacatatgctgtagcatgaacaaaccttgaaaacatgacactaagtgaagccagacacaaaaggacaaatgttgtatgtttctac

SEQ ID NO: 61746 - DNA, 1048 bp, Homo sapiens
gtttcctcatccgtcattagggttaagagtgctgattcaatgaggccgtggcagtgatcagagataatttcatgtggcatgcataggtcccatgcctgtcacttgggaggtctgtctggcctctgcctgagggcgtgaatccaagtgtgttttcacaggtgtgagtccgacttgggcttgagcccaggagtatgtggctaggggagttcgcgactggtgtgggtcacggttggggaaagggtcacagggctgacttctttggaaggccttggactgagagctccatgaagacagggcattcttcatctgtcttgtttccatatttctggaattttccacagagcctggtgcagagtgggtgctcagtgtaaattaggtgaacaaatgaatattgaggtggtggccagggtcggaggtaagaggtgcggctgtgttcctaggagcaggctttttctttaattttctctcaaccgtctcacggagaggccgcacattcagtggaaagtgtcgttttggagtcagcaaattgggtttaagttctggctccatggctgtgtggccttgagcaggttgcttggcctctctgtacctcagtttgctctcctgttaaatgaaagagctctggagagccaggtcagaaagcgtgtggcacattgtaggtgctcattgaatgctagtgtctccagctccaccagagcagccccctcacatggaagatagaaaaaccaaggctctggccgggcacagtggctcacgcctataatccccacactttgggaggccgaggcgggcgtatcacaaggtcaggagatcgaaaccatcctggctaacacagtgaaaccccgtctctactaaaaatacaaaaaattagccgggcgtggtggcgggcacctatagtcccagctacttgggaggccaaggcaggagaatggcatggaactgggaggtggagcttgcagtgagcggagatcacgccactgcactccagcctgggtgacagagcgagactccgtctcaaaaaaaagaaaaaagaaaaaaaaagaaaaac

SEQ ID NO: 61747 - DNA, 1069 bp, Homo sapiens
cctgctgggtcagagtctgcattttcacaagcttcccccatcacccatgggaaacactggtctaggaatttcttgcttctcagttccccattcccggaggctgcctcttgggccttctttccatagcctacaaggggttcttggcaggaaattcccatctcgttggagaaaatgctgtggcccagccagacccctgccctgctcaactgcctaggagatatgagtgcatcagaattaagctgaagttgggcagaggctctaacagcctctgtcactccaacaacctctgatgagaccatttgttgggagtgcagctgccaccagaatcaacaaggcctttcagacctgggagagggtgcagggaggagtgagggggtaccctcagcctgggctcagtagggctaggggtttcttctgaacaaagggcatttgtaccagatattctccaccttcacccaggaaggcaaaaggttgaaaccgcagttggaatattccaggttagaaataagaagcaacgtcccaactgatcaggagcaagccagccaaggacactgaagactccatccccttaaatgtgtggccagtgtgtgtgaggtcaagaggcagagctggaacggattcccagaggccctctgcccaccgtcctgccctgagaccattttgacttcaaggggccaagggactcacctaaggtcacatagcaaggagccctgggttctgattccctgtgcctggggcccctcttcattgcaggccttcctggaggctggggagtgaccttgatgaccttagcaacctcccttgaagcagcctggaggttttgagcatgtcaatgggaggacgggaggggctggctttgtgagcctagcaactcagtgtgtctcactgtgtcttagccttcatggtacccaagatcattaggaataccccaggggcagaagtcctctgagacagatgcggtgagtcagggacaggaaacctggacccaaggggtccaggtagaggaagcaagtagaggcttgggaggcctgacattgatgaagagcctggggaccagtgctgtgtatcc

SEQ ID NO: 61748 - DNA, 1074 bp, Homo sapiens
agctccctggaggccccatctcatcacattcacggggaaggaatgcaggctctgggccaggaatccagatgtgcaccccctcccctgaaccccacctctgcctcctcagcctgtgagggaagaggggaggggccctgccccacactctgtgctcccaggatagggctgggggaaggcttcaggcactgcagggcggagcatctctttcttggagtgagaagggagggtcgggcagatcgaggcccccacctgatccaatgcttcagtatgacagagtgggcctaccatgccagcccacctacaggatggtccctgacccactgatagacatggttttgggatcctgggaaaagagggtagtagtcattttaagtacagcatgagattatcagtgattttttttcctattagtttttcctattttccaactttttttataatgtggcattacttttattttacgtttgtaatggaaatggaatcctggaaactctggaaatgcatgtagtgttcccctccagatgttggaaactgacgtgtggttgggtggggctgggtcccttcaggaccagtgggaggccaaaatgtgctgtcattcattacattcccaaaccctgctcagaaacggccacaccatgcttcaggttcttgccgcttagagtacggccctggcagagatgcatcagtgcctccagggagctattacaattgcaggctctcagagcagcatcttagcaaggtccccaggtgatctgtgtgcccccatcccagactctgcatacatagtgggagctgacccactgacgactttcctgcagaccccacatctccagtgggtcctgtcctccccctcaatatacacagtaagcaggaggctattggctcccagcagagagtgagtaccctcagcccccctggggttctctggatagaatgaggggcaaacaggcaactgaggatctagttggtccttaagggcatgctcatggcctgtgcagtccatagcctgttgcactttgtccagctgagccccagcacaggggcccccagctcatgtgcacacagccatccaca

SEQ ID NO: 61749 - DNA, 1138 bp, Homo sapiens
cctccagagggtggggtgtcgagctgccaaggagagggcacccgcttagaggcctctggctgcccagggatgcctgtggggccgtccgtgggcaggggactgtggccgcaagatgggggagaggtttttcagggtgtaattagtgcactttctggcacccaccaaacttccccttcctcttgacaatttgctgccaaacagcctgattcctgtggacttgcttaaatcttatccaggggaaaaaaaataaaaataaaaaaaaaagaaagaaagaaaggaagaaaaagaaaaaaatattaagagggttgttatttgtgaaattgtgtttcccagccatgagggtgagtcacaccatttggggcttcaagtttcttgtttggatgaacttttctctgggaggctggggcggatttggagggggagggggccttctggtgtggggaaagtcttcgagtcaagataaggggagaccctggtggttgggaagtccaggtgctccaaggctgggtggggctgggctggttgtacctgaattgcctgggggagcttgaaaaatacagattgggctgcagtaggcgggggcgttgttgtttcacgggcatggagtttcagtttgagaagatgaaaaagttctggagctggacggtggcgatggctgcacaacagcatgaatgctcttaatgccactcaactgtacacttaaaaatcattgaaatggtcaattttgttgtgtatattttgccgcacacctaaaaatacagatttcgggccctcgattccaggtggctgctttggtaggtctgaggtggggcccagaaaactgtttgttataagcttcccaggtcattcaatacaggttggggcacactcatgtaatctgtaaaatgggatagtgactcatagagttgtgggcagaatcagctatctgaatacgtgtaaaatttccagtgctggggtcacagtaagagcttggtctgtgtcactgttatcctgtgatgtggtttttatcagaactctcccccatgccgtggaaggttgacccccattggctcccacagctccagggacgggggaccctctgcttctcaaggtggactgctccatcttggattcatctgagagctggagtgcccatcag

SEQ ID NO: 61750 - DNA, 1056 bp, Homo sapiens
gccctctcttctccctctgggctgccctctgcagcttctaccctcctgccctaactcctgctacccctcacctgctgtgcctacctactgtcctgcagggaaggaagaaaagagaagaagtccctcttgtcaggcttgctccggggagaactggagtcagccttggaaatctctgtctctgcaccccgtattctgcagcagaaccaccatgcccagggcctgcacccctcatgcagcgcagagacactggtccttcatcttgccagggccgaggggcctagcatatgatgtcacagggcctctgtgccaagtagagtggtccgcacctggcattttcctctgactccccttcctataggggaggtcaagccttggaggccatgtagaggctgaaatataacagggcaacacgtgctggctgcgttaccttgggcaaatcgctcagcctctctgagcctcagtttctagctctataaaatggggccaataatgcccatttgaatagtattcttgccaggtaagaggggactaagaaaggtaaaagatttagtcaaatatatgacacaccgcatgatcagagtaaaccacaggccgagcacggtgactcatgcctgtaatcccagcattttgggaggctgaggcaggcagatcccttgagcccaggagtttgagacctgcctgggcaacatggtgaaacctcatctctacaaataataaatacaaaaaatcagccagccgtggtgccatgtacctgttgtcttagctacttgagaggctgaggtgggagaatcacctgagcccaggaagtctaggctgcagtgagctgtgattgtgccactgcactccagcctgggtgacagagtaagaacagtaagaccctgtctcaaaaaaaaagtaaactataacgtcttcccaccttcctttccccaacagccaagcaaaaaccttggagaagttccagcactgggcaggagtgtgatgcatggtcccccagatgcggtgtgagggtcacatccttcctgctacctgctggggtcactgacctagggaggaaag

SEQ ID NO: 61751 - DNA, 1068 bp, Homo sapiens
gtagaggcggcggcggcggcggcggcggcgggctcggaggcagcggttgggctcgcggcgagcggacggggtcgagtcagtgccgtttgcgccagttggaatcgaagcctcttaaaatggcagatgatttggacttcgagacaggagatgcaggggcctcagccaccttcccaatgcagtgctcagcattacgtaagaatggctttgtggtgctcaaaggctggccatgtaagatcgtggagatgtctgcttcgaagactggcaagcacggccacgccaaggtccatctggttggtattgacatctttactgggaagaaatatgaagatatctgcccgtcaactcataatatggatgtccccaacatcaaaaggaatgacttccagctgattggcatccaggatgggtacctatcactgctccaggacagcggggaggtaccagaggaccttcgtctccctgagggagaccttggcaaggagattgagcagaagtacgactgtggagaagagatcctgatcacggtgctgtctgccatgacagaggaggcagctgttgcaatcaaggccatggcaaaataactggctcccaaggtggcagtggtggcagcagtgatcctccgaacctgcagaggccccctcccccagcctggcctggctctggcctggtcctaggttggactcctcctacacaatttatttgacgttttattttggttttccccaccccctcaatctgtcagggagcccctgcccttcacctagctcccttggccaggagcgagcgaagccatggccttggtgaagctgccctcctcttctcccctcacactacagccctggtgggggagaagggggtgggtgctgcttgtggtttagtcttttttttttttttaaattcaatctggaatcagaaagcggtggattctggcaaatggtccttgtgccctccccactcatccttggtctggtcccctgttgcccatagccctttaccctgagcaccacccaacagactggggaccagccccctcgcctgcctgtgtctctccccaaacccctttagatg

SEQ ID NO: 61752 - DNA, 1032 bp, Homo sapiens
gagccctggagatgaagagccgatccgaagctgccatgtagaggaaagcatctaacaggccagaggccccatgatgatgtcgaatgcccatcgggcacccagctgagccctgcaggtgttaactcagtcttcgtcacagcagtctaggcatacactcaccattagcccatttgtaagctgaggaaacaagcctaaggagggtgaaagccttgccccagggcacataccggtcctgctggtttcagagcgggcttttcacctctgtttcttcctgtcctcttgtggactggtatctgtgtttaccatgacccagccccatgtccctccagcctcttatcctgcttctccctgccttttacagacttgtaatagcaaacagccaaaccccctcccgccagtgccttcgcattactgaaatctcagagctccctatggtcacctctgtcatgggctcagcatggtgtcccacaacagtctgtccttgtctgtcctcctgctccatgatggtgaacttgggagggcagagcctgcctgggctctcccagcctccttaataccccacagagggtcttgggagtgtttggggaactccaccttcctccctgggaagaggggaaggtttcccctcctctgccagtgggatagggggagactttcctcctggtgttttcatgtggtctgtggtgtcccgaggctcgaggctcgaggctttactgggcctccctttctgaccacctgggagctctcatctctgcctttccccgtgtggtgggggactggcagggggctaaagggcttggtgttgctttcaggtggtggtccctggggaggtgctgcctaccctcctccgcccagcatgccccccatcgggctggataacgtggccacctatgcggggcagttcaaccaggactatctctcgggaatggtgagtccagctctcctgctgaggcagccctggggccacacctgcgtggccagaggaatcaaagctgctggcctctggggctccagagttgtctatgtgtgtgt

SEQ ID NO: 61753 - DNA, 1089 bp, Homo sapiens
accttttgactactgtgaatgaggctgctatgaacatgggtatacaaatgtctgttggagtccctgctttcatttcctttaggtatataggttgagtatcccaaatctgaaatgttccaaagtccgaaactttgtgagctccaacatgacgctcaaaggaagtgctcattgaagcattttggattttggatttttggattttggatacacaatggtaagtatgatgccagtattccaaaatctgaagtcatctggtctgaagaccacaatgtctgaaacattgctgatcccacacattttgaatgagaggtactcggcctgtatgcccaggagtgagattgctggatcgtatggtagttctatgtttaattttttgaggaatctccatactgttttccatagtggctgcactattttaccacatggtttttttatctttacagttttatctcagggtcttttggatctcatggtgctaaaatgaaggtgttggcagggttgtgtctttgtctggtggccctagaggtgaatgcttccttgccctttccagctttagaggccatttgagttccgtggcacttggcccttttcctccatgggtggaatccctctcatgcttggactctgtccttcttattcttccttttcatccttaacccagcaacaaaggctctctgctttgaaggacgcttctcactggattgggcccacccggataatctaggctagtctccccatttcatggcgggtaaccctaatcacctcaggacagtcccttttgccacctaaagtaacgcattcacaggtaccggggatgtctttgagggacctaatcagagaagctgatggtagctgagtttcaggctctgaaaagccctccctctacccctccccttaccagcattttcctgaggccccgggaccctaagggttggctggacactcccctcactgtgtgggctgggctggtcccctggcgggagcctgacacctgagtttagtgtgtgcccaggatctgtgacccttttctccctctcgaaatgtcagagcctggcttctttggccactaggcgtgttggtcacagagtg

SEQ ID NO: 61754 - DNA, 1098 bp, Homo sapiens
tagttcctggcatgtgggtggggagttgaatgcttaacagcacctgtgtaggctttttgtttagtgcctgggaaaatatggtcagggttggtggagtgctgccctgaggctggctggctggcttcggtgacttaatggcacctgtgaccagcaagggcaggacattggggctctggagtgcacgcccagggcccccacccccttctcagtagagctggagatgttcatactcccactcacatcacttaaggtcctgccttgaggtgggggagagaggggaatgtcctagatgtgtcctccctgcccccagaattcctggggcctacgtaatagaggctaccgaaacaggtgccacccagagagtgaaagaaatgagtcagagtccaccggggttcctgccagtattcagtatgtgtcaagggcctcacagtgccagccctgtggcaggtggtggtgggggacaggaagagaggcctgtcctacagcctgtagcactgatgctctcatggggaggcctagaaaaaaagtgtctggctctggcacttgggtgtgtgacctttgcatgtcaagagtcagctcagccttcgttcccttgcttataaaatgaggatgataatacctatccaataggagcattgtggaggttaatgaggtaatatatagggatgtaatatatgtatctatcctaggagttagaaaaaggagagcttattagaacattagagaacatggaaaacattttaggacaagtgctgtgagagttccaagaagagtgagcattgtggataggagatcagggtgggcttcctgaaagagatatggtatggtttggctgtgtccccacccaaatctcgaattccctcgtgttgtagaagagacttggtgggaggtaactgaatggggcaggtctttcctgtgctattctcgtgatagtgaataagtctcacaagatctgatgcttttataaagggaaatttccctgcacaaactctcttctcttgtctgctgccatgtgagacgtgcctttcaccttcagccatgattgtgaggcctccccagccacgtggaactgtgagtccattaaacctctttcttttg

SEQ ID NO: 61755 - DNA, 1057 bp, Homo sapiens
cacttaaaaaagtttatcttggctgggcgcggtagctcacgcctgtaatcccagcactttaggaggccgaggcgggcagatcacgaggtcaggagatagagaccatcctggctaacacggtgaaatcccgcctctactaaaaatataaaaaattatccaggcgtggtagcgggcgcctatagtcccagctactcgggaggctgaggcaggagaatggcatgaacccgggaggcggagcttgcagtggagccgagatcgtgccactgcactccagcctggacgacagatcaagacttggtctcaaaaaaaaaaaaaaaaaaagtttatcttgaagatggaatcttcgtaaataaaatttgtttctcttataatcagaacgtggttgagggtggatggaggttgacagaaggcaatgataacagcaacaaacctaattgcatggtttctgtctttggtagaggaattctgactgttgacataccagatatacttgattttattctttgcatcttgcttattacttattatacttgcatgcattcctttcctgatttttgctgttgggttaagtttctcatcgtcatcttccccacgccacctgtattacgtttcaggtttggttgtgaatgaagagaggagccccgtctctctctctctctctctctcactcactctctcactctttcttgaaaaatcagggtcgaggttaagtgtgtgttccatgagattgtcttggcaccaggctccttatggactgttgtccctagcattctcaagggctgtggttttcaaacttgagcatgtataagaacaatctggaaggcttgttaaagcatagattcttggactgcaccctgaatcattctaatttaggaggtctgtgatgggacctgagcacgttaattgcttacaggctcccatattgtataatgccgccgggccacatgttgggtagcaccgtctaggtgcctcccttaactgcatggcccaagacagctcactttcacatccccatggcaggccctcctagctgctaggggtctggaaagcagtcctt

SEQ ID NO: 61756 - DNA, 1172 bp, Homo sapiens
taccattgcagtttatttgtaaggaactctccccagtgtttgagggaatgcgggagccatcccaggtgctgtgcgtgccttcgccccttccccaaccttgatccccagtttcaggaagggattcctggacttgtatctcccatgggtgcaggccaggcccttaagacttaggtaaaatggtctgttggtttaaaggagacacgcgaagtttgttacctagagactttggaggggaaaagttaagccagccagtgctagcccaagctggaaacagtcagcccggggcatttctgtctctgccctccaatccttgacctctctgtagagattcggcgtttgtggtagctctcccctctgttctctgcgctgggcatggagtggagctgtgaggccgagcccctgccctgccctgccctgccctgcccacgcaacagggactaggtttgcagggcagggcctggtatgctcacccttcactggctctcattgctttcctcattccttttatgcggcagtcaattgttggggattccaggggattaacagggcccctttcctcaaggcattctttgtgctgcaaggtgttccctgataagagaggccaggtgaggtgccagggcagtttgttgccctggcattgggtgcccactacttcaggctcctgcataccttgctatcttttctttgactattgtctgtgctttggtttttcatctgtaaaatgggggtaatagtaatccctgcctcacaggcttgtgagattcagtgcattcatttatttaataacaatacagagctcaggtacggaccagtcagaacaggtggtgactgctgcaccacacttgtgtatcccagatgggtgtcacccacattagccataaagtgtgtgaggcaggcctgggtcataaataatcaggtgtaagggtcaataaatagtagcagtggaaggttcagctaaagttgaaatgcacttctcctgaaccgtctttctggcttagctcatgctaagctcatgctctctgtcttactggaatgccctccctcccctgtctggcctagcattctccaccctcctgggagccatccgggtgcctgctcccagcaggagggacgggatatgctctgagctcactcagcccttctggcactgactcggttctcatctctcgcct

SEQ ID NO: 61757 - DNA, 1063 bp, Homo sapiens
gaaggtaattaaggaagcattcccattttactgatgcaaaacagttccttgtccaggtttatacagcttgcaagaattaaagttagatattattcttggtgtgggcctttcctatatccccgtcttttataagagcatgtcatttagttgagaccttctgcattacttctgaaggggtacaaaagacatttctgatgattttctcatctcgtgtcatttaaatggtgctcagaaagtttggataggactggaactctagggctcaagccccaggctctgtccctatctaagcaatagggcagctgtcctgccagttgggttcttgcttctttgtgaaatgttgagcagaagctccaagtctctctgctgtggcttgtgtggcaagaaccatcctgaggttctgtgcagagagccagcctcacctttgagctcagtggcctctggcacagggaaattacagctgggcagtgtcctttgccttctctggcactgctagtgcaggaggcagtgttagctgctacaggaatagcatggagcgggcctgcaggccagaggggctgagacaagccagtgttcccaccagacctagaacgttcaccagaaagcaggcctgcagtgacacagctgcagaagttcactattttgtgcctgtcctgcttcagatatcctgtctttataggggcacgagtgaatctgagccctgcaaaagagagaaagataatgctgctttgccgttttctagtgcgttaccgcattaaaaattgctcttcttatataatctttatgacaactctttaaagtgcccttgtttttaagaagacactgaggttcagagggataaaataactctcagagtcaaagagagaaaacccaggattattggcttttagcccagtgtcttctgtggtattgccttgccttcctatccacacccatataacttgatgaagccggagttctgagcccagacaggaggctgtgcaagtgagattagaatggcttgctctttgaggggtggggggccctacagcttgaggaaacaagaggacataatcagctactg

SEQ ID NO: 61758 - DNA, 1047 bp, Homo sapiens
tttttcttactctagaaaataaatgaaaaattaaatgtagttgcaaccatacaacagcatatttgtattggagatgagtagactgcatttaaaaggatttttgctcattctttaattctgacaccaaatgtgaaaaaaggattgagttcttaatgttgaagctttaccatgactcatgcagtttccctcattcatctagcacacagttcctgagagtcaagggtatctgcatctcagctcagctgcattctccccattgtcccccttcaaatctttccacctggtatttagcacctgttttatacccagccatgttctaggcactgagggttccaagaaatggaagacatagtttctaactattagaaacatttgggaatgtaagagacaacactcaacttagtggtaacatgcagactcagtacagaaaatgtcaccaaacagggaagataggatatgcacagagaagcagggctttacttcagggtggactagccagggagatctttttagaacggggatacctttccagagggtagggttgagctgaagagagaaggaaggttatggctagaggagcgtgtgtctgctgggcccttgtgttagtttggtctagtgcagggaaggggctgggagatgatgtaggagagaagcattgtgggcaggaggagaggatgtgtttgggtatggctgctcccaagctgtggttaggacagccataacaggagccttgcctctgctttccactggagaagacaaggagcctgggctgcagagggaacctgacaccctatgtggaggcccacagccagctgggacagatgtccctgaacccttgtgtcttctacaggaagctgcggatctgtcctccctgaaaagcatgttggaccagctgggcgtccccctctatgcagtggtaaaggagcacatcaggactgaagtgaaggatttccagccttatttcaaaggagaaatcttcctggatgaaaaggtgtgtgtgatgggaggcttttagacacagactgctggggattgtgctcagctgtg

SEQ ID NO: 61759 - DNA, 1049 bp, Homo sapiens
tgctgcctgtctctgccctgccgtgtcagtccttggatatcttgcatgttccatccgctacctggatgtggcctgtaggggcagccacctttcctagaagcaggagcaggtagcgatacccaggcaggcctggtcctccccacttttgtgggactcggggattgagcttgcaggcataggggtgtagaaagcagtggtagcgaggtgactgaaggtggactcccactggggatgggattgagtgtggggctagatccctggtctgtagaagggagtaggaaccctgttagttaaattttccccctcaggccacgttagtaggattttgaagagtcagccacactgtggctcttgattttgtgcctggtcacctgcttggtctctggtgatttccctcggggccagcagacactgttggaggtggtgaggcctcaggttcttctgcttcatggttaactcactctgcttaggcatatttccaccttttccagggcctccgtttttctgccagtggattgagaggtggtggtggtctccagcagtggtctcactcttggcaggctatcagagtacccagggagctgcgtagaatgaagttttgagagtctttggtctaggtgaatgccagcgtttcagtttgcttatcttccattatagtagtgtcctctgtaactgtgaatcagggaggttattcataatatctccacatccattttctcccttaattgcgtatgcttttgatttagacagggcaagtagccattttggtggagcgcaggccctggcaggggggcagtgtccagtgccgctctcaattaaacgtgaagatgtgaagatgaataacactgtccagcttgcagagtggacggtggtgaggcaagctttcaagttgcacctactttctagttgagtgacctacacaagtctttgattttttttttttttcttcctggaaaaaaaaagttgtctacttttctcatctgtaaagtgagaagaatcaagtctgccttttctgtctcacggggttgcagtgaagcattagtaccctg

SEQ ID NO: 61760 - DNA, 1154 bp, Homo sapiens
tggcatttgggagagctggagttgggctgtcctgcatgggtaaggtttggggagggactggaacaaggggctagtgaaccttctctgggtttttcctgcctgactatgcgttgacagtcccagctgttgggcctgtgctcctgtacactgcacggccttgagaggagttcggagccctaacatccaggagagaggccccacagcagtggaaggaaatgggcctctcccgaatctcttgtttgtaccccgaggtctgagtggtgatcctggggatgctatgggactctcagcagtaggagtgtgtctgtccccagtctgggtgcccaccagctgtgctgagggtcctctcctgtgtccctgggccaggcagacagggtctttttctggggcttgttaggggaggtcagccacagccccagaccaagtaatttacacaccctgagtgaggggtgggagcagtgggtccaggaagacttagggagctggtgaaagaaaaacttaattctgacacttgttaaactggtaaggtagactgtatcaggactattacgatagatgtaggaattatcgcaatggattttgcagtagaggggagagagtgggccaactccaaatacaacaaagaaaagtgggaacttatagccaaggagcggagtgtgggggctcctgaaaatttctaagagggtagggaaatttttactaaacttagctaactgaattcttgctgcaggcaggccagggtgatcaggttttacctgggagatagtacaggatgagaaatacgttcagatatccagggtgattagatattgaggttgggggattctggttaacaggagttttgctaaaactaggctcttagagagaatggagttaggaaccctaggtcaggaccagatgagtagagggctcagaggaataaagtttggtgagggacagaatctctgtcagtatcccgtggttggcagtgtcctgtccattcttcttgcactggcctgtccctcaggagacaggtgtgagtggtcctgagcttgggccagtgtaagagtaggggacaggtttctctccttgtaggtgtcccttcttgtaagtgtcactctctttttttccagaaaccttggtccttttcagcatctgctggccccttgtccctt

SEQ ID NO: 61761 - DNA, 1030 bp, Homo sapiens
ccctgtggtctgggcggtctttgagcttgaggtcattaggaggtgtttatttctgtccgccctggtggcctagggcgtaggaatggggtgggatgggatgggatggggtggggtggggtggaggagttattctacatagatagagttctgtttatgcagcactccctgccatacacatctctcactcaaatggtctggccagtcctggttctaatggtcattgtgtcattcccctcagcagcaggaaaggctggaatggtttttgtattgttccttagggggaaaaatcacttggaggaagtatatcagtgcttctgagtgcagagtatttattgacacgtcagttaaaggaagcttttaaacaacatatatgtatctctttagtgaggaataaatctacaagtgcatctcacagctccattttgcagcttccatttcctggaaggtacatggagtttagtggttagggaatggggttttgagctgggattttggagaaactgtttttagcctgtccttggaattgggccaggcctagaaatctgttgaaatagctttctttagttgctgaaactgggatgtgttcatagcactaggacctcgagctccactgatgactgagtggggagggctcagagaagggtccctgtggatgcccgggatgcctgggtttcagtcccgtctcctgcatcgcctacattgcctgaatcttagggtcttacagatttatcatgaagtgggcttggcagcagatggtctggtttcttttgtgcctttgtcagaatctgttcttgctcttcttaggaaaactttctatttcaggacttggggtggagtcgaaagcagggagccctgtgagttggtgagtctgtatccctgaggctgccactgcctgaccccctccttccccttgtttcgtttcccctccccattactctgccttgttctagggaaacaccagaagctgcctgcagacagctacgggtaaaattgtgtgtccagccacaaactttaggcattttaaatatta

SEQ ID NO: 61762 - DNA, 1002 bp, Homo sapiens
tgttctcagattctagtttctgcctctgtcaagatcccccttcgcccttctcaagtccctgtgcttgcctggaacacctctgggtaagagttctgagcagctgggcaaggagcaggagtggccggtgccaggcttgtcggccacctgcccactgctttggggagtgagttctgccgagtcttcccggcccagctgtgcccttgggtgggggccaggcacgtgcctgggttgctattagtctcccaggccccccacttgctttgtgcctcagtgctcagcccagtgctcccgttcctcacgcgagcactcagctgctgaaaagcctgtgtgctggcagctcagcctgcagccacccccgctgcaggagccacagccattttcctttgttctgccatctccgggctcttgaatctcaggctggcagtgggcagcaggcagccagcacacagcgctggtggggtggaaacccttgtgacatgaatctgcccactgagccaaaggcatggcagccccctggctgcacccctaattcctctggctgtacccctatctcccagccatgctgagagaagcacagagtatcccctcttactggatcagaaagatagtgacacctacagtgggaacagagagaggtctcacctgttttgggccactgaggtgcacactaaagagagagagagttagcctccgggtctttggcagaaaaagccactctcaggcacaaaggatgctcgttcttaatctcctggtctttgttgaaaacagaggcaggattggttaagaatattttttattttggtccttatggttgtgaggacctttctctaactgaggggaactgtaccctgcttcttcacatctgaatctctcccttctctcccccaccactttttggtgggcaaaatgagcattctcttttggggtacaatttcagctatgtgtggggttgcaggcggggtgaaggccactctcacccgctgtctgacttctctatctgag

SEQ ID NO: 61763 - DNA, 1057 bp, Homo sapiens
ctttctgggaaaaacacaatggatgtagaggctgggatttgaattcgggcttactgggtgaccttggtgggtcacttcctggggtgtagattcttactagaaaatggaagtgttgctcagaggaactttgggaacattttagctgtaacccttggagttctattaatctaactccaaaatggttctattaatctaactccactacctggaatctctcttgccaactcaggatcctttggaagaaaatgtcatcagatggaattaacaaagagcccctcttttcctgggcatttcttcctcaggttcttgaggggtggtgatgatcacctcaaaagatgcctgtagttttcaagtggaaaccgagccaccctgagcccaaacacacactcccagtgttcaggcgctgagtgtggcccctggagttcactgatgagtagtcttaccttggacctcgccttggcttttcttggaaatggcacattacttttgtttattagtgtagcccctctgttgtgaagtggaatccagggagagggaagtaaagcttttaattttacctcttgccaaagtgaggccaagctcttaaatgtaaaaacaaacttgttaaaagtaaaaatgaaaacaatatccccattcctcttctttgggggtggagactgtgtttaaattttgcctctattttgtcaacaggttctaggagacaaaatgttcttttcctggtgacctttcaggctgggtttctgccctttatgtgcctttcctggcccagcctccatcctctgggcccgcccacccaaaccagcactgcctaccaggcccccctgtgcctgttgcccgtctgacttcctcccattgtcttcggggccagcctgtgtcactgctctaggctgtgtttctgccggcacgaacacaggagggcggtggtcttggaagaggcaggtctctatcatttggttagagtagcttttacagctgagaaatgggaataaaaataatctgtgaggatccattgggatgcaacaaaatcccaaacaaatcccaaaattaaagcattcct

SEQ ID NO: 61764 - DNA, 1137 bp, Homo sapiens
tttgtctccacggcctcattctcggtgtcttacatgcagcagtgccctgaacatgtagaaacaagtctttaggtgtttgtctcccacagcaaaagtcttttcaccccatgggcttggcaggcgagcctgtgcactgatggattgctgggtggtttgcttcaaccttgctgatctagggaggccacagggcccagcccagtcctcctgaggtctggaggcacagcaccttggactccctgggttcttgttcacattgggaatactagtgtagactgggcccagactctccacgtttgtttgcaactagctgaggaagaggctctgatgtgctcttaccaggggcatataaaaggattctgtgtatagacatttcatgtagacttagattttcagaaacaggcctgtcatgatgatcagggtatgggtataggacacgtgcactatgcctgctttggcctagcatcctcccttgagtgggcagcttcaccttcaatggcagagggaagtaggttgggacatcaacttggaagtcaaggtgccaggcctccttttgcctagccatttgagaagtgggggtggggtgggtagcaggtgtggggtgagtggcaggtgtgggtgaccaggccctgcctcacctaggtgggcaggtgttgccctgaggctgctggtgcagttgaatgagctgcctgatgaatcattctgaaaatctctcatgggtgctgggcgtggtggctcatgcctgtgatcctagcactttgggagcccgaggcagtaggatggcttaagcaggagtttgagaccagcctgggcaacatagggagaccccatctccctatgtagctgggactgcaggtgtgcactgaggtaggaggatcacttgagcccaggaggtcaaggctgcagtgagctgtgacggtgccactgcactccagcctgggtcacagagtgaggccctgtctcaaaaacgtaaaagtgaaaatctccaatggggcccaaggcctgaatgttttgtttgctttttttttgttcctccaagaaggaccacaaactctatgtttcagttacttgaagccagttattttgtagtatctcccttaatttaagtttgtttgttgtttcctcatggttagctgcaag

SEQ ID NO: 61765 - DNA, 1050 bp, Homo sapiens
atgaattcttattttattcaatgagttaaaatccgttgttattattgtttattttgccgctcagattgttccagatttggccagtgggggctttttcaagctgctgtgaatgacagctcttcaaaacatgcatttccaagtctatcacagttctgttgaactagttgccatatgattctggaggcagctcctgagccgttctgctgtcctgtggagcatggcgtcagtcacagtaggcccatggtttttagtgtgcaccttgtgaagccttcctttcccccagccacctgaagataaaagtgtcctgctctgcctgcttccatgttgggtttctgggtcagagtttctttgaacaaagcctcctgtagcttaaaaaataataaaaatagtaagcttggaagtcactggactaggtgacctccattccaggcccagtgcttctcccactgaggactcccctgactcaaatccacccactctgctgctttcctgatgacagcactgaggtagacagaggcctcctctcaccaggttaatgaggaggcccctcggtgtcctgaaacttggcaggttttgggttgtgagtttttggtggtggaaattcacagtgtttcagtcactaagatcagggtttttacaggatgccaggcactgagaccctcagaccctttggagagcctggtggagctcagagctggggcccagcctctcctgcacctgcatgtggaggccatccagggctggcggtcaggggcttgatggccttggaagctgggggcccaccttccccacactgtgccagggcagtgtttgtcaccctgtgataaaggaggggatccagcccccctgacgttgtgcagctgtgtagtgacttcccacagtaaagagtcaaacttcttcactccagtgagcggttgctgccaccatgatgggttttttttttttttttaaattaaagtttttttttttcttttttgttggaaaccacaggttcacatgccacggtgtctgattttgcagtgtttctggtggcccctggatttggcgttt

SEQ ID NO: 61766 - DNA, 1119 bp, Homo sapiens
cagggacaggcattctgtggaggtgacttgtgggctgaaaacttgagtactaatgaagaggcagccaagcaggagtctggggaagaatgctccagatagacagaatggcagctgcaaagggcctgaggcaggaatgagctttgtgtgtgcaaaggacaaacagaaggccatgtggctggagctgagtaagtgggagaagggacacaggtggggacagaggcatgcaggattcaggtcacaaaggatcatacaggtctcaataaatagttggaattactttctactgctttaaataattattggaaggcttgtaagttgggtggtgtgatctgattttgtagtgactgcagagtgaggggatggatggtggtaccaggttctgagatgggatttggggtagaaggggtacatttaagttatctcatagccagcctcagggagatactatttcctttgtcgttgactgtcctggagatggaagtcttggccaaccaccatcagaggaagggctggaccagatgagagcatggaagatgggtgtgttgactgagaagaggagaggtctgaatattgagccctaggatgctagaggttgggtcgaggaagaaaacccactcccaagttggctgagagcgagtggcctgtggtaaagggaagaccaggagattgtgtattgtagaagcctttaaagtagaaaggcacagtcaaccatggtgcagggaggtgaagaaggatgaggacaggacattggtaatggcttagacaaagtggaggttgttgatgttgacgggaccactgtgagctctgggtaggggatctgggcgggtggatagaaacccagctggagtcggctgaggagccaatgagaagtaaagaagtgaaggggatgactcttgacagttcttccaaggatgcttgccttaaagaggagaagaaaaatttggacactggctggagatggtcaagggattaagggagatatagcatgtgtttattgccagtgggattggtccagggagaggcagacattgattctgtgcaggagggcctggggacatgatcatgcacagagtctttgaaaaccattaaacatagtttatgaatatctgtgtgggggta

SEQ ID NO: 61767 - DNA, 1054 bp, Homo sapiens
ttggttagtgggtacagaagatctcactttgatgtgcagaggaagggaagctgggagaggcgtacactggaggagtggcatctggctctttgtctttgttcatttataccccccactggttccacaaagcacttggacttttctaagtttgccgagtgaatcctctagagggatgattccgataatgtctgcaactccagggttggtttccaacacaagcattggctttaatctgcatgcagaggttggatgaagtccttgcctggatctgcttcagagatggattaaaagtgaagaactgagaccctttctaaatagactgtaggcctgtgttacacaggaaagtcctttgcttgcctttagtttaaaaaaattttttttaaatgacattctgccattggctttctcagtgacttgggtctgtttgagcctacccttgtaaaatgtgtgaattcacctctgcgcagcctgtttctgagtgagatgagagccatggacatctgtgctctgtgaccagcatggcttaaggcctattccttcaaagtcacagatgcctcctgtgagtagggcgaacatgtaatctgtggttcaacttttgacagtaagagaattttgagagagtcttgcgaattttgccagaacaacaggtgtaccccaggcctctcctgtgcaaacctgggcatgtggccaccctgcacaagaaagggaagacaagcccaaggtggaaagatcaactctcttcccttacctctgtgtagggcatctttgcaggtggggtcttattctcttcctctgacttttattatgctcctctttatagaggacttgccacctcccaggatagtctgctgttcctgggctcttctgactgatggaaaattgcccttatttgagctgaactctgctcctttgatatcagaccccaaggcctgatccctagatcttcagacaaatgatttcttcatttccatctcagtaatgcagtcaaaagggaaaagtctagtgttttaataatgtatatagtgtatttttgttttcactgctgggaagatgt

SEQ ID NO: 61768 - DNA, 1047 bp, Homo sapiens
tttcatatcctgtgagtagtatccttgcagtcttaagatacgcattttcacatcagcatctgctaatatagaacatctactaatatagaacattccaggttgcaacattatctttccaattgtatttttagaaattcccatattggacatttaggttgtttccaatttttttgctatcctagataaggatgcagtgattagtttatgtaatacgcattcttccctttagggaagggagggaaattatttgctgagatagattcccaggagagattaattgggtcacaaggtgtgtacattgttttgacctgcctgaacatacagtcaaaatcacatccccagaacgactgccccaattcataggaagttgactgtcttttggcactgtgtgtgtgtgtgtgtgtgtgtgtgtgtgtgtgtgtgtgtgtatgtacatgtgtgtatttcatcatttaggcttgccaaggcagagggcagggattgcttaatcagaaactccactagaacttaaggagtggcctgtggtgctgatgcctgcatggcctcagcccctgatttccccaacttaggcaagtgtgaggctgggaccaccagttgggattactgaggaagggatgttcaaggtgctctgagattattgcctggcacacaggactgttaaatgcttgcacgtactttcaagtcttaagtagtttggtgtgcttgtataactctgcctccttggctggtaaataatcagcatggcatagtctacaggagtgatttttcttgtttgtactttttttctttaatggaaatcctttttataatgatcacttctgttgatgtctgatttagatagaataacatttattcatttcaactgtacagttcagtgacagctgtacatgccacataatcaccatcatcacaatgaagatataaaacattcccatcaccccagaaactttccttgtgcccctacagtcatgcctgccccaccctaccccttccctgggtgatggttgttctgcctcctgttgctataaattaaactctttggtatct

SEQ ID NO: 61769 - DNA, 1079 bp, Homo sapiens
tgtctcctcccacctccaggctgacttcaagagtttctccttttattctggattatagcaattttatacatgctggtatagttgtctttgtgtttattctgtttggggttcattgggcctttgagatttgtgggtttatagttttcatcagatttggaatattttagccattatgttttcaaacgcacaccctttttctccccttccctgtcccatttccctaggacattgtttatctagggcacagaggctcggtttagttttttattttgttgagtgttttaccattctcctttagtttccatagctttgtcttcagctttactgatcttttcttccatactgtctcattggctgttaaacccatctagtgaagtcttcaattctaatattgtagtttctatttctagtcgttacatttaggtattttttatgtctccaatttctttccttatcttatttatattttcctttaaattcctgaacatatttgcaatacttgttttgaagttgttgggatttcatcttctttgtcattcttgtgtcttctatttactgaattttttctcttatagctcacttctttccttttcttgcctatctagtaacttttgattggatattagttatagtttttctactaagtattcttccctaacagtattaagtcttttgtgtctgacatctttcatttaatatcatatgtgagattcattcatgcagttatacgtagttgtagatcatttattcttgttgtgtaatattctattgtggggatatataatttgtgttatttacagttttaggctattaagacctgttacagtgatataaaaacataccagtgttggagacctgagtatagggtatcccaggctttgtgtggctgagcaggatgacatcccatctttcctctccaggtccagatggttttagtgtgatagtttacagctgagcttttcagactatggcttgcaggccaaacctggccttccgcctgtttttacacatacaattttattggaacacagccacacccattcatttatgtattatctatggctgctttcccattataa

SEQ ID NO: 61770 - DNA, 1042 bp, Homo sapiens
tgtcataaggaagccgagccctagcatcccttctggctcccagaccttccgaactcccactgacaagtggcttggttcaggctttcaacacaggacagataactgcagctcctcccttggcccactgggctctcaggccaggttgggtctggggtctgcaccctctggtcctttttggcttcaaattctattcaatcgtcagcatttcaagtggccacaagcatctctgttgtttcctgaatgccccaggcctggattcaggatttcttattctggagagtaccaggaccctggggtttccgtctggtgtaatttataatggcaaaactcagccagtgggaggtgcatgggtccttgctgcttattttgctgattgacagactgaggcccaggagagggatggcttcctcgagaccctgactctgtgagttagggacaaagctgagactcagtcctggcttcctccactctctgctgttttctttccatcatcctttcctacctcacttgaaaagcctccagaaggccgtatttccctaagctctgcttcactgttgtctccagaagcccagtaaaacaggtgcctctggaaagcacttggtcttaggacagaagctggtgctggaagtaattgggggtggggtacagaacaccagtgtcaagagaaggagactctgtcttcaggacagcagatgcttgtggcatatccttgaacgcccctcacatctctgctctgtctgccgtgcgggagggcatggccaccttgagactggctctgtgcctggagtaagcatgtcacgtaggatcttccttcaatctttacaaccttcctgtgacctaggaaagataatccctgttttgtagagaacataggctcagagaaggtcttggactcgcatgaggccctgtcactaggtagctacaaagcagagactggacccagggccggctttgttcaggggaagaggctctgtgaatgtcaggctgagtcagcgtgtggattgtgcaagacccggaggccagcagggcagagcctgagagc

SEQ ID NO: 61771 - DNA, 1018 bp, Homo sapiens
gaggaggctcagccctggccagtgaatggcctgggccactggatagctgcttatctgtgcctggagtctatctccagggctggagagctggggtgtgtggcagagatgctgggctgtttccccctgtcctcaccctgtggtggtgcctggtcctatgcagtctcatcctgtgttgggaacctctgaggggacctgggtcagccctcccaaggggtgatgtcttcgtatacaccagatagtgcactgaaatgagttcagggttgcagaaaggggaagaagcagcacagcctgatgtctgtgacccatagtctctccagggtggagtccgctctgagatcttttcctcttccttccctggggcatagggtcatctgaggttgaaggagtttgtccagatattcaggaaggtaggttcaggttatctgtcatctgcggggcctgaggggccatgtgggatgtgagctaggagcatgccctacctggcagtgtggactttgctctgtgaagcatgttcacagtgctggtttccaacctaacttccttctctctttcctctgccccgcttagttggctggagttgtcttccttggagtcgggctgtgggcatggagcgaaaaggtaggtgtaactgtcgcaggacactgagcttcaggcagccaaaaccagattcgttggacttcattttccctcctccaatctgttccctgacaacaagcatttcttgtgcagtgtcaaggtgtataattgtcaatctttacagacacagctcttgcgtactctgcccacatgatagtattggctgctggaggtatgggctgggctggttgggttttgagccctgtggatgtggagagctcagctcttgtatgcagctgtgcccagagcaggcttgggcaatccagcttcctgaccctgtctgtgcctctgggagcaagcgggcaggtccctgaatacaggcatgcttattgtggaagcccttatcctccaggatgagaaagagcaggcagcagggagcggg

SEQ ID NO: 61772 - DNA, 1059 bp, Homo sapiens
cccaggatgccaccctggagggtccaggtggaactgctggggtaggacagccattcattcctgtgataggggtctcctccttgtccagggaggagggctgcttcatagcaagtgattgacacattggcttggagctttctcacactttttcacgcatttgagtgttatcagcaatgcagtgacatgggtagggataaatagcccctttttacagatgaagcgaagttgtgcagagtcacccagctaactctaagtgtggggttctggggccccgatgtgggactctcaggtgcagagcccacgctctgctgaggatggtggttctgggtcaggtggggttatgtgtgtgggggtgcaggctggtggggtggtgacttctgctcccgtccccttcccctgcagttctgtggcaccatcgtgctcatcttcttcctggagctggctgtggccgtgctggccttcctgttccaggactgggtgagggaccggttccgggagttcttcgagagcaacatcaagtcctaccgggacgatatcgatctgcaaaacctcatcgactcccttcagaaagctgtaagcacctccccagcgggcccccgatagagcatgcacctccctgtgctgcctggagctgagtctagcaggggcatcaggccttctctgtgggttgtctgcctgcagcttggcagacagcagggaggccgtggaacaagccactccacctctggtctgttccactttgccggcttgtggttgcctggtgggccagccctttcccattgggattgggcaggcaagtccagctgtacccgaggccacccaccccccacgtgcccggccctcctctttcggccccagatctttccaatcctgcccaatagccataccagctgcaatcctccttaggcgctgcataccgtaaggcacagcttcttccccccggctcatgactcaccatctgacgctattcctatccccttcctccccgggaccttttccccttcctccctgggaccttttccccttcctgtttaagaagccagggctgcctggaggaag

SEQ ID NO: 61773 - DNA, 1020 bp, Homo sapiens
gcgaggctctgtcctccaggacttcctttaggctgtagggagtgtgctcttagatgcaaagagaaggaagaccccaccccactccagtccttgttctagtggtctttggtgatatgaatgactgctgttctaaaagggaggagtctcgaggaatcttcagagaccccacctgttagccgtggatatgagggatgtgtccctacagcttggggaactgtcctcctttagggacctgcatttcacagggagaaagtgctgtaaactgaatgtgtgtgtctctccaaaattcacatgttggaacttaaactccaatgtgatggtatttaagaggtggggtcttggggaggggattgggtcatgagggcagagtccttatgagtgggatgagtgtccttatgtaagaggcccagagagcttatttgtcactccactgtgtgaagacacagtgagagggtgccatccatgaaccagaaagtgggccctcatccgacactgaatttgccagtgtcctgatcttgaacttcccggcctccaggactgtgagaaataaatttctgttgtttataagccacctaatctatagtattttattctagttgcctgaatggactaagataagaacctatatcaacatcagcttccctaattatgattttttttgccacttatattaatttgctaaggctgctgtcacaacataccacagacagaaatttaagccacagcaggcatttattttctcacagtttggaggctagaagtccaagatcaaggtgctggcgaggtgaggtgggtgccttcagagggctgtgatggaagggtctgttccaggcctctctcctggctgcaggtggctgtcctctccctgtgtcctcacgtgggctcccctctgtgcatgtctgtgtcctgatctcctcctcttagcaggatgctcttcatattggattagggggcaccctgatggcctcattttagcataattacctctgtaaagagcctgtctacaaatacagtcacctt

SEQ ID NO: 61774 - DNA, 1051 bp, Homo sapiens
caggaccccttttttgcgggaggggtggctgtgctgtgccactcgctctgcggtgctgtctctacgtcttcagtcgcagctggggggtgaggagaggcgtgcagtgggagctcccaaccccaccctccgctccctgccctctgcctttgggccccagcaatggccgctgactctgctggtgttggtttcagatatttggcatcttcctggcaaggacgctgatctcagacatcgaggcagtgaaggccggccatcacttctgaggagcagagttgagggagccgagctgagccacgctgggaggccagagcctttctctgccatcagccctacgtccagagggagaggagccgacacccccagagccagtgccccatcttaagcatcagcgtgacgtgacctctctgtttctgcttgctggtgctgaagaccaagggtcccccttgttacctgcccaaacttgtgactgcatccctctggagtctacccagagacagagaatgtgtctttatgtgggagtggtgactctgaaagacagagagggctcctgtggctgccaggagggcttgactcagaccccctgcagctcaagcatgtctgcaggacaccctggtcccctctccactggcatccagacatctgctttgggtcatccacatctgtgggtgggccgtgggtagagggacccacaggcgtggacagggcatctctctccatcaagcaaagcagcatgggggcctgcccgtaacgggaggcggacgtggccccgctgggcctctgagtgccagcgcagtctgctgggacatgcacatatcaggggttgtttgcaggatcctcagccatgttcaagtgaagtaagcctgagccagtgcgtggactggtgccacgggagtgccttgtccactgtccccctgtgtccaccagctattctcctggcgccggaactgcctctggtcttgatagcattaagccctgatggcgccggtggcgcggtgggcatggttcttcactgagagccggctctccttttcttaaagtgtgtaaatagttt

SEQ ID NO: 61775 - DNA, 1122 bp, Homo sapiens
ctggtggctgttgatgatgatttttttttttttacacaattctctgtagactaggagaagaatgcttgtgtttttcggaagtgtgatgcttctctttgactgccaaactcttttatggaatatatctttatattaatgctgttttggtcatttttgtttggggtcactattgagatattgctaagcatctcagtggtaaacgcggctgccagaggaaccaagggatagggtatgtagaccttacagaaggatggatggtaaaggcagtccatcatcagcacaatctgacttacatttcattgagtaattttttttttttttaagattctgtatggcagcactttcagttgcccttgtgtgccggccacagccgcacaagttggcttgtggtttatcccccgctataagtgagagctggagaaacttcaactccataggtctagaggaaacattgttttaggttatttctgtccacccctgtgcgatactatttattgatccaagcagaagagcttggggacactgagtcgaagtggggacatgggattgaagcctgggcactgctgctgcatgagctgtgtgtcctgggtgtgccggcctttctgtgaagggggttggtggcagtgcccacctcactagatgcctctgacccagcctcccctgggggagtgggtggccacagaccctccctgccagagctcctggaaggctcctgcaggcctgacccatctattcctgtagacctggtttaggatgaagtctcggtgcgatttttgcagagttgggtttatctttcaactatagacccttctggctgttctcagccatatcatgtgactctgaatagttggatgaggaatggaaagaaagcaaggatgagagccggtcacgtggcagtctccgcccagcatcggctgtccgcacagaggcacagggcaggcctcctgtgcactccccacctagcactggcctgtcctgaatccccgccttccctggttggaggccagctgtggcatttgcaccctcttctcacctcaccatgcacatgctaactttaaagccttggggtctttcctgtaccccctcctcaaccctggtccaccccctctcaggatcttgtca

SEQ ID NO: 61776 - DNA, 1171 bp, Homo sapiens
tcactccacctgcagccaattcagccacactgcctttgcatggaacccagggttgcaggccgcgtgtgtagatgctgatttaggcccaagcactcagctgtcagcaggaaggaccatagtgttttcttctagttttagatatgcactcgttctgtgttttaaagtcacagctgtgagccaatatgggaagaagtgaagtggcctctaggagggactgagcaccctgtccttggaggtatgcaagcccaggctacacccttcctgtctgggatgatatggctgggggtgggctttgtgctgcgtggaccatggcaagcctttccatctctgagaggtagtggtccttcccgtgccttctgttaaagataattttttaaaaaaaggcataactcatatatattacatgtacacatgtcaaagattttatttaactcagtaattgagagtgctgctaagattaacagccagttcaaaagagaaatcacaatgaaccataaatctgtatggagtaaaggaaagttgaaactggctggggtttttttttttttttttttttttgaggagaaaggtcaattgaatcttattcgtataatatgcacatccatagacaagaattattttgcattaactctacaacttagttgtaaaaatagctcaaaggcagtgaaagactagaatcagataattggaagggtgcaccctaagcaatgcatagttctattttctttctttttttttttgagacagagtttccctcttgtcacacaggctggagcgcagtggtgcaatcttggctcattgcaacctctgcctcccgggttcaagtgattctcctgactcagcctcctgagtagctgggattacaggcgcatgccaccacaactggctaatttttgtatttttagtagatacagggtttcactgtgttggccaggttggtctcatactcctgacctcaggtgatccacccgcctcggcctcccaaaatgttgggattacaggcgtcagccaccacgcccggccccaatgcatagttttttactgaagacaaccagaatctctgttgcttattccaaatttccttccaccacttgtccatccagcagagccacttttaaaataggacacaggcagaaatttaaaggagtcaatatctcatggtgaaaagtga

SEQ ID NO: 61777 - DNA, 1074 bp, Homo sapiens
gagtgaggcagccggactagaatgacccccgctagcgcccattttgtgcgatagaggggatctcgctgggggcggggtgatccctggcactcccaggtcagcggggcaggaggccaagagacaccgaatcgcggggacgtgagcgtcacccagccgcggatggcagcccgggagcgggtgaagtccggtttccgggaagacgtgcttcggggcccgcctatcaattctcctgggcctggcggggtggagggcgggggactcggccaggcctggggcgctccctggcggccgcacggggaggcactcggcttcgcaacctgggtgtgcctggcctgggtgtgcgggaggaccccagaggaccccagaggaccccaggagcaggggtcgcgccgaagagcagagtccgcggctggaaaccaggcaggggagccacggagtagtcacacaggttttctgccgcctttcaactggtcttattttgctttcatttttcaccagcccatgtggggtgtttaatgttgcacgcgaacgcagtttcttccgggcccggaaggcccacgcacgcaacaatgttgtgcaagtgactggaaaccacctgagtgtccctccatgggggtgggttgcccagcatggacctctactcctgtcacaatgaagtcgactgtttcgtcgagggaagtggccaccgttgataaaatgaaaagacgccatgcagaatactgtgcacagggtaatccattttttttcttttttattgatcattcttgggtgtttctcgcagagggggatttggcagggtcacaggacaatagtggagggaaggtcagcagataagtgaacaaaggtctctggttttcctaggcagaggaccctgcagccttccgcagtgtttgtgtccctgggtacttgagattagggagtggtgatgactcttaatgagcatgctgccttcaagcatctgtttaacaaagcacatcttgcaccacccttaatccattcaaccctgagtggacatagcacatgtttcagagagcacagggttgggggtaaggtcacagatcaacaggatcccaa

SEQ ID NO: 61778 - DNA, 1139 bp, Homo sapiens
ctttgggtcctgttgcctggcctcttttgctgtcctgggtagaggagatgagttcgtcgctggctgcaagctgaggccaactgacaatgctgcacagagaaggggcaccgagagtggccccggattgagcagtccgtagtgcagagcagcccctcgggcgttctgcctggccctgcttcccctgctggctgcccttctggtgcgtgcatcccaggtggcatcatgctgcagcagatcctgcacgacatgtacatcgaccccgagctccttgccgagctcagcgatgtgcagaagcacatcctcttctacaaaatgcgggaggagcagctgaggcgctggaaggagcgggagacttgggaggccctggcccaggacgagggtctcaggcctccaaagaccaagcgaggtacgtggctgggagtcacagagaggtaggccaccagtcccccaggaggtagaaaaattagcagggccaggctgtgcccttcttcaagatgggcactggggtgatgagggctgggggcttgaaacccttgtcttgtgggcatcaggtcccatgagcctgtgcttttgccttttggccaggaccttagggcttcgaggctgctgcagaggctgtccagcggcccttattggagtcggggagttgggacttgctttgtcttgttgtggaaggcccgagttctgggaagacaccattgagacttcagattgtgctccgacgtggttggcaatggtagggtgaacgacggcatatttgtgacccttgccattggttctgggccagagtgtggtgtagatatgcagttcctttctccttggcatgcgtggcacaccagttcttggctagggccccttctgtggactgtgcctctccctccagatcctccggcaggaggatgctgtgggttgtctctggagccccactgggcatccggagagagggcatcagggaacgtcccacacaatgaatgaccatccccaaatggtcgtagcaactgcagatgagaagcaagggcctagcctacatttcaggtgttttgtatgcaaagtcatgtgccagtcaatcctatggactggtacacctgtgggtgaaggaaatcatccaggacccctgggccagaaactggcaggctgct

SEQ ID NO: 61779 - DNA, 1026 bp, Homo sapiens
ttttttttgagacggagtctccctctgtctccttggtgcgatctcggctcactgcaagctccgcctcccgggttcatgccattcccttgccttagcctcctgagtagctgggactacaggcgcccgccaccgcgcccggctaattttttttttgtattttttagtagagacggggttttgtgttagccaggatggtctcgatctcctgacctcgtgatccgcccacctcggcctcccaaagtgctgggattacaggcgtgaaccaccgtgcccggcctatgttgcaaatatttttatcagtgttatttttttcttaaatttggtttcagtatgttcagatgtacataggattaaacttttaattggctaaatctatcagtctatttattttcattatttgcttcatgcttagaagaatctgtgacatcacaagcttataaaaatctacattgtttatatgtctttcctgattttacttcaactagttttccttcactttggagggtgatgtaatagagggctctttattttcttccaaatggcagccagtagtccccatattatttattatgtaatctgtcttttcccttctcatttgacttgctgccttcattggattcttacttgttacttacttgtggacctttttgtggatttttcttctttgatttattattcctgagccagacttaattgtttaattattgtagctttaaaataaattttaacatctgttaaggtaagaaccctaccattactcttcatttccaaaatgtccttggctaatctcacccatttttttttctgccagggaaacttgaattattttgtcattatctcccaccctcttaacaacaaagacctcggtgattttcattagaattgcatcaatttatagctgtctttgtgaaaaatggacatttttacaatattgaatcattgaatcttcttgttcagaaatgtgatatgttattcaaaggttctttttgtctttgttaattttttaaaatacctttaaaagtgctg

SEQ ID NO: 61780 - DNA, 1028 bp, Homo sapiens
aatgggaaaatatattctgtctttttcttacgaggaactgcagagtcctatgtcaaagggtgtggcaacagagagggaagaagaatttgagccaataatataatctgtcagaatcccaatacaaatcttttctttcccagataaaagagtcttagttaattcagttagatttcatatgcaggttaaacatgactactcgaatgatttccttccctttcctcaaacacatgtggatttgtgccagtgttatccaaacagcaaatagacaaagaatctgaagatatggggtccattctagaacttagcggctctgagaccttggatgtgtcctttaaattccccatctgtgaaactggcattgtaacatctacttcacaggacacttacgaagattgagccaacaggagtgctttgtccaccataaaaagccatgccagtgtgtttcctgatgtttcctgggatctggggtcaaccaccagaggctcctttgggaaatcaggtttggggaaatgggcacagagtgcagagtgagaggggactgggaacaggcttttctctgggaccacagggttctaggtagagtctcctgggttacaaagagtgatagtaattccttgtttctcctttgttcattgttatgttccaggaattgggagagagattgtagttatatcaaactacttgtgagaaatgctagtacatataaccttggctttggggaaaaaggtattttcaaaattcgacatgtatctaaaattattaagaatgttctctgtctgaacattggctcagtcagaacccatttctcttcctgagctttacttctacaaaaacagtcacaatgtggtctatgatttattgtctgggtgacaacccattggctgccttgctgcttgcccatagggcttggcacagaatgggactacccggtgggtgacatcattggcattggtaaattatctccatgtgaccctgctcaggtgctgggagtggatctcaagcgtggcctcacctgggcttgggtgggc

SEQ ID NO: 61781 - DNA, 2060 bp, Homo sapiens
acagggtgtgtggtgatgaacaaaactggtgccttccctaccctcatggaacttacattcacttgtgagaaacaacaacaaaaaattcaaactgatgtaacctaaaagagaattttcagctcataagactgaaaaacccacagataggtctagcttcaggctttgcttgatccagggagcttaggcttttcagcaaccagactctctccatctctcagctctgttgttttctatgttgttttcattaccaagcaatgcatcagcctgaggttgcatgcctgcattctcccaggctcaaatccagcagaagaaagggcctgcttgtctctcaacagccccagtattagtcccaatagtctgctttgttgggtctgggttggtcatatgttcacttctggaccagtcactgtggtcaggcaggtgatctgccttgattagctagccctgggtcatatgatcatgcctagagtaggtgggtggagaacaccctattggaactgcacagactgagagtacgtggcgtcccaaaaggtcacagttcccttgccagaagatagccactgaatgatactgggcaggcaagaccaatctgtgttcaccacagagggaaaaataacctggcttctgctctagcgaagctgtcagtctagtcagtgagactgatattaaacaatcatgccataaatgtatacatccaatggaggtcagtattatacaggatcttgccatagccagtttcagaagtcattttactgggtgataccactctctcatgaacagcagcattggtgattagaacctggcaggtcagcttggagcagacattcataggcatggatattgcctcttgtgcataaatatatctgggaccaagaaactcgtccagtgaaacccttgtctgagcagttagccatggttaaatttcatttggcgttataaaaaaaagaaggcctttgagctcattcatcacaatctctgtggctttaggatgctttgagatactgttgagaatgaagagcttaataattccagcctccttaatgatactgtctggaaagtatggcggtcagaaaggaaagtcacaaaaatgaatgagaaatagctaagtggtaatggaggtgttgtcagccgttgaggcgtagctgcggtgaaagctttaagaaatatgcacgtcagataaattgaggtccataaaaagtgaaacgtcgtggctggcctgcctgcgtttctttcttttgagggtgaagtcctaaccgagaaataaaaagagctcatttggttactcaggttcaattctgagctaataatttcagggaacggaatggaggtggaggggctgggaacagaattctgggttggctttgaggatttgctaacatacggatttatggctctgttattgcagagtgtcttctgaaagtatacttacaatgcctttcctttcccggggtgcagctgattagtgcccatggagtaaatattgtaatagtgaacatgaagttgttggtgctatctgagaacatctgtatggaattcagggagacgaataggggaggtgtcaggaaggatgcaccgggatttgtgctcagggtgtagtaacagaggagttaggcactgttggccgcactgaggtggggccagcggggctgcagtggcctgcctgtgatagtcagtgctggcacaggaagggtgaaagcaagcctggacttgtttgtcaggccagtgttcctcagctcttctgcattccctgccttctcatctttactcactgcagcctgtaaccatgggagagagggtagctaccctgaaggatctctgtccctgtgtcacagccctgtcctgttctacagaggcccaaccgggagtgctatggtcagtatggcagcctcaggtgcttgggcccagagaagctctggacacctgcagatgggcccaaatgtgtctctcctgaagtctccatcaaggcccccaatctaaatgctgggcttctgcctcagttcccttaattataactctgttcacttctgccactgacccttggactttgtggcttaggccaa

SEQ ID NO: 61782 - DNA, 1018 bp, Homo sapiens
tcttacagtgcgtggaccatgttttaataatccaaaataattccagtgccgaaccctgaatttaacatatggtagacattcagtaaatgtttgttgaatgaatgcatgtcttctaaaagttttccaacacaaattagcagtggtttcttgtaaattatttcctactcgccactctataaaatcatggcaataatagaagattatgaaggatttctatggaggacataaatgctgcatctttcataatctccattatcaccctcattgatattatcattggaattatctaaggtgagccccagtttccagggcagctgattgacaccgtcctgccttccttatttaacctcttcttttgccactcgcctctatctttgaatcatattttggccttggttttgcaatggttttatgtcatcctacagatgtcttcaagacctggggtgagttatcaatgcaagaatggttcttagaaatctgatgaggcctctgctctctgggatgtggccctctctatgcaggttactccaatgattagctctgtcctcattgtccttttaattcccttgtcaacttaatctcagtatgttgcttatattaacaagaagactcacgcaataactcctcgataactctcagtgatggtatctgttggtgcatacttgtgttccacagttatggccatatacacagaggtagtatatgatgaagagaagattacagtctttacagtcaagaagacttgggttcatatcctaaccctggaacttactagcattataatgcttgcagcattgtgtttggtgagaggaaaagaatgaatggattctaggaatgttagggaacgatttactttacccgatggctgtatcaaacatctatgccccacttcttctcttgcctcacctattccttagattcttggtcacttctctaccacaagccaccagcactataaccagttttgcgtgggttctgctcttcctccctatgttgatcagtgtcatgtgagcataag

SEQ ID NO: 61783 - DNA, 1102 bp, Homo sapiens
atgatttatcttggagagtgttttgcatatgcttgagaagaatgtgtattctgctcttattctgtggagacctctgtatatgtctcttgggtccagttggtttgcagtgttgttcacatcctttgtttccttatttatcttctctctgattattaatgagttgtcttttttgttttttagagtcagtttcactctatttcccaggctggggtacaatacataatcatagctcaatgcagccttgaactgctaggctcaaactatcctcctgccttagcctcctaggtagctgggactataagtgtatgccactatgctcagctgatggtttatttttatttttattttttgaggagatgggggtctcattatgttgtgcaggctcctagtcttgaactcctagcctcaagcaattctctcaccttggcctacatgagttgtcttttaaggagtgtttgcagaagctctttgcagtacattggctgaatctcattagctctctttggtcatgcttacatgcaaaaaggctggaaaatgtagtccaattccaggtatcgtgcacctctaaaaataaggattatattcagaaaaagtgaagaatagataatggggagcagactgcattgggtctaacatattagatcagaatctaatatttttaaggtaccgaatgtatatcctatcacatcttgatttggatgaggcttttcattttatagatggaggaaactctgaagccttcccttgtgtgtctgtgatatatgagcttttaacttctcatttatgaagttacaatagatatataattcttaccttattgtgtgttctctaagaagcacagtaaaaataaaatgaagctttaaaagtttaaaatgatactgcagggaattcaagatgaaaaagatatacaatgccaaattacttccacccatgttgttacataccctattaacagcatgcacaagagacaattctatttctagattttagcaccccatttcataatttttacttgtgacgaccagagaatatgaagtaggaagatggcctgtggggagatattatgcatttttgttattgaatctcaccactaaaaattgtg

SEQ ID NO: 61784 - DNA, 1017 bp, Homo sapiens
actacatttgtaaaaaccatcacagactctgtaatcacgtccagttattaacagccgttctgtgttacacataatttttgcagtcatctattttgattggtcaaactgggacttaaacctagtttgttcctccatcttcagctgtgttctctgggatgggtttcttgcattacagtggatggttgggcaaagaattcatcgctgaaaattaaaaaggtcgctttatttcctgttctactaaaaaatagtttgttccttgactctgactctcatatgtccttctcttaattggttagtaggttgttttacttatgtttttttggttggttttgccttttttttaaactagcatttcagatctgctcggtagacctggtgcaccaccaccatgttggctgcaaggctggtgtgtctccggacactaccttctagggttttccacccagctttcaccaaggcctcccctgttgtgaagaattccatcacgaagaatcaatggctgttaacacctagcagggtaaagataatctgaatgtttttatattgcttctttttccatttgtgccctttctttttggcagagtatggctgctctgcctttagtgtgttatacgtcagttagccctgataatatccccaatcagctctttctccccattagtttgtatcattctggtccctccttatcccatatgaaatagaaaatgagtttctgtaactctgtcttcgcttacagcttctggagtttctcatttagaaaatttagagtacattgtgagggattgagagttacatagtgtaacggagatcctggagcacatagtcagaagtttaagaacccagggatattaccagttggccaatagcttattaataaattactaaatatattatctcttatttagaggttgataatatctgtcaggttagaaagaaacccatttttataatagatttatcttctggcattcagattataaggtttgaagtgtgaggtaatgaggacaatataaagaa

SEQ ID NO: 61785 - DNA, 1073 bp, Homo sapiens
ttaactgttccactgttgaaaaagagccacaatggaagtagtagtcttccctcttcttggcttcatgttaaggaaagatgctgttcttgagtccatatcccagatgacaaaatatagctaataatgcttgtagaatgcatatcttaaaaatgctaacagattctcaccctggtatttggttaggatttaaaatataacaattctaggtatgtaaatctatagtttgtgaaagaaacaatttttctgaaattgaaactaagaataatataatgaattactaacttccaaaggtggagcacagggaaggtctacatttatttatttatttttacatttagttttttaagttggctaataaatttccatagtgaagttaggtatatagaaagtaccaagtttctttaactagagttttctagtgtaaagggatcttgcattttattttattaacgttctgttttcatgtgggtggtacgtgtctttgtttgcatgtgtgtcaggaatatgccaccaaaacaagaattgggatccggcgtgggagaactggccaagaactcaaagaggcagcattggaaccatcgatggaaaaaatatttaaaagtaggtggctatctttagtttttaacctagaatctatggatatgttttaagaggtccatgaacaacttcctaaaaatatatgtgtatttgtgcattttctgggaagaccacattattattctgagatctgacgacccagaaaagattggtactttgcactggattcagtggttatcaatcatatttcttccagtggaaattttactttccttttttttaaagaaaaggattattaatatgccatggtccaaaaggtatactctgttgagaaagttcattttaagtgtgtagaatcctcattcaagcatataatatttgtgtatgtttcagattaagaataaatcaccaacacatagatgttaataaaagcctagctgtccaagaagaatcctttaactcactgctcacatagggcctcaggagggcagtactttaatatattgccagtttggttcagtttggatatcaacttt

SEQ ID NO: 61786 - DNA, 1062 bp, Homo sapiens
gctccttaataatcttgcaaaatgtctttacagtgggagagagccctaatcagtatccttcaggtcatttctttctgatttgaccctagagaccaaatcatgcaaattatgtagtgacagcctagtaatattcttagtaaacgaattagactaaaagaataagatgccctttatgaatacctctattgagttagagttgattagttgcctctcagtaccctaaaacgggagcctcctctcacttgattctgctgcataaacactgattatattttctcttttttcttgatttccacgtaaagcatcatttgtgttaataccatgcagtatggtatgactgttaacatttccttctcattttttactttccatgaatgtcatgtgaatatacttcaacctcttattagtaaaataataggtatcacagaagtagctccacgtctacaggtatactgctccctcaaatattgttggagggaggttgaagattcaccaagcctgatcctttcttttttgtactgatttttacacctttgtttcaggagtgtttttttctactggttacctaacattgaggcaatttctgtaccccatatgcactgattatggcttctattaaatatggtacatgatttgattcccttgataaatattttaaaggctttgtccagatgtgccagtactaacctgcatttccttctgtgttctgcagttgatcagatgggaagatggtttgttgctggaggggctgctgttggtcttggagcattgtgctactatggcttgggactgtctaatgagattggagctattgaaaaggctgtgtaagtaaattgttttaagtaaactgttcctaaacaactccagccttaaaacaaaaattcaaattttcttctcattcctatctttagtcactttggaatgttttgtgtctagtctttgtgtatacacacaaatagagaatctctttttgcttctttgacatttatttattcaaatctaaataaaaatcttttagcaaggttatatgtgtttaagcaaagagaaaatatgaaatatgtt

SEQ ID NO: 61787 - DNA, 1993 bp, Homo sapiens
ttacttatttataagctgttagcagtccttattacataaagaaacagcagtgtctgtcttagaagttcccacattttaagtttatcatcatatgctttcccttttgacagcagtaggtttgaccttgagttatttgttttaagcttgtttatctcaattattatatgaatgttgtagaaactagtggtaagctcagattcaaatagctacatggaatttgatggttactaaataagtagattagtgtttgcttgtgagtgtgattgattaggaatagtgttaatgttgtgatatagaatttgagtagtcaccaatttgggctgtagaatttggtgggggtagtattatctaaaggcagaactttttgaatcatagtgcttaaacagtaaggtataatataaagtggcatgttagaagtgatattttccttttgcttgttatttagtaaatacttaatgagcacttcctctttctccaggtgtgatgggtgcagtggtggctcctctgacaatattagggggtcctcttctcatcagagctgcatggtacacagctggcattgtgggaggcctctccactgtggccatgtgtgcgcccagtgaaaagtttctgaacatgggtgcacccctgggagtgggcctgggtctcgtctttgtgtcctcattgggtaagctgctgtgttttaacacttaattcttggtgcatagtttcctgtaacctgaaatactccaatatcctaattgattgagtcatttattttaaaagtttttttaaagatttatgctaatttgactggattttactacctgacatcatataaaaatcatggcaacatggtcaaccattattactggctttaccaaacacatctaaaatgggaaagttggtctggagaacatgaatattgctctgatgcaagaaccttcctgtgaaatgggcaagtggctcattggaggaatgagtatcatggattttgaactaatgcaaataagattagacagtacatgtacccagatgtcgtcttacctacacagtataccaaggagatttttttttaagtaatataaatcataaactcagttatcggaaatccttttttaaaaaaaatcttgttttcgcattttgatttcaggatctatgtttcttccacctaccaccgtggctggtgccactctttactcagtggcaatgtacggtggattagttcttttcagcatgttccttctgtatgatacccagaaagtaatcaagcgtgcagaagtatcaccaatgtatggagttcaaaaatatgatcccattaactcgtaagtaatgctttttatttaacactgttactctgtcacataaggatgcttgtgtgtatttgacctgttttggtttatggctgtattagttttctagggatactgttaacaaagtatcgcagactgggtggcttaaaacaaaacttgattctcttgtagttctggaggccagaaatctaaaatcaaggtgttagcagagttgtacttctgagggccctgagggaaaatctgttccctgcctctcagcttcttgttactgctggcagtccttgacattccttggcttgtagatggatcattccagtctctgtctccatcttcacatggtgctcttcctgtgtaccagggattaggatttcattatattttgttggggggcagaggagggtcacagctcaaaccacaccaatggctttgtcagatttcctgttttacttctgttgcagttttgtctgttctctctttagtaaactatccaaaaaaacctcttgattttattgcaacttagtgtaatacttaggtattcattccattatcagaatattttgtctatttttgtgagccagtgtcagggtgcaataaataatgtgctcttactgctcagttaatttttttggtagtgtattttgcagactttaaaactgaagaaatgtattaatcaagtattatttattggaaaatgtatataa

SEQ ID NO: 61788 - DNA, 1626 bp, Homo sapiens
ttctctgctacatcaaatatcttgtttaatggggcagatatgcattaaatagtttgtacaagcagctttcgttgaagtttagaagataagaaacatgtcatcatatttaaatgttccggtaatgtgatgcctcaggtctgcctttttttctggagaataaatgcagtaatcctctcccaaataagcacacacattttcaattctcatgtttgagtgattttaaaatgttttggtgaatgtgaaaactaaagtttgtgtcatgagaatgtaagtcttttttctactttaaaatttagtaggttcactgagtaactaaaatttagcaaacctgtgtttgcatatttttttggagtgcagaatattgtaattaatgtcataagtgatttggagctttggtaaagggaccagagagaaggagtcacctgcagtcttttgtttttttaaatacttagaacttagcacttgtgttattgattagtgaggagccagtaagaaacatctgggtatttggaaacaagtggtcattgttacattcatctgctgaacttaacaaaactgttcatcctgaaacaggcacaggtgatgcattctcctgctgttgcttctcagtgctctctttccaatatagatgtggtcatgtttgacttgtacagaatgttaatcatacagagaatccttgatggaattatatatgtgtgttttacttttgaatgttacaaaaggaaataactttaaaactattctcaagagaaaatattcaaagcatgaaatatgttgctttttccagaatacaaacagtatactcatgattgctaagtgtttttttatttttgcatatttattgaactgtctaattgaatacagcttgctcttgtcacctcttcaagctttcaagcctttatagaaaagcttctttgtggcttacactggaaattatgaaagcagtttttctcctaagacttttggtttctcgcattgcctctcagactaagcactaaaaagcaaagcaaaacagaactagttctgtcttaatgaaatatatcaacccaaaagtgtaatgaggaaaatgcttcattagtttcccctagcagacttttacttctcttacactgctacaccattactttcttgagacatttgtaagttctttgatacagaagagttatatttagaagtctttaatgaagggaaagaagtctgtatgatgactgaggtgattgctctttttgacaaatgtttattacagtaatgcagaaatactgttaatcatctcaaagtacataggaggcttatttctgaaacaaaggtttcagccagatgttgattagtctaatttttccaagtgaatcatatgcatgccatttgaatagggatttcttcaagaaagcaacttagtttcttgccagtatagtatagtgcagtgtgataagtacatgatacttgtagctagactacctctatttgaatctcaactcttatttcttatgtgaccttgggcaaattacttaacctctgtgtgcccagtttcctctcctgtaaaatgaatatattggaacctgtcttataggtttatggttaaacgtgcaggcacttagtaagcattacataagtcttagctattgatgc

SEQ ID NO: 61789 - DNA, 2005 bp, Homo sapiens
ggttttctttttcccatgattttctaatacttcactgtcctgtaagaacagatatctaaagcattgtcttttgataaatgacctcagtaactaattattacttatttatgattcagaggggatcttctgaagtacaaacaagctcaccccacccagttatgtacttttttgaagatttctttttctttttttttttttttttttgcttaagcaacaaaaatttattttcttacagttctggaggctagaaatccaagtccaaggttccagcatgttctgtttttggtgaaggatcacttttatttttctgagaccgaagtgctgggattacaggcatgagccaccacactcagtcaaggatcactttctagcttgtagatggcagccttcttgctgtgtcctcacatggtggggttgggggaagaagagagaaggcccagttacgtacttttaagtatgcaggctgaacggactgaggtcagcaacacagaatgacccccaaacaggaatataaatggaagttaagaaagggcacgttactggtttggtatgatctgttagtagagttagggatttaataggttcattccatttggtacaccttgagggaatgaactgttagcaccagctgtggggaaacacaaggatgaatggctggaaacccatcattctagaagacagcatccaatgagcagtgggagtgggtagttgctaggaggatctaattctagagagagaaggcagtgctggaggcagaagcctttactgtgggtggggaatgttaatcattagaagccactgttttaagagattaaatcaacatttattagacactctaaagtagtacgagagtagttaaatgataagaaatagcaacacacttcaatgattcaaggtaattataaaatcattatccagaaattacaagaggtttattcagactaattgccaccggagttcagaggacggaagcaaatatgaggagtgcatatagggacatttgagtccaaacgcaccagcccagaagggttggtactttgtggaaaggggaatgtctggcctggctcgcatgtgtagcatcatggggacttcctgatctcctttgcagagaacccaaccttctctgcctgcaagaccctgacaaaaatgtgggtattcttgaaaagctataaaatgtccttcaggactctgctgtgtgacaatcaaatgacgccacccttaaccacactgtttctcagaagatgcaagcatgattgccttcctcatttaaatagaacggttatttaaaaagaagttggataaattatgacaagactttcactgttattaattctgagtggcagaaaaaaatgggcatttgataagaaaatggggcttttggtatcttttttagtacattatagctgcccttaagtaattttgtaaaaggcaaaggacacatggggagaaaatgaaaattatggaaacactttacaaggagctttccagatccgggaactagtggaatggcccaggaaagcagtctctccgccctgcggaactgaacccagggccttcagggtcctcctagcctggctccttctgtgaggttgaagtttaccccggagtacatggccctagcttcacctcccacatccctgccctttcctgggtgtgctaggtgtgggggtgaaaatgcggaggcaaggtgacacatgtctgctgggaagcctgctgtcaaattgcaaagtacagaacagacgctgacaaacaggatccatctcagccctacctgcagttttccagctctaagcaccggcaaaagaggaaagctttggcactgctaatcctcctttctacacaacctccctccctcctgcccgagttcctcctcgcacttgctctgtttgtcctctcacctttctctgtcaaaatctgcacttggatatgagcctaggatcagtcatttggaccttaatttcagtgtgtgtgcttcctttgcctcaaattgtggcaagaaaaatag

SEQ ID NO: 61790 - DNA, 1062 bp, Homo sapiens
catgtgagggtgatgctgctgttttatctaaggtggttagggaaggctgtaataaaaactagtatttgaacagagatcttgaagaaagaatgtgatctatgcagatattaggagagagagagtacttgatgaagatagaactggaatacaaagatcctgtggctgaagcttgcttgacctgttctaggagtggcaagtaggccagtgcaggcattgaggggaaatgattggtagatgaggtcagagaggtgggttgggttggggggatatgcctgatcatatatggcattgtaggccagtgagactggcttttaaaaggtggggagccaccagagttttgacttgttataagtagaactctcagctgctatgtaggggtggcgcataatgagattatttagcaggcgcagcagtaatcctaagtgggagatgatgattttaggcagggattgggagaagtgcccacattttgtatacattttgaagccagagccaacaatttaatgatggattgaatgtgggctgagtttggcctgaaaaactggacaaatggagttaacatttcctgagatgggtaagagcgcagaagaagcagggttttagcgggggaagtaacgagttcagttttggacattttaagttagtaatctgagtggagatatggtgaagagagctgggtatgcacaagtctgcagttcacagcagaggtctgggttagagatatataaatttgcagttattagcagagagatagtatgtaatgcctcgagaatggattaaaataatttagggagtgaatgtggctggagaagtcccacaagttagccttgggatcctgtaatgttttcagagggagagaaactagcagaggagaccaagaagccgcacgcctataaagaaggaagagaattaagactgagttgtatcagtgaagccaagtgaaatgttgtaagaaggagcgagtgagtaatcagctgtgtcagatgctattagattgaggactaagataaagcaatatgaaaatcattggtgaccttaacaagttgtttctggtttagtggt

SEQ ID NO: 61791 - DNA, 1041 bp, Homo sapiens
tgccaccatgcctggctaatttttgtatttgtggcagagacagggtctcaccatattggccaggctggtctcgaactcctgacctcaggtgatctacatgcttcagctgcccagagtgctgggattataggcgtgagtcaccacgcccggcctgaaaaaaatttttaaatattaaataccaatactgtaaatttgctatactttaaaaaattattcttgcagaaactaaaaaaaaactgacattttcaagcactggtccagatattagtcttagttcaccactaaattaaagctcacagatggtattaaagtgtctcagagattatatcattagatgatgtaggcaacatatattttttcaaattgttaatgaatggattttttagacacctaacagattacagtttaggtaaagtgcatcaaagacagcatggctaccaaaatgaagcagactcacaatgtctattttattttatttcaaaattataagcaaatataagggaaaatttcatgaacttttaaagacagatggtagctcatcaacgaatgaagtgataatattcataacgtaaacttcatagtggagctgtcagactagtttatcttaagaccaaagttcaagatgattgatgtgatttgtgttgcaattatttgtacatttagaaatcgttattcttcatagagaatagcacattcaggttctaacattattcttttcccccacaaactggtggaaccacaaacaccagtaacagtgtgtctctcttgtgggctcatcttgtgcctctaagttattaatactgaagatgctcttgggagataacatgtattaccctcatcttaggcaggaaaatagaggcatagagaaaggaaagaatataattttctttccgtggtctacttgtgacaggcggggaaatgttaaagcctttctgactcacaggctctttaatctttaacatgtattatttattgatttgcaaaatgaccctaatatgtaatatcaataccagttttcttatgtttataccgaaagtggtt

SEQ ID NO: 61792 - DNA, 1208 bp, Homo sapiens
tgccaccagaagcagttctggagaaagcttagctcaatccccagacagtagtaaatctattaattgtgaaaaaatggtaaggtcacaaagtttttcacattccattcagaattcattccttccaccttcatctataaccagatcacattcctttaatagagctgtggatcttacaaagccttatcagaaccaacagctatccattagagtgcctctacggtcaagtatgctaacaagaaattcccggcagccagaagtactcaatgggaatgaacatttggggtatggatttaataggccttatgctgctggtggaaagaagttggctttaccaaatggcccaggtgtaacttctactttaggttatagaatggttcatccctctctactgaaatctagccgatctccattttctgggactatgacagttgatggaaataaaaattcacctgctgacacatgtgtagaggaagatgctacagttttggctaaggacagagctgctaataaggaccaagaactgattgaaaatgaaagttatagaacaaaaaacaaccagaccatgaaacatgatgctaaaatgagatacctgagtgatgatgtggatgacatttccttgtcgtctttgtcatcttctgataagaatgatttaagtgaagactttagtgatgattttatagatatagaagactccaacagaactagaataactccagaggaaatgtctctcaaagaagagaaacatgaaaatgggccaccacaggatatgtttgattcccccaaggaaaatgaaaaagccttcagtaaaactgatgaatggatagatataagtgtctctggtaaatattacttaccttaagtttttttgctttcttttaaataatataactgaacttacatttaggattatcttcagatagatttcaagatattatcagtttcacggagggatagatctagacaaaattgaggtgggttaacgtttattttcctgtgacttttgctccataccccatttttcaccctatccaagacaatattaataaaaccactcttaacctttgttgttctttggctgttatacacagcctattcctgcttagtatatgcagtgcttctaaatgacttcccctgcttacctcaaccagtgtggtatgccattaaacaaaccatctcttctcttaggatagcatttcattgctatttgt

SEQ ID NO: 61793 - DNA, 1697 bp, Homo sapiens
tataggtcttctaaaagagactgccggaacaagtttatttccttatagggaggcaattatgagtaccctacattatttaatctatgaagttaaatagtgtacacagaggaaaaggagtttcctggccagtgtttaaaaataaatatcttgggaaatataggaatatgagggtttatttacatttttggaaatattacagaagtgaaagatgactaaatgaattttcttttcctctattagaaaatatttcagtaggttattttaaagattttggctcttgatgtttttattgcttaggatatagaaaatgctacagttatgagtgctttttttgagccagcttttttgctatgatatatcaaattattagcacttatatttttaggacacgagaaacaattatatttttgtgaatcagtaaccttttttctcttgaagacaggagtgaatgtacaaaacatacttctgggaataatttggtttcaccagatacagactacagagctggttcttcgtttgaactctctccatctgatagctctgatggaacatacatgtgggatgaagaaggcttggaacccattggaaatgtccatccagttgggagctatgagtcctctgaaatgaacagcatagtatgtatggatttatatactcttggaatattttgtttaccctactatagagagacttgtgatatgattgattttgtaaaaaatttatgaattaactttactactttgagaaatggaaattcatatttgttaagagcctataaaatatctgactctaatatgaaataaagcatggagaatatatgacatttgacttaaatatactcaacatgtttacatatatattcctcatacatatgtgcatactatattagtagtttaatctatgccagtggttctcaaagactgggggaggaggtcaatgactggaggtggttttggttgtcatattgatgagtgcttcttggcatctagtgggtagatgccaaggatgttgtttaacatcccacagtccacaagacagagaccacaatgaattatctagcctaagatggcagtactgctgctgttgagaaaccttggcctgtgctatactgaggtaacattgaagtgccaactctcagtgggataatacaatacaagtgtattattttactcttagaaagtttgttgtgggtctggacagctctctagggcagctgtctttagtgatctaaactactttgattttggggcttgaccatcttttgaggtcccttcttttcactatggcagaggaagagagtgccagagggtctcacacatataattacttgcattggcctgcaggcaacacttggcacttccgttcatgatctgttgaccagaactaatcatgtggtcccatctgagtactaaagggacaggaagtgtaatctttgtgtgtgcctggaaggcaagggaatcagctatgggcaagtgttagaagacctgccatgaatttatatgtgcatattttaagaaacatggcaagtaatgtggataatatgccatatgggtaaagtgtaattggtatgtttaaagtgactcattgcagttattcagtatataaaatacgattttccagtagttgtatgggaaaattggtagtctgtggatatattaaattccaagtggatttcaggcaatgtaattttctatact

SEQ ID NO: 61794 - DNA, 1025 bp, Homo sapiens
caaaggagataatcacttagattgaattgcagcacaattctttctggagttaaaagacaagacttcccaacagaacagtttattcagtaaatgacagaaagcatcactgctattgaatctgaattagtgacttgaaagatcaagtagaaaaatattgtagaacacagaggaaaaacataaaccattggaaagttataggggaagaataatgagacttgatgatctgggaaatttaatggtaatttttagggctggtagtgaggagtgagggatttacttcctcggaataaatcacatgctaggtaatgcattttactttgacagaattgtaacaacttctcttggaaactttatgccctttctgagtggaagtagaaagaaaggatcttagagcctgccttatctttagcagacaacagaaagttacccaaatattagataaaagtagaatcacagggaaatttagtctttgaggtcttgattggggacttgtgaaaagtaggagggaactcttgggaacatcccacataaacagtactttagatttttctagaagaaggcaaacaactattggctattttgagtaaaggaacattaaagaaagcatgtaagaacatggatctaaaatatgtagcctcctgaggcaccaaagataaaatagtatctaggtttggtactataggaaagtgggaaatttttctttttatggctcttaagtcccgaacaattatacacacccattacagttttttggctgggaggatgagaatgttacagggactgatagagatttagggagtctaataatgtgctttccactacaggttttagtcctttatagcttctggttgttgatgatattatgcaggtttgataaagatttagatgggggccaggcatggtggctcatgcctgtaatcccagcgctttgggaggccaaggtgggcagaacacaaggtcaggagattgagaccatcctggctaacatggtgaaaccctgtctctactaaaaacacaaaaaatta

SEQ ID NO: 61795 - DNA, 1733 bp, Homo sapiens
ttaattttaaaagtgtgatttgtttgtgatgaaaagttaatttgtgcttcttgagatcagtgaaaattaattgtagcagtcctttataggaatgagttctcttaaaaatctgctgtttcctgtcattttcattctgaaatcagagccaacttgtgacagtgatgaaaaccacctaaaactgattatgagtgtttaaaatgtataatgttgatttcaaggttaatttgcctgttttaaaacagtgtggcagttaattgtttacatgactgtaatgtaaaagtattataatttacttcattttgaataatattaagttcagttttcaccagaagaactggttatgcttttagaaatcttgatattgtgattaacataaatggctgatatttttaaactattatttttatttgatttacagcatttaattatcaagctataagagtcaacttttatggagtatgtacatgtttatagtcttttgcttttgaatctgtctagtggagtgtgacaatatgaaccgctttgaccgaccagacagaaatgttcggcagcctcaggaaggtttttggaaaaggccaccccagaggtggagtggacaggagcattaccacctcagccaccctgaccactatcatcaccatggaaaaagtgacttgagcaggtaattactgttctgacttagatttcatttgctgtcctctgattttgaattataattctccctttcccagaaccctcaaaaaacctgtttttgtctggtttgtttttagaggcaccaaaaagcacttcaagttttatgtggtactaattggaataatatgtctaatttgttctttttggcccaaatattttttcattagttttatcttaaatataaatactctatttatatctgctttttggacttcaagttatggtatgattttctagctgtcatttggaaatgattaaatgttaactgtgttaaatttcttagtttttccaaataatatttaaaattagtgccaagtgattggtcttttgctcatgtaataagttaaaatttaaaaattccacaagtaccattaaaaacagaagaaggtactgtttagtgctgaaggtactatttagtcttttctttttcaaagtagaggatagtctttaaattggtcagatcttattttgtaatgaggctccgtagtcattcaaacctggaatcaaaacctgacctggcgcagattagctttgcaagcttagataatttatttaaaccgtctctgcttcactttactatctttaaaacataattaataatatctttatctcagtgtttgagaatcagggataaaagtgcctagagtagtgtctagtttacagtaggcactctgtggaagttattagtttttccttttcactttcttatctcattccacagggatttcaggtcattttggagtgcatttacaatacaaatagtacaattggtttaaagaaataatggaagaaaaacatggtgttgtgtagttcctaaagtgagggaaaaaattgattctaagattctttgcagcaaaagcaaagaataaaatttgatttattacaacatatacagtacgcataagataaaggatgtgtttttttcctgaattaatttgtcagaaaagttaagcaacattttcaaacaactgtgttccttggatgtcagcagttgtaagaaaagagagggtccctggtcaaattagtatgagaatgaatag

SEQ ID NO: 61796 - DNA, 1036 bp, Homo sapiens
actctcaatctttggggtgttggtgctggttttgagacacctacatccacctcagcaagttatggaatgggtggtacaaaaagaaacctcctctaagacgagccttaccccagcataccttaaaactattaatttctctctgtgccttaatattagaaaggtttgggtatactagccccagggccttttcaatattgcatgtgcaaaagtcctgtttccattctaaaacttcctgagtattgcttcgctttcttctgtcccttaactcccgttattattgtcattagttataggatcatgccttatccgtaactcaggggtgttgggaagactggtggttgagaactaatacatccactcatgttctcatcgtaatactgctctgtctttttacctggcctaatcttcctctcttcttttctgcccagacctcctttttttctacaccttttgatatgctatctggaattctctcatatcctagcaaactcacattcttcatctcttcacctacattctcctaatcataactgaaacctagctctttcccaaatatactacttccccagtaacatttttacaccaaagattcttattttccagtcaccctaatacttcactgtttagagatggggtttttgtcctcatttctcattgtcacttctaaaggaagtgattgtaagtcccattttttgagacttagggcatttggctgtatcaactcttctttactggttcctacctggagcttacaaaaggcttggcccttagcccactttccctctttattataagctttgctgcagtcctgagtggctgcagtgttcatgtacatgagtcatttaaccctctgtttgcttagtcctgtaggacagtggtctccaacctttttggcaccaaggaccagtctcctggaagacaaattttccacaggccatgggtgggaggttgggggatggttttgggattgggatgaaactcttccacctcaaatcatcaggcattagttagattctcataaggggtgttcaaccta

SEQ ID NO: 61797 - DNA, 1904 bp, Homo sapiens
cgatagggttcgtgctcctatgagaatctaatgctgccgctgatacgacaggaggtggagctcctgtcagataagcaggaatgcttacatgcatgccctctgcttacctcctgctgtgtggcctggctcctaacagaccacagactggtactggtccctggttaggggcttgggcaccccagctgtgggattttctatatacaagatatgttatctgcaaatagtttttaccttttcctttccattttggataaaaatgtctttttatcttttgcataattgctatggctacaacctctgttgagtagaagtggtgaaagccaataggtgtgtcttgtttctgatatggggggaaaataaatattttaaatattttattgttaatgtgatgttagctgtggattttaaaagatactttctatcagtttgaagttcccttccattcatggatagttgagtgtttttatcatgaaagggtgttggattttgtcaattactttttctgtgtctatggagataatcttttttttccgctttcattctactaatgtggagtaatactttggtatgttgcgtgttgtgttggtatgttgtgtgattcagtttgctagtattttgttgaagattttttttgtgtgtgtatgtgtatatatatatatatatatatatatatatacacacttaagaaatactggtctgtagttttgttttgtttttcttcttgagatatccttgtcttgttttgatatcaggaccacacagattgaattgggaagtattcctttcacttctacttttgggaagagtttgtgaaggatttttgtgaattcttctttgaatgttttgtagtattgaccagtggagttatttgggcctgggcttttctttgtggcagttttttggattgctaatttaatttttatagatattctgtagatgtctttttggtcttgttggtttataatgttgcttaaatcttctgcttctcatatatctctaattgttctgtccattattgaaagtgaggtgttcaagtctccaacttcactatatattgtagggaaggtgtgttagcaataaattctctgtttttgtttatctgggaatgtcttaatttctcttttattttgaaggatagttttgccagatgtagacttcttggttggcagtgttccttgtaatatttcaactcccatgctttctgatgagaaatcggctgttaatgttactgagcgtgtcttccacatgatgagtccccccgccctgccaccaccaccccccccagctttttttctgcattaaggattttcactttttctttggctttcaacagttaaattataatgcgcctctcttttagtttatcatatctgtagtttgttgagcctcctagatatacagattaatgtttttcatcaaatttgggacatgtttggtcattagttacgttctttctgcccctccccacttcgctctggccacttaactacgggaatgtatgagcatcattccttgcttgtcacaaaaaatttgaaaaaaaaaaaatacaaataatgtgaaaactacttaaatcagatttctccctggccaggatttgttgttgtgtttttttgtggttgtttactgacttttctagacagattctgtaaaaagtctgtattttaaaaaaatatttgacgtctttgcttggtttgattagtggtcagctaatggttggatggagatttcattgaatgccttgaactagtaagtctcccagcctccaccagggggctctgtgtgtttgcttaggcacacctgcagtccctgtaagtagtttgcagcttaggcacacctgcagtcctgtaagtagtttgcagctctgccttggccttcacttcctgcttgtttagagtttcaaagtc

SEQ ID NO: 61798 - DNA, 1844 bp, Homo sapiens
ttacttccacagattattcttgccgtagctcccttttttcttcttccacatttccttctaacagtatatataggggaaatgaagatttctaaaattttgtctcccatttgttcttcaccatgctagcatttggtcttcaccatgctagcatttggtctgggtaaattcaggttgaactgaatgtccacaattactatattaatctagtgtttttcttcccttctttctgacagcatgatggaagtggttcattgcatgatattcaactgtcattgccatccagtccagaaccagaagatggtgataaagtatataaggtatgactatgtagtcatgctggatttttcaaaattctttttaaatactaaaataatgatacaatgacaatgaaaacaataataaatgtattaatacctaaagcatcaggtttgttcttaacttttgctactttgttaagttgaaatgatatctctgtggtgctttaatttgaatttatcagttggataatgatctgtccttgtattactactgttgcaggatttaaaaagaaaatatattgctcataatgataaatgataagagtttttaaaatatgagtaggaatgaaagttaaaatggttataggtgcttctcatatataaatcccaaaattgaagaagtatactgaaaatgagattaatttcttttttcatgtttaaaaatacagaatacagatgtatttttgtgagtgaaagtgtttttttataattcttatttatgtctatttttagttgaagaaaactcttttattttgcaactatttaagcacatatttatttcttaagcacacacagagattcttggttaatttaatgtttccaagtcaagttatagttagcttttacatcccattttcagggtacacttattagtgtttgctagtcatctacagtaacaacctgaaagcaatggtggcttataataatgaaatttatatttcacttacatattggctgtagatcagctgggactctgcttcatgtgtcttcctcattctgggatccatactgagacggatcagcccctattgtgggacatgttattgtgccagtgggaagagaactttgataggatcacatgtgaattctgcttggatgtggcacatatcactttcaaaacaattcaaggggccaggcctggaattaatagggcagaaaagcattatttgctcgtaggttgcagagtgatttattgggaagaagattgtatataaagcaatcaaaatcataagagtatagtacagtagtcaatctcattctctcatcttggcttttcaacttgttgactacctgtccttgcccagattgcttcccaaccctgagctttcatcctactctcagtataatacattaagtcagcaggttcacagcaggccatctcttaacactcagttgagaaccattgacttaggtaatctctgatgacctcccagtttagaaaaaaaaaaattgtgaatttgtgactgacattttaaaagcaaagttgacctctttcctgaatttgtgtgtgtgtgtgtgtgtgtgtgtgtgtgtgtgtgtgtgtgtgtgtgtgtgaaaaagttttttacatgtaaagatttttttttttttttttttttttttttttagacggagccttgctctgtcacccaggctggaatgtagtggcgcaatctcggctcactgcagcctcggcctcctgggttcaagcgattctgctgccttgatttcccaagtagctggaattacaggcatctgccaccatgctcggctaattttttatatttttagtagagatggggtttcaccatgttgtccaggctggtc

SEQ ID NO: 61799 - DNA, 1168 bp, Homo sapiens
actaactcgcaaattactttagtaagaaagtataaatctatttaatgtttttgttatgtacaaatatattaaatgaaataatgaataatgcctaggaaaacacaacaatagcaaagcaaatacttgtggctgccacccagtcatggcaatccttggtgttgtgtgtggtctctgatgccattgtcctgtctttttcttgtctctgctctcccattatgccattggcaaggagttgagaagttagtccattacttctctgacaaagcgtggtacagtacaatttcggattttttcctaccaccttcctcataatcactttttttggtttttttttccagtttgcatgatgcatgtcagagcctgcatgaaagtacaggcatgttacagatggctctatttccaccttcctttttatggttaaaatgtatttaataataacaataaacttgtatgtacccaggaaaaaaattagctaaattctgtgtctgttatgcagtagcattattacactttagaacatttcctgctttctatttggtgcactttgacatatttttactccatcaggacttgacattttagctgccatcttttgctaataaccctagaacaagaatgcttatgaaaactggcatgagtgcttttccgtatgctaatgctgtagatctttgaagtgtcgtaaaacagtaaaggtgaactgttttgctcattggtgggtactactttgccttttttcatgttcattatgtttcccccaatgggtcactgtggaatcacctctttccagaaatactgctccacactgtggcttgagtttagtatctgaaagttatcctgggtaggctagatcatctaagaaggaaataggacattatccaggaaagttagttccttaatattggtattatatctgcctgtagtgttttaaaatatattaaaataatcatctggttatactgtatattctgaaagcctgtgaactcatcagaactaaccaaattgcacagaatattaaattttagtgctgtattttaagaaattatctgatggttcaaattctggctttgccacttgccaaaatgtttgaatttgaacacgttaacattttttaaccccagtttactcatttatagaaagaaaagaacagtatgtttcacctaggggtctc

SEQ ID NO: 61800 - DNA, 1218 bp, Homo sapiens
atctctgccttgcttgctagaggttaagaggtagcttgttgttcaacttgctagcaggggtaattagcggcaatccagtccttagtgggtaaccacttccatgtagtcttccacataccaggagcaagttgtttccttgttcctcacattataggtgtttcttattcctcgtgaaagagactttttgtttttacagtagtggaattgattttccaaatatagttaccaaataaataataaagcaagacactgatttggggatagggaaattatatcatgccacaaaaattaatttttaataaaaatataaaattttatttcgcatatagaaaccactgatttagttaatgtaattcactagtagtatagatgtctaacttgtagtttagacatttatttataaaactgttaaattcctctcggttgactcaacattttgttattctttaaaaactggatgttttctaattcattaatatttgatatgaagctttattgcatttaatacaagtagcttgtctttctgactctgctgtatttccgtttatttctctgataagcagtggtcagttgggtactgtgagtaatcaaaacagtacaagtggtgagtacaaaacagtacaaatttatagtgcacaatggccctttcctgggcatttctggaggtaggttgtcttaataatcagtttattacctgtcttaattgaaaaatcatctttttatgcttttcactgatagcacatgtttataccttttttcttattggcaatagacatattacaataaagtccatttttaaattgtcactgatattttcagaagtcttaaattgctttaagagttttaacttggaactagaatatcttaccatgtttgagggtgaaaaggaaaaacaaatccccattcaaccaaccaattgatcgtgcctccttcctaattactttttattccctttggtagattttggtttgtttaatatggtcctgctctattttttcactaatctttcaaggtttttgatcactttggcacggtcatttttatctagggaaccccagggagaatctgttgatttaattatgtggtgattttagtatcttccgttttgcgggacagttcattcatttttgtgttgatgtgctgtgaaaatacccagtgactttaaagtctgggatatttagcttgaggcagcaattgagctgacttgtttatttcaaa

SEQ ID NO: 61801 - DNA, 1322 bp, Homo sapiens
aattttttctataataaattagtactttaatgttttctttttctcatttaattttggatcttgttcagtgtttactgcctgtatcattttttgtttgcattatcactcttgtatgtgtctaatttgcttgaatattgcagttcattttttaattaaaagaaactccacatattttccatattaaagccataataagtaccaacacagcctaattggtatttatattaaatctgggtggaatttctaagaacttgctgctaatgttgtttttaattttaacagcctcaagtactacagccttccagcagccttcccagacccacagatcacacccagggaaaactaataaagccacaacgtatcgaggcccgcagtgaatgctcaatccaagacatgcatcagggcggtgcacatccggaagaaagctttacacacgtcttgcaccaagaaagcaactatggtttggaagagcagcctttttcatcaggcccacaattaacaatggatgtggctaagagtacaccttctgaagcaaacttaaacattactgtaaatgctcaagagccttatcatttggcaaacaatcaaattagtgacatgcagtttatacccacttctcttcagacacctcccgagtcaagtacagtagaccaggctaagagagttggaagaaatcagtctccgccagtgggttatatgtctcagcccaagtccttgcagcttttaaagccatccatattgagttctttggtaccgcctccagtttctgaatcatctccaagtaggactcccacttgtaaaaagtcaccaataatcacaacatgtaattcagcaaaacttcagccaacatctagtcaaacaaatcttgcaaataatcagaatctgaaagcatctaagctccgccccccctcaggctctttcaaacaaaaacaaacaaacagcccccaactagagcctcaaagcttccaggccaagacaagcatcccaaggccactaacacaacgaaaagaaatcatgcagaatccaaatggcaatttgcattctggggattgtttggcctctaatcgatattctcgtcttcctaaaccaaagatacattaagtacatagccatcacctgccaatttgtttcttaaaaacaatctcttctgtaatagctttatgtgcagcttgcagcttgctactgtggtggaggttccattgaaagcctgcaaatcttaaattaaaatgtggaagcttctactagtttggctccttcattttatatcctggttgaagtacatgccatttgagcataattatctcaggtaaacacgaaagttt

SEQ ID NO: 61802 - DNA, 1979 bp, Homo sapiens
ttcataatattttactgagcaggcaagaagtgtgctttgctggtttagtcctattaaggtctgtatttattgtggttgtcagaacctcaccccttttcacttgtctctcctgtgaatatggctactattttaactaaagatatggtgataatggaagatggtagtctgtaagcagagttctggccagtgttttgtatatttaaaaggtctatgcaaaagctttgtgatgaataaaggagattaggcttttaatggaaagtctatgtaagttttatttttccttgccagggtcagtcagctaatgttactgttgattcatttcccaaattccccagactgaaagtgtttcttattacatataaatcagttatatattcctttacatcttgttttacaaacacatgtgcatgcacacacacatatacacacacataccatttatgtttgtatttgttactgggtaaattttggagcgcttgagatacaccttgaaacctgtacctaaagatgtattcatttgtaacatatgttggtgctagagttttgctggtaattcaggcttgaacccttaggcttgtggatccatgatagccattttaaggttccacagcattatgtctttaattgtaatatttatatttattgattttctgctaatatctgaagactgaaataatgaacttgaaacatttgcacaaaactttgatggggtataaatataccatatatagggattgtaaactattttctatagcaaaacaagttaaaatattttgagaaaaataacaaatttaaataagactatcttgagaaagctggagttcataatattctccccctcccccatctccagtctcctaggtttcccttttctgtgttttttgtttttttctgtttgttttttgagacagagtcttgctccattgcccaggctggattacagtggcgcaatctcggctcactgcaacttctgcctcccgggttcaagcgattctcctgcctcagcctcctgagtagctgggactacaggcatgtgccaccatgcctggctaatttttttgtatttttagtagagatgagatttcaccttgttggtcaggctggtctcgaactcctgacctcaagtgatccacccacctcgtctatggtgtatttttgaaagacaattttttaaaggtagatttgggaaaaaaatagaattgaagatgggaaattttgttttattaaaaaggtgctagaagatgtttcaaagacaatattcttattttaatacgctgtagaaggtaggtgtggaacctccatgctaccatgtgcacaaacctaattatgctttgggtcacttgtcagttcagtaaatctgccttcctcttctcccaaatcatgtcatctttaggttgttcacctgcagctgctttaaatgaattagtatctttcagatagataaccttacaaggagaatgtttgttttgagcagctgaccaaaaatatatcaaacaggattatggccaaaaagtcactcaaatttctagagattcctttaaaagatgtatgttgatgaaattgcccctttataagaaaaacaacagcaagtcttttagtagaaatttgaaagaagtgtttgctaccattttgacccattattcccttacctatcagatgaatttgccattcactggatagaaaccattcttggatttggtaagaggtgagcaagacaaatcttgtaccatactcttatgtaccagcacttctgatggagaagcagtgaagttcagaacgttcttcacatagtccagatactgttagagtcaggcaaatcagcaaagcactttgttatggagatgacccatgatggctgcagttgtaagtgggcatacatgttctatcattttgaaggagaaagaaaaccgttctcacatgttgcaaatatgtgaatcatactatattcccctaaagtaaaaccagtgacttagtggttt

SEQ ID NO: 61803 - DNA, 1045 bp, Homo sapiens
actggtttcctggtctctagggcactggggatgtactttgaaatcaccgaacaggcttgcaattaagatcaataaggctgcagcaccatttcaatttactttccatcttacccagtagtttttgtgtttttaaattcgtttgggtggttatgtttgcatgcttaagcacacatttgaaaattaattatagctgtactacccgatgtttttccttggggatgatggccttgttcctttttaaattctgatgcttgaattctattttctagtgatttttcacatctccctttaagtttttgctgcagcaatttgagagagtacttttgattaaatgattctgatggtgggcaccaatctacaactatgtcattaactgaagatacatgttttaatcttgttgggaataagcttacccactttctccttggtaaagcgtttacttaacaaaataatacccgagaatgtaaggtctctaagtcattactaacaaagagcaaaaataatatctgcagtattgtttttcccattgattttaagtcagtttagagtacaaactgtatattagaatttgcctgtaaaatgaattctaaaaagcagatgtaaagtctctcctgaaaatgttggcatagtaaataaaaataaagttcataattataaaagttctcttgtctttctcaacattgactcccatagtttgctttttctttgatatcttttttcccacaaagatctaagatactgttcatttgcttatgtttttcccaactctgatactttattttacatgctgccttcacacacatcttgacaccccaagccctgattgagtaggagttgatcagtattttgttgttgtgtcttcacaaattctgtaagagatctagtactttcgtttccattgtaataaaatacctgctttatcttagaatattgggataatggttaatggacatttcaagaaacattagcaccttggatttagaatgctgtacaaggaagaaaacacttgtaattttaattattttgtcattgtttttaagcagta

SEQ ID NO: 61804 - DNA, 1007 bp, Homo sapiens
cagtaaggaacctcactagtaggactaaactattttaaaataagccttgaagagaaatgtttaacatctttctaaaacattttattgaacacaattcacatacagtatatttcacaaatttagattgtgcaacttggaagtttctaaaaaatgcataacataggattaccatttacccaacaatttctacacctggatacacactcaagatgaatgaagacacatgtctgcacaaaatcttgaacacaagtttttatagcagcattactcataaggtctaaaaagtaaaaaatgtccaaatgcccttaagctaatattgtataaacaaaatgtggtgtgttcatagaatattatttggtcacaaaaagaaataaaataccagtacatgttataacatagacaattcttgaaaacaacaagctaagttaaaaaaaaatccaattataaaggaacacatattgtaggatttcatttatataaaatgtccagaataggcaaatgtctagagatagaaggtattccagggctgtggatagggaggtggggaacgaagagtgactactaatttggagagtgataaaaatattataaaagtagattgttgtgatggttgcataattctatgaatatactagaaaacatggaaacttacactctaaatgggtgaattatatgccaattatctcaacagagctgtttctattttcctatgagttttaaagggcataaaaagtagatacaataactggtcctataatagatgtttgtagacaaataaatgaattgttaaacgaggttagaaaaatttaaattggcattattaagaaaaaatattgaatattgacatgtaaacatggagagagagactgctcctctcaaataataaaataaaaatgataacaacaacaacaaaaatgcagataataaaaaaatatatacactttaatctaattttggctaaataaaataccaaaaaagaattatgtataagtgtgtgtgtgtttgtg

SEQ ID NO: 61805 - DNA, 1074 bp, Homo sapiens
atctattcatttattcatccagcagggagtatagagcacattcaatacctggattgggctgggcattggtggagtaacagtgctacagtaacattaccttgtaaccaacataatgaccatgttgcaacagttgtctatgaccagaaatcatcctattcatttattcactcatttattcttacatttctataataaagagatcatttgctcctgtcatgcacctaacattgtgtcaggctctggagataaaaagtgggtgagaaagcatggtctccaccttcatggagtggcagttggcaattcagaggagcaggcagagaagtgactcagtacagcacagcaagacgagtaccatgattagggaagtttctgtgattgtcagggcacatgggggctgtattagtttcttaggggtactgtgaacaaagtgtcacaaactgagtggtttagacaacatttattgtctcacagttctggaggctgaaagtctaagatcaaaatgtgggcagagctgatttcttctgagggctgtgagggagaatctgttctcacctctcccccagcgtttgacagtggctggcaattttggtgttctttggcttgtagatgcattaccctgctctctgccttcattttacacatggcattctgcctgtgtaggtatctgtgtagaaatttctcctttttataaggacactcgtggtactggagtagggccactctaatgacctcatttaacttgatgacctctgataaggactccccaagtgagatcaaatttataggtactaggggttaggatgccacatatttactttggggggatgcattccaacccatcacaggggaaatgtcttgaacagaattttgaaggtagtgatgtgttccccaagatgtggaatgtgaggagttgtccgcatgtttaggaaggagaactgttccatgtggcatacgagagggaccagaggcaggagagagcactgtgggcttgggaaacaaaatcttgcacaggacagaacataaagtatcggagcggctgctggaggactaagtgggacaagtccttcgaggcct

SEQ ID NO: 61806 - DNA, 1041 bp, Homo sapiens
cactctgttgcccaggctggagtgcagtggcacaatcatggctcactgcaacctctgcctcctgtgttcaagtgattcttgtgccgcaggcccacgagtagctgggactataggcacatgccactatgcctggctgattttagtagagatggagtttcaccatcctggtgacgctgatttcaaactcctagcctcaagtgatctgccccctcagtctcccaaagtactgggattataggtgtgagctactgcacctggccaattttattgctattttaaaaaactttttatatgaggtggtagattttatttttattctttcttgttttggaatgccttgttttattctgaatatagttgtgactgaattcttagtggttttactaatataaactgaagtgtaacccttatacagaaaaatttctaaatcttacgtgaatcacagtgaattttcaaaagtgaacatgtacatacagacaacactcacatcaaagaacatcaccagcaccctcagagctctcccctgtgcacccctttcatcaccacacccaccaaatggaaccagttttgatatctaatgcccttaattaggtttttcctgtttttaacttgatatcagtgatatcaaatgttccatactcttttgtatcgtacttcttttgctcaacattatgttagtaagattcatcattattgttgtatgtagttttagataattcattattgggttttacaaggaaagttttattatcatacaggtatagagaggccaacaaatcaggggacgactgccattgaaaagataggttgttacagttccccagaggggcatgcgaagcacactagacagggccacagggtcagtcaggaggtggaggaaaacctgagcaagcttcatacttatttttcaagacagacttggtgattcttgactctttgtattttcttatacattttaaaattagatttttattttccacaaaaaaatttgggattttgactgagattgccttgactcttgatcaatttgggaagtgttaa

SEQ ID NO: 61807 - DNA, 1053 bp, Homo sapiens
caacacttagtgttggtagtctttttaatttcagctattccaaaggcaggagtgagtctcactgtggttttaatttccatttccctgatgactgaagatgttgagcatttttcacattcttaccagccatttggatatcctgttttgtaaaaggcttgttcagaactttctcccactttactttttcaattgggttgttggactttttctttttgatttacaggataatttttaaaactaaaaatgctgaatatgggtctttttgggacatatgtattatgaataccttgtcatttgtatcatctttttcactatctaaatttggtgtcttttggtgagcaacagttattactttttaataaagtatgattgattatttttaaatggttactgccttttgtcttattttaaaaatctatgcctacattaaggcaaggaagctatcttcctatattttgttttagaagcttatttatttttattttaccttttacatttagatctgaagctgaatgactcctggggaaaggttgtcactggggaaccatctaagtgcatctgttttcacttagatttgttatttttattcctaaatttgatttccttttcatactactgtaaatggaattgtttcattaattttatttttattttcatgatagtatatagaaatagagttgatttttacatattgatcttgtatcctgcaaccttgcagaatttatttattagccttgatagttttttgtgtgaatatcttaggactttaaaaaaaataaatgagctgtgtcatctgcaaatatagatagttttacttcttcctccctatttccttctagatgttttaaaatttccttttcttgcctgatttgcatgactagaatctccagtacaatattgagtagaagttgcaaaagtggatatccttgtcttgttccttgtcttaggggaaaaacattgagtctttcatcattcagtatgatgttagctgcagatgtttcatagatgtcctttatcaggttgaaggagttttcttctattcctaattcgttg

SEQ ID NO: 61808 - DNA, 1027 bp, Homo sapiens
tataatttctctctccagtcctcatttttggtaaaaacaaattatgatgggacatgttgttcatagaataaactttagtcttatacttggcgtgattatttgcataaagtacaagaatgattattaggccttttggattggctttgatggaactctgttccacaaggaatctcagataagacctcttaaaggtgagctcagacatgggttcatattctcaaatacctgtgagttgggtgatcctctcctagattttggatgtattttgaaggcagattgacagaatcttcttagagcttggatgtgagtcttcagagaagagtcaaggacagtgccatcacttttggcctgagttataagaatggtgagaccatttgctacaatgacaaggaggacagaggagtgggttttggggggaagtggaaaccagtgtgtttttggaaatgttaaatttgagaaatccaattagaagcttgaaggaggcagctggatctactatgctggagatgagaggagaggctggagctgcaggtacacctggggactcaccagcacacagacactgtggatagccatagtatagcattagagggatgcttaagggaggagaagggatctggggactggcatcagaagggttgctgtaagggctaagtggggagcataaagcaatcagctttcttgcctcccatccttcagaattcatgggacatttcttacctttagattttacaatttggaagtctactagaagagctgggactttttttttaagtataaatattttgctcatgatgacacaatttttatttagttacaaacctgtcatttgagatgaaaatggccctttcccagagtccctcctaccaggtggcttttcagagagaagggtggatactccagtgccctgggcactggctaagaggtatgctgaggggagccctggctgtcctgagcaagtcatctctggtaaagactgagcatcacatgctccccccttctctaggtttgagcccagctattccat

SEQ ID NO: 61809 - DNA, 1030 bp, Homo sapiens
aacatctgaggaatgaatatgcaatgagtttgtgtgattctgcctggcactgactcagggccctgggatgctcttgcgctccaccaaggctccttgctacagcatccagttcggcagtctacacagaatgtacttttggcctgtatgagataacctgcaaaacgagccaccaagttctacccaagaacaaagggtattgcttctcctctagcagagaaaagtgtgatttctgcaaggtcccccgaagcctggaaatcactcatgttgctctcttcccctgccacatactatggttgcacatctctaagagttggggattccatgggggaccctgtaacggcacctctgtgatatgataaatagatgtgcctcttttgagtaaggtttttaggggaggtgaggtctcaggaccctgggaaaaccaggtgggctataattcaccctcggtggacatgcagatgagagggtagcttttatgaatgcctaattcttctttactaagcaaatcgggtatcttctgttgatcagcaatgtcccagttctagcactgcagaaagaccagcaaaaagaccagcaattaaaatgtaaccgaggtaaagtcactcactagcatgtcaaaagccattaagccaatgctggtttataagtttatgtgctatgattagcaagcaagtagggaaacgaagcaggtctttacctagaattttaaaaataaacaatgcaatgaaatgccattagccacttcaccccttcattcagcaaacatttatatggcacttattatgtgcttgccacttgctagactctggggatggagtttaacacagtgtagttcatttcctgaccttgaaaaccctgctatcttgagcagtgtttctgtgtgggggcttggtaaaatatctgacatttctttagtggactattgaaaacagatgtaaaactggtattatataataatctgtaactcactttcttactattgagcacatgtaggtaatgtttattaagtctttcaatgatcatgttaaaa

SEQ ID NO: 61810 - DNA, 1040 bp, Homo sapiens
aagatgcattagagtgtggagaaagaaagagatgtggttctgagagggagtaactgaggaaatggcccgaaactggagggtcagggaagacttccctgaggcagtggtccttgaggtgagacctgagagtgggaaaactgaaccaagtgggaaaactgatccctctgtgctgagggatgttagtcgaggaactgaaggaaattgggatgttgggaacccagcaagggaaggctacagtgaacacccgagggccaatggagtaggcaaaggttgagactgcagggtgtcgtcaaaggttatcatctttatttaagaacagagaagagccatggcttggttgatgcagtgcagctgcactaagcaggatggggatacaggccatgtctggccattgcagaagaaggtcatcccagacactggggaacctggcacatctgggaggttactatgtggtaccacagaaggcagagttctcatccacctcattcctgacctgaatcctaggtgacttctgtgaaatcttcagagaagtgactgcaggagggatctccttgaagacccaaatgtcctgttctctgaaaaggtttctttaatgctccttctactctgtctctctctccaagccaggattagttgccctctctgtgggctcacaaccctgtagaaacctctgtagagtcctctccactcactggagggttctcgagggccaggaccatgtcttgttagttggaatgcagcctgagtcccagggacagcagccctttatggatgtgctgaaggaacttcaccttcgctaagagttctaccacagtctaaagccaggcaaggggcagttcgccagctctgcaggaagcacaaggcatcttctgatgcttcgtggcatctcaaatgaggctctgtctttgcactgcagatgggcccgaggccctaggggctcctgattgctatgtggttttcaagcccttggaagggcctgccaggctgccatatgtatgggcaacagccaaatagcctccttaagctacagtctctgctat

SEQ ID NO: 61811 - DNA, 1061 bp, Homo sapiens
tagagaatgggagcttctcccttgtgctatctgtgctgggctgcacatctctgtgatactgggagattgtgtggacagggacccaagggtgttctgagctttccttctgttaatgaacaaattagttggttgtgattattggacacataggagtggccagtgaaggaaaacagaaagagctggcctggtctctgtcttgtcagttttcactctggaggggaggcagaaaacacacacacacacacacacacacacagacacacacacacacttggatcttcttgtagagacacaggtataaacagtctcaggaacaacctatcacaacaggtctgtacacacacatacacagacaccccggacacacacacacagactccattatgcagacactcacaacacacacacacacacacacacacacaaacacactcaaacccacatgtacattcatgccatatactggcatactaacatattacacacagacacatagatgctcagacacaagagctcccccgacagacacacagacacacacacatccatccatcttctaatatagaggtgagcatagaggcaggatggagaagacccagatgggaagtgtgtataagtgtgtatagccattacaaaggaatcagaagcttgtattggttccatgccccatgccttccatgtaaatacattcattttttaaccctaaactattggtaattttgtctctagagactcaggtgtgttcattcctttgacatacacaggcaagaaagcaaaggaacttaaaacaacgacagtgcatgtatgtacagctcttgagtttgcaattagttcagccaacttttactgatgctcaactgcaggccctgtggaatgtcctgggcatacagctgtgaaaaagatgagctccttctgttccatgagctcctggactttcaaagtgaagtcatgttcaggagcctgggggcactgacacacactcacacaaacaccaacacacactgtccacacacatatatctgtgcacatatgcacacacacagacacttgcacacaagtac

SEQ ID NO: 61812 - DNA, 1060 bp, Homo sapiens
ctggagaccttcttgggagaggtggcttgggataatgcttttcattaaggatgggcggaaaggcctgtcttctgagagtccatggcagtgctgattcagaaccccagggccaggtgcctgtggcttgcacggggcgctttcctgccccgccttggcctctgagagctccagctgtgctctgagcaggacagaggaagtgactgtaccttgaagaagagggatcctcagaagacccagtggagccacatgggctgccgctgggctgtttcagcggtaaatctcccaggatgggacatctttggggagttcctcctgcaggccatggcagggctttgcctctagcaatgggacatcttctggggactcctgagttgaactggctggtgggggtcttctgcctggggattgaaagtgaccatgtttcagaaatcccaggctggactgctgctggaaactgctagaggaattttgtgctcttctgacttgctgactcaccaggccttatgggttgccctgtgtgctttccctgaggtttcaggctttggttcccaccctcgttttctccttggcagcatcccttccaccacccccatgatggaactgggcacatgtgggtacccctgtgcaggggcatgctggaagctggcgtcctaactccatgcttagtaatatcccttggtagcttgaaatctaccatggtggaaatatttacatcaaggaagttggtaaatgctacaagtcaggggtttatttacttccagagagccagttaaacctctcctagcataccactgcccctggggctacagcgtggcttgacaagctcaacagtacttgcctcattctctatctgtttggcctaaggtcattgccggaaggcacctatctatctcagggcagtgtttccagaggccactgtggcccttttggtctgctgtgaccaaatccctaggtctgacacaaggccttcttgttgcagtccggtctagctcttgccatgatcctggattggcctgaaccagtgcactgaagcatcttttacgtcagacacactgtcctt

SEQ ID NO: 61813 - DNA, 1041 bp, Homo sapiens
atggagtaaagcgaatggtagaagaggaatggagtaaagcgaatggtagtaggagctgcagtgatgatggtgacaggccataggaatgggtgactgtctgaggggtaggtgctgggacatgagccccagcatgggcagtttcctaacttccccaggccactggcccacttgccgtaaggggtttctgtgccaactctgggagaagcaggcgggtagtgtcccctcttccctcccctggcttaatccactcccccagagcccaggagaggagtttccaggtattgggagctggacacaggccagttggtctacagggagccccaggctctgtaccaggccaggttcttagtgcctaaggtcccccgccatcgcctcaggaggagaaaggaaaaaatgaaaacatggaatcagtgcgacaggggtctaattaccctgggtagcatcaagcctccaattttgggccctggtgctccttttaatttggggtgtttaaatatttacctgcaatggaggggaaaaaatcttttgggctgcaaggctattctggcagcaatgcactgagaaattcattaaaccacagttaattaggggatgaaagatacgtatatagctcattagctcaacccacataatttacatctctgaggatattcgaggactagctcagcttaggctctcagaaatggtgtcttgaaaggaaacctctcactttggctatttctttgggcatgtggcattagggagggggccatggctgccctctgtctgtccatccacgagagggtaaaggggcccaggcctcgctgcctcttgtgttcgccgctggagccagaggtggggctgactggctgtgctcctgctgccagggatgattaacgagggggtggcagcctccttgcaggcgcgctgcttagcataatggtgcggtgtctgagcaggctttaagctgcatcgaatccgatttctagatcagagacattatccccgatttaatctgtaatagttagagaaattagggcgggagcatcagatccacgtgtc

SEQ ID NO: 61814 - DNA, 1019 bp, Homo sapiens
tgactcttctgcttggctccctctttcaaggacctttgtggttatattgggcccatctggataatcccagataatctccctattatttatttattcttttttgagacagagtctctctctgtcacccaggttggagtgcagtggtatgatcttggctcactgcaagctctgcctcccggattcacactattctcccgcctcagcctcccgagtagctgggactacaggcgcccgccaccatgcccggctaattttttgtatttttagtagagacgggatttcactgtgttagccaggatggtctcaatctcctgacctcgtgatccgcctgcctttgcctcccaaagtgctgggattacagatgtgagccaccgtgcccggccctccctattttaaggatagctggtttgcaagcttaatgctgtctgctacctgtgccatgtagcctaacatattcacagatctggggattaggatgtagacatctttgagggccattattctcctaccatgttggcacacctgtctgtgcccaatatgcattgtccacctccactttccttccaccctgataatcttttgcatgcttgactgcactcttgcttactgcggggcatcctcttttgttcgctgggcctgctatagtcacttgggatggatggctatgtttcctttctgtttctacaaagctcaccctggaagcatcacactgtaagcctgtggagcctccacagacttgcctgtgttctccaatgacatgtcagcttcttttcctgggcttggctgctgcttgtgcataaggaagttcctggaggaaactgctgttcgaatagtcagactgtaagttggtgctgccgcttggacccagggcctcttttctgcctgagcaggttgttcttcagaacctcaccgtctaggcccatgcctacctacaccccaagggacggccctcgttgaagtcaatcttgctttgccgcccggggtcccacagagagctgctgttcctggtcccctcaagg

SEQ ID NO: 61815 - DNA, 3230 bp, Homo sapiens
accaatatttcttgctctgtttcctcagatcaatgtaaccactgtgcgggaatatctgccagaaggagacttttcaataatgacagagatgctcaaaaaatttttgagttttatgaatctcactgtaagtagcttttattacagcttatatgattttaaatttataatacattgacagtagacataaaaatactatggccatagtaagtgggagcaaaaagggattttcttttaattttaataatcgtgttctatttcttcaaggtaatcattgcatgttatggcaaataactttatcaaacccacaatttaatctcggtgtactttgatttgtagtgttcagtttagtaaatctagaggtaaacttttatttatacttcttaaaatctgttaaatattaactgttacttcctttccccttcaccctgctttcagtgtgctgttggaacaactggccagaaatctatctctagagtgattgaatatttggaacattgctagctgctttacctttgcttcaggtgctcggtaatgctggagctatccttagacaaagaaaagtcaagtcatgaaagaagtccttgaagatataccaagaacattcatcagtatcattcgtgtttggatttttaaggccacctgatttcttcgtcatgcattcggcatttgctaaatgacagttactacatcaatctgcaactatcaaaaatgaggggaaaaggttcaggctgttaacaattccatgcagtatttaaatacatttactttggcagagtttataccctccccttgttttcttgctttattctgggcaagtttgaaggggaaaatttgtgctgctgttagtgcaactgctgtgtatgttgagccactgttgtcatgccagccaggtgcaaaggcagcttagctactgaggtagcgaatgttctgaggacattctagacaacagcttagttcctttttcaggctcatttgcttttgcttttttgttgaatgattccaatcgtaaataaagcttttaataattttgtgaattttttggttgttgttccctgaactactgtctatatttaaaattagatggaatccaaagatacacgggattaatagtatatttttttattcttgattaggtttgggttattgaactattttttacttttgagaccacaaccatattcaatatcataccataatgtgtcatagctataggcacaagaaaaacaacagtttgagagaatattatataagatgatgtgccctgttaaaaggaggaggcaaaatagtcaaacccagggtagtttacacttaatgctagggaggctcttaaaacattattagattttgaggaaagactctctagatatattttctaatgttcagtacaataaatataaggaagctaaaacaccaatgtggaattcctgtttccagataacatgtatattcttctatagagtgacaggatcaattgcataagcgcaaagccttaaattgctggtttagagaagacccttttttcattcagattctttgttcgtagagcagttatttgaaaaacagttatggaacacaaaacattttatagatttaatatcataacattgcaaatttttcttgtattattcacaccactggttatacttttttttttccttttttattgattgggcctgaatacaggctttctagagatctttttcattaatacttttaaatacctttcaggtagttacatcatgtttcttcattggatttgtaaaacttgaagccataaaaatattagtttggtgtgtattggggaaaatagctaaaagtctaatttttacccatttagactttgttatttccttgtataaagtgacaaatcggggctcttgtatcagtgccagctgtaatgtttttaaatgcagtggctgccttctattgtcttcctatttttgataatgcagattgttgggaaatctgtaaggaagtaactgattccaggcaaattgttttcttccttctacccaccccaacccctacccatcaccttttaagaacatagtacgccagtgtaacgtgggaaccattgagattgtatttgccctgagtattaaagctagcttagcaaaatacttttaaaaacatattggtaaatgatacccgtaaaattaaattagttatattttattttaaaatgcaaaatacattgatatttattaatcattggatttagggaaagggacagatttttggtgaacctgacttgtggcagatggtaaggaatattataaaacatttggatgagaacaatcagggcgaactgcatttttctgttacactggtaatcatttgaaaattgatttacctcagtgtttaacagttttttgttttgttttgttttttaaataataactaattgtcgagcactgatagagatgcagattttggtggggggaggtggtgggggagataatcacttcaccaactgcagtgcatttgtgtgtttttaaccctcagagaactctgcattttagggtacttgaggctgacttaactaaaagttttaaagtaaccttttttccattgtaaatatttctgtaaatactaccaattggaaattagaacagtagagtacttttctgaatccaatcctatttttattttatacagtatttctcagctgtgatctttggagcaaaagccaacggcaggaaaaaatagtttgtaccagtttcatgaagtatgtctttgggtttttgtaaataattttaactcaaataaaattgctactttcaatacacatgttgtctttaacataagtctattggaggacagaagtgtcacaaactttatatatagccgactctaatgggaaatacactatcacttaacacatttaaccagtttttgttaaatattttattatttctccatgtttttaataatactcatctgaatataatgtgaactcaacaactcaggccaattagggactggattttcagttaggcccttggcatacttaactgttttgatttaggttattttttgctcctatgagtatgatccaagacatctttgcttctgaggttttacactgctttttagtttttcagttttcttcttaattgtcagcccttaggcatcctgcatttacaagtagattcctcaacttctccttactgcttttagccacaaaactagattgaaggatctctcctgggagtttccattactctccc

SEQ ID NO: 61816 - DNA, 1249 bp, Homo sapiens
gaccaaagttctcatcgtggctctggaggccccgcaagatctttatatccctttttcttatttccaatgacaagattttaagagcaaatcagaaacccatcacacacaggaaaggaggaagaggcaggcctcaaaagcagtgaaaaaaggccgggcgcagtggctcacgcctgtaatcccagcactttgggaggccaaggtgggcagatcacaaggtcaggagatcgagaccatcctggctaacacggtgaaacggtgaaaccccgtctctactaaaaatacaaaaaaaaaattagccgggcgtggtggtgggcacctgtagtcccagctactcgggaggctgaggcagcagaatggcgtgaactcgggaggcggagcttgcagtgagtggagatcgcaccactgcattccagcctgggcaacagagcgagactccatctcaaaaaaaaaaaagcaatgaaaataatatttaaatttaaagatttttagatactctgttttttacacactataggtttagtcatatttcagtcacgttctttcttacataatcgttcttgaaattgtgttattaccacatatgatttatcttgggccatctttcccatgctaattcctatttgtgtttgcctgtatctatcttgtctctaaaaagagaatgttcttaaattgtgggaaatgttgtgaattcatagagccccagatttatttgttgccttggagattattatgattaacaccaaaaagctagctgataccacaaaatgtaaaggaagtttggtttacctaatgtgtaagtgaaaagagatagacaagaaagcatgtggttgttgcagtaaatgctgctttgtggtctgatcccattttcacttgccctccatgtcttctcactttgcagctggtgcattgcagtggtcagtctcctcactgctcttcctgctttgttgcccctccattcctgggacattgcacattgccactggagctaacttacttcagagcacttactgatcacgtagctccttgcccagtcttccttggctcacagccaggaaggggactcatgactgtttagtgttgcaagaccctggacttaagactgcttctccaatttccaaacctactggacacttttaaaatttttcaaataggccatgctgtatcatgccttttctttttgtacctgctatattctgttaaaaaatgctgtcactgtccctcccattgcctcagaaacgctgtatgtcat

SEQ ID NO: 61817 - DNA, 1033 bp, Homo sapiens
tcgaactcctgggctcaagtgatcctcctgcctcgacctctcaaagtgctggcattataggtgtgagccacagtgcccaccccatttctctctttaaactgctgtcctccacatgttgtcctctgctagcccttatggtcccgtgctgactacagctaggtgtctcatcaaattaagtagtgcctagcagtaatagggcctcttcctctatagtttttttttttttttcataggtgcattggctggaaatacatatctttttaagacaactgtttgtttatttcccctgtgggaccccatgccactctcacccctcaccaggtagacttctcatcttggccagcattgggtcacaatgcttttgtctgaaccagtcactggctgggaacatgggattactgtgagtggattagatcatcaggattcacttaggagaaatacaaatgtctagacaatcaggctgagtcagcctgaaagtgaaaggttgtgactatggggatagtctgctgccttgggaaaaacaaatatgaagggtaaaactgttgaagaagggtccagcagaatcattgtgagtgttctctttcagatggggggttgggcataggtggattatttttaagtgtaaagtccatttgtaaagccagattttgaaatggaaggcagattgttttctaggagcaagggcattgagggaacaagaaagagtggagacctataggaggggggcattagtttcagcaggaagcaggggccatctctttttgaagctggaggactggaagaacagagttaatgataaatgaatggctttatttgagcaggaactcatgctggctctgtgtacctgggcccatctacccaccccacgtttccttactttagccatctaattctttgtattgcctttttttttttttttcactttgtgtatctaagtcctgtgtgtttttctgaatccatcttgtccatctcttccatacttaacattttaactaacctaaatacaacagcccactctgtgtggcccctctgg

SEQ ID NO: 61818 - DNA, 1097 bp, Homo sapiens
ggctgattatagggttgtttaaattgtttgtttcctatggaggaaaaatggcaagaaaatgtgttaacatttccagtagtttttttttttttttttgaggcggagtctcgttctgtcacccaggctggagtgcagtggcgcaatctcggctcactgcaagctccacctccctggttcccgccattctcctgcctcagtctcccgagtagctgggactacaggcgcctgccaccgcccccggctaacttttttttgtattttttggtagagacggggattcatcgtgttagccaggttggtctcaatctcctgacctcgtgatccgcctgccttggactcccaaagttctgggattacaggcgtgagccaccgtgcccggccatttccagtagttttatttaaattacctaaatagttttaaagtaaaaactttagtacagtctgtattggaaagggaatgtatagcattttttacatgctaatcctttccaatataggttttactaagtaaggcctggagtggagtaaattaaattgattttcactttttaaaaagtgaaataaagttgatctttatggctttattaggaaggatgtgcctgtcagagttaggctgttaaagatgtaagaaaaagcagttctggaaaacaagctagtcagtgctttaatctcatgaaaaaggaagaattacatacatgaaataaaattaaaaatcaaaatagtatataatattaaaaactttaaaatacttgttgagctttttcaggtacatcccaaaggtcagaatactaatgaaaaagctcttgtggccgggcatggtggctcatgcctgtaatctcagcactttgggaggctgagatgggcagatcacttgaggttaggagttcgagaccagccttgccaacatggcagaaccatgtctctactaaaaatataaaaatttgctgggcgtggcggtgcacacctctaatctcagctactcgggaggctgagacgcaagaatcgaatcgcttgaatcctggaggcggagtttgcagtgagccaagatcgtgccactgcacttcagcctgggcttcagagtgagactgtttcaaaaa

SEQ ID NO: 61819 - DNA, 1169 bp, Homo sapiens
atctttgaggtctacttggcatttgattttcaggcaattctttctagtaacttggagcatttcccaaattgtgtcagtgttttttctatgtgtcagtactataccagcatagggaaaataaagtaagtgaaggcaaggaatttagcatattcccttttgacttaagaattttccaattttgtatttttttgcttgaatttcttgtattatgcaaattaagggaaattattgagactcattcttgcatcattattagatgacttcattgaatcttagcagcatttatactttcgttttggctttcagtagggtgtagagcaaaagcttttacttatactcacctctttttatcacataaccatcttagagttagtgatagatttaaaagcaactataactttatatttgcatatatgcatattgattggcaatctctttttaatgatcttcaaaaataatttttatcagctattccttgagcgagagcgggcagcccagctagcagaaagtaaaacagatgagttgatcaaagatgctcccaccactcagcatgataagagtggagagtggcaagaaacaagtggagaaatacagtgggtgtcaactgaaaagactgatggtacagaagagaaacataagaaggaggaggaggatgaagaacttgacctcaataaaggtatatttactttgaatggtgtatttaaattgaagatagtggtttgattttgtttttttcttcaaactattttaatttgcagattgtcttaatctggctattgcttgaggacctctctagttcagtccagacaagctttgatacttaagtgcttgtggtagttctcccacagtgaggaaggtgcgtgccagtggcaggcatgctagtgacgggaaagatccagttaagtcactcttccttccggggccctcctttcctttacttatctgtgaagagacatataggagacataataggattttttcagttttcagtttttgagattgttttttcagcttcactttaaacttgaagatctattgtcagattacagtaatagttctcaaagtgtaagtactagatggtaaacacagtaagaaatatactgtaggctggtggctcacacctgtgagcccagcactttgggaggctgaagcaggaggattacttgagg

SEQ ID NO: 61820 - DNA, 1203 bp, Homo sapiens
tcgaggagacatgtcaatttgaatgaacttaaattaaaaaataatgatttatactgtcaacgttggtagtgaaggtaataaaaataatgatttgctctaatgcgtatgaaatatttaatacttgtctttacattaacatttgttatgtagtaataacatttactacctcagaagtgtccaacattagctgttaaccatttgccctgtttgagaaagggttgtggtctgtctcttatattggagagatcaataacatgcgagacaatttggaaataaagagattactagtggtaaatgtagatagtacagatataaacttctgccataagtttttaattttaacattccttgaataagttttttaaggtatcagatttttccaaaataaagtgaaatttcatccgatagcctttaggttcaagtaaatagaaatttgctgtgtacctattattatttactataatagtctatattttatttccttttaagagcattacagcattgtgaagaactgattcagcagtacaaccgtgctgaggacagcatatgcttagctgacagtaagcctctgcctcaccagaatgtaactaaccatgtaggcaaagcagtggaggactgcatgagggccatcatcggggtgttgcttaatttaactaatgataatggtaagatttttttccatttttttctcattgaaagatgtatattgcatgtgaaaacaagttatttttgtttctccttttcctggggtagtgatttttttatttgtcataatgtacttgacttactcatgtgtaggtttaaattgcttttaagagttgatatttttagaagcctagtagcttgacccagaagtatcaatagtatgtttcaatagaggaatgactatacaattctaagttaatatccatgttaataaatctccattattagtgttctaaggaagaatcagtaaccattttcctgtatccatttcttatttcagagtggggcagcaccaaaacaggagagcaggacggtctcataggcacagcgctgaactgtgtgcttcaggttccaaagtacctacctcaggagcagagatttgatattcgagtgctggtaagttgaaatgactttttcagaaatgagtatcatatctaataaggtgtgcaaaatgttaaccttagtttgggtttaagaaccaaccctttaatatattgt

SEQ ID NO: 61821 - DNA, 1022 bp, Homo sapiens
tgaccaggctggtctcgaactcctgacctcaggtgatccacccgccttggcctcccaaagtgttgggattacagatgtgagccaccgtgcctggcctattttatatatatttagcactctcttttttttttttttttttaatagatacagggtcttgctatgttgtcccagctggtctcaaactcgtgggcttaagtgattctcctgccttgacctcccaaaatgttgggattacaggcattagccactgtgcattgcctgtatttagtgctcttaccgcatgcattctggttgtttgctaccatgtttttacccttccttaccaaagattattgaagttaaatgtttctgatttcattttcttttttaaattaagaaaaattgtgtatgttgtttctgatttaaaaatatctcttttgtatacttcataacctctgacaactaccttgtaagaggaagtatttgatatgacaggtgctcttttgttgtgattaggaaattcaggccaaatgtcttggaagtggcagtagaggtcagaattgagtgtttgtaaaagagcacttatctctaggtttttaagcttttcagcagaaaccatgatcaattcggagatagcatacagaaagattaaataacatatgctgaacctccttttgtcttcaaagccccagtttagcccagcctgaaaacagttgagttaccagtgacagtatggtaatcctgaccagcattcaataccagaagaacaaattattttaggttagacatgaggaacaccttcctgaccaaagggttgtaaaatattaagaacttttacagaacttcctcagtatgttttaaagggcaactaggcgtagattagatacggtttctttaagaattttgtgtgatatataatgcatgaagaatcaactgacagagtgagcttacttgatttgtattaaacttaaaaatcgtggacttggtgatttaaatagtgtctttagaaatactagacccattagggattatatttccttgtt

SEQ ID NO: 61822 - DNA, 1140 bp, Homo sapiens
acaaaatgacagtgtggattccagcttgataatttcagctgtataacttttgtaatgtacaaatcaagctctttacaagggggataataatagtggctaacccacctaggatttttattacagtaaaatgagttaatttgtatgtttgtaagaaatatatacatagtagatatttaaaaatatgtgtatattaaaaatacatataaaaaatttaaatttaaatgatttttaaagtatcttttgtatcatttgtgatacatattaatgagttaaattagttaatgtgcaaagcctagaacagtacttggcgtatagtaaatactaagcatttttcctcattcttgttttaaatggacttttctctgttcttctgcactttatttagacctgtttttctatatctgtatgtagcttcttccattccacatttatttcttcccacatttcatcacaattaggctaatgctgtcacctccttgcaggtaaaattcccaagtatgtctccagtcctggttctgtcttattacagcaacctcttcctgatatctctgtcctagttcttgatatctgccctagttctctggcctttagcctatccagaacaataccacatggagttaactttctccaaatcgctgctttgaaaaaataattttaatttctcaaatctctgattccttattgtctttggatatatgtacaactttcttattgaagtcagccttatcaaaggcccattgcagtcttactctagtttatctgttttttaacctcttattttggaggaattcaaatataaatagtgtaataaactgtaatgtacacattatcaatcatggccagtctggtttccatctgtaacctcatccattccctctcctgtattatttgaaacagatccagatattatttcgtccataaatacttaagtacataatgcctagaagaaaaggactcttttaaaaaatataaccccagtgccattttcatgccacacattattagttgcttaatattttatgtttagtcaatattctaattttcagtagtctcaaatttctagtctcagtagattttcttaatctgtaggtttttaaaatctcctttttttgtcttggatttgtacgttttgtatcttgc

SEQ ID NO: 61823 - DNA, 1594 bp, Homo sapiens
ttgaaggggagaaacttagggagaaaaaccagatcttgtcagtctttgctagttaaagcatttcttttgttatgctgaagttctttattgcagcaggaaccaaattgctctttgttgggaagtggctgtctgctttaaaaagaaaaacaacagccaaagtgaaataaagggcaataaaaactttactcaggttgtgagtgtggctcttagcttttgtactcttctggtggtggtcctaaagcattatttgtatacagttttgtcatcatggccacatgatgaatatctgagctgctaagcccgcagtatgccctttaaaaactagtcagtctgcaacactaaagtgaacaaaggatttgtatgcagaatagacaaaatacaccaaataataagaaaagacaatcagtcttgcaggaaaatatggaaagaataatgaacaggagtctcatagtagaaacatagttaatatgtgaaaaactgttcaaggttactgtcgttgtaaaaatacaaacaaaagcagtatgttaccattttgtaccctcagacaaaaatgttaagtgataacttgtacttttgaagattcagggcaactggcactcccacactttgctcctgagagtgttacttgttaaatccattgtggtaaattaatccaatattgatttacagttaaaaaatacatgtaccctttgacttagcagttccacacttgacctgtatactgtagaaataagagtacctatatatatgtataatattaaactgacaaatgatagactaatagcacattttctctatgaaaagctggttaaaaaactttgttcaatgtggactattctgataaaattgaaaattagttcaattttatgtataaaagtggtgttaaactacatgtagcatgcagtaaatttttgtaaagagaaacaatttctagagttattgctaaaagttgatattcattaatgatgcttctggtttttagactgggcatttagctatggagacattattatcccttacttctaaacgagcaggagactggtttaaagaagaactccggcttttgggtggtctggatcatattgtagataaaggtatgatatttacatttagaatgtttttatatattatttaaagcctgaagaaaatactccattgacgtacttcaaaaaataattgtatcagtttggaaatgtctattatcattattattttttagttgcatcctgcaaatttctaacatttaaagaagaggccggccgggcacggtggctcatgcctgtaatcccagcactttgggaggccaaggcgggcggatcacctgaggtcgggagtttgagaccagcctgaccaacatggagaaaccccgtctctactaaaaatacaaaactagccaggcgtggtggtgcatgcttgtaatcccagctacttgggaggctgaggcaggagaattgcttgaatgtgggaggtggaggttgcagtgagccgagattgtgccattgcactccagcctgggcaacaagagcgaaactccatctcaaaaaaaaaaagaagaggccattaacattttgatattgggggattatggaaacaa

SEQ ID NO: 61824 - DNA, 1040 bp, Homo sapiens
acctgttatcccagcattttgggaggccgaggtgggcggatcacgaagtcaggagatcgagaccatcctggctaacaccgtgaaaccccgtctctactaaaaaaatacaaaaaataagctgggcgtggtggcacacaccagtagtccgagctactcaggaggctgaggcaggagaatcgcttgaacctgggaggtggaagctgcagtgagccgagattgcgccactgcactccagcctgggcgacagagtaagactccatctcaaaaaaaaaaaaaaaaaattttttagagggaccgctgaataaaacgtttttgaagtttccaacatggttagtaatataagttttaagcattaacttgtaaacaaaagtcattaatagtcttatttcctgagatgtcaggagttgcttacatgaagttttttttcttttctttttttggcctgttgaagaatctgtccctctgtacagctgccctcatgtatatactgagtagagatcgtttgaacatggatcttgatagagctagcttagatctaatgattcgacttttggaactggaacaagatgcttcatcagccaagctactgaatgaaaaagacatgaacaaaattaaagaaaaaatccgaaggctctgtgaaactgtacacaacaagcatcttgatctagaaaatataacggtgggttccttcttccttccttctaagatgagaattactttcagaaagtctttggttagttgcagtagctgtgtgactgtgggcaaattattttaattctaaccttggtttacagtttggcaaatttcttatgtttagatctgagcataatttcattccttgcctgaacttcctaaactagtttatctgtatttaggctttttgcccaataaatagttgcacattttctgttgcattttgtctaatccttttctctttattttttaagaaaaaaaaggggccgggcacagtggttcatgcctataataccagcattttgagaggccaaggcaggtggattgcttgaacctgggagtttggg

SEQ ID NO: 61825 - DNA, 1099 bp, Homo sapiens
gttctttttacctctgatgttcaagtaataagttagatttatttaagcatattgtgatctggacgcttacatttgtacccaaatgctcaaaaagatgatcttttgtatttcctaatggattgattgaatactataattttgattaaatttttcagtcatttggagtatatccaatcaaatataattaattaattgtgatttttatcagaagtattaatgaaaggcagctcagattttaagcttttaatggtggtagtagtaacgtaaggaatgcactaaagacaattacgttatttttttaaaatacagtgtacctaatcatgcactaggcatcagtatatttttaataatgtgttttgcctatggtttttatattgtgatcatgtatgggcaatgctttgacccttttacccccttcctatttgctggttttggtattacacaaactcaaaactaatgtactagctgtttccagcccccctaacctgctctattttcttgtagtgttattagcttggctactaaatgtgccatgcccagttttcgaatgcacctgagagcacatgggatggtagcaatggtctttaaaaccttggatgattcccagcaccatcaggtattttttaagtttctgagattgagaagccttatgttgaaaactactagtctatttggctatcaaaaatatcttcactgaatattctataaatatatcctaattatagattgagttcattttatttgctaaatttgtagtgcttatggccagaagcttttgcttaatacttattttatcatgaaaacgtgaaaacattttttcttaatgtgtcattttatacttttaaaattgtattttgttatcttagctaatgtagtatattgatacagaattttgtaagcataattttctctataatcagaaagcactgagaagaatcttttaatattatttgatactaatgaatggaaaaaaactggtttggaaatgcagccctaattttttagaaacgtttttgtccagtgttgaatctggaacatggcctcattgtgataaggaataatttcttcattttccttgcctttgatgcttttgcataat

SEQ ID NO: 61826 - DNA, 1057 bp, Homo sapiens
cttcttaaactgattagactccttttgatagtataaagaaatcattttgtatattagtagtaatatagcatgctcctgttatagctatttatttttaccctaaactacttcacactcttgtgctactaaaattcttttgactctgtctggtttttctgtcctgtccctttctgcttatgaaagctatttttgcatgcagttgtggttctttagtctttctaatggtactagagacaaacgacaaattgtgtgaaataaaaagtttaaaaaagaccagaagaaatccttgagtggttcttctgtgtgcagatatacatatgtcttacctgttagtgcatggaattcaaagtatttctaaagacctttgagaggcctccctgctccctgctttttaaaaagctttatttacttttttttgaagctgaatttgccagatagatgagacgttcctatttttatatatttatttagaacaactaatttaatacctttattaataggtgaggctgtcttcaaaggaaccaaatcaaaaagatgatggagtttttaaggctcctgcaccaccatccaaagtgataaaaactgtgacaatacctactcagccctaccaagatatagttactgcactgaaatgcagacgagaagacaaagaagtaagcagccatatacagtgtttactgcatgttgatagatttttgtatgtaacatttagccatttaatatcttcaacaaatatcagtatactgatactcagttttgaaccacaaacttcttttgtcctaccatcatccttgttctaaaaatatttttgttgccatctaatgaactattttatgcacttatgtaaagtacagtgagcccatagatttaaatatgctagttcctagttaaaaaggggtgaactttttttttcttggcagttatatactgttgttcagcacgtgaagcacttcaacgatgttgtagaatttggtgaaaatcaagagttcactgatgacattgagtacttgttaagtggcttaaagagcactcagcctctaaacacacgttgccttag

SEQ ID NO: 61827 - DNA, 1943 bp, Homo sapiens
gtccaaaccatgtatttgaagttcaaaacataatttaacgtcacttttgtagaggatagagaggatgaggtgttacctttctattttgtctttgtaattatgcagttttctcttgaaagtgagggttttgttcttttacttgatttgattttgtaggtttactgtcatttattctcaattcggaaattcagtgttaaaactgaaaatcccctggaagtttaagtaaattgatagggcagcacaataacctcaattgatgtgtgagggactttacatctttgtcctgcttagtgtaacattttgctgcagaaatcatgtatgttattacatggtacttttttggatcccactgtgtcttggaatatgtggtatatgtattatatttaccttgataaaatttgagaactcttgagtggtggcacacagctggctgcagtggtttgctttaaatgagcgcattgtctgtcataaactgctggattcccattgttggaagattgtgaggcatgaattggtagtaggaagaataaagttttgccaaagaacccattgaactattattattatcatcattactattttttaaatttttttgagacggagtcttgctttgtcacccaggttggtcttgaactctggggctcacccaggttggtcttgaactcctggactcaagtgatcctccttcctcactctcccaaagtgctgggattacaggcatgagccatcatgcccagcccatgttgagttaaatgtgttgattacttagtaagcctagcaagaggtttaccttttttttttttttttgagacggagtctcactctgtcacccaggctggagtgcagtggcacagtcttagctcactgcaacctctgcctccggattcaggtgattctcctgcctcagcctcccaaatagctgggattacagatgcctgccaccatgcccagctaattttttttatttttagtagagatggggtttcactatgttgaccaggctcgtctcaaactcctgacctcaagtgatccacccgccttggcctcccaaagtgctgggattgcaggtgtgagccaccatgtctggcctaggtttactttcaagtgccatcttttcttggttagtcatagttgcacagagcactaattactgattttgtgacctagtactacagtgattatatttgccatagacatgagaatgggaattatggtgggactgttcccagatagtatccatcctgctgtttctaggacatgtttatgcatataaattattctttatgatttttagttgagagtcttttataaggatggaagcagttgatctttctctcatttctctagtcacccacaaaagctgtatataatgccagacattggaatcatccagattcagaagaactgcctgggccaccagtagtaaaacctcagagtgtcacagtaagtgaactgtacttatttattttgtgttttttaataagctataaattaagcagttactcttttaattcataatttgtaaatctttgacttttctatttaacagtttattttggctttctttactgaaacttattagtttcagtttaattcattggaaaactgaggattgtcagtaagatagcagaaattctagtgctgctaggttaaacaatgaaagccataaaaaataaggctcttgttactcatgacccacatttcatggaatttatagtatttagtgtttaagagcaagattgtccatatttgatgtttgtataagagctatgttgtgtattacatcctatatatatttctaagtggctttcagtgcttaatttgcttttcagagacaaatctcttcctgtattctagtaatacttttcaatccaaaacattaggaaaaagattcttagcaacttattttctccagaatgactggtaatatcatacatgatttc

SEQ ID NO: 61828 - DNA, 1051 bp, Homo sapiens
gttgattcgggcagagaagaaagactttgcagctttatttcttctcgttagatgtggattagattctctacagtgtttcatattgcatattacaatttctaattcttgatagtacagatgctgttggttttaatttaggagtttctgtagtcttccttcaaataattcaatactctggatatttaacatgtgttatgttttttatagtttaagaccatttgagattgtatgattatgcttaaaaggaagttgtaaagagctcaaagattctttgtaagacttttcttctcctgcttctgattccaattgtcttttttaaaggatttttataaatcctttaaagaaatttttgacaatccagatccaaattgtttttttctacttcccccttttgaattgccgctaaagtactgtgcacacatacacacatagttatgcattgcagtacttcttcagagttcatttagttgtacttcgtgctgattgattgaattactggtgatatccttgggtggataaagctggatgaattcttatcagcttactattttgtcttcatatagcacatagtttttaaaacgtataaataaatttgctcttcttgttcataaagtatttatggcttaaaaacattccttttttttggctgtgcgctgtggctcacgccagtagtcccagcactttgggaggccaaggcaggtggatcacctgaggtcaggagttcaagaccagcctggccaacatggcaaaaccccatctctactagaaatacaaaaattagccaggcgtgctggcgcttgtaatcccagctactcgggaggctgaggcaggagaatcgcttgaacccgggaggcgcaggttacagtgagccgaaatcacaccattgcactccagcctgggcagtaagagcgagaaactttgtctcaaaaacaaaacaaaacaagaacaaaagaaacccattcctttttttcctggcttttatgagccagcccagtgggggataacatgtcatttcctcttagattttcaggaaggaatgctttctttcctc

SEQ ID NO: 61829 - DNA, 1455 bp, Homo sapiens
cagcctatacctttactttcatcattcccctgtggtttaaagctaggcccttctagcactatcttttgtctaactctttaaggaacattctggacttaattttttcttcccatctgtccttcaatatgacactggatagggggcttctgggcaattaaaatttatcagtataaatcatggttacatatttagttgttttagaatgttgtaattacataaacctgcagttttaaagttgaatatagctttatactttgataaacttcattttttgttttataaaatgagtttatacgggttgtcaacttactagcaaaatcttacaattgaagagactttaaaggacaagtactcccacatctcacccaagaacaaatgttccttccacacagtgtcttcctttagcagttagaacccactctcatgaaatagcatatttttctgtcagaacagttttacccagtgttacctttgttatatgtatggggactcactgactatcttgagatccagtcatcatgtggtattgtgagatccactatattctcaagtactagaaacctgatatattaattgatatgaagcctgaaaaaaagaatgactgtagcaattggattggtgatgagggaaactggcaaaagtgtggaagttaatagctgctgccattcacttacagctcctgggtgggtgatccaaagagttgttgaagctgagcaggttctggctgggcctaggtatggaagagagggagtcggttttagttggctttttttcatcattgtttttgtttggtgtttactacatgactttcactgtgctagggatacaaaaatgaataagaagagtatcttaaaaaggcagaattgttttttcctactggaattttgagcagtcttagtatttcctcagtgtgtttgttccaaaccagaagcatattgcttccttttatataggtagtatttaacttaaatattaaaccaggtaattaaaatcattgatctgtataagtcaaaaaggcttaggaaaatgtaaattattttctctctgtgatccaattcttgtgcttttttttcctttaatactttattctggaaggattttaataagtaatgaaagtactgttaatctttttttttgttttggatatggagtctcgctctgttgcccaggctggagtgcagtggcgcagtctcagctcactgcaatctctgtctcttgggttcaagtgattcaactgccttagcctcttgagtagctgggactacaggtgggtgccaccatgtcctagggctaatttttgtatttttagtagagacggggttttaccatgttggtcttgaactcctgatctcaagcgatccgcctccctcggcctcccaatgtgctgggattacagatgtgagctaccgtgccctgcctaatcgtattttctttagtataggtgcctttaaagtt

SEQ ID NO: 61830 - DNA, 1187 bp, Homo sapiens
tttgttttgagacagagtcttgctctgttgcccaggctggagtgcagtggtgcgatctcagctcactgcaagctccgcctcccaggttcactccattctcctgcctcagcctcccaagtagctgggactacaggcgcccaccaccatgcccggctaatttttttttggtattttttagtagaggtggggtttcaccgtgttagccaggatggtcttgctctcctgacctcgtgatccacccgcctcggcctcctaaagtggtgggattacaggcgtgagccaccacacctggcccagaaagcatgaactcttaagcatacgtgtctgtgagaatttcctttagtgtctcccaggaatatagagttgttaatatcaggattgagggctgactcagaaagaagatgagggtgaagaaaacttgtagtaagaacatagttgaaatgatgattcagaaaagttgtcacttgctggtgagaaaaagaaagataggatttgataaatagggttgaaacatacctggatttaactacctattgtttctaggtaaggttttgatcattgagcagttcttggtactttcgttcatgaaatgtcatccagtttctgatttctggctacagcttccctacatgccattatttgtagctgtcatatgtgtgctgatatacttagattatttcttctgcttgccctgcttgtggtttgacttctaccttttcattcagctgctgcctgtcatccctgcttgtaagcattcattgtctgtatagtcaggctgactgtacaggttttcagtgcttgcggggttggttgtgttttacctgggatgttggccatcttgttttgcagttaagactgctgctgggtcattgatgaaactaaccataacgtcaatctcagtttcaattctccaatatttatacctttacgttctttttttgttgttgagacagggtttcactccagttgctcaggctggagtgcaatggtgtgatcatgtctcactgcagcctcgacttcctgggctcaagtgattcctgtgcttcagcctctagggtagctgggactataggcacacgccactgcgtccagctaattttttgtattttttgtagagatggggtttcaccatttttcccaggctagtctcgggctcctgagtctagccatctgccggtctcggcctc

SEQ ID NO: 61831 - DNA, 1914 bp, Homo sapiens
cttatgggcagccctatcccagataaataaaaacactggtagaaggtttttattaactgttcagttggtttaggttttactaaatgatttttaatttaagcatctttatttgaaaagcccataatacccctaagaaggtttggctgagtcatttacatgtcattctgaatggattcagttgcttaaccctgctgaaatttcttgtgagtttacaattttaagggacttggttgcctgaggaaaggtcagtagaaggcatgagagctatacactgaaaagataggagaggaaatgtctgatatgtaaatgttaatttcttcacaacttaaaattatttgcagttcttccaagattgatcatatactattgattaaccacatatatgttatttattaacttttatgttgataccactcatgtttttatcctttgacttatttttacagataaagtggagaattttcatgaagaacatgaaaagaatagtcaccatattcacaaaaatgctgatgacagtactaagaaacccaatgcagaaactacagtggcttctgaaatcaaggaaacaaatgatacttggaactcccagtttgggaaaaggccagaatcaccatcagaaatatctccaatcaagggatctgttagaactggtttgtttgaatgggataatgattttgaagatatcagatcagaagactgtattttaagtttggatagtgatccccttttggagatgaaggatgacgattttaaaaatcgattggaaaatctgaatgaagccattgaggaagatattgtacaaagtgttcttaggccaaccaactgtaggacgtactgtagggccaataaaacgaaatcctcccaaggagcatcaaattttgataagctgatggacggcaccagtcaggccttagccaaagcaaacagtgaatcgagtaaagatggcctgaatcaggcaaagaaagggggtgtaagttgtgggaccagttttagagggacagttggacggactagagattacactgttttacatccatcttgcttgtcagtttgtaatgttaccatacaggatactatggaacgcagcatggatgagttcactgcatccactcctgcagatttgggagaagctggtcgtctcagaaaaaaggcagatattgcaacttctaagactactactagatttcgacctagtaatactaaatccaaaaaggatgttaaacttgaattttttggttttgaagatcatgagacaggaggtgatgaaggaggttctggaagttctaattacaaaattaagtattttggctttgatgatctcagtgaaagcgaagatgatgaagatgatgactgtcaagtagaaagaaagacaagcaaaaaaagaactaaaacagctccatcaccctccttgcagcctcccccagaaagcaatgataattcccaggacagtcagtctggtactaacaatgcaggtaagaatttaaaaaatatgtataataagtacaatagttcccccttacctgcagtttcactttctgtggtttcaattacccaaggtcaaccatattctgaaaagaggtgagtacagtataataagataaagatcccattcacataacatttattatagcgtattgttaaaatcattgttctattcttagtcattgctaatctcttactgtgcttgatttataaattaaactttatcataggtatgtatacgaaaaaacatagtatatacaggttttggtgtactattcctggtttcaggcatccactaggaactggcatgtattccctgttgatggctgggggggctactttaaatgtgtttttcaggcttgaatcaacagctgcatagtttcttcctagatactcaagtttagcttgttatatttattaaaagtacctgtt

SEQ ID NO: 61832 - DNA, 1042 bp, Homo sapiens
atgtggaagttattcataagtaattgtttctgtagctttgcggacaatatatctttatgttaaatctgttgttggaagttggttggtgagaccaaccagctaagtgggataattgcttcccagtctatgtagctaaaatgtagttctaatgctgatactgtggactgactctgagtccaaactccattttaattggtctgtgaggggaaaatacatactaaaatacaggtaaatagatgttcaggaacatcttgtccatcttccttcctccttcacaaagggtctcttagtggtcagggaatggtgtagcactatgaatatttctttttttctcctctcccttggtcatccagagttgcaacaaccttggcagctccctgtaggataagaagtgaatttgagggagtgcatttaattttcatggtagacttatcctgtctctaatgtgtgcaagttagttgttcttataaaccatttgtaagtttgtatgtttgtaagtttgttatagttgtggggatgcttttgtactttgtgacttttcctttgtctctcccctctaaactggtcatttctcttgtgcctagactgttttcttgcattatgtctgtcaattttcattgcctttactctcactcagaaaaccttgtaattttaattgaaatttagaaacccaaacctaaatttttgataaaagaggcctctctaaatctcaagtggttcctaaccttttttgctttagggacccttctgagaatgataaagttttgaactcttttctccagatgcaagtattcatgtacctacttgggtctcagaaatcttagcagtcttttgcaggtcatggttaggcattttatttaaaaacctgttgcaaattttaacaactcattcaaagtgcacaggtgaagttccgtcatatctttccagtggagtgttgagtgtccttctcgttcatactatttttttgctgtagaattatatcacctcagtgaaaagggcttatccaggctcagaattattatgtcatttgtcctggcattac

SEQ ID NO: 61833 - DNA, 1032 bp, Homo sapiens
gatggtctccatctcctgacctcgtgatctgcccgcctcacctcccaaagtgctgggattacaggcatgagccaccgtgcccggctgtgttgatagattttaaaccacaaaactggttgtattttaaaaatgttaatttgtaaatatagcatctagtattctctcctaaaacgatatattttgttctgtcttctgtaagggatttgagatttataataagtgaaaaaggtgcaattaattaaaagactgaagagctaatattgagggtggcagggaagaggtggggtggagaagtgggagcactctatcagcattaggataagggtggcagtatactgtaattgaaaagaaaccttagttcttgacgtcttggcaaagtttagcaataatgagaggttataaaaatctcctattttgaaaggaagtaaacacagacaaaacttggctgtactgaattcttaaggcaaatttgtcctttgaaggttaaggtatgtgaaacagtacaatgtactgggccttgcatagttttactaaaaatgttgagcattttttcactctttttctcactcttggatgagacgatgagccagctgttattgtcattcccttgatcctcagggttaattctaatttggctgtccttcctgctttgcccacatttctcctcaggcgttgttgacaagttaagtttaggttaaatttccattaaaaaacagcgtaaaggacctgtgcagtggctcatgcctgtaatcccagcactttgggaggccaaggcagttggatcacctgaggtcaggagttcaagaccagcctggccaacatggtgaaaccccatctctattaaaaatacaaaaaattagctgggcatggtggcgggtgcctctaaatcccacctactacggaggttgaggcaggagaatcacttgaacccaggagacagaggttgcagtgagccgagatcgcaccactgcactccagcctgggcaacaaagcaagatgccatctcaaaaaaaaaaaaaaaaaaaggcatag

SEQ ID NO: 61834 - DNA, 1416 bp, Homo sapiens
ggctggtctcaaactcctggcctcaagtgagctgcctgcctcggcctcccagcctctatacagataattttttaaggtaaaaatgatgtttataagaatagtaaattaattcatttggaacttaatatgcttcattttaagttagctttatggatatcgtattataagttggttaatcattaagtttttttactttgtaagtagcgtaggaatatgtactcattgtggaggaaaattgacatggaagcatgtagggtaataaatcagcctttctttataccccttcctcatatttgtttatttaaaagtctgtgtggtgagtgtcaaaagtcatgagggaagaatccctaggtttttatttttatatgcactgtttaacacttgtatttgatgattatatgttttcttaaattttttttcacagagaatatgaaactggtgtcaaaatgacatccagatttgggaaaacatacagtaggaaaggtggaaatggcagttcaaaattcgatgaagtcttttccaacaaacggactacccttagcacaaaatggggagagaccacatttatggctaaattagggcagaagaggcccaatttcaaaccagatatccaagaaattccgaagaaacctaaagtggaagaagaaagtactggagatccttttggatttgatagtgatgatgagtctctaccagtttcttcaaagaatttagcccaggttaagtgttcctcttattcagaatctagtgaagctgctcagttggaagaggtcacttcagtacttgaagctaatagcaaaattagtcatgtggtcgttgaagacactgtcgtttctgataaatgcttccctttggaggacactttacttgggaaagaaaagagcacaaaccgaattgtagaagatgatgcaagcataagtagctgtaataaattaataacttcaggtaagttttgattttctttattctccgccaagagagctttgtgcaaccaatttatttaaatgatttaaattctaaaatatatattgtgttttctttctgcacttatgatacatggggaccattgatagttttgtaaaagacatttaagaactttaaagaaaccagttggaggttgaaataaacaacttggatgttaacatttatagactgttgcgcagggtacgttttgggaacagtcataagtttataaccccaattccaataagaaatatctctttttgttgtgttaggatcacaaagtatctcatttctattactgtggaggatttggatggttattgataatgaaaatgagatgagtatttaaaatgaggattagttaccaatggtagactctctgccaaaactagttcagaaagattaagggggtattgagtggagacatttaaagaattgaacttgattccaaat

SEQ ID NO: 61835 - DNA, 1932 bp, Homo sapiens
actgctgattgacttagctccccaaacccagtcaagtgtgttgatttcagccccgagtcctttcccgtggtttcatccgcctctggccgccactggggccttgcactgccttaaggattcggtggcagaggcttccggggcgtcgaaagtgacctccctttcctgggcggcgcgggttgggaggagaaaagttgcattgagtgtctagtccgaggggtccatcgcgcccactgcccgtggcgccccggctgtccccaggtgaggatttctggttagtcaggttcgtcccgtccgctttccatctttaatggaagcccttaaagcctttggggatcgggaagacgctagattagggtgggagtgaagtataaaggctttttgcttttttttttttttttttttttttaaatcacagcgcacttctctcaaaattcgacctgattttgggctagggcaaaagccgaacgaccgaaaagacttagtcgtcaatcattctttcctttttagttaggacagtctttggagtttaaaggttgagcaagattgtgtacttgaaacacttaaaatttaacttcaaggacgtctgcacacttattttggaatctgtagtgctttacgcttagataatgccattgcaaagacattttattgtgggaaacgataaaggcaatcaggaggagatattatataatgaacttctctgtacccatcgcttggatttagcagtgactattaaacaaatttatttcatctatacacttctcattccttaatgttggaaaatcgctgacgttatttcatcagtatttcactatgtatttgtaaaagacgtggtcttttggcacaaaattattattatcattattattattattttgagacggagtttcgcccttgttgcccaggctggagtgcagtggcgcgatctcagctcaccgcaacctccgcctcccaggttcaattgattctcctgccccagcctccggagtagctgggattacaggcatgcgccaccacgcccggctaattttctatttttagtagaaacgtggtttctccatgttggtcaggctggtctcgaactcctggcctcaggtgatctgcccgtcttggcttcccagagtgctggaattacaggcgtgacctgccgcccccagccagcacaaaattattttttatcacataaaataattaagtccttagtgtcaggtattcatctgaagacttcaaactttcaacagtgaatgctttgtggttatagaaccattttaacagtttttctgatgttggcataaaggaactcaagtctagatttttggtttggcctttggttagtatttttagatgattagcacataagtgaatccaaaacattccatctttgttggtgtgtatgtgtacgtacacttacagacctgcaggatctcagctttacattcttgaaggaacagagaatcgatttttattttgttgtccgtggtagttgcccagtatcctgttttgtttaggctgtacttaacaagaaagacagtaagacttgttagtgttagagctgcagtggaagatgaaatacatctccttcaggaacactgttttctcttaacgcagatatgtatgatgactaaattattaccttgtcaaattaaaattgggttctcaccaaacatgggggggggtctactactgaatttatataaaactcagacagtgactcattataaatggtaagaatttaagttaatcaagggaaaacaagtgtagatcaaaacatattcaaaagtataggtcaaatataatttcaattcttgtagctttcaaagtaatgatttttcattccttaggcccttgttcactttttaaagttatattcgatgtattcatgtttgaactgtagaaaggtcaaagtgttagacaaacggttactgattgatc

SEQ ID NO: 61836 - DNA, 1029 bp, Homo sapiens
aggtcgagggcggctcttgaccacgcgccccctgcctcccagctcccgggcggcggcctccgcaggcccggcacagctgcacagcccgcggtccccaggcaccggcgggtccctggaggggaagcgattgatacagctgcctgcactgcgccacccgcccggctgcccatctccgtggcacctgcgtctcccggctgggccgggagctagaagtggctgccgagaccgggagggcccggccagtcgcccgctcccgctcccgcgcctggtcctcggcccgcgacctcgcggacctggactacaactcccgtcgggctccgcggccgggccaatggcgggcgccggagcatgcggggcgcagcgcctgcgcggcggtttgagtaagcggctgcgcgattggctgcggggtcgggcggccgcgcggggactgtgggaagcggagtgacggagcgagcggctgttggaggaaggaggtgggggccgggagcgcaaatggcgttgagatggttcagggccctgttcaaactccagcactgaccattcaccggcggaagcggcggcgcaggaggcggcggcggcccagcgggggcacacagcaggctctgttaccagctccagcagtggcggccagcgagagctaggcctgggcccggccggcggcgctcgaggcggggagggaagttgcggggccgccgctcctgcccccccaaccgggcttcctatttaccgaaagcagagtccctcgcctctctcggctctcacctgccggccctgctctcccgcgcgagggttccgcgcccgcccgcgggccgtagggagcgggagaggcggaggcggcccgtggccaaagcacccgccaggctccgagggtaagtgaggtgtcgggcggccgcctaggccgggagggagccgggagggtgggggaggcagaggctgggagcgggcggtggaagtctcactgcctcgcccaccgggccgctgaggaagttgggcaggggaatgacctgaggaactctttttttccccttt

SEQ ID NO: 61837 - DNA, 1036 bp, Homo sapiens
agtctcccaagtagctgggactacaggtgtgcgtcaccatgcccggctaatttttgtatttttaatagagatggggtttcactatgttggccaggctcatctcaaactcctgacctcctgatccgcctgtcttggtctcccaaagtgctgggattacaggtgtgagccaccgtgccaggcccccagaataatgtttaactaaatatctaggcaacccacggcttagtcaagttgacacatataattaaccactacaggcctacaagctttttccagattaactgtgcagtggaggaaaaaaataattttatctgagattatgggacactataatgagctctaactctattttctggggatccagaacacctctttgatccactggtagaaattgagtttatggtgatcaggtgacaaatggtgttttagcttgattctgaggcactataggctttccctgtcccaatgacatcaggcctggagatacgccagatatcagagaccagaaaggccaattgtgatataatgtgttactgccctgtggaaaaaccacacatccatcctccatagagggcagacttactttggtcaatgcaatgtgagcatcagtgacatgtcacttctgagcagaaggtttaaggcagtgtgtggtttgccatctctctttttcctctggcaacatctagattgggcctactgtcagcctgggtacgcaaataaagatggcctgaagcagagctgaagttactccaagatggacatacagtacgagaaagaaaaattttcattgtaagcttctgacatttgggtcatttgttacttcagtataacttagcctaagctgactgatacatgctcaaaaccattctggagttattcccactttcctgaatagccatatatagctattgtgagaatcacaatacccccttagttcatgcaatgaagacatccaagtggaaacccctggagctaattatctatgccaaaattgtaaatcaaaatcaatactgaattgctgggagaatcacgaaga

SEQ ID NO: 61838 - DNA, 1027 bp, Homo sapiens
agcacgttatggccaagagggttactcactggcaccacagcatggtcagctcagcgtggctgcgttaaaaggaagaggagaagaggaccctttccaggcataccaggggaggaatagggaggggatgggaggggacaggagggagatgggaaacgtccttcgtgaagtctcgattaatcaacagtgcatcaattccaaaactgatgggtgccctagtggtgagaccaaatgatagcagtcttcccaacgtgcagaaaacagaaagttagtgaagagcatttctttcattattctccattgaacttccctttggccattgctactacttttaagagcacaccaaggacacacgtgacaaagaaatgttaacaggaaatccctgttagctcttgggcttaggcagccttgtttttctgggtacgcatgagctaatgcttgtgtttgtaaacttgcatggtcatattttctgctttgaatgatggaattcaatcaaccttgcccagaattaggcgaagagcagcagccctgagccttgggagtttgacttgaaactccaggacaggcgacctctgctccctggtggcctagaggaagtactgcatctccaaaagggccccaggctcctcagttccagcagagcccagagagcccacactgttccacccttggggctggggagcctgccctttataacctgcatgcatatcatggccacaagggctggggtctggaaaggccaagtgcaactgggttctctgggactttttaatccctccatccctcttattacatcggtttttctggctttggaaaaaagcatcactgtcatttcaagactttttgccttgaattgctaggggatcctgacccagggataagatgttgccgagactgataatcagccaacacagtggtattcccaagtagaaaacagtgaggaattatgtgtatgtgtgtaaaaaagaaacaacagatagacagacacatacacacacacacacacacacacacacacacacacgagggt

SEQ ID NO: 61839 - DNA, 1090 bp, Homo sapiens
tctctcctggcgtgacggcgagccaggctgaaggatgcagaagctgagggctgcgaagcgccactgcctgctcgccccccgacggagtcggggttgcgacgggggaacggagctgccgggccgggccaccgaggccggggaggttccttctctgggtgggttagccccaagcaaggaagccgtcaaatcggggtccagattctagcctgcctctgtgagacctctgtgttgtgggggctggaaaagaaaaggaggtggatccgggagtctgtaaggccttccgatggagggaagcgactgccaggcagggggaatagggttagtattgctggagggaggcaggaaaggtgggccagggccctgtttacttgaaagggggcgtactaaagcctgttttgctgcttggggagtttctaagcgggcatctgctgttgagtctggcagcctgagctcgtttcggctaagcagttcaccagctggatgacttggaggcagccatttaagctctccaagtctcagttcctcatctgtaaaatggacttgcaaatattatctgcctccttggattgcagcgagtaataaggcacgtaaagggcctggcatgtggaagcagtcattttggtgaaggcagcaccacgcaatagaaatttcctattagccacatttttaaaaaataaaagaaagcaagttaaattcattttaatatattttctttgactacatatatttaagatatcaggccggacgcagtggctcacgccagtaatcccagcactttgggaggccgaggcgggcggatcataaggtcagaagatcgagaccaccagggtaacacggtgaaaccccgtctctactaaaaaagtacaaaaaattagccgggcgtggtggcgggcgcctgtagtcccagctactcgggaggctatggcaggagaatcacttgaacccaggaggcagaggtggctgtgaagccgagattgcgccactgcactccaacttgggcgacagagcaaggctccgtctcaaaaatatatatatatatatataatttcaacatataatcaatataaaataattattaatgtgccttcaa

SEQ ID NO: 61840 - DNA, 1006 bp, Homo sapiens
ctggaatccttaaatgggaaaggcgctcacctccccgccccggagcggcgaggctgatatttgtgatttggctccggacgctgtggggaggaacaggggagaacaaaatgagtttcgggcgggggtcgagtgagaggagcagccggcccgcccccgagtccccgcgggaaggggccctggcccccgagctcccggagctgcttcacctgttgtcctgcgcggcctccgctccgtggcctggtgattccgtacttcagttttggaaaactttctgctggattgcctggacccttttttctctttccagactcctagtggaaagatttggcaaggaaaaaaaaatgagcttgcgtcagggaagaaaaataatatgctgtgtgttagggtctggcgtttgagcgtggtactctttcatgctctcagatgttttaatttggtcaaactcctgcaggttttctcttttaagcggttaacaaactgttcagagtacatagtatgaacttggcacctgtgttacgtcatttaatccttacaacgattctggtttattgtattcctcattgttttaggggaagaaaccgagtcgcaaagaggttaactaacttgtctaagggagctgggatttgaacccaggaacatcgtattctggcaaacgaattaggaagaaaaaaaaccaaaactgtttgcaaacacttttacgtttaggaacatttttcagttactcttacttgaaattatcgctattttgttgctggagttgaaaacaactactttattgtatttacttgtgagaggagttaaactttgaattagagtgtaacttaatgcgtctcattgttttcagttgttgaaataaagaatgtgaaccagaattatttagatttttaaatttgaagctaaaatatgggcaattctctgatctaggaatggggtgagtgtatgaaaggccgattgaaatgtagaatgcgtttttagtagaaccagactcagttcttgtttaattttt

SEQ ID NO: 61841 - DNA, 1058 bp, Homo sapiens
ccctttacagaagaggttgaggcacttagcaggagctccttcattaaattccttctgttactggcttcttaaccttccgtcaaagagggagaatttttttttttttttttgtctttcttattagttaacaccttggggtttttttcctttccttctaattttcctgcttagtggagcgtgagttattttctctgtcgtatttgggttctttaaagtacaaatgttcttaagattttttcagtttacaaaaaccttttcttaagtctgctactccttcaagctgtcttgttgctgcttttccttttcaaatcttattaacattttaaaaagcttgttcgtaataaaagtaacacatggttgttaattgcgaactagcgcaacattgaaattaaaatttagtcattcacaatccatctctagagattgccaagtgtagtctgcttttcctgcctttgcctggttggtggctagccactcatttcttaaccccttgttatctggatttcaccttcacaaggaactataacctaatcaacacatttaactacctttttctaagtcctctccttgagttttctgtaagatttaacatcgacttcacattttcagatgcctctccttgggtttcattcatctatactcgctgtattctaacacagggtccaaggcagtaagatacaacagatccttccctcatggagcttaaagtctagtggggaaatacttattgaaaaataaagtctctagttaaatataattgtgattttaattaaggtgcagaatattataagaacttcaaatggagacctgatctggtgcttgtggtggtgggagaatctgggaaagataccttaaaattgctttgttggaacccaggcagattgtgaaggatgagcaagagttaactattaactagatgaagaggggccttttgtgacattatactgactttgttcctctccgccacttttctgccttctgtttcttctttcctctttaatatgcgttctccaagtttcacttttcagatcacttttctctatgtctctagtccctta

SEQ ID NO: 61842 - DNA, 1059 bp, Homo sapiens
tgtatttttagtagagacagggtttcaccataatggccaggctggtctcaaactcctgacctcagatgatcgcccgcctcggcctccgaaagtgctgggattacaagcgtgagccaccgcgcccagcctttaattcatctttaaatgaattgtccccattttctaggagttattatcttttctaaaaataacataacttttttggattaaatttagatatcctatttatatcttcagcattgaatcaatattttattaaatatacattaagggagcttcagtgatactaaaagagtgtgatgctgttgtaaatttgccattgctttcctttttgtcaatattcaaggattgtcttggaccatgggccaagcctgaattgtaagaaggaatggtaaagcatggtaacccattaaagggtaaagaaattaaaaaaaaaaaattgtcagagatatactctttaaagggccagattttttttataagactttaaaaagaattgatgattcttattttacacaaagatttttagaggaaagaaaaagtatgcaaaagagaagatgctctttgaagctggccataaccctgctgcaagcaaaatcagacaaggatggaccagaaaaagagaacaatttctattctcacttatcgtgtatttgtaaaatcccaagtaaaacacgagcaaattgaatcaaacagtatattgatactatcggataaagctagcccaagattcaaggatgatttgaccttagggattatattagtgtcatttacactaaataaatctaaggaggaaaacaatacaaccatctcagttaatggtaaaaaatatattaaatgaaattaagtaactctttgtgatagactagttttaagaaaagaaagaaccttcctcaacctgataaagggtaattttctacctggggcgtgtagcaaacccaacgggtaaaatacttcccgtgaaaggaagaacaatactaagttcatttttagtgttctttttagtgctggagaccccagccaatggactaagagaagctgaagcgaaaaagttgtaaa

SEQ ID NO: 61843 - DNA, 1024 bp, Homo sapiens
tatttttagtattttgagagtaggtgctgtattttcttttctttccttgtttcttcttttttgttttttgagacagaatctctctctgttgcccaggctggagtacagtggcatgatctcagttcactgcaacttccccctcctaggctctagcagtgcttccacctcagcctcccaagtagctgggaccagctcacgctaccactccagctaatttttgtattttttgtagagacagggttttgccatgtcaccgagactgagttactgtattttcttagcagaatattgtcccagtgagctttttccaaaagagaaaaggtacagccaataaaagtttgtggttgggtattgggagttggtgttgttctgttttgtcctgttcataaaagttttattctctttagctctcatgctttagttctaatttattcacagatttttgcccagtaacttgattttatacttggctttctatattgtggctccaatttttcttcccagtttatactcttatttttcctttctttttcttttcttttcttttttttttttttttgagacagtcttgctctgtcgcccaggctggagtgcagtggcgcgatctctgctcactgcagcctccgcctcccaagttcaagcaattctcctgcctcagcctccagagcagctgggattacaggcgcctgccaccaagcccggctaatttttttttttttttttgagacggagtcttgctctgttgtctgggctggagtgtagtggcccaatctcggttcactgcaacctccacctcctgggttcaagtgattctcctgcctcagcctcctgagtagctgggattacaggcgcccaccactatgtccagctaattttttgtatttttagtagagatggggtttcgcagtgttggttgggctggtcttggaactcctggcctcgtgattcgcccacttcggcctccctgagtgttgggattacaggcatgaactactgcgcccagccaatttttgtatttttagta

SEQ ID NO: 61844 - DNA, 1079 bp, Homo sapiens
gatctcaggtcactgcagtctctgcctcctgggctcaagcgattctcctgcctcagcctcctgagtacaggcacgcgccaccatgcccaactaatttttgtatttttagtagagatggggtttcatcattttggccaggatggtctcgatctcctgacctcgtgatccgcccacttcggcctccccaagtgctaggattacaggcgtgagccaccgtgcccggccacaacttgaattttcatagcaaactagtttttattgtcaaattagaaatttatgcttgaagcctagtgcttcttttgcctatgcatctcatctaaaagtaatggcacttatcacgtcagcctcatggattgtggtagtggttgttatccttggaattaccggtagggtaacagtctccaggcataccatgggttcttcagttatgagtggcatagcttatgtacatgttaactgtgaataataaacgatttttccaacttactgcaatactcttatttatgtctgtaatgtgaattgtccagaggagaagttgtggtcaattgatgattaggctgatggtttctgctagctctggcaaaaggtgaatccagttgctttctagcacttttcctactaaccctgcttctcaccctgtacctaataccacatttttagtttagtttttgttttgttttgtttgagacagggtctaactttctgacacccagactggagtgcagtggtgtgatcatagctcgtctgcagcctccacctcccaggctcaagtggttctctcacctcagcctcctgaatagctgggactacaggattatgcccccatgcctggctgtttaaaaatttttgggtagagatggggttttgccacgttgccatggctggtctcaaactactgggtttaagcaatcctcttgccttggcctcccaaagtgttgggattacaggcatgagccactgcacccagaatcacctttttttagtttggaagatgacatctttttttttttttttcttagagaagctagagggtaccaaattaaagtctgtcagttttttctgtctccacctcaaagatc

SEQ ID NO: 61845 - DNA, 1096 bp, Homo sapiens
ggcaattggttcaggatttgggaagaaaacgtatggcattaggattaaaagtacaatgtttagagtctggctgatctgggtttaaatcccaaatctaccatgtattaactgtgtgactttgagaaggttacttaatcactatgagcttcagttttctttttttttcccgtttttatttttatttttatttttattttgaggcagagtcttactctgtcacccaggctggagtgcagtggcgcgatctcggctcactgcaacctctgcctcctgggttcaagtgattctttgcctcagcctcccaagtagctgggattacaggccaccatgcttggctaatttttgtatttttagtagagatggagtttcaccatgttggccaggctggtctcgaactcctgacctcaggtgatatgcccgcctcagcctcccagagtgctgggattatagatgcaagccactgtgccggcctgagcttcagttttcttatctgtaatatgggattactagtggtatctggctcataggcttattttaaggattaagcaagataataaatgtatagaatttagcacagtaaccggcacatagtaaatgtttgataaatggaactcggtaaatattattgccataattttgttcttaaatcaaccagcaagtgtttgatgctattattaggcaatgttattaaataatggaaggtgtttctaccagtgattcacagtgttttctgtatccagcaagcttttaatacagctgcttgtattattctcccgtataaacttctaattactctctgaaaatacagttggtttcctgttgatagagaacaataacagtagcttacacttagtgcttactgtctgcctggcactgttctaagtgccatacctatattaactcctttgatcctcattttacagattgggtacggaggaggttaaacaacttggtcaaaggattacaacagttaagtggtggagccaggattctaaccttggtattcagtctggctacagagcccatgctctttcttatctttatgttcttctctttacttcctaaagaatggtagatgcatttcaaacatcctgac

SEQ ID NO: 61846 - DNA, 1026 bp, Homo sapiens
gcatacattctgatgacaagaaaagatgttttgtaagggaaatgtggaattaaaatgaactttttgtgtttgtttgcaaataattattaatgttgaagaaattttgatgttagctctgagttatgaatgttagaatatatttagaaatgtttgattttcatttttccatgtcattaagaagcttgcatatgttttttaaagaattgccttctttttaatgtgttttctacaactaataggcttagaaatttcagacacaaaatctttgaaaaaatgacttgtacttacttagcgttttgttttgactaacacccctggtggttgttgaaccacaagttcatagtgttaaaagcctgtggtaaattacccagtaagctaagtgattaaagttgtttggaacattttgctcatgtacatcttatttttatgtgtatacatatttatagatctgtgctcataggactatagcactatattgcaaaggtcctaacctttattcacacaacttccagtgtgtacaatgtgacttgcagagctgtactgtggagcatatcctttcctgtgtcttttgtttacctctgagtaatgaagtcaaatcttacttgattttccttggctggtctattttattttattaagttctgggatacatgtgcgggactagctagtcttaaattcagtctttaggaaacgttttctgggctgggcacagtggctcatgcctgtaatctaagcactttgggaggccgaggcaggcggatcacttgaggtcaggagttcgaaatcaggctggccgacatgacgagaccctgtctctacaaaaaatataaaaattaacctggcatggtagtgttcgcctgtagtcccagctactcaggaggctgaggtgggaggattccttaagcccaggaattcgagaccagcctgggcaacacggcaaaaccccatgtctacaaaaaatataaaaattagctgggcatggttgtatgtacctgtagtcccagctactcgggaggctgaggccgg

SEQ ID NO: 61847 - DNA, 1819 bp, Homo sapiens
atgcttgaatatttataattatttttggtaggcctccttgtacttcgtattatttatttgttctttatttttgtgcttagacttcctagggatattgaactttctagataatttcatgggtcttttcaaagagccagcattttggttttataaattaactccacttttttgttatatatttaataatttttgcttttaacatactaccttttcttcctgcctttggtacccattcttccatctcggttacacataatattcttctatttttaaacatttttctgttgtttctgaggatttaggagcagtaggaacacatttgtttattctcccagccttagttagagctgcttgtatattttcaaaagcttcttgcacctctgtctcctgatggtctgtaatttttccagcaacccaggatttaaatctgggaaccacctatgacaactgcatctctgctttctatcagatctagaagttgctaaattttatcagccccccctctataatagttttcttccacttccctattctcattgcctcttggttgggatggttacttcttgtgtgaactactgtaattaccctttggcttatctacctcaccctgtccctttcatcccatgtaatgcttcaagagtgatttttctaaaccatggtgcactcacttctttgctctgaaacctccagtgatttctccttgtctgctgagtaaagttcaggctactttacactagcatttgagaatcttatgaattaattcctgcctacacttaatcattctttattcctttgttctttaggaaaaatcgtaattggtaagataaaccaaatataaaactatatagtaatgctgtttttcagtcttactgatctcactctattccttatctttaccatgcttttctgactttgtgcttttgcctctggatttcccagtctggaatgcctctctcacatcctagtatgttgaaatctgtccattattcaagtgtgagcttagatgccaacactttgatgaaggcttatctgatcccattgcctagaattaatcttctcttcccatgtctttggatttgaactgcagcttctgtgctctgttactagtcattccattttcgatagtctaccagtaacttctgtgccttagatccacatttacactggcttgtcaggattggtcagtgaatcaaataggtagtaagtataagcttctagaactacactctccgatatggttgtcattagccacttgtattttgactactgagtagccacatatggttagtggctactttattgagtaacatagagactttcatgattgcagaaagttattttgagcagtatctagaacaatgcctggcaaataatagacaccagggaatgttgttcctaggtatcacatcctcatagtagacactcagtaaatattagtttaactttcctttcctcatctgaattttattagcgtttacctgtgccatttaaaaagtaacagtttatggcagctaacacagtgtatgaacaataaatatattttgggtgagtaagtaaatactacgaagcatccagaaagcatcttgctctcttttggggtggggagagtaggggagtggaagttaaaaaaaattcactactcaggccgggtgcagtggctcatgcctgtaatcccagcactttggaaggccgaggtgggtggatcacttgaggtcaggagtttgagaccagcctggccaatatggtgaaaccccatctctactaaaaatacaaaaattagccaggcatggtggtgcatgccagtaattccagctccttg

SEQ ID NO: 61848 - DNA, 1047 bp, Homo sapiens
tgatctggtctttgtcttctctgcctcttcaccctcatctcccactacactatctcttattctcaacatttcagacattgttctctctttgcttttctctccctcaagatctttgcccacggtgttccctgtgcttagaacttcccgtctttctttgcctgactgactctatttttcagatctcaacttaaaggtcacttctcagcattgcttccctttccgcttcatctagattagaggggggtcactgcccctattccttcaggacctggcacttttcttcctttgcacttatcatgagttatgattgtgtatcatttgtgttttcttgtttggtgtcttgagtatcttaattgttttgtttaaggactctgaacttcatgaaggctgggcctgtttggctctgaacagtgtattcttggtatctaatacagaatcatgcatagcacagacacttaataaacatttagggaataaattaataattcaacggcaagaacactgtttccataggactccagcattggaagggataacgtagattatttagtctagggccaggcggtggtggctcacgcctgtaatcccaacactttgggaggtttaggcgggtggattgcttgagtccaggagttcgagatcagtctgggcaacatggcaaaccccatctcaacagaaaatacaaaattagccaggcttggtgacacgtgcttgtggtcccagctactcaggaggctgaggtgggaggattgcctggagcccaggaggcagtgagctgaggttgtaccactgcacttcagcctgggcaacagagtgagactctgcctccaaaaaaaaaaaaaaaatttagtccagtctccctttctatcatgttggtcatgtctttgacaaagatgctctcaaactttattccttatgtactctgtgagcaaagtccctgggttcttttggttgtatctcaagtggagtggttgctatgtcctttgcattcctgtcattcttctctcaagtgcttaggaggcctggccaggtggaatacagtaagat

SEQ ID NO: 61849 - DNA, 1457 bp, Homo sapiens
gttttcattatatctactagaatttgcaagaatgttgatggttacccttatgttttaaatttaacttttcctgtttaagtcttaatatagttgggaattttcatgttattaataaaataattagaacagccagaaaggactattgagattgtttaatatacttcccttgttgtacatatggctaatctgaggtcaggagaggttgcagcctattaactaaattatttgaagtttgaaattatagtgcctaaaaaaaaaaaagcaaggatacctttaatcttttaaaatgtatttcattgtttaaaggtgtgtttgggcatttgtttcccttttagtttttgaaaaatttccaaaattcagttgtattccttaccttttaaatatttttgtctttcaggagtcgtaagaaagcagtgggagttgaagtcattgtcaagtgcttgcgatcttttacaagaaaatctcactgaatgatagtcatttaaattggtgaagtagcaagaccaattattaaaggtgacagtacacaggaaacattacaattgaacaatgcctcagctatacatttacatcagattattgggagcctatttgttcatcatttctcgtgttcaaggtaaatcagtgttcattttagtaatgtatgtgtgtatataaaaagcactatttcttgcttctgttctttcaactcatccctgtttgaatagttaggcccagcctactagggcagcttttaggaaagaagcaaagatgaaacacgtgccaaataattttttaacttggctgtgatggaaacattttcaagtatttttgaaatctcagtctgagtctgtcttctccttcacaacataggcgtaatgatacacagcattaggtcttgtgaggattaaatgagataaagtatgtaaagccacctcagttagtagctgaaagacagggtaataggtagtccaggctgagcttcaaaattcctctctcctttaaaatacaataaggagcaagtgtaaataataattgaaaaatcattttattggccaggcacagtggctcacacctgtaatcccagcgctttgggaggccgaggtgggcggatcatgaggtcaggagttcaagaccagcctgggcaacatggcaaaacctcatctttaccaaaaaatacaaaaattagccgggggcctgtaatcccagctactcgggaggctgaggcaggagaatcacttgaaccccgggaggtggaagctgcagtgagctgagatcgcaccaatgcactctagcctgggcgacagagcaagactcttgtccctgccccaaccaaaaaatttcattttattgttgttaaaagactttagaaagataactgacacttgtctgtgctgaatactaaaatttcttcatagagcactgacagtttgtttatgaccaataaagtaattttgctactatgtgttcacagctta

SEQ ID NO: 61850 - DNA, 1064 bp, Homo sapiens
tttggtcattaagcctatttgtatgtttcagagaaaagtttgtttttatctattatcatatacaatatggaagtactgaaaaaatgggtaaaaagagacaaagttattttaaagtatgttttcaaaacatgacataaaattttataaatcagctttctgtgatcacatgactgattagcaaagagaagtcacataactcctatgtggaggacttgtttaattgaaatccttttcttcttgacaaagggttgtcactggccttttagatcttggctcagacataactttcatttgtcttaaaacctctggcgttgccaataaatcacgtgtgaatgcaattctaagtcacaaaacaaagtattaaaggccatctgtacctgttcacattcagactcaaatttcgttagtactttctatgtgaatttatgttttgttttgttttgtttttttctgttttagaactaatggacattgctttgccatcatagaagaagatgaccagggagaaaccacattagcttcagggtgtatgaaatatgaaggatctgattttcagtgcaaagtaagatataatttgggacccatgagacaaagaagggaggggccatatgaaagcatcgatttcccccaggagaaacatgcctggtgtacacatcgctgtatgttcacatcagtaaatatattggaggaatacctactgtctagattctgtcctgtattcatatgtagaatttataactaaatcatttctgaaaagctaattgtttgattacaatttccttttttatttccatagacagcacctggctctgttgcccaggctggagtgcagtgctgcgatctccgctcactgcaacctcaagccagcctcctgcctcagccttctgaatagctgagactacaggtgcatgccactatacctggctaatttttgtattttttgtagagacaaggttttaccatgttgcccaggctggtctcaaactcctgggctcaagcagtctgcccgcatcggcccgcaaagtgctgggattacaggtgtgagccactgtgcccagcctgat

SEQ ID NO: 61851 - DNA, 1844 bp, Homo sapiens
ttcccacttagtagtgtttgagctaccttcgtcatccctgtcagcatccttcatagagaagaaaaaacaagacaggagttgaagaattgttcgtttttctccttatcatccactgtcatgtcagcagtacatctgttgcttggagaaaccccatgctgccaaagaaaccctttcttggtttttctttgcacttttctcttctgcaaggccaagctcattttagctttcctggaaccgtttttggatgcttgacacttctttcattcatcgttagttatatgattttcatttcctcctccatgtgttttctctgaatctgggattatttcagactctccagtttaaccctaacttttttctctctctccttatgatcatttaaaagtaaaaattgtttaaaagttattaataaaacttcatttaaaatataaaatatgtatttggacatttccaaatgctcttgaccatcttcccaacagaatctgaagtcacaggctcatgtttacctttttaaagtcatagctgattatactgaggcttttccttaatttccgcttacattcttgttacttgtgtagtgacaaacagttctttgctattcacatgttggtcagaatggcagttctccccaggctgcagcattcaacttgtcagatattgtgttgttaatccaataaaacatcacatgcaagtgctgctgcgcttccagtgactgtgtccttctctgtgctagctttctgctctcttagggacagtctccttgctggctggtggtctgtaatcagctctcaagaatgctttctgtagtttgtccttccctcaccatggatgctcaacttgcctctgcatcaggctcatgacttccgacgtggctggggtaggcagggtctgcagcgcctctgcacgctcagctgccttgctaaccagccttttctttggactacgacaccctccactttttagtctgatcttaaatctcatccacatctcagtaccacagtgagattatatgtaccagaccagtttatgattgtaattacctaagttcgggtttggtgttctaatctagtgtctaacacaccatccacatagatatgttcttaagaaaagccattttgcagtcttcactatttcagcacaaattttaatctttcaataatctgtttttacatataaaatttgcaggcccctttcactcactgaaatagaaattgtattttatgaatactaaaaagacatatcagtttaaaataccaaaccatttctaattttatcattactcttcttttaggattctccaaaagcccagctacgccggacaatagaatgttgtcggaccaatttatgtaaccagtatttgcaacccacactgccccctgttgtcataggtaggttagccgagaaaagtcggagcatgcttctcaaatatcttctctggttttacagtaaccaggctacctagaattgaacacgtcagattattttttcatttcaattgtttacattgtttacttttattgtcaggtccgttttttgatggcagcattcgatggctggttttgctcatttctatggctgtctgcataattgctatgatcatcttctccagctgcttttgttacaagtaagaagatatttattttgaagcaaaatattttgtcaaatattagatgtcaaccgctgtttgtaaagccagttgcagaaaccattaacttgtattctctggttgtatatctcctttatgtaactagactatagttctcttaagggaaaaggaccttactaccaattaattaattgggcacaatttcatacttcttgtatgttcatgattacttatgatt

SEQ ID NO: 61852 - DNA, 1150 bp, Homo sapiens
cacttaatatggttaattgattaaaaaaaaaaaaacaaaaagatgcccaagtaattcaattggaaaaaggcagtccatttaacagatggtgcaggaaatatcaggaatccatttaccaagaagttaatctcagtccttacctcctcactctataccaaattaacttgaaatgtagcatagacctaaatgtaaaagttgaagtataaaacctctaaaagaaaatgtctgaaaaaattattctgaccttgggcagacttcttcagtacataaaaaacacaaatcatttttttaatgataaatcaggctttatcaaaatttaaaacttctgctatttagaagacaagaaaatgagaagacaagtcacagattggcaaaacagatctgatacagggtttttgtgcaaaatatataaagaccttttgcaactcaataataagataacccaatttttttaaaaaatggacaaaagatttgaacagacacttccccaaagaagatataagaatggcaaacaagcacatgaaaagatgctcagcatcagcagggatatacaaattaaacacagtaagatactactgcacatccactagtatagctaagactgataatattaagtggtgccaaagatgtagatcaactagaaatctcatacattgctggttggaatgcaaaatggtatggctattttgaaaaatagtttgacaattgcctggaaagttaagggcatactttccgtacaatgaagcaatccttctgctaattatttacccaagagatatgaaaacttgtccacaccagaggcctgaatgtgaatgtttatagcagttttatttataatagacataaactggaaacaaccccaaagctcatgaattgctaaatgaataaacaaatgctggtacattcatacagtggaatattactcatcagtaaaaaggaacaacttctaacacatgtagcagcaacagtgggtgaatttcaaaagtactttatgctacatgaaagaagccagacacaaaaggctacacaaaagtgattctcctgcctcagcctcccaagtagctgggattaaggcatgcaccaccatgcccagctaatttttgtatttttttttaagtagagacagggtttcaccatgttggccaggctg

SEQ ID NO: 61853 - DNA, 2024 bp, Homo sapiens
aacatacatctactattaagagtgaatcatagtgtctatattttttcttgtgtaagaatccgttttagttccatagtttagcaaaagatgcttactagattggtatatcttgtccagcaaccatttttgtgcccatgttttctcattcccttatagggatcgtggaagaataccaattgccatattacaacatggtaccgagtgatccgtcatacgaagatatgcgtgaggttgtgtgtgtcaaacgtttgcggccaattgtgtctaatcggtggaacagtgatgaagtgagtggaactcagtcccctgaagaagtgattcgtaaatgccaccaaatatattctctgctcactgaacatctctttacttttcagtgtctacgagcagttttgaagctaatgtcagaatgctgggcccacaatccagcctccagactcacagcattgagaattaagaagacgcttgccaagatggttgaatcccaagatgtaaaaatctgatggttaaaccatcggaggagaaactctagactgcaagaactgtttttacccatggcatgggtggaattagagtggaataaggatgttaacttggttctcagactctttcttcactacgtgttcacaggctgctaatattaaacctttcagtactcttattaggatacaagctgggaacttctaaacacttcattctttatatatggacagctttattttaaatgtggtttttgatgcctttttttaagtgggtttttatgaactgcatcaagacttcaatcctgattagtgtctccagtcaagctctgggtactgaattgcctgttcataaaacggtgctttctgtgaaagccttaagaagataaatgagcgcagcagagatggagaaatagactttgccttttacctgagactttcagttcgtttgtattctacctttgtaaaacagcctatagatgatgatgtgtttgggatactgcttattttatgatagtttgtcctgtgtccttagtgatgtgtgtgtgtctccatgcacatgcacgccgggattcctctgctgccatttgaattagaagaaaataatttatatgcatgcacaggaagatattggtggccggtggttttgtgctttaaaaatgcaatatctgaccaagattcgccaatctcatacaagccatttactttgcaagtgagatagcttccccaccagctttattttttaacatgaaagctgatgccaaggccaaaagaagtttaaagcatctgtaaatttggactgttttccttcaaccaccattttttttgtggttattatttttgtcacggaaagcatcctctccaaagttggagcttctattgccatgaaccatgcttacaaagaaagcacttcttattgaagtgaattcctgcatttgatagcaatgtaagtgcctataaccatgttctatattctttattctcagtaacttttaaaagggaagttatttatattttgtgtataatgtgctttatttgcaaatcacccactcctttacaaccatactttatatatgtacatacattcatactgtagaaaccagctcatgtgtacctcatatcccatccttaagagaagaaatgttataaagtagaactaaatataaattttcagaattaatgcattcaaagtaatatatcaaatccaggactttgttaacttcaggtaaaaacttcattagggtaatatcatctcaattttttcaaatgaaaggattctctaattagaaatttatatgtcagagctgttataaatttatcaactgtcaaatatgttctggacagctaaatcatttgagatttttggttttttgatttctattccctaacttgtgaagacaatgaaaaatcaggcagaaatatttagtatctagtcagtatctgtagctacactgtataactgttcttcaataaaatggttcatattttatagatgccttgttatctcaagaaatctgatttacataaacttatacttctttaatgctt

SEQ ID NO: 61854 - DNA, 1697 bp, Homo sapiens
gtggaggttgcagtgagctgagatcgtgtcactgcactccagcctgggcaaaagagcgaaactccatctcaaataaacaaacaaataaataacaaaaaacaaaaatgttgcattaaacttagttcttgtctctcctttccactcttattcttaaatctgaagctcatcgactaagtgaaatatttaaagaatatgataggccagcaagaagaagtattatgtagtaccatagttagtaaattcgtaaaaccttggaagccattatttggtcccacttgcaatttagtgtttttgaagtgtgtagcttcattcagatagctctttaaataattaaaatataaaagcaaacaacccaaactacctgactataaacaggaaaagttaaccctcaaagagagttcttgtgaattctctttatgctggcaaatagctctaggattaaaggcacattagggtttccttcagtttgtttattctaagcttttactgtgctttttactgaacaagtttctgatgtataaaacttgcatctgatttctttggaaatattttcacaaaagttattttaatcagtatttttacattgcctttccagtgtccagaagtgtttctaaacttagaaagtgacctatagttttttaaaattatgttttcctagaacgtgccaaattttgatttactctaacaatcagtacttttcttcagatgctttgttctgtttagaacaaaaatgcactatagtttttaaagaatcatgcatctttgggttggcccaggatcaaatttgatattgaataatttattccagggcagctttcataaacatacttcatagatgttgttttgaaatgtttctaaatatctaaaatcatttcaacagcagaaatgatttttattttaacaaaagattatgatagcccttgtagtgtttaaaagtggtcatatttattactgactttgagtcaggtgttaaaatagcagtgccacagctcgtctcttgccttagtgtgctgctgtgagagtcacagtggaaactgcagggaggaggtgtgttcctaagaaccaaaatccagcacagcatcctgtgaagccacgtgtaatgatggtcccataaggaaagtatgtgaatatggctcttgtaaaggattaactattgtaattttagcttatgctctgtattctgttttctatggaattatttaagcccttttagtgacctttgtcctggcccatttaaaaactaaaatgtagtatatattgtataaaatggaaatatcattattgcttcattaggggaaactgtacataggcattgaaagaagggtaaaagcaagcagttttatcaggcagttgtaaaacaccaaaaatatagattcgtctttgacgtgtaacacactaaatgtattttgtacagcatctggtttaaaaggtgccttaagagtttaccattacttgctttgttctatatacagattatgtccaatgtatcattttgaagtaaataaccttattttagtatactttagtgatgtgttttgtgatgctacactcagacggtattgtgcatcagaagtcatctgttgagatttttgtaatgattaagttagtgtatatacatatgttcctgagatgtacacttcaactaccagaaacccagtatggagcacaggtaggtacacgcttgccctgtggagata

SEQ ID NO: 61855 - DNA, 1060 bp, Homo sapiens
ccaacctgcttggtctctattagtcagtaatgaagacgacagcctggccaaccaagggaaaggaaattagtatctttagtttcagtcattccttgtaggatatggtttagctgtgcccccacctaaaatatcatcttgaattgtaatccctataatccccacatcaagggagagatcaggtggaggtaattggatcttgggggcggttcccccatgctgttcttgtgatagttctcacgagatctgatgattttataagtttgatagttcctcctgtgttcattctccttcctgccaccttgtgaagatgccttggttcctcttcactgtctgccatgattgtaagtttcctgaggcctccccagccatgtggaacagtgagtcaattaaacctctttcctttataaattatccagtcttgggcaattcttgatagcagtgtgaaaatggactaatacacttgtgtttatctgtaatttaaatttcatgtctttttctccttgccttacatagggtaaagaccaagaaatgccaaacgtgaactaaaatatgtagggccttcaacttttttacttcctccagtatcttaggaccatcgtaattcttgttagcatctctaaccaggaggcagctgagggaggagggaaagaagactgtaaaaatccccctcactaatgatcaactttggaataaagtgatgcccttcaaatctctgcctcatttacttctggagggcaaaaataattggtagagtaggtaaaaaaaacatgggacaacgtgaaactatgtgggtaaatgtgactgattattccaggccctgttatgtagaatgatttccgtttattctatataaaacacttggaagtttccacactaggcaaagatactaatactggactagacagtacagctcatagctgcaattattcctgtaatataccagcatatggttttcaaaaaagttcagatcctatagcaaactggcctgagaaaacagtcatctagctatcagaaacaaggttttttttggtattaagtactcaaaatttgttgaatatag

SEQ ID NO: 61856 - DNA, 1007 bp, Homo sapiens
acggccctggagcaggcctcggagcccccgcggccggcagagcacctggagcccagccacgacgcgggccgcgaggaggccgccaccaccgccctggccgggctggcgcgggagctccagagcctgagcaacgacgtcaagaatgtcgggcggtgctgcgaggccgaggccggggccggggccgcctccctcaacgcctcccttcacggcctccacaacgcactcttcgccactcagcgcagcttggagcagcaccagcggctcttccacagcctctttgggaacttccaagggctcatggaagccaacgtcagcctggacctggggaagctgcagaccatgctgagcaggaaagggaagaagcagcagaaagacctggaagctccccggaagagggacaagaaggaagcggagcctttggtggacatacgggtcacagggcctgtgccaggtgccttgggcgcggcgctctgggaggcaggtgagttcctgggctggggagactggacgagcctaggaggccagggccggctgccggcagctcttctgcctccaagagggccaggaagaaagagaacaggatggccatccgtcacccctactaggtccaccttccccttggcccacctgcttctcaggggtgtgggtctctcaagctacctggcttatggggagacagaagtcacaagaaccacctgctagtgccagagcccgtgagcggcatagcctggaggccacaggcacaatagtgccgcctactgctcctgctacagagagggcatcgcctcctgccctgccagggcagccttcaagtccccccatctcatctcttcacctcacccccttcattcccatgtgcgtttaagccactgtatctaggaagaatgtggatagggactgtggccacttgcagccccacttagttctgtttcattttccatgattttagttttttttttgttttttttttctttttcttttctttttttttttttttttaagatggg

SEQ ID NO: 61857 - DNA, 1856 bp, Homo sapiens
tggtgaagggccaggatggaagggctacctatcaggtgtgcgggatgctgagtgtgacccccaaccaccttgcatgaccttgatgcggtggccatcccagagaggacactgctccacccagctgcttacctttccttaggacaactgtttgaaagtccctttctagaatggtcctaatgggcatggccagggagctggtccctcatgtaagtagcaactgggcaggctgccagggcagctggaatggggcagtggagctgtgttcacagaacgcttgtcaggagccaggcacctggtgcttctctgcccacttaaaggagggcattacgatcgccattgtatagatggggaaagagaagctccctaagtgcctcactcagggtcacacagccagaaagtgtgagggattcgaacccaggattctccagccccagctgcacgttggtagcaggagaaacagcgagagctttctggctctgtggctaacctcaccaaagggaatccatgcagacagctgcagtgcacacggtgttttccccacactctggctgttagttttgttggctaaaacaatcatcaccctggagctgcttttcacagttctagattgtggtgggtttctcagcctctctgctggctcggggaggcttcgggaaggtggtggagcaggtgccctctttgcaggtagggattgtgaaacatttgctctggagcccagggatgaataatgcggaaggctctcttctcaggataatggattccagaatcccagcactgctccggcaggaggcgaggaccggtggctctgcactggcaccccctgttgacctgggtgtggctcagcagccttctcctctggcttgttttccagtaactggtgcccctacccaatgtccaagctggtcaccttactagctctttgcaaaacagagaaattcctcatccactcgcagcagccgtgtccgcagggagctccagactgccagaaagtcaaagtcatgtgagtaggggagggtgggccatttgcccaggcctggagcgggccctccctggaatcactgagccagcccttctcctcttccaggtaccgcatggcccacaagccagtgtaccaggtcaagcagaaggtgctgacctctttggcctggaggtgctgccctggctacacgggccccaactgcgagcaccacggtagggctccctgcggcccccttccccccttgacctctgatccccaaggtcaagcagctcctctgaccactggggtcaataactaatgctttcttctgcagattccatggcaatccctgagcctgcagatcctggtgacagccaccaggaacctcaggatggaccagtcagcttcaaacctggtgtgttgctttccggaaggggaaggcaggcaggctggtggggcccatgtagccagctggccctttttcctgtgatacagcagtgccatttcagggaaaccttgcctccagaatcagcaaggcctgctctgtggcctgtaccacctcccaccttgaaggccaggctcacagggcccccagcggcctactggccaagcacacacacccttttccttcaccccatcttctgggaaggactggttcatctggcactttccttgccccgctgaaccacacaagcccttgtgcctggaaaaagcattctcaccctttcccacagccctaaccagagccaggaagtcatgctgtccttggtcttggagtcagcacaggaaacccaccaagagacaccatttgcagcagggccctttaaggctgggcccaagattgagaaagtaaatgagtttcattatgtggtgaagtatttattgacaagggctgcca

SEQ ID NO: 61858 - DNA, 1001 bp, Homo sapiens
acctcagccatctgaggagctgggactacaggtgtacatcaccacacctggctaattttttaatttttttgtggagattgagatcttgccatgttgctcaggctggtctcgaactcctgagctcaagtgatcctcctgcctcaacctcccaaaatactgggattacaggcatgagccaccatgcccggcctgattttttttcattgatgattttctccatctgttctctctttctgaaatttgtactacttggatgttacatttgcaagactggtcgtctatttttcttttctctttccaattttcatctctctgtttgctcttttagggaaatttctttaactttaccctctaacgtttccattaaatttattttcatttttactgttacgtttttaatttccaagagttcctttttgttttctgaatgctcacgcttcctctcccatctccccctcatttgtttttttcatagcttcctggtcttgtttcttgggtgcagtaatttcttttatcaacctggaaatcttagtacaaatgtttgagtggttctcttctccttacacagtcttagtttttgtccaggttgacatttttttgtttgcccacttcaacctctttttttttttttttttttgagatagggttttgctgtgcacccaggctgaagtgtagtggcataatcatggctcactgcagcctcaaacttctgggctcaagcaatcctcctacctcagcctcctgaatagctgggactacaggcatgcgccaccacacctggctaattttttgtagggatgaggtctcactacgttgcacaggctggactcaaactcctgggctccaaggatcctcccacctcagcctcccaaagtgctggggttacaggcgtgcgccactgtacctggccctcttttggaatacagtgtttcttgggtaaatcttggatgtctgctcacttaagaggagaaagactgagaaactgactggaagctggggtg

SEQ ID NO: 61859 - DNA, 1090 bp, Homo sapiens
catgggaaggggaggcagactgggttctgctagcaggggtggtgacaccaacaccatcacaaggaggctcggctgccagggccaggcattctgccctgcctttgccacttacatctgtttccagagccccagggctaggctgggcccaggatgcaggccccaataagaccctttgcaaggagaagcttgaatagaaccactacgtcctcagacttccctgaggtggagaagcgaaggggttaactgcttcttaggttgccagggaccccgaggggcccagcccagggagccagcagcctgagcattaggactccgggaggaagaggctgtttctgtgccctggcttggggatgtctagaatgtgggtgcctcagacccaggatttgctgtcccagtggaactcagtctgcggtagggaccgtgctgagccccaggcaaggtgtcccatctatcacattgctatgatagcttggaggggtggggacgcctcccagggccacagagctcctaagtgacagtgagagcccaggcccacccaggctgtcctgtccccccaagagggtggccgtgtaggggatgctgctgccagcaggctggttggccccagtcaccagcctcaggcttctcctgacccttacacaaagagcactgagattttcccagctgggagcttgtggcccagaggagtccagcatatgactggaggtcacacaggagcagggcagagcacaggccgccttctctgggccacgatgcaccttttgcacttgttcctcccccatcctcacccccacccccgacccctgccgggcacagagcccttggtatgaacagggaagaacccccactggccagagctgaagcttccagaaccacgctcaggggttcttagctctgggctgatccctgagagcctcaggcttctctgccaaggcccttttctgactcaaggacaaaatcctgtgagtttctcccctggaatggtcaagttaatggctggcttcagggcctcagaaaacaaggctgctgagaacacgccttccttcccaaggaagacttgagggcccctgggagggcgtttcctggctgg

SEQ ID NO: 61860 - DNA, 1051 bp, Homo sapiens
gagcctcactttccttgtctatgagatgggctcccaagtcccccgaaggggtggttgtggtgattccagacccgaatgcaggtcgaacagcaagcatggaccccaccccatgccggcgctcagtgggtactgaaactgaagccagccgcagccccccgtgttgtttcctggggtgtggagtggagtgatgccgcctccgcccagcagcctttctgggcccaggagaggactgggcaggtctgagggccggggctcaccttgcgcaccaccccggaggtgaccgcgatgttctccgcctcctccacggtcttggtggccacagtgttgacgctgctcaccacagcctcgctcacggcgttggcctgctccttggtcttctcggccactatgggaggacactggctggcctccaccccagccccagccccaaggcaggcctgctggagtcaggctcgcagccccttcccaggagctcagagccctggccctgctgggaccctcccctgctccctctgactccagggcacctctgatgctggtgggggtaaggagacgcccaccctagtttagcctcatggtctgcaggggtctgtagggcttgggaccccagttgggggtaaggcaggactctaggtttgagccccagcactaggatgcaggagccccaggggtcctatcccccatgtgtcccctggccctggggcttctcacctgaggtcacgctctgtacaacattctccttggtcttggctcctggggaggaaatggagctgtcagcccagacctccctcgaggtgttgggggcggtcaggacaaacacaacagaacagctggacaaactgtggggtcggtgggggggtaaggatggtgtctgggggccggcggccccttcagagggcctcttcctgctgtgtctggaagaagtggatggatgggaaggggacaggacagaatgtgggggacaagagagagcaggcctgaggtagggacactggctagacccagggtccagcccctgcccgggtgtggccgggcctcagaagcagcaaca

SEQ ID NO: 61861 - DNA, 1086 bp, Homo sapiens
tggagcccagaactcacatggagggaagacccaggagcctatcttcacctcctgctgacagtgggttcctcagggactcagagcaggcaggcgggggctaccttgaggctgagctaagctatccccgtggatgggactgtgagtcctgtcgaatgtcttggggagccgaaggcagtgctgcctcctccatgttaaaggcaatgggtgggttgggggtgttcctgaaggctcacgcaggtcccatgaatgccctgtgtgtgtccctataggatacctggtcctatcaacaggctgaacccgttcctgttcctgggaggacctggggacccctcctcaagctacacagcacccagaggaagcatggcaggagtgggctcaagttttatttggaatcatttaaaaaaaaaattcacagcagcataagtggggtcagaaggaccagagggtgggtggggccgagggagggcagtgaggttggtgcagcagcacaggtggacaggccaagggtggccagggagacgagggcaggagcgtgggcagccgcatgtcactcaaggcgggcactccttgtgctaggaggggatggtgtccaaggcagaggagcgctcttcaggtcatccacgctggcctgtagccctctagtctcccccactctgggcctgggagagagaatgacctgcacacccagctccaggccccagccttaatgggccaccctgagtgggctgagaaaagttgtcttctgtgccccatgcctgaggggtcatccgtggggggacctcccactcaggttcagggttagccctgtacacagtccctgtaggggctgtggaaggtcaggaggcccctctgggccctgggagcccaggagggaagcagtgcgtctgtgggggatggggtccctaccaaggaaccccccatggtgcaccccaggagcccagctcctacctcctctgccacttcctctttctctttggatgcctcaccctcctgttggggggcagatggcctcaagtcctcctgtaggggacaaaagggggcatgagaccatgtggagaatgcagagacccctagctgccctgcaac

SEQ ID NO: 61862 - DNA, 1455 bp, Homo sapiens
ccagcctggccaacatggtgaaaccctgtctgtactaaaagtaccaaaattagctgggcgtggtggcgcacgcctgtagtccctgctacttgggaggctgaggcaggagaatcacttgaacctgggaggcagaggttgcagtgagcagagatcgcaccaccactccagcctggatgacagagtaagactccgtctcaaaaaaaaaaaaaaaagaaaattctagaaataaacaattcatgttttaaataactttcattacagtatattgttataattgttccgttttcttactggttattgttagtctattactgtgcctaatgtataaacttcatcatagggaggcacatgtgtacgtgtaggaagatacatatgtaggctttggtactatctggggttgcaggcagctggaaacatcttgagtgtatcctggtggataaggggagtcaaccgtgctcctgcagggaggtcagaagcagcctcacagggtgcagagcacatgaggtttcaaaggcaaagagcactgccagtgcccatggctgggaaggggctttctggtgatgtttgtcatttgagtccaggaacaagccctgagtgtatgtgagagggggttgtaggggggctgtggtaggggcagcagggacccctctgggctcctccagcagaggcagagggccctgaaacctggggcaggttgtcgctgggagccgggcataggtgccctctccctcacccccatcacctgaccagccttgctcctccttgctttctctcacagcccaggggactctcgggcacacccaggccccaggtggcctcctcctgggttcatacaggcctgcttaatgtgtacatgtctgggctggggagcaggaacagccctgactggcctgagctgcttccagacccttcatgcctgcccatggcagtgcttggggatgtggagaccagcagccccctgctccgttctgcctcctcagtggatgcccatggccagacaacagatacagcctggctccgctgtgtctgactgggctcccagcctcctgggctgcccttgaatccactgcagaggctggatggggaggcggtgtggacagggcagtgtctgaagtcacatgtggacggactcaagctctggctccaacacccaggcctgaaggcctggggcaaggcactgagatgctttgagcccaaaccatctgagtatcaaaggggaagccaggatccccagggaaccctggtctgaacaagcccgcccggcatgcaaggctttaaaacaacccaggacacgctggccagtggcctacatgatgggtggtttgcgtcgtgcccggcaggcttgttcagagtgggctgggcaaacagcctttcatgtaggccactggccagcaagccctgggttgttttgaaactttgggttgggggcaatccactgtaagcaccttggggtcc

SEQ ID NO: 61863 - DNA, 2080 bp, Homo sapiens
attacaggcgcccacccccacacccggttaattttttgtatttttaatagagatggggtttcaccatattggtcaggctggtctcgaactcctgacctcaagtgatccacctgcctcagcctcccaaagtgctgggattacaggtgtgagcaaccgcacccctgcctaatttttgtatttttagtagagacagggttttaccatgttggcaagtccggtcttgaactcctgagctcaagtgatctgcctacgtcggcctcccaaagtgctgggattacaggcgtgagccaccgcacccagccaccccattgttaagtccagagaattaggccctcctgcctagaggttctgctgctagagtagtttgtctttggctgcccaagtcctgccttgaaacaatgagagggtaacttggaccaggcctgtctgggccttgtgtgtttatggcctggccacttgagtcaggatcatcttcactgcattttctctttcatttcagcaaattatgcgcacagccatgaagtataacctgggattggacctgagaacagctgcctatgttaatgccattgagaaagtcttcaaagtgtacaatgaagctggtgtgaccttcacatagatggatcatggctgacttcctcactatcctcttcacatgtaacttctgcagacctatcacaagtttacatgtaaccacagaaatccctttctctcctgactcattaataatggataccattctcaacaagtcaatccaagtcagcccgttaaggagaaagaaattaaggttagcggatcatgtacaagctgagtgtgaaagtagaaatcacctacaccagagagccattttggtattttgcctttaaataaaaagcctcctttatctggctgtgcagccttgctctgtggcttttcccaacacaatcagtgctagtgctggggaggaacagtcaagagcagtcagttgcttgcttattttttctggatgagtctgggacacactgtaactttaacacatttaagaagtaggtgtgtggccttttcagaaggtggcatggtcctcaagtgagttcttagtattttatatcagcaaaataattcaattttgcaggttgcaaacaaatataaaacctgtttctgtttatgaatattattcttttagaatagaataagtacatgctgctgtaataaaattgcctttaatcacttaacaagcctaaccttgactcaaacagtgaatgcctatagaaataataaatgaaaaaaactagtatttttatatcataaaacaatgtcatttatagcttatcattcatgtattgtccagcagacattaaaagccctgtggataattaagttatcttcatacctgcaaaatggtggaggctattttcattaaaactgtcagaatttgcttactataattatgatacagtccaaagaatgcagtcactttttatcatgttaactaattgttctcttttgaagatctatggttgactaattaaacaataattcaagtagagtgtcccagaaaaaaaccacttgggctccctgtttggagtctggctggctctgagcattgccaatggcccctactcacctgactttgtatcctctccttttagaggctttgcattctgcacccagcttcactaacagtgggctgaaaacatccttgggttgagtgtttcatttgggagttatttggccagggccttttgaacagtagtgtccccatgaagtgctagataatatatgtgtaagagtcagctttttttttttttttaactctaacacccttcagaaatttctaactactttgtaactgcatggcttaacctggtgataaaagcagttattaaaagtctacgttttccaaaacttacgtttcttttctgtgtttttacatgtggtagtttctcttttcataagttataatactgcaattggatttctgaaatgtttatagcgaccacctgtataacatttccttccactttattgtgagctgcccagattttattcttgaattgttttttttttttttgttcggtgctttacacgttcagagaaactt

SEQ ID NO: 61864 - DNA, 2116 bp, Homo sapiens
gatggagtctcaccctattgcccaggctggagtgcagtctcggctcactgcaacctccacctcccaggttcaagtgattctcctacctcattctcccaagtagctgggattacaggcacggaccccatgcctaatttttgtatttttagtagagacggggtttcaccatgttggccatggctgatctcgaactcctgacctcaagtgatccacctgcctcagcctcccaaagtgctggaattacaagcgtgagccaccatgcccgctcatcacattcttaaacagagaattttattgttgaagagaaaccagttagtacattgtttcttttggcaaaagaattttgagaattgcttctaaataaacagagtatggatttacattggtcaaaatatgactcttgctgtctataccaggactttaatttttgtgttatgggtaattgttcttcacagggatttggtaatgtgggcctacactctatgagatatttacatcgttttggtgctaaatgtattgctgttggtgagtctgatgggagtatatggaatccagatggtattgacccaaaggaactggaagacttcaaattggtattaatacatttttatagcatagacactaaatataaatatttaaaactctggtgcagctattaattgtgattttcaatcaatggcagcaacatgggtccattctgggcttccccaaggcaaagccctatgaaggaagcatcttggaggccgactgtgacatactgatcccagctgccagtgagaagcagttgaccaaatccaacgcacccagagtcaaagccaaggtgacaacattatagaaaccagaaccaacattatcaatgtgaatgacgttaggggggtcatagaagagtctgattgagttttctctttctttttagcagctttattggcacatactgcacataccatacagttcccccatttaaggtacataatttaatggcttttagctaccggcacagagttgtgcaaccattaccaaaacaaacgcatctgcctgacactcctgtaaaaaaaaaaaacaagcaaacaaaaaaaaaacctagataaatagaaaagtgaaaggtagttttatacacttggcagagaaaaataacctctatttaactttaactgaaactgtgcttctccccacagccccttgttcatatatgcacatctcttgccctcagtggaggggatttgacggtggtgttcgcatttctctatgttcctgactctcttgcagatcattgctgaaggtgccaatgggccaacaactccagaagctgacaagatcttcctggagagaaacattatggttattccagtaagtcatctatatttattaggctttatatgtacttagaatcataatagtcttttgcaaggaatttggaggaagagaggaattattagtctccaagctctagtgaattcatctttttcacttttgagaaaatatagtagaagcatggttaattctaagcctgttaattttcactttgatcgaaacatttattccaatttcaggctctttactgaatgtctttagccttctaagagtctggttatataaatgtgtactgtgttagaaacactattctaactaaagctcttaagattttctatatgattcctaaccttatgcatttcaagtgccctttccagctttactcagaaaactaatatgaggaacacgtgctcaggttttttagcaagtaaaaatgagtctacaccaaaaagttactagaaattaatgtgggcttggaatatattttaaagaaccccctttgctgaaagcacttaagacatttaatgtaactgaaatgggctacccttaggtaataggagaaagaatcctgtcttctgagaggccctgtggacagtccagtccaactggttggtgggcaagccatttagtctgagaactaacttctggtagagaagaggctccaaccaaagattattaactttccttgattaataagccaaaaaatgattttttttttttcctaaatagaaaaagccttagatggaattgggtgggatgggaaggagtgttaattaagtgtgaaattcctgatactggctaaaat

SEQ ID NO: 61865 - DNA, 1003 bp, Homo sapiens
tctcaggtcaccgcaacctccgcctcccgggttcaagcaattctcctgcctcagcctcccaagtagctgggattacaggtgcctgccaccatgcccagctaatttttttgtatttttagtagagacggtgtttcaccatgttgaccaggctggactcaggtgaagcaactatactggtgaacagttttccctctttaagtgataagaaatctaaaatcaagccctaaaggaaggacacagttgtttttgttactcatttctagatgtgaactgaaacgtgccgccctctttgtcctagccccacctagaagtgcagtgtaggtgggagaatgtattcttctctgggctttcaggaccattacgtatgctggggagcctggcagttggcgccaggcctgaccccagacagtatttccttcagctccagcatttgcattctcactgtttaaaagcatttggcactcggtttgcatttctgtattcataagtgttaattattcatgaaagcaaactgtgggaaaactactaattctattaatcactctactagactgagtttttcttccttgctttcatcctttttgttggtaattacacaaataatataattctaagttctctgtgtaaaaatatttaaacaatacagataaagaacagatcactttttaattcagccagctggaatgttagggatatgttgggagttaggggtttggtgtgaagtagggcattttattttgtttacatggaaagcaaattgcttcaacaaatttattattttatacttttgccactgacttaaaattttatatgaattttcattttatattgattgcctatacaaaataagactgtctctagtttctcctgctccaccgatgagtttactctgcagtgttctcgtggccgtgcttatagtatagttgatgtcttggaagggaagccctacttagcccaattcttcttttttctaattacacctgtttctgtttctgaacaagaa

SEQ ID NO: 61866 - DNA, 1041 bp, Homo sapiens
cctttccaccaagtccaggagccagaggaccaggagaggagcattgcacatgtgaggcacatgacagagagactcagcaaaactggattggatatatgtggaattaaggaaagggaccaggctgagtcacagagaaccaggagaacctgagtctggggactgagcagaggtagtaccacagaactgaacatgagaggaaacttaactcctgtccctgaaaggggtgcaaccttaaaaaatgaaacatttcaggagtaggaagagaaacagagtcaaaaaatacatttatgcctactacatgcagggccatgtgtaagcaaggtattcactacaattgggataaattgctagaagttgttttgaagctatgaaaaagaatcacaggcccatccagtcctttcagtcctttcaaggtaaggtcagaaaaagcctcctaggagataaaaccttctggtctgcacttagacgggtgtgtggacatggactagggtaggggtagtggcaagtgtttggaacagaaggaattacctgagggaaggttctgaagttcagaagctgggtgaacttgggaggataaggactgactactgtggccagagttgagaaagagaaaggtgggataagaaaggccagtagaaaaaagggtcaggccaggttactgcttggtaggtgaccatgagaactttggtctttgtcctgaaaacacagggaaacagcaaagagctggtttcaagcaggtgtgactcagctaagtgtgcatttgaagacttgagggcaggagactactacaggggcccggactgcaaggggatatgaagagggaagcagggcatgaaatatagcctccaactaagaaaaatggcaccggagagaagcagaaagaagacagcttgaaaagtggctgttacccagagaaaaaggttttttttgtcttttggcatgtttattggctgtaagacacagatttaccggtgcaagagatagacaatgctgaagagatgcaggctggtagaggtagtgaagtcccccaggggaatgaag

SEQ ID NO: 61867 - DNA, 1942 bp, Homo sapiens
ctttttaatggctgtttagtactttgcataggtataccatatttcatttaattggcatacaagataattaggttgtttttatttttactgtgtttgagaggagtatttctgcacctttacagatttgagtgagcatcacttaacatgtttttatcagagatcttactgtagccgtcagtagtagtatagtcagtgattcctgttattgcctgtaagctaatttattagcctaaacctttaatttcctatgatctgaggaactgaaagctaaggcctaaaaccttatatgtgctgaatgtcgaataataggtcacagccacattcttccacaagtaaaaataatatggggcttaacacaattgctttagcaatatgaccttctcccctttttctctacttgataaggagggcttatacccccactaagcagcatgttactctgctatctcatacatgtcaactccctaaccataataatcctgcttatatagaacacaatggtactgttatctctaattgcatgttagtgaaatgaggtcaagagaggctaaactgattaacctctggtcgcacactcagaaatcctatggagtggcttatatctgttgtgcatagctaacttccaaacatacagcaagtaaatgccagagggagaaattattatgtaatgttgtatgtgtctgcattttatagtgaaacatttaatgaatatttctatgactttgattagctacctaaatgagatctaaagttttctagccatggtaacttggttattacagagacttacaaggatctttgtgttcgagaagaatttttcttaaaaactggtgcactcctctttccctgtgcccccgcaggtcctggcattgatgtgcctgctccagacatgagcacaggtgagcgggagatgtcctggatcgctgatacctatgccagcaccatagggcactatgtgagtacccactggaagccccgaggcttctgcatttgctgtctacaagaattaacagtttgactgattatatcaaaagttgagaatccctgggtttttctctcattcaatcataatcttgatgtgcatattattttatgtctacttgtctattcttaaatcgtaatgaacacagattgagctttacttatatgctgccctatacttgtcactggaacaggaccagggcagcccactgtgctaagacactagaacgtacatcaagaagcatccaattctgatttttccctcagagggcttccatttaaagaggaactaaggtgcataagcagataaggtatggaaataatgtaatacaacagtggagattatgaattctgaaataagactttctagaggagatatttgggctagaccttgaaaatgggtagaatatgaacatttagagatttggaggataagaggaagagaaacaatagcgttcagtttgtctgaaggtaaggcatatttataaaggtaatagaaagtaagagtgagggctggatgcagtggctcattcccataattccagcactttgggtggccaaggcaggtggatcacttgagcccaggagttcgagaccagcctggacaacatggggaaaccctgtctttccaaaaaatacaaaaattagccaagcgtggtggtatacacctataatcccagctacctgggaggcatgcttgagcccaggaggttgaggctgcagtgagctgtggttgcaccacagcactccagcctgggcaatagagtgagaccctgtctcaaaacaaaaaaaaagtaagaatgaagaggtaaatgaaccaggacaaaaacaccaagccccagtgtttgtgttttacatggtagtcagtggagaaattttgctgatccttcctggggaagaataggctggcagcagtgtccagctgtgctggcgccaggagagaacctcctatggtgtcagt

SEQ ID NO: 61868 - DNA, 1173 bp, Homo sapiens
ttttttgttttttaaatgtattgtttaatcaagacaggatctcactatgttgcccaggcttgtctcaaattcctggactcaagccatcctcctgcctcggcctcccaaagtgctgggattacaggcataagccactgccccggcctagttggaattgttgtttgaggtaacaagcttatttaatcctaaagcaagcataatccttttgtagttacctctagaaagattcaggaccaatttgtcatttgtacattgggagaaaaggagtggttaaacaaagttgtgctgacctccagcagaggtatgtcactaaaggaatggaaagtgagcaaataggagctggagagcgccagagagcccttttgtcagtggatgaggctagaatatggcattaatctttccaagtgcagtggggattagacttcacaagattttgttgttgttgttgttgttgttgtcgtcattgacttcatgagatttttaaggtgactaagggaagggtgctaagacatagagttacagattaggtgggaggtggagagggtcagggtataaaaagcgatccttgaccatttcaaagttatcttatactagccctgtatccattacatcacagcttgttcaaaaaagtttattatttaggccttgggcccctgagttatagaaaaacattacaatatactgattctgttgactaaaaagtaaaatttataggaataattgggtacagcccttagaactttaattattttatggggagacataatagtttaatagtttaactttttttttttttttttttgaaacagagtcttactctgtcgcccaggctagagtgcactggcgcgatcttggctcactgcaacaccccccacctccattcaagcgattctcctgcctcagcctccggagtagctgggattacagacatgtgccaccacgcccggctaatttttgtatttttagtaaaggcagggtttcaccatgttggtcaggctggtctcaaactcctgacctcgtgatccgccctcctcagcctcccaaggtgctgggattacaggcatgcgccactgtgctcagcctaatagtttaaccattttttaagttgcgtttttcgttttgtaaaaacgagtttgtattttacagttgaaataatatagaaagttataaact

SEQ ID NO: 61869 - DNA, 1722 bp, Homo sapiens
tttttaaaaggtctttcctcttcccctaaatctcaaacacattttatagtcttgaatggtttcagactttattcagtcatatttgtcacccatatctgcaatatctccagcttaattttatcagacttgacaagtacctaataattccaaaggtcaaaaagtgattcattggaatactgaaagaaaacacagcttaaactctagtaatttgatttatttgcttaatgtgcaaaagcctcattgacccaggatgcagttaaattgacgtcttggcccagaaagctttgaagcctaggaggtaggcaaagggagttttttctctcactcctcggcaaaccttcaaatttgatgttatttatctgttatttcctgactgcccattccacagagagtgtcagattgaggctcagacctgagcctgaaccctgatcctgtcacatgtgtgtttagcatcagcttgtaaatttctgcaaaacaaaagaaaaaaagaggctgggatttttataggaatttcattgaatctgtacactaatttgtggagtattgccatcttccccaccctccccaaaaaggttttgtcctttcacccaggctggagtaccagacagcagtcactgcaaccttgacctcctgggctcaagcaatcctctcacctcaccctcccaagtagctagaaccacaggggtgtgcaactgtgcctagctaattttttaattttttgtggagacacggtctcatcacgtatcccagactggtctcaaactcctgagctcaagcagtcttcccacctcagcttcccaaaattctgggattataggcatgagccactgcacctgaccagtattgccatcttaaccatattaagccttccaatgctgaatatgagatgtctttccatttatttaggtctcttgatttctttcaatgatgttttgtagttctcattgtagaagtcttacatagaagtcttacaactaaatattttactccttttaatgctattgtaagtgacattggtctatagttttcttatgatgtctttgtctagtctttgtatcaggacaattctagcctcatggaatgagttgaggagtgttccttcctcttctgcttttggaaaagcttttgaaaggtcaatgttcattctcttgtgtgagtgtaaatatcacctaagttctgcaggaccctgatgtctccacccttctcatccccttatatctctgtgtaccaaaattaccctttcatctcctactctatagtcacatgctgttagaaaagttgcttttttaaaaaagattaacttctgcctcatacctgttctctatataagaatttatctgttaggccaagcatggtggctcatgcctgtaatcccagcactttgggaggctgaggcgggtggatcacctgaggtcaggagttcgagaccagcctggccaacatggtaaaaccccgtctctactaaaaataaaaaaaaattagccaggcaggtacctgtaatcccagctactcaggaggctgaggcaggagaattgcttgaacctggaaggcggaggttgcagtgagccgagatcatgccattgtactccagcctgggcagcaagagtgtaactccttctcaaaacataaaaattaaaaaaaaacaaaaagaatatatctgttattcaggaactacttgttttttgtttttgtttttgttttgagacagagtcttgctgtgtc

SEQ ID NO: 61870 - DNA, 1049 bp, Homo sapiens
actctgtctcaaaaagaaaaaagtattactgtgatctgaagtttttatgtcaggatctgattctagtgacacatatcttaactaagactataaaaaccttactttttatccagtcagttccaagttaattcaaactgattgtcacaatgctttacataatactaaattatctatatacaaacataaatgcatgatttttattctctttaaaattcaccatttaaatggaatataattatatttaaattaatcttaattaagatttagtgtatttttcagtggggaattaatagaatgggaatttgagccctagttctactatcttgtttttataacctacttttttgatcccttattttgtcacctttaaaatggcaatgcctactttatgagttgttctaaggattacatgagaagacatatgaaaatgtactataaatagaaaataagatgctagctataatctcaagcgatttttatatcaattttttcttttgtttttgttttcttattttacaggataatgaattggaaaagatcacaaggaggttcaccatggagctagcaaaaaagggctttattggtatgtgtagccacatagtttttggtataaagtgggaacatctaaaaatttttttttttttttgagacggagtctcactctgttgcccagactagagtgcagtggtgcgatctcgtccgcctcctgggttcaagcaattctcttgtctcagcctcccaagtagctgagattacaggcatgtgccaccacacccagctgatttttgtatttttactggagatggggctttgccatgttggtcaggctgggcttgaactcctgacatcaggtgatccacccatctcggactcccaaactgctggtattacagataggagccactgtgcccggcctcctactatttgttataggagcttttgccaaacatacaacatttctgaagatattaatctttgtttgcttgatgtttttgtatcttactattatctgtgtttatattttctttgtgcacaatctgaatattctt

SEQ ID NO: 61871 - DNA, 1108 bp, Homo sapiens
atttgtaaataatgagaaataagggcttgtgacagtaaatatatttggtctctttgcctggttcccaacacagagctcctgaatgtcgcaaattcctgagtgataggagcatcttttgttctaactaggacactcttaatgggcttctgggtagcttcaaggtggggactagtcaccaaaaagaccaagccataattagaaatttggaactttcagtcccaccctttgacctctggagattggaaaggggctgaagattgagtttaatcagcaatcagtcatgccctcataatggaacctctatacaaaccctaactgatggctggagtatggggagagttcagagagcttccaggttggtgaatgcatccatgtatgggtagggtggtaccctccaaattccaggggaacagaagctcctgcagtggggacattccagacatggccctgtgtacctcttcatgttgctgttgatttgtatcctttacataagtaacgtttccctgagtcctgtgagcctttataacattattgaacctgaggagggggccatgggaaccccctggttggtagccaagttggacagaagtgtgggtgccctgggcacccaagacttggaactggcatctgaagtagggaacagtcttgtgcgactgagcccttgagctgtggggtctgtgctaaccctggtagtcagtgtcataactgaattgcaggacacccagtttgtatctgcagagaactggagaactgcttagtgtggaaaacccacacatttggtgtcagaaatgtgtgagaaaaaacaattttttcctttttttttttttttttttctttgagacggagtctcgctgtctcccaggctggagtgcagtggcgcgatcttggcttactgcaagctccgcctcctgggttgatgccattctcctgcctcagcctcctgagtagctgggactacaggcgcccaccgccacgctggctaatttttttttttttttgtatttttagtggagacggggtttcaccatgttagccaggatggtcttgatctcctgacctcatgatccgcccgcctcggcctcccaaagtgctgggattacaggcgtga

SEQ ID NO: 61872 - DNA, 1044 bp, Homo sapiens
ttgcagagaatgtgcattgtaagagagacaggtcttctttcttaaagcttttttaacgtctaagaaattgttaacctttgtagtcccactctagtcttagaaacacagaatatattaggtgattgagatttttttaaatgctttggataatccctatgaaattctgtctttccctcttaaacatattttaacacgttcttcttacctctccccactaacctgtcttctctcccattggttctttgccaaaaaaaaaaacctcatctgcctctctccacccttttaccaaccttcagctttctgtatctcattttccctcaagaacaaccttatccctgagttttctaaattaaaattcttgaggttgaagcaaagcaacaatctagcaataatctctaagggaaacagatggttataagacttggtggctgatgtgtactttttccaagtaaatatttaataatacacactgtttttgtgcttttcttttcccagttactacatgtacctgaggccgttagatttgtctgtgttaaggatttgaaagggtaagctaaaggatctgaagggaagtttaagtgaggccttaaaaatatttccagcaaaggggcatagtgtgagaatatgcgactgatttgagaagactggttcaaaagttctggtgggtttggaaatattatcaaagattgttctattaactttcccagagtaaattatctgtatttcatttgctatggttctgcctgagaccagtctacctttttagaaggaagtttattgttttaaagtcagtttggagggaaagtacagattgataatagcaatttattgatggtaggagtcaattaactttctcttccagtctgcccccccccagttgtcttgatattaaaactattaaaattccctatcactgatgctactatcataaaattttctaaaattatcataatttacatatagttgatggaccgtagatggagttctctcatacattgaccctaagtcttttaattacaaatattagtacccaaaaaagtgtac

SEQ ID NO: 61873 - DNA, 2546 bp, Homo sapiens
cgcccccgacgccccgccggcgcgcgctgccgccagcgaggcccggggaggccgcggcggaggcggaggcccggcgccctgggcggcgccctgtccccgaagtccgtcctccccgttaggtggcgagcgcccgaggggaggggacagccgggcaagcaggaagctgcggcttaaaagggcaacccgcgcgggacccttcctccctagtcgcggggagtctgagaaagcgcgcctgtttcgcgaccatcacgcacctcccctccgcttgtggccatgtaccgctacctgggcgaagcgctgttgctgtcccgggccgggcccgctgccctgggctcggcgtccgccgactcggccgcgttgctgggctgggcccggggacagcccgccgccgccccgcagccggggctggcattggccgcccggcgccactacagcgaggcggtggccgaccgcgaggacgaccccaacttcttcaagatggtggagggcttcttcgatcgcggcgccagcatcgtggaggacaagctggtggaggacctgaggacccgggagagcgaggagcagaagcggaaccgggtgcgcggcatcctgcggatcatcaagccctgcaaccatgtgctgagtctctccttccccatccggcgcgacgacggctcctgggaggtcatcgaaggctaccgggcccagcacagccagcaccgcacgccctgcaagggaggtgagcgtcggccgggccccgtcccgccctccctgcctcccctgcggccctcccctccggcctcctgccggtgcggggccgctgctcagcccagcccagcccagctggagcgggccgggtccccgcccgggtcaccccgcctcggatgtggccggctctgtggatggtgatttttccgccttaaaatcatcatgcgattggcctgccccctcccccgcgccgtcaccccgggcctctgtatatgctgatcttgcatgcagagtagacgctgcaccggtctccttttggtcccggtgtctgtgtcacacacggcgggtcctgccgaaatgcacttctaggaaagggaatgacctgcccgtgtgataatgcctcgtcagtgttcttgggcttttgtgagtctcccctaaatgcaagctgtcaaattattttctggtatttgttcactcctgttccaatagtgacagatgatatccgaacatagaaaatgacttggcttctaagtttgaaatctagacagttttattaaccaaaggaatttactaatcacgcgttaatcgtttcaattaagtaattttcccattctgacaagttctgttttataccaaaaaaaaggaaaaacacaaaaaaatcacaagcaatgtaatatctctgacaaataaacacctggcgtcctgacagtaaatttacaggttgtaggctgcggatggccagccagccaatggaatgaaatagctctgggggtgtgtactggtcctggctagccctgaatttgagcttcaggaaaaatatagtacgtgaagaaaggggtcagataatgtttggtagtcactgggttatcctgtggtttaaatcatttaatgtctgtagatttggcctctgtagtcagattgctttcttcgagcaaataagagcttttttccccccaatacattgcatcatacctctttagtaacataaaatggaaaggacaaaccacttttgtctactgtaaaaaagaaaaattatatggaataaagagcccagggaggcgaggagtcttgttggaggtggattggctgagaagcacagaggatgttgggctagacccatgtctcagtaaacctggttctgtggtctttcagttatgcccgctgacttatgaggatttttagaaatcctctctgtaccggaaaaaacttgagcggtgctggtgttcccagcaggggggacaaaggttgtttttaaagatttactaaatttgcattgaccccgcccacttctaggacttaactttggagcttaattatcccctagctctggttgcctcagccaaaaccaatgtttgaaccactttgacctctgatttcctttctagcttcaaaattgtataaaatgtacacaccgtcagtctcctacatttgcctgccttcttcctaccactcccttattatccaaaccaggaaaacaagttcagactccaaagaaaggcaaataaggatgttggaggaagttcaggcaatgtttagcaaatattgagttgcatcgttttcttaaaacggacatcaagtttattttttactatcttgctggcagcatttgccagtcctttaaaaggtgtacagataaatcagtgtatgtggttttctgcaggatgatttggtctctgaaatcctttttcttcgattcttcagatgcccagctctctcctgtttttataagtcgcagctccgcaaactcactgaagcaactcgtttaccatagtttgtgagtcctctttctcttgttgccacagcagttttaatgccaaaatattgaacctagcaacaaattgggtcagccataccaaagc

SEQ ID NO: 61874 - DNA, 1049 bp, Homo sapiens
tttctctcttaaaaatattttagaagaagattgttaggatttagaaaaacatagcatataaattcttgaaccattcatttttaaaaataatttaatttgaaaggtaaaaatatactttctactttctgtctcactaaatcagtctattctggacttttcctataaaagatgtatgtggccctttgtgaccgtcttctttcacttggcagagtattttaaaggtttatgcgtgtagcatgtatcaggtacttcatttcttgttatggctacatagtttttgttgtatgactgtaccacattttaaaaatctattcatcattgatggacacttggattatttccactttttgactattctgaatgatgctgcggtgaacttttgtgtgtgcatatgttttcagttctcttgggtgcgtttatacctaggaatggtacttccatatttaaatttttgaggtactgccaaacttttccacagtggctacaccattttaattcttaccagcagtgaatgaaggttccaatttctctacttcttcaccaacacttgttatgtgtgttttttattataatcatcctagtgggtatgaagtatttatttgcagttccttgatgactaataaaatttagcatctttcatgtgcttatggaccatttttatgtcttatttggagaaatgtctattcagatcctttgcccatttttaagtcaggttgtcttttattattgatttgtaagagtttttttttaatatgttctagatgtaagttccttaccagatttgaaaatgttttcatccattctttaggttatattttcccatttttcatagtgactttgaagcacaaaagtttttaattttgatgaagtccaatttataaatgttttctttcgatacttatgcttttggtatcatatgtaagaaatcattgtctaattggacttcatgaagatttactcctttgttttcttctaagagtttcataggtttagcttttacatttaggtttttatccattttgtgttactttttccgagaaaaggatcca

SEQ ID NO: 61875 - DNA, 1051 bp, Homo sapiens
ctgtgccaggccgattactctagctttgtagtaaattttgaaattgggaaatgtgagtcttccaaattttttttttccaagattggttattctatctccatatgaattaggatcatgtttccaatttctgcaaagaagtcagctggaattttgatagggattatgttgaatctgtagatcaatttgggaattagtgtcattttaacaatattacatcttctgattcattaacatgggatatctttctgtatatgtaggtcttttaaaacttctctcaggactgttttatcactgtcagaggataagttttgcacttcttaaaaccaagtaagctaagttagcaattcccaaaaattatatgagatggtaactcccgaaattctgtggcataacaagattatttccttaatggcaagcatattctggccccagaataatttagaatcaagtatagaattcaagagaatcaaggctgcagcagtaatactttgagtctatacccttgtgtatatttggcttaaatgttttaggagaattggcctttgaaaatttaagatatttgttatttcaaaataaaatgtgtaatcaactaatacaaagcaagttttgtactttttgttgaatttattactaagtattctttttgatgcaattgtaagtagaaatatttatttattaagagatagggtcttactgtgtggcccagtatggccttgaactcctgggcttaagacatcctcctgctgcagcctcctgagtaactgagattacaggtgtgcaccacctcgcctggctcagaatggttttcttaacttcatttttagattgttcactgtgaatatatcgaattacaatagtttaggctgggcatggtggctcacgcctgtaatcctagcacttggggaggctgaggtgggtggataacttgaggccaggagtttcagatcagcctggccatcacagagaaaccttgtctttaccaaaatcacaacaaattaattagctggttgtggtggtgcatgcttgcaatcccagctactggggaggctga

SEQ ID NO: 61876 - DNA, 1045 bp, Homo sapiens
cacctgctaccatggctgactaattttttgtatttttagtagagacggggtttcaccatgttggccaggctggtcttgaactcctgatctcaggtgatccacccgcctcagcctcccaaagtgttgggattataggcatgagccactgttcccggccagaaggaataattgttagacaactcacagtgtctgccatatttgccacagaaaataactgacttgctctctgctgtcttactgtgataatatatttttttaacgcaatttacaaaagggggggaacattcttaaatttgaaactaggaattatgatatttgcagtttcatattgtatacagtaaacagtcttcaaattctagttctccttgagatcttatacaatgataacagttttaaaattatgccttctgttttttgaacagctttttactattgacagcttttaaggaagtagttttcatgttgtcgtgtttactctcttactagacaggaagacagaacagaaatccatcctcaacttctggggataatctgaggattataatgaaatatcagatgcttaaatgatttcaacagacttttagatgaagttgccattagcaccttgttatcatcaatgtaacacataggcaagtggattaaaataagagggctaaactggcctttatgttgaaattagaagtttcgttgtcctacaggcagaaatgacagtttcattggattctctatgttatagtaatatatcagaaggatagcttgagatgagactattttgaagatacatggggtggatattcaaagtgccttttacatagttactgtcctccacagtttccccattaaatgtggaatccttgtgattgcattcttggagggccatcgaaaactagtgaagcacagagagactattttttttctatagatattaatctaaagcaataattggcaaaaaaaaaaaaaagagatttaaaatgtaggataaaggccaggtgcagtggctcatgcctgtattcccagcactttgggaggctgaggcaggtggatc

SEQ ID NO: 61877 - DNA, 1924 bp, Homo sapiens
agcactttgggaggccaaggcaggtagatcatctgaggttaggagttcgagaccagcctggccaacatggtgaaaccccttatctactaaaaatacaaagattagccaggcatggtcgtgggtgcctgtaatcccagctactcaggagattgaggcaggagaatcacttgaactcgggaggtggaggttgcagtgagccgagattgcgccactgcactccagcctgggcgacagagcaagactcagtctcaaaaaaacaaaaacaaacaaacaaaaaaccagtcagtactctagggaagaaataacaatagctatattatgacatagtagtgagttgaagataactgaatagccaaaatatattttggagatagtttgatatgagaggtgaggaaaagtaagtagtcatgtgtggctctttgtttctggctttaataactccagtagttctggaagagacttagtgggaaacattttggataaactgagtttgtccaaatggggttgccaagtggagagttgagtaaatgaagctagagctcaggaaagatgtggaccagagttataagtcatatttatttatttatttattttgagacagagtcgtgctctgtcgcccaggctggagtgcagtggtgcgatcttggctcactgcaacctccgcctccggggtcaagtgattctcctacctcagcctccagagtagctggtattacaggcacgggccaccatgcccagctaatttttgtatttttagtagagacgggggtttcaccatgctggccaggctggtctcgaactcccgaccttaggtgatcctcctgcctcggcctcccaaagtgtttggattacaggtgtgagctactgagcccagcataagtcatatttaaaacaatgggaatgggtaggaacacctagagatagagtgtgggaaatagaatagggtccagtatacagctgtgccaaatttcacatgtacaggttagatagtggagtgggtcagttctgttgggaatgccctgaaagtttgaataatgataagcacgtccttttaacatcatgaggtagtggtgacgttgtaagaggagtttcagtgtagtgggttgtcatgggttaaaacgttcagattgtcatgggttaaaacgtgaattggatatgaggaagtggagtgcacaaagatagttttctgaaagttttacttggaagaggacaaaaaattgagacgacagtttgaggaggatgaaaggtcaagaattctaagctagtgataaaaatttcgtcaacatcaatgaataggtaatgtaaacacattaatcctgggatggatgtgagaagagcaaagaaaggaatcctgggggaatatcagctctaaaggttgagtagagaaggaaggagtgatctgagaggtggaaggaggagtaggaattatcatagaaactttaagcttcttgagggcttgtgactgtgtcatgttcatcattttatctgaagttcttatcaacaaagtagctttcagtaaatatttattaaatgaagataaaaattttaagagccatctgcaatgtcaaatgtagcccacagttgaatgaatatgaggacagggaagtgtcccttgattttggtgttaagcagctgattgccaccttctgtagaacagcttcagtggagtctccataatagaaataaatgccaggttgctgaggactaagcgtggatatttgttgagagtggagacagtaagtgcaaacattcttttcagaaagctttgctctttttgaagctttgctcatagggagatacaagatagtaggtagaggggcaggctgtgtttagatgagagagacttcagcatgtttatatgctaaatggaaaaaggaaaaaggaagggagaagttgaagatgtagaataaaggaggtgtgtgtg

SEQ ID NO: 61878 - DNA, 1051 bp, Homo sapiens
gaaaacctacttcatttcttgaaacttgtttcttcctctaaaaagatgaggataatatcttgcagggtggctatgaaaattaagacagttcatacagtatctggcacatggaaagttctcaatgttaattacccatttttttctgtttaaggaaatagtctcaatcctataccatgaatgaattatgaaaatagttggaaaggaaacaacagttttaaatgtaaactgtctcagtcttatgctgacatcagctacatttctggtaaagtgatggtgtcatgatacaggttatattaagagttaaaaccagtttccttctggctttccaactgacataataagcaaaacctgcctgggcaaacatagacctatttattggctcacttattattaatgttaaactagctttggtgctgacttctgttcttgttttaaaatttcactgttgtcatttaaaatctgacagaccttcagaagcttcatagaatgcttaatggtttaaatcgtctctagaacatgtgaagtatcttttccaaagtggttttctccatctgtcagtatgttcaaaatcatgtgtatagggccgggcgccggtggctcacgcctgtaatcccagcactttggaggctgaggcgggtggatcacgagatcaagagatcgagaccatcctggctaacatggagaaaccccgtctctactaaaaatataaaaattagctagccatggtggcgcgcacctgtagtcccaactactcgggtagtcccaactactcggaaggctgaggcaggagaatcacttgaacccgggaggcggaggttgcagtgagccaagatcgcgccactgcactccagcctgggcaacagtgcaagactctgtctcaaaaaaaaaaaaaaaaatcatgtatataggacagaattgcttatattttcacaattactactggatgcctgtttggttttcatagcaatcaacttttggagtttatgggcagtacttaacatatataacctaagtgtggataattatttaaaataaggctactggaagaaaa

SEQ ID NO: 61879 - DNA, 1124 bp, Homo sapiens
cttagaaatagtctgagtgatgtgtgaccaaaatatgatttctaggaggaatgattgttacatccgtggaatagctgcgtacactttattgttcttggtgcttaaactttagttgtcctgctaagataaaggaagacattctttcagttggaaatcataatgtatttctccattgaaacagtatggtttgaacagtgctatatattcttactcattattattccttaaatgaatattttaagctcctgatagaaggcaggtactgtgttatatgctgttggtgttaccagaatacaaagatgaagagaacaaagtattacacaattcctaatctcacataaatgctattttttttactagctgtggggagcacaaaataagtggttgaaagtcatctgacacagttacatttattcctttccttttccatggctcttaggaataaattgttctactctatggattaaattgccctttgtttattgcctgggatcccaactttatttcataattttatttctttgaggaaacgtttcacaagttttataacaaagtataactcaatttggagagcacaatctgtgcataagttggaggctacctattgtgaaatggaaaaatgcttgtcctagcattactaagttaatgtatagctggtagaaagttttcacttttaattgctaacttgcctagtgagagtgaaagattgattacggcaactaaaaagtataaaaactactgagtagtttttaggtacagtcagttcttcagtagaacaagaatctttagaaataactttcactaattctttactagttgtttttcctatttctcttggatatggatcatcagaatgttttttgtccctcttacccgcccccccccaccccgtctgccaccccccgcctcccacttttttgttgggaggcttatgtgagagcattagaggccttgaatgtttgggtagacaaggtaagtattcaaataaacatttcaagatcattgtgacagtgaaattatttgatatgaaaaaggatctcagttattagaaaaaacacaactgtgttaatactgacagccagcgttgctataagtgttttatgtgcattatctcacttaagctt

SEQ ID NO: 61880 - DNA, 1296 bp, Homo sapiens
tgcgcccggcctaaagtgagtctttaggtgaaaaatttttgtgaatattgtgatttctccttaataatttcttgtgtatttatgaattttatataattaaatggcatatcaaaaaaatcacctatgttaattatgtttttgactcagttatattttcttttggtacattattaagttaatatccatatgcaaaaatatgctgacaatatattaattttggatttttcatttttatcagaaatcatgagtggaggatctcaagtccacattttttggggtgctccaattgctccactgaaaatcacagtatcagaagacacagcttctttaatgtctgttgctgacccctggaaaaaaattcagcttttatacagtcaacattctttatatctgaaggatgaaaaacagcacaaaaatcttgaaaactataaagtcccagaatctattggttctccagatcttagtggtcatttcttagcaaactgtatgaatagacatgttcatgtgaaagatgactttgtacgttctgtttctgaaacacagaatatagaatcccagaagattcactcctctagactgagtgatataactagctctaatatgcaaatatgtggatttaaaagcacagttccgcatttcaccgaagaagaaaagtatcaaaagcttctcagtgaaaataaaattagagatgaacagcctaaacatcagccagatatatgtggtaagaactttaacacaaatttgtttcagttgggccataaatgtgcagctgtgttggatttggtttgtagtactgaaaaaattaatatagggcctgaagtggtacaaagagagtgtgtgccaacagaatatcatgaaatacaaaaccagtgtttgggattattttcctcgaacgcagtagataagtcaaggtctgaagcagcagttaggaaggtctcagaccttaaaatatcaactgatacagaatttctcagtataattacctccagccaggttgcttttttagctcaaaagaaagataaaaggcggagtcctgtaaataaagggaatgtaaacatggagactgaaccaaaggcaagttacggggagataagaatacctgaagagaattcgattcagcttgatggttttacagaagcatatgaaagtggacaaaaccaagcatattcccttgaactttttagtcctgtttgtcctaaaacagaaaatagccgcattcacataaactctgataaaggtcttgaagaacatacaggatctcaagaacttttcagttctgaagatgaactgccacca

SEQ ID NO: 61881 - DNA, 1024 bp, Homo sapiens
ctgctgtagaaatggatcggagaaatgtgtctgaatttaagagtattaaaaaaacatcattaataaaaaactgtgattctaaaagccagaagtataattgtttagtcatggtgctatctccatgccatgtgaaggaaataaacataaaattcggaccaaattctggctctaaagtgcctttagcaacagttacagtaattgatcaatcagaaactaagaagaaggtttttctgtggaggactgcagcattttgggcatttacagtgtttcttggagatataattttactcacaggtgaggtcattatggtatagtggtagcttattttataaagctaagttttgtttgtttttgtttttctcccacttagtctttgaagactctttagtcatttgcctcttctgagcgcagcataattgatccctttatcgcatctgcattgttctcctttccattgtccactctcctgcccattgccacttctgggcctctgttctatccttctcagctctgtcccttctttccacttatcccctcctttaataagccttccctagtcaggtggagtgggtcacacttgtaatcccagcactttgggaggctgaggcaggaagattgcttgaggccaggaatttgagaccagccttggcaacacagaacccgtctctacaaaaaataaattaaggtttgcgtgcctgtagtcccagctacccaggaggctgacgcgagaggattgcttgagcccaggaggttgaggctgcagtgagctttgattgggccactgcactccagcccgagcaacagagttagacctttctgcttctttacctaatgtctaataatgctgtgcacattgtatttttactgtgggaacagttattgatttctattgccttattatcaaaattatattaattacacttggaaatatggaaaggaaaaaactggtattataccaacttcatataaccaccaatagagttctagagtgttgccttccagttattttctctgttctccttaa

SEQ ID NO: 61882 - DNA, 1056 bp, Homo sapiens
cagtttatggagtctgctttctaaaaagtacttaagtgtttattgccaatatcttattttggtcagcaatcaatcacgtactcaagcatacttgtcttaccttcagagaaattaaaatttaatcagcaaaactcatcagcctgtacatttaaaatatatgcatgttattgtacagaaactataccttaataaaaagtgagaaaaaaaatgagacaggaaagagaaaaacatttaaaggacatagtaactgaagaattaaataaccaatccaacacttgaaaaatattacaatgtagcacgtgctcaaaagctctctgagctcagggaacaaagcagcactgtgaatctatagtggtaatcattctatgtggtattgggtaggacaagacagccttgcagctggaaattggtgaggacggaggcctcgctgtggaaagagtaaggcacactcagggagagaaccagtgaggtggctctgagcctgtttcagaaggggcttgaggaagaacggcagaggataggatagttgggaaagcaggatcaaatcagactccagggactggggaaccaattggctgttacagggtggtggagtcaaaaaagaacagaaattttctgtttggttaattgatagaaaatgatattattaacaaagtaaagaagtatgggaacagcacaagttttttggggatagtaaataattccatttccattgattaaaaatatcaagtttgtttttacatctaaactgattcaagacttagctattgtacatgttttagagaaagcaaaactatattttatatctaatcatactttacaacataaaatacagttctaaaaaatattatttgtgaagaaaaatataatgttgccatcttttgtctgtctgtatgttttttttcccttagattccagtgtagttagtgaagttgtacttcaagacttactggcatatgtgtcctcaaaacattcctacctcagagatcttcctccgaggcagcctcagagggtgaacagtatagactttgtagaattggagcaccttcaacctga

SEQ ID NO: 61883 - DNA, 1042 bp, Homo sapiens
tgaaaaaagtaacttgaaattgtgattgtgaaatatgtgattattatttttattttcatttctaaaaataatttataaaacagtttaatatatttttatattagtatctgaaatttaaaaatggatatagaataaataaaatgtagtaatttatcatttgaagctcttggggaaaaaaaaaaacctttttttccttctaggatgtcacagaacatcctagagttgttttaggcattcaaattaatcctgcataaaaaccaagtgctttttggaattatttttcatttaagcatttcttttatctgaaaatctttttgaaggtcgtgtgttgtttactcttttgtaggccagcgttaatgactgccattgatggaagacatgatgtttgtatccgtgtagaatcaaagctgatagagaagattcttctcaacatttctgcagactgcctcaacagagtgataggtaatatatcagtgtgccatcaagaagttgttttattcaggagtataaatggtatatcggaacagaaagagcactgtactttaaattaagagcttttctgtccatatgaaaaccgaaggataatttagcttaagtgaaatataagcctatgtaagttagaaggttgacttgctttacacctgttagtacatgaacagcgggaggcacctaatttcttcttaacctacatttcctgttggtaagcaaaaactattttacttaactctagttttataagagtgaagtcaatgagtgtgtgacataatatatatgaagatagtccactgtcagtggaatggatttgcaagatcttcaaccgtgatgtcttagttgtcagtggctaagaataaagcaaagataatatatttgtcaggtattcaaactccattcctgttctcattagcctcagatcctctaagctgatgagctaatctggttccgtgattgctttatctttcaatagtagattgtttttcgtgtatttttttagttgggggtgtctagtaattttgggttgaatgctgaacattgcatatattaa

SEQ ID NO: 61884 - DNA, 1021 bp, Homo sapiens
ggttcaagcaaatctcctgcctcagcttcccgagtagctgggattacaggcatgtgccaccactcccggctaatttttgtatttttagtagagacagggttttactgtgttggccaggcatgtctcgcactcctgacctcaagtaatccggctgcctccgtctcccagagtgctgggattacaggtgtgagccaccgctactggacgggaggagaaatttaaaatgggtttgagacttgaggaaccaaaagaaacaatgaaaccattcaatgtgtgtgctcctgtcaagctagcagcgatcttgggagctctgtgtttttgtcttttgcagttccttcctcagagatcacctatgggatggtcgtggcagacctgttccactccttgttggcagtcagcgcagaaccttgtgtattaaagattcagagcctttttgtgttagatgaaaacagctatccattacaacaagatttctccctcctggatttttatcctgacattgtaaagcatggagccaatgcccgtctctgaggccagaggaagaaattgcaggcatttcaaggaagaagtactgaaatgatttgtcttttgaaataaatgaatgacagggcttttgctttggattttttatgaaatatattttacaaagagaattgcactagatatataaattaaaacttttttctaagaaaatcctgtgaggtttaaaaagattgtttttgtcttttggtttcttactttctcctggagaaatgatctaccagtcaaggcaatatgtagcagatccctgggaattaaaggtttgcccatttgttcactgtatttagtccctgctacattccaggcattgtactaagtatggggaaccacagagaagacattccctcagaaactgctgcagtgctttcgcttatccctacctaaaaaaccgtcaatgtgaaatcatttccttgattataactataatgataatggattagtttatataaacctatgtttagacaagttcaagacaagcgtg

SEQ ID NO: 61885 - DNA, 1006 bp, Homo sapiens
atagaactgtgcttttcactgaatatttttttcttattgcacgttcatttcagatgaaaaacctgagaaatgtggtcttcgcctttgcgttggaaaagaattgatgccttatttaagaaacaatcagctaggtgtggtggttcacacctatgatcccagcactttgggaggccgaggtgagagcatcacttggggccaggagttcaagaccagcttgggcaacaagctaagaccccgtttctacaaaaaaaaactttaaaatgagttgggcatggtggtgcactcctgtggtcctagttacttgggaggcctacgtgggaagagtgcttgagcccaggaggtcgaggctgcagtgagccatgatcacaccactgtattccagcctgggtgacagagcgagctcctgtatctttaaacaaaaacaaggaaaaaaatatcatttaaaaaaaattttgtgggattttacatgtgcttttgccaaattgcatgttgctgaagagtgttactaagcactgacaacagagtcttcctcagtcattatgttgaaatactatgtttcttcccacaaataagaactgatttgattttaaattattattattttttttccaagacagattcttgctctgtcacccgggctagagtgcagtgacgtgatcttggctcactgtgaccactgccccctgggtcaagtgattcttctgccttgggcttctgagtagcttggactacagtcatgtgccaccacacccagctagtttttttgtatatttgatagagatgggattttactaggttggcccacctgttctcaaactcttggcctcaagagatctgcccatggcctccctaagtgctgggattacttgattttaaatgattttaatcagcaatggtttgaaagtaaatttaagtgactaagaagtgactaagttcctaaattatttactctactcctcataaacaagtattttcttataaaaggcattaaggtttttccaagtaa

SEQ ID NO: 61886 - DNA, 1035 bp, Homo sapiens
aataattactacttgacaaatctctgggagccatggacgaaaggcaacaaagccccagcaagcattagttttacaagtttcacctgctcctcctgatgatttcatttgagcgcatgtcacacggttctatacttagtgatgccaaagagagggctggatgccttgaatggaaggtcaagaatgacgttggagataagctctgtaacaaaggcagaccatttcctagtgactctattttccttgcaaatatcactcccagtgccacatggaaatagaataaggcccaggattcccgcagaagtaattacttttggaagctgtggggttctaaaaacctgtgttaaagtgtttttgtgggtttcagagtgctaaaaaaggacacagcaaaaagaattattttgccaataaaacttgtgtgtttggtacatgcgacaatcttcaacaatcttcatcaatctctctcacttttgcacaaaatgtctgcagggtgagtggctttctctctctggttatccaaggctcatttctcaccattagctccctgggaatgtttatcgagtccccctaataacctaaaggtatagaatcactgaaaatattgtcaaagacacaagtcatgccaccattctccttggcttctaagaaattctaaaattctgagttccatctgccagcatgcattgtaaggcatgatgaaaaaaatacaggcatacctgagaaacattgcaggttcagttccagactactgcaataaagtgaatattgtaataaacggagtcacacaaattttttggtttcccagtgcattttaaaagttatgtttacactatactgtagtctatgaagtgtgcaatggcattatgtctttaaaatgtaatattatctaaactttttttttttttgagaaagggtctcactcctatagcccaggttggagtgcactgatacaatcacagctcactgcagcctcgacttcccaggctcaggtgatcctcccacctcagcctcctgagtagctggtactacaggtgtgca

SEQ ID NO: 61887 - DNA, 1020 bp, Homo sapiens
tgagaatactttcaaatactagcttttgtgcttttaaaataggtaacagtgaatgttagtattgggtgtgggatgcatcagggacacaggtttgtaaaccatgacaattcagttgtaaaactaaagccaagtgcacctgtagtcccagctgctggggaggatcacttgagcctaggaggtgaaaattgcagtgaactgatattgtgccattgcactccagactgggtgacatagtgagaccctgtctctacaaaaaaaaaaaaaaaaaaccctaaagccaaaacattgaaataagttactgacatgcaaatttggaactgaaactagaacacagtggtgtatatctcactgttctgaaaatacacagtttccagaaattcaaagaatggccaagataactcaaataggggattggctatatccagtaaaacaaaatcacttgcagtcatgtctaagggagatgagggtcatctgttaggccatagtcatagacttacaaagaataccagttaggattctgtttgtagcaaccaactctagctaacctaagcaataaagaatttatttgaaggatataagatcaaacggaagctaaagaaccagactcaggatagaaacttagctcccgaagatttttttaagcagaaattgctcaataatcttgcttttattcatcatggattaaattaactccagctgcttaaaatgcccattcaagatttaaatgcctggacgtgagtgtgcaaacctaggtcagaaatcacccctggcagtcttggagctttgagaggactctacaggaactacttcggcttaaatggtttgaggcaaagcagctgggtttactgattcatcaagactaaatgtgaaaggagaggtaatttattcaaaggaaattgtgggaaagactgttagacaaacaaaatctgacaaatgaccaggtggttacttgaagccctgacattgaaatatgttgggtgttgggtatatactaaatgaagggcaatattataacaagtg

SEQ ID NO: 61888 - DNA, 2921 bp, Homo sapiens
attttataattttatatttcagtatgaaaaatctggatggacttgggttataactttttcctgaatgtttttccctgaatatctgtaaattacaagggagccataatattctggactttgtttctcattgaagtagggaggatttggattagttgatttttactgatagtgaagaattttactctcaatttgtaaaaagcaaaacatgcatgtaagtatatacctagaaatgctactttttaattacagttttcatgggaataacgtgattttttaaattggaattatattcccatttcaataaaccatataacattttttaccttatggtaatattgtgtacttatagatgtgaagtctttgtagctattttagcttcctacttcttagcactcagtgcttttaaaaaattccttatgatttctctatgtgtagataattcctggaagcatttacatgaagctgttcattgtggttgtctttggggtcttgaatggtaaagagatttcatttttatacccttttctacagttgaaaacaaaattttttttttaccacatgcatctcttttaaatcttggtaaaatattttagggaggcatattctaaagttatttgagtatttgatggttttgtttgcattttagccatgacgaagatgaaattcggcctgttcaacagcaggacctgcatcgggcaattgaaaagatgaagaaatcaaaggatgcagcatttcagaatgttttaacacatgtttgtttagattaagagtaaagatcatttgtacagttcagtgatctagtttggtgtgtcctcttatcagttagtggaaatagaacggaaagagtgctctttaaacaatgagggagctcagtgtttatggttttatactctgaattctaagttattgagatatagttgttacataggtggtattactgttggtcaaaaatcatgaggaggaacagttgaatccagcctgaacgtgggtgcttgtgtttgaccttttcagccatatattgtacagccttatagaatctaagctggtcttaaagtcataaatgattcattgggtcattagtgagaaacggggatgtggttaggtgctggttcctagacatgtgagtatgcgtttgtgtgtgtgcgtgtatgtatgtgtatattaaatgtatatatccacacattttatattgacattctgtagatatgtttgaatatagaaactttttttaccccaactactgaatccaggagtaccaaataatatatagtaaaactaagatttaaggttgtgtcaaaaaggtacagtgattcagccatttccatttgtcatttgtttcaaccttttttaagttgagtgtttttatttctgcagttattagttggatcctccacatcttgcatatatacatgggctcaattattatgtttgtcaggataatcaaatgaaaatactagttcagtgatcagcattgaatggttgttaggcagccatgtgctcaacactgatttcacctcttgagtataaactttttaaatttaaattggtttacatgaaagtggattaaaaggcctttcaaaagaatgggtttgaaaaacctcagtaccctttaatacatgtacatttctttccttttttcatttaatgtaacatgtctgttgtaactatgtttcttaaatattattttaaggttatgtgttctttaattatggtcaaatataatttggtcaccaaaaatgaaataatagtttaaaacaagtagctgttactaagtgtgctaaaaatactcattttataattaattttagttttcttagtatattattataaattgtgccctaagtcaggtacaaatgtacacatcaaaatgcccatattgtatctatctgtagtcgtttaatgtgaattatatgtgaatttttttcaaaattttactaaccagaattctgttataggcacctaaccacgcagcatgaggaaaacggcacaacacaatcttgaggtgccttctgaatcatcagattaaattatgcttcatatgtttttgcttttactgtatttctttaaaaactctaaatctttattcatgtgtcactggattaatttatctgataatgtgtctcacaagaatctgttagatcgtttattcttcagttgtactttgaatggtggggtggaagtttcaggtgaacaatggataacaaaaagcaagttatggaagattgtgaagaggatggaaaaactgaatacaagataccaaaaatgaaaaaaagtgtcccatttttaataactatattctattattttataaatgtgtaataaaggggtccctctttattggttgttctccacttaatctttggtctttttcagtaattttaagttttctgggattttttttggtttataaaacttgtgtttagactttatcttgctatggagttttcacacttctatagcacatatcctagtatctagtcatttctgttttaatatgaatttcagtaatttaattttaatctggtgacatattaatcgaaaataaggagtaatgtatacctccacatgtcctttctttttgtcttctcttaaattcacaatatccagtaggagtggttattcaatttcttcgtggttttaatcatcaaatgaagttagagaagtatactaatcccagcaactatgactcatctaggcatgttaagaccataaagtaattcaggaaactattttcctgatttttaaataacttttagtgttatgtaacatctatccttctgttttagacatgcatttcacatatagttgaattctagattctaagataattcattttgggtaatacttcagagtactggatctagaatcaggcttcctgaatttaaactcaggctccccattaactgtgtgtctgtgagccc

SEQ ID NO: 61889 - DNA, 1012 bp, Homo sapiens
attacccaggctaaagtgctgtgatatgatcatagtgcactgcaaccttgatctcctgggctcaagtgatcctcccacctcagtctcccaagtagttaggactgcaggcatgcttcaccacgcacagctagttgttttttgttttttaaaaatcttcttgtagagaaagggtctcgctctgttatccaggcaggttttgaactcctgacctcgaggtatcctcctgccctggactcccaaagtgctaggattataggcatgaaccaccattcttgacctattgccttaaaacatatcaaaataacatatagtgtatgcaaaagcttaaagaacctagcaaattacaaagattaggatcagtggttatgaatcattttggggggagcatgtcatagagccctttaagaatgagataaaagtagtcttttctaagaaagctacgtatgtacatgaaatatgtacagtttcagagaaattcctaaaattctccatgttttttaggtaaggaactttggtcctagataagaaatcagtaaattatattttgcctttttttttttttttttttttttttgtgacagagtctcgctctgtcgcccaggctggagtgcagtggcatgatcttggctcactgcaactttcacctcctgggttcaagcgattctcctgcctcagccacctaagtagctgggattataggcgcgcgccaccacacccggcttatatatatatatatttttttttttttagtagagacggggtttcaccatgttgatcaggctggtctcggactcctgacctcatgatccgcccgcctcagcctcctaaagtgctgggattacaggcatgagccaccgtgcccggttgacttttaattgaatttttgataactgctttcaaaaaaacattgtgtaatcctggcactttgggaggccaaggcaggcagatcacctgaggtcaggagttcgaaaccagcctggccaacatggtgaaaccctgtctctactaaaaa

SEQ ID NO: 61890 - DNA, 1882 bp, Homo sapiens
aattatagttttggtttagcatagaatagaattggagaaatttggcttgaagaattgttctattcagaaggcctgccatgaacaacaacagggatttatttgattgagtattggcagatgtagtcagtgcttccctgataggattaatgattccagtagatatcatagtttaccttaagaatgcaaacgcttagatggtgttaaaccagttctgccttctttctagcattttttgttagttaaaaagtacccctctagtagatgattatgacttaccagtacactataattttggcacagatcttcaaatcttgaattctgtctgccttcagactgcaaaggaaagaaaaaacaggttttactagtagaaaatatgttccatacaatcagcatgttacatgtgttgccatttagaggaacttactctaattccatttataatctggctaaaaatcatttgtcccatttatattctgtaatttatcagattggtttttggtagtaaacatgatctctgaaagattgatggttatggactctataaaattactctgatcaactctttactatagctacaactgtaataaagtggttaagtgtgtgcacatccttagaaaatttacccaatgaatcaatgaaaagatttttaaacttaatttaggagactataaaatttatttagtatgactgattttttttttttctttgagacagagtcttgcctgtcacccaggctggagtgcagtgacgcgatcttggctcactgcaatctctgcttcccaggttaaagcgagcccgcctcagcctcccaataagttgggattacaggcgcccaccaccatgccctgctaatttttgtattattagtagagacggggtttcaccatgttggccaggctggtctcgaactcctgacctcagatgatatgcctgcctcagcctccaaaagtgggattacaggcatgagtcactgcacccagcctagtatgactaatatttattgagcattaatatgtgtcacagacctgctaggatctggtggatgggacatgggcctggtccttgaagaattctgttttggagaggcagacacagaaataaataatgtaaaatatgctttatgaaggtatgtttaaagagctatgagagcctgagatgttgatgaaaactaatattctgtcagggaagtccatggaatttacagaatccagctggaccttgaaggatgataggaatttgacaggcaaatgagacaaggaagggctttcctgccagaatgaacaaagtcaagaatttgtggaagcactgtttaatggtgagttctgagggtagtttggtgagcgcagcaccaaggaatatagatggagaggaggctgaaaaggtagactgcttctgggtttaggtgaactttatatgctttgcacaagagttttgattttgtaagcaagacatcagaacacttttttaaaaatttgtttacctaattggttctgaagataatttatagaatctctatcactaatccaatagttagtacaatggacaattaagggttttttaaattttattctttttttaaagacagagtcttgctctgtcagccgtacaattataaattatagcccactgcagccttgactcttgggctcaaacagtctttccacctgagcctcctgagtagttaggactataggcatgcaccaccacgtttggctaatttttgaatttttttacagacgggtctcactatgttgcccaggctagtctcaactcctggcctcaagggaccctcctacctttgcctcccaaagtgttaggattactggcatgagccactgtggctggccagctatggtttttgatgtacagtacaatagaacat

SEQ ID NO: 61891 - DNA, 1105 bp, Homo sapiens
ataattgcacatatttatggggtacagagtgacatttcaatgatcactatagtatatagtgatcagaccagggtaattagaatacccatcatctaaaacgttttatcatttcagtatgttaggaacatttgaaattacataaagagtaaataaaataaggctaggcatggtggctcatgcctgtaatcccagcactttgagaggccaaggcaggagaatcacttgaggccaggagttcaagaccagccttgacaacatagtcaacctgtctctacagaaaataaaaaaaaaattagctccgcatggtggcacatacctgtggtcctagctactcgagaggctgaggcaggaggatcacttaagcctgggagttcgaggttgcaatgtgctgtaattgcgccattgcaccccagcctgggcaacagagtgagaccctgtctcaaaaaaaagggtaaataattaattcttaatttctaaggttaaggaccttttacttctagactcctttctacgaaaccgttcaagttctgaccatgaagctacagccatgatgaaagctcagtttatgagtctctgggatggattggatactgatcacagctgccaggtatttgaataaaatctgccctcaacttgtgttggtttttttgttcttaatagaaaatttgctgggctacttactatgcttttgtacaaacttttttttcataattatttacacttatgactaagtgataaggatccaaaagaatatggtttgtataaactttatccaatttgaggacttcgtgtttaccaaaacattagtagattgcctaaatgcctgaaacagacacagcagaagagaaaacaccagagtaaagcctgtccttggaattttcagaacctacagtgctaaggagaggaagtgactagtgtccgtgggtattgtgtacatttttttaaaaaactgttctttctgttttcctcggttcttacttttgactttcaccataattccttatactgtcaattcttagtcacttccctgattttcatttgacagagttcattagtagctgaaactgacaacactttctcacttcctgtcacctatgcctatctt

SEQ ID NO: 61892 - DNA, 1025 bp, Homo sapiens
atgattttgtttttcaactgttgataaagtggtatgaatttggatgtcaaggtgagcatttaaactgaaccttttcatgaagggagagggcacaggatgctgtaatccccaaatacatgctcttaactgacactgagcttagaacatggcatcttcctttcttctatcttacctactataaacaagattaaataaaagcagaattgaatattgggaaagttttttgtggaaggaattactattctattgattatcatataaattgaagcaaatatccccttaaaggtaataaataacatattcatttccaggtgttcttctctatgggcctccaggctgtggtaaaacgttgattgccaaggccacagccaaagaagcaggctgtcgatttattaaccttcagccttcgacactgaccgataagtggtatggagaatctcagaaattggctgctgctgtcttctcccttgccataaagctacaaccatccatcatctttatagatgaaataggtatgctatgttttctatatgagtatttttaaaggccatttttagagatatttagataaccagatttagtttttaacatttattaggccatgttaataaaacaaagaacataaccaacatcataatatgctatgtataatttctgtgttgtagaatgaaccatagactatatactcccctacttgatagataggtttttctgtcttttctctgttacaaacagtatgcagtagatatccatgtacatgttttctcatgtatatatgtttgcccgggaaagatacctagaagttgaatcatttggttgtgtgatatatctatcttcaacctcactaggattaccagttctttagttattatacctatttatgttttcctgcttggtagtaaacttgggcatcttttagcatgttgattagccatttgggttttcttatttgtgaattgtcaatatttctttggagttatttgtagttttcttttgttgatgtttattatgattacacctatttt

SEQ ID NO: 61893 - DNA, 1048 bp, Homo sapiens
tttattgtttcatatgagccatccaaaagaaaaatgtcagtagaagattcaaattataactgacttaaccaaattttaagcacctaagtgaacttaattaaaatttgcagaatgcttgaaaatacaattaacatgtattggtaaagcttatggatttaaatttaaaagtcagctttagaaaagtttagtttcatatgattaaacttagattagttgctgttagaacttgaatcttcaagaattataaagaccagtagaaaattctatgtatgcttgaggaagagcttgaacattattttgaagtgtttgatgtgaaaaataaaattgctagagttatggaatcaggtgcagatttctttttttttttaaattgagatatttttgggaattttcatacaaaattatttttcctctcattttgaattttatttttattatatataagaaaattttggactcctccagatcccttccagttcaccctagcatgccatctatatagatggcattttaaaaaatactgtttcataggaaaagttgagctttgaattaaacaaatattttgagaggtctgcctattacagtttttgttagggctgtctgtagatggtttattttaataaccatcttagtactaagtttaggtgccagatcatgtagtactgagtttagtaatttggtaaaattataattttagtattatatatttagtattattatatatttaatattattaaatttagaaaatgctatctcattttagttgagaaacagttggtggtggttcccaaaatgttcaagatcccaacctctagatcccttgtattaaaagtgttaccttaaattgtatttagcagcaaaatgctgttaatggagaccataggttaataatatagttttattctttggaaattaaaacaggagtgactgataatttctgtttcttttaggaaaagattgtttggaaaaaggcacatgtcctttggctaaaacttaatctgtgagcaacagcaaaacagtgtttgccacaatctgttttgaagttgtt

SEQ ID NO: 61894 - DNA, 1089 bp, Homo sapiens
tggtccataggtttacttttgatggataaaattcagaagctatgttttgtaagaccttatttctaaaattaatttctgtgatgcttgacaacatcctgtataaaataggtacattcctgatgagctctttcccatcagccagtgctaaattatgtctcagctggttctcagtattcttgcagcagagtattttctccttacaagtggaatgaatttagcttattagacccttgcagatttttgagtacctgacttacagatttttaatagtagatagttgactattaaattcctttttccagtttcatagcagtttatttcattactgcttggaaaagtctttacttatgttaatatatgattttaacttatttatgtataatcatcagattaacatttgtaattttgggagcgttctttttactttagtgagtgtacatttgtagtaaaattcatgttgaccttaacttttgccaggttacttggagtgatatagcaggtttagatgatgtcattacggatctgaaagacacagtcatcttacctatcaaaaagaaacatttgtttgagaattccaggcttctgcagcctccaaaaggtatggtaaaggtatatattcgcctaaagcattaaaatcctagaaaacattgaaactttctgccattgtagaactagtttttgtgaaatcagattctcaagaggatgctgagatctatgtgaacagtttcttaaaataattgctcattcttcagcttctgaaattgagataaactttttcctgtatttacatgttaaaatacttgttaaaataatctccttcaatttcttttctcttacttccaagtaaattaaaatttggaaaatcaagattaaagaaagattcaaagtcataatacaagttttttgttttgttttgttttgttttcaagccaagacatttttttcttgtttcacagctccaacgatcttatttttagaatgtaatgattctttttcaggaaatatttatctgcagatgaactagaaattaaatatttaactttgatggagatgtttgcttattcaaaatcactttgaaagtcttggaac

SEQ ID NO: 61895 - DNA, 1299 bp, Homo sapiens
catctattgtagatacctggattaatttgaaggaagttggacatctgtttcagatactcagtttaaagaaacttcacttatacatttcttgccctccttaactcctctgtctttcctcttgagatttcacctttgccagtcatgatagtcctgttaggaatgagaaactaagctgtatcctagagtctcattgaaacaatgggagcccctcttggaagtgtaagatctcttcagtcacataccctattttctcatttcctgaaaggtggttaaatttccctgatttcagtggattagagcctcaaatcgttacctgagggctcacaatggagaaggctaagatcaaggggcctagaatatccttggaaatttcttgtatatctatctgttcattgctctttagacttcacatatatctatttcgaagtgccagtatctaaatatcaaatcaaagcaggttgtttgttcttttcattctaggcagaaaaactaatgaagcaaattggagtgaaaaatgtgaagctctcagaatatgaaatgagtattgctgctcatcttgtagaccctcttaatatgcatgtatgtatctttaatcttatttaagatttttttagaggtgggggtgggttctagcattttgtgtcaggggtcttaaagatcacggccgggttctttgattctctaggctgaatcataagactcggcatatagttgtattcctgtatatgatttattacactgaaaagatacaaagcaaaatcagcaaagggaagggggcatgggatgaagtctgaaggaagccaggcgcaagattccaagtggagtcacacagtgcttaattagtgcatcaagttgtgacaacacatgtgcagtgttgtcaccaggaaagctcacgggagactcagtccccaacatatttattgggggctggttatatagctttcctcttcccttaaatgtaccaaaattctagactcccagaaggaaaatggatgtttcaccataaaccatattgtttgcacaaacagtttaggcacagtgagctgttcttgtcaagaaattgtggcactcttctgaaatctaagttcccacatgccagccaagggccaatcttgcaaatatgcctttctaaggacaacagtctcaggcctactttgttaactcttttctgtacgcatttgtttagtaaaacttttatgtatttgcctttgtggtgtataaagcgtactgctttaagtcatgtggatttttgttttatagagtttaaacctaaattttcataatatggtatgataacac

SEQ ID NO: 61896 - DNA, 1050 bp, Homo sapiens
gatcagaggttgtccttgtttctaacttaagtttaattcgttcatctctgatttttcactcttgttaatgacatgtccaactttctaaactgattcttccaaaaggacaattttatgaatctttagaacctgaatgaaatgagtgttagctcataagtattttctttgctgctgcttgtccccatttctgccttccctactccaggcaaaaatattagtttaatatttcctattccacttcttaatctttttgaaaaaataatactttgcatggagaaaaaagtgaaatagcatgaaagggtaaaaaatagtgtgaaagggtagaaaatcatttggaacagtcaaaaaaatatgggtatacagtaaaaagtaagttttcctccttcttttggcccccacacactccccatccaactcattttccctccacagaaacaacaaccacttggagagacctactttaaaaaaaaaaaaaacaagcaaaccatggtgatcagaaaatataactttcattaagctgtaaacaagaaagtatgcataaacataagccatttttacagtagtccaatcataattttgtttttctgcttatctagtggctcacttaaaagtgtcaaaactaggcaattgtataacttcttcctgggacacagtttgtttggtggcagttttggtgtgttttttggtgtgttccatttatttgccagccatgttctgctctcccaaatgaagagtattagtgtttcagcaaaatatgggattcgaaattagacaaatcagtatttgagctctgttaatgtcacttcctagctgtataatcctgacatttcttttaatttctctgacctgtaaattcctcatctaaataataaggataataatagttacttctcaggttaattttaagggttgattataaattacctagcacagtgctagatatggtaggtgctcaataaaaccattagttccttttcccttttcttttaatgatatattgtgaatacaatctgaagagattgttaaagtgggactgctgttgcaggaaag

SEQ ID NO: 61897 - DNA, 1629 bp, Homo sapiens
ctgctgagccatacaaattctgttttttttcatgtttatgtaagtacaaatatatattctctttttcttatatatcccatagcattcagcacactcctgtgctgagagtataatggcagtatttgaagctaagatcctatctcccaaaatgtgatagtcatatcatccctaacaagcttattcttccgggtagttattgccattgacagaggagtgtatgtcttctgtaagcctagctttgattgatgtagctgttcagggatatatgcaaaaataggcacatttatctcattttttttctctttagcttgggtgagtgctgtattcttgtagtagttgtctcagttcaagatttttccaagttctattgcttcctacttagcccggttgttgggaacaatagtgtggctcaaaaaagttaataccacttattactgaggaaatggcatgtttaaatttaagcaggccttgaaaacctttaaaagtatgtatgaggaaaaagtgagtcagttcacaatttgaatttcactcaaaaattacctggtatatgatacagttaatagaagaaattcttaccgtcacattagtattgttgggctgcctttcttcagttggattagtgttatagttgatactttcctagactctgaaatagttctttaaagctgttttgagtaaataccttaagatatttactgtatttttcaaataaaatgattaattctactaccaaataaatcttaatttctagtctacttctagtttgcaagaggagctttaaatgtatttgtttacttaacatttaaaaatccatttctccttaaaatgaaacactttttttaaggtaggtaatattttaatttgactagaagttagtttttctttcttagtttaagctactttgttagtcttacaattttaataagtatagttattacctagtgacatttctgtttgtttttttaaggttaacattcaagatggtacatgctgaagccttttctcgtcctttgagtcggaatgaagttgttggtttaattttccgtttgacaatatttggtgcagtgacatactttactatcaaatggatggtagatgcaattgatccaaccagaaagcaaaaagtagaagctcagaaacaggtatgattgaaatgtttgaagatcatttttcttgtggctaacaagtattttcccctcaaactaaaaatttggtagagttcacaaattaatgagaaattctataagacccacatgaaaatgtattggtactcatagttttattactcttacaaagtactagtttattatgacattatttcaagtcattttttactatataaacaacttatcagaagaaaaatgaataaacaataaaatattgtgaacatcttcattagaatatttttgtcagctttggaggtaggatctagataaaagtttttaggctaacccaaaatatttatcttcagtaatgatatgccttttgctgtgtatgacatctgaaatgtggataatactgaaacgctctcagtcttaaacttataagctacactaaaatctaattaatgaattgctgtaaaagttgttgattattaatataagctgtagtttttaactttttatctgc

SEQ ID NO: 61898 - DNA, 1017 bp, Homo sapiens
aacaaataactctaggttatagtgttttaggatgtttcttagttgcatacagcactatcatcgtatatgtacatatttgtgtattcattttgttgaacctaatgtttatacaggattgaaatacgctccctgctgttgtatgcgcatgcagcttttattgtatgttcgctggtgatggtattgctgctgtaacagccttacattttaggtatatcaataccaaatgaatgatacatgagtgtacaataaagtatatatagttacagtctacaaaacaagtttcagtttcattgaaggattttgaagtaatttaaaaaggtagactactattttacaagtggccttagtagacctaagtctttattacattaaaaatttcagaattgggaaggatataaacgggttttgtgtgttgaccttttatgggattaaaagttgttactatcttgatgactgggatgtgttcataacagccctaatttgttcatgtagttcaatgaatatccagtagatgacttggttggtagttttatcactaccaactctaaaacgaaaacgttttactggaatgccaccgcttttcacagattaggttaataaaacccttatcttgtctaaattattttcctctgtgagtataccccacgtagtgatataacacgtttcaactgcattttcaactttgtggaataaagactagaaaagtcagttttttacttcctatgagaagtgaaatattgtgtaacccgttttttttggaatccatgctgatggaagatagcacactttggtttgttccatgaagagagatttcagttaggtgccttctcctttttggcttcttttgctttctttataattaatataatagccggacagtgtgttctttgaatgaagtggtgatatcttaacaattattgtatatccaatatatagtgggcgtcatatatagatgttcagtaaatgcaaattgaatgaattaaatcatttaccatccctaggccaaagtttcttcct

SEQ ID NO: 61899 - DNA, 1920 bp, Homo sapiens
agacggcggcggccgcggcccggagcccctctcagcgcctgtgagcagccgcgggggcagcgccctcggggagccggccggcctgcggcggcggcagcggcggcgtttctcgcctcctcttcgtcttttctaaccgtgcagcctcttcctcggcttctcctgaaagggaaggtggaagccgtgggctcgggcgggagccggctgaggcgcggcggcggcggcggcacctcccgctcctggagcgggggggagaagcggcggcggcggcggccgcggcggctgcagctccagggagggggtctgagtcgcctgtcaccatttccagggctgggaacgccggagagttggtctctccccttctactgcctccaacacggcggcggcggcggctggcacatccagggacccgggccggttttaaacctcccgtgcgccgccgccgcaccccccgtggcccgggctccggaggccgccggcggaggcagccgttcggaggattattcgtcttctccccattccgctgccgccgctgccaggcctctggctgctgaggagaagcaggcccagtcgctgcaaccatccagcagccgccgcagcagccattacccggctgcggtccagagccaagcggcggcagagcgaggggcatcagctaccgccaagtccagagccatttccatcctgcagaagaagccccgccaccagcagcttctgccatctctctcctcctttttcttcagccacaggctcccagacatgacagccatcatcaaagagatcgttagcagaaacaaaaggagatatcaagaggatggattcgacttagacttgacctgtatccatttctgcggctgctcctctttacctttctgtcactctcttagaacgtgggagtagacggatgcgaaaatgtccgtagtttgggtgactataacatttaaccctggtcaggttgctaggtcatatattttgtgtttcctttctgtgtattcaacctagggtgtgtttggctagacggaactcttgcctggttgcaagtgtcaagccaccgattgctttcttaggctatctatatggtctcttcctgagggctattgtccgttaatacagaatacagtacactgttagtggattagcgagctcggtaatccggtctcctaaatgaacaaaaaagtagacgctttttgaggttgagcatatttcgattaaatcttggcttaggccctagatcaagggtttagatcagaataaaatgaaaattagtgttgcacgtacgcatattgcatcagaatcttgcagtgattgttttagtttcctgagttgcattgatagattcttttaaaatatgactgatttgcataactttagaagcagaatcattttcagtatatatggtgcacattgagggcaaaaagtagttttgttaatgtttaaacttaagttacctacaactttgaactgtatgtagaagttttgtagtttgaagtcaatagtgccataatataccttataaggcgttcttactagatctttgttatatttacctttttctctccctatggggtgatgtaggatagtgcttgaaatttgcacttcagtagcatttaatgttcagtgctcttgtcataaacatagaatggatattgagtagtttctgatcccagatggtaatgtgtaggttcaagggtattgtgtgtagcaagtgaagattgcagaaataaaacttcagttcatgcttgaaatttaagtattgttgtgatgccagaattgctgctcaccgtttttaggtttcaggtcctctgacaccttttggtatcgttaattttactgatttgtgtagaatgtcagttgtattttaccagctaatatctagaaatgctggcaagaggggtttactccagctttagattgtaggtatgt

SEQ ID NO: 61900 - DNA, 1062 bp, Homo sapiens
ttatgttagctgcatataaatgtgcacagttaattttgcccaagtttttgttttgaaatgaatgtaaaacttactgaagaagtagcttcccaaaatttagttttctgttaagccaaaaatattattttaaaagagtatttgcaaattttgaagttgacattaattgagaatgttactaaggctaaactggacccgcttgcccagaagataattatggaaaaattcttttgtgacttccaaagcagtctactattagcatgaattactgacagtcatccaaatatataggaacaaaaaattaaatgtttatgtaactttgaaaaaaaagcctttgaagaaaataattgaatgctgtctgggagacagatttctttcagcacttaaagtacataacacactacttttacttttcccacttgattttaaattatcagggttattaagaccttaaaattattttaccaggtttttacatgtgagctgtgacatgactggcattttctttgatttcagcgtatgttggtctctacacatgaaatttgtgtgacttaaaactttctctaaaactgtacttttagttatgatatgcatagaaagcagtatcaaatattgcgtcaaatgactaataacacttaatttctagagttgtggttttattgagccaaaagttgatatgaaaaaaagtcagtaaggaaagtcagtgaagtgcttgcttttttgataattgcactcccaataattttgatattccaacgtacttggtttgcttgttttcacgttaatgttttctgtttattggagtgggaaggcattaaaattgtcattgaagactttgtctttgacatgttgtagtatttatttcagtaactaacctgtgaaaagttaaattcctttatgaaagtagtgattggagtatttttatctgataaagaaagattaataatgaagccatttctccgaggaaaattgaggacaataattcagttttaaaatattatcgcaaaattaaattattctaaaaatttgttagtagggttatatgcttaatattagtctgaaata

SEQ ID NO: 61901 - DNA, 1724 bp, Homo sapiens
aaaggagtaatgtacagtttatatgaggaaaaaggaattttattgctgccagtgtaaaagtttgcacagcagtatagtcatcaatgcagatttacattgcttataatatactaagtaaatactaaatgattaaagataataaaatatggtgaggtataaccaccttcattttaaacttagttttagaagatagtaaagaaagattcctttattacctttttagaattttatttttaataacatgggaaaggcaactggtgatattttaatttttgtatggaacagtgcatctgctttctcatagccacataaaatacataaacttcttagtgttatgaaatggcttactttttggaagtgaagaagtcttcaattcttattttctaatgttattttgaaatttgcctccatttgctgtttgttcatttggtgatagcgcaacacttaaaaaaatattttaagccgcttctgaagtaatcacttcagtgacttttaatggaggagtatttgttatgggaaattcacttcacaaagttttaacattaattcacttgaagtaaacgtgctatttttaaattttcatctcaatcttttaagtaagacgaaagcttaggaaatcacttttattattgatattgtgtgtgacttcagagtttgtaaagagaattgtagaagtgttgcatgcatatgacaattttctgcttaattgaaatgtgaggcctctgccatactacaaggatttagcttccagaaaatgtaatattaacatagcttaagaaatgtatttttttttttctgtagaaaccgttgggttaaacaaacagttcagaagttttattacatggaacccattagttcttaatcttgttacctttttcttcattttttctgttaaacttgattttcacagtcagcattgaagaattcatcttgtggcctgaattcattaagaaaagatgttaggatttgttctgaagatagtgacttaggaaatttgtgagactggggtcagtcagttctgttttacaattgctttctatttggtagctttgaaattaatttagttgcttatcagagagaataatgttgaggttagactaaccttaaattggtaaggctttgctgagcaaactgataactgtaagtcttttatagggtgcattactgccacatatacgttcttccataggtggttaaaagtatattggtctgtgtttggtgattctctttgtacatattgagtatatgcattcactaatgtaaaataatttgccaagaaaggtgaaattagtatattgtacttgactattcacctttcccttagttttttgaatttttttcattggttgcagaggaagtattagcaatttaattcttttaaaataatttgcactggaataaataagtatcggcaaatataagaagagtaacataatttaagggtgaattaattttatttgggaagttttagttctgtatagttaaggcagattcttcatttgcaacagttgacattgggacatgtgtgaacatcttcaaggtattaggacatcttcaaggcattactttttggcagtgttgagaatttttttttttttttttttttttttgagatggaatctcgctctatcgcccagtctggggtgcagtggcaggatctcggctcactggaacctctgcctcccaggttcaggcgattctcctgcctgaacctcccaagcagc

SEQ ID NO: 61902 - DNA, 1977 bp, Homo sapiens
attttgctggttcatcacaaatgggaaataaatctctgctaactcaaactgttgaccaaagtaaaattaattatgccaatcaaaaactatttgctttaaaatataaaaggcaaaaacttcctattagcataatgaagtagaatttttaaactttgttataatcttaaattttctttagtgttgaagataggtcaacttaactatcatacatttttattcacataaagtaaactctgcctcaaatgtaataaacttaatatgagttatgtaaactttggtcaatagaggtatattttttagcatttccttttgaaaatttcagccttttgagggagtcttgcaactgaatgtcaagttacatttattacaataaaatggacacttaatataatctgtaatgcattaacataatatgggaacttttaaagtattcagtctctgtattattgagtcctatttccacatttggccaggattctcaatatgatttaggcccaagacgtgggaagaaagaagtaaagaactaaaggatttttttcttcatttttttaattgaatatggggaaagatggaataagcttatctgtccagtaaaggccattatgtgtacatagggattattatttttcccccccttgggctgtactgatttcccagatgtaccacagcactcttagtagtgaagcacttgacttctagtgagtggattttttgtgtgtgtgttttatattgcagagtgaatacactctgtctgatactatgtgactttctgattatgtgatttttatgcattttatgtgttttgtaaactagctgtatttttggtccatgtctaggttgtagaattgaattgtgcattttggcatctgagcacagctgagttttctaaatcaatctctctccttgcacctagtttttgctttagatcactacctaagacttactgttgatttaatattagagcacttaagcatagctttgacttttatttcctttgatttttgtagattttcaggctgaagtacaataaggttctctgttctttactagtaattgcaaagattgtattctgtgaattttatttgtttaatacttttgatcttttgaagaggatgtaattatttaaggtattatgaaatgcattgtgatttgaattagatactctttggagatggagttttgctgttgttgcccaggctggagtgcaatggtgtgatctcggctcaccacagcctccgcctcctgggttcaagcaattctcttgccgcagcctcccaagtagctggaattacaggcatgcgccaccacgcccggctaattttatattttttttttcagtagagatggggggtttctccatgttggtcaggctggcctcgaactcttgacctcaggtaatctgcctgtctcagcctgctaaagtgctgagattacaggcatgagccactgcgcccggcctcagatactcttttaattagatgcgtttaaaaatttaacccaccattgctggcatgaatagatgtatttttagagtgattcataaatatcgtatacatgtttaaagttacaaactttttgcttatttcaaaatgcaggattcttttccatttaaaattccctctctttgtgagacttctttttgagtattctggttactctaaactgattggagatgaaattagatagaattgaaaactgtacttttaaaatgaaattttggggatgtcattaagcttgattttttaggttttttttttagtgtgtattataaattattttacactgattgtcagcgataaaatggaatgcctgggattttttaaaatttattttattcatttttataaggtaaaaacagtgttttgctaggcttaatttgaccatgttgtaaaatttattgtataccttgaaagaatcatttatgaaagatactgaattagctaatatatactctgtcttatgtagtttttgattaac

SEQ ID NO: 61903 - DNA, 1434 bp, Homo sapiens
ttttttaatcagaaggagtatgggcttataatgatgttactgttccctgaagcatattttgaatgatacggtttatatttgcacagttgcccaggtaatcattgtgatattaattgatcaatttgctatttatttgcgttttaaatcagtactagtatttgtgcttaaaaattttgcatatgttttatcagatttaatttttaagtgtcagatactaaaacaaataaccttaactttattaaattataattttttatcatgaggtggtattcatttattcatatagttagaacaaaaaatatttaaaatattgaggtagaaacaaattagtctctttttaattaaaagccagattacttgttagagtaacattttcccaaatgaggtaaaattgttgcgactgttaaacttaaggaaattttgatctaggtgtggtatataccttcttgtggggtgctaatgaaaacagggatggcaaaaatattttgtttgtgagtgtatgcatttatgctttttgacaacctaagaaacactcttacatctgagtatctttcatggactagctgtaggaaatctatataaaatagcttagtatactgaaagtatgacatagttttacatatctagattgtggttgtgattatatataatactataaaatatgctaacgtgctgcttaataatactatttggattttttttaatactgaaaaggtcacacagattgtgattattgtgtagtgtccaagaactaaggcctaccatctgttactcaaatgtatgaaaaagttaagataatttagtgatataagtggttttgacaccactgtttttggaataatctaattatgatttttataaagactaatatcaaattttaaacgtttgcaaaaatgaaacctaatagttatactgttatttatatttttctattacaatacagatactggctgagaactaaagattgtgtaataaacgcctggccttcagtcatttggttttttttttccctcgattgtttggatagttaactggacatcatgttttaacttgagaaattaagttatacaagattttgatattttaaactagttttcctaactggttgagatatataagaatttagtattacaggactcaatcagggaactgatttaataagaatttcttaaaaatttgtttaaatatttttcaagttcttttcttcatcttctacaacttaattcttgtctgtatgcaaatgagcttccccatttaaaattttgctgttgcattttaggccactatagaagttgtttctttaattttcactcacaagaatttggtcttaccaaattgtgtaaatctttaaaattgtgtatttggcttaatattatagaatctgattgatttaatctaccttgtttcatttagtatgttgacattttcttgaga

SEQ ID NO: 61904 - DNA, 1009 bp, Homo sapiens
cttttttgctgtaaaaattagtggccttatgtctttctgcataattatagagtagccaaaacctgttttaggttaatcacctctggcaaaataaatgataaaagcatagcttttgtaagcagaatgatattacagaagttaacttataaatctaagtgtattaaagacacttaggaaatttatgataatgctgggtcagcattacagttttaactttttacagtttttcatatgctttttttgtgattttgctgtagaaaattaacagttggcatttggcttagttcaagtataatgctgttgacaagtatatctgacacgtcattgaactaataatatttttgaaagctgataggtaagttatatctattttgtttcattcgtcattagtgatcggtcttagatgtttttagcgagagcaaaactgtagaggaatgtgtgtctgtgtgtgtatatgtgtgtgtgtgtgtgtgtattttaacagcaggagagttctgaaacaggaaaccagtcttatcatattcatccagagacctaggaagaaggtaattgtttggtatactcgttaaaaccagttggttgggcaacttaaatttttagaggatcacagatgtaggcttgagcagttgtagatagatgatttctttttttttctttcttttttcttttttttttgagatagagtctctctctgtcatccaggctggagtgcggtggcgcgatcttggcttactgcaacctctgcctcccaggttcaggcgtttctcctgtctcagcctcctgagtagctgggattacaggcgcatgctgccatgcccggctaattttttgtattttagtagagacggggtttcaccgtgttccccaggctggtctcgaactcctgagctcaggcaatctacccacctcggcctcccaaagtgctgggattacaggcgtgagccaccgtgtctggcgatagattatttcataattaacacctgctatgaagaaaaattgattaaaatag

SEQ ID NO: 61905 - DNA, 1023 bp, Homo sapiens
acacaactagttagagacatagccagctcttaaatctgacttccagattttcactgtgtcttcttttttctgtaacgtgttgccttttttagccatgaaaaattagaagttgaactcttgtcttttcaggcaggtgtcaattttggggttttgttttgatttttggtttttgacataaagtactttagttctgtgatgtataaaccgtgagtttctgtttttctcatatacctgaatactgtccatgtggaagttaccttttatctttaccagtattaacacataaatggttatacataaatacattgaccaccttttattactccagctatagtggggaaaactttcttttcataactagctaatgttttaaaaagtattcttttagtttgattgctgcatatttcagatatttctttccttaactaaagtactcagatatttatccaaacattattgctatgggatttcctgcagaaagacttgaaggcgtatacaggaacaatattgatgatgtagtaaggtaagaatgctttgattttctatttcaaatattgatgtttatattcatgttgtgttttcatttagaaaagatttctaagccacagaaaaagatactttgtgatgtaaactattattgtagtgctctataatcattttttggcttaccgtacctaatggacttcagggggatacagttcatttgataagaactgaccttatacattacataatcaggtacttatgtgatatcatttcctggactccataaaatgctggtcaccaggtttaatacctggattccattacagtgtgatttttgtcttatttcatagttggggattaggcttaaaatcctagagtggatttattcagttaaatttattcacactaagatgtagatgactaatactgtatatttttatgtagaccaaattttaaggtaccactgtgcatatgtataccaactacctgaagaagtatttggttggtacaagagatatagaaaggaatcgctgggtg

SEQ ID NO: 61906 - DNA, 1105 bp, Homo sapiens
tcaaatttttgtacctacaaaaactacaaaaaatccccctagtttttatagtttctattaaaattatagctggtacatagggatgccagaaggactgtttaagaagctgaaaatagagaaatgaatttatcttctcatagttaggcagggcacagtagaaggatgcttaacattgcaagctgatgggaacagcaggttgatatagcttgtgataacacttctaaagaaaaagcaatgagccatagaaaaaagaaaaagatacattttgaattaaggaagatggtgaatctgggaagtgagcagtacagtcaccagacgtgtatcctctcctatggtacagaagtgtttattgggtctctttatggcctgcatgatatatcccacaagatgacctacttcacattattttaattctgtattcaactaagcactaattcaacccagccagattagtactcataccaaaaaagagtgaatactctgaatagagggcaggttttctgattatggtgagaatatctttgtggtaaattaatctggtgtgctagtttttacgttggtctcttctcagtgtcgttagtcactgaggctgattgatcatcttttaggttactgataaagttcctgtacagctgattttcagaccttagattgcaataacttcaccaagaaaatacttcattgggaagcattttggtccttccatttgattcataactcttacctttatgcctctgaaggaaaagatttatacattcagcttgtaattagtaatcaagactgaggtttagtctatctagcttcacaatctatctagtttgttttgtctagccatatgatttcttcaaatatgccatttcttaaaaaaaaatgttttatgtatcccgattaatatttagccagtggttcttttagccgatggatcttgtcacctcttatgatactattaatagcatgtcaacatgaagaattatctgctgaatataatagctatgctgtccttgtttccttttgtctcattcttttttgattgggggataattggccaataaagctttgatagcctctattgcccaggcccctcctcttcttttatgagagaaag

SEQ ID NO: 61907 - DNA, 1093 bp, Homo sapiens
aaacggaaaatactctgcagagattagactttgttattgttgtactacatcattgctttgactaaaataaactcagattgcaaataccttcaagcttacattgctcagtatttttttttttttttttttttgagacggagtctcactcttgtcgcccaggctggagtgcagtggtgccatctcagctcactgcaacctctgcctcctgggttcaagcgattctcctgcctcagcctgcggagcagctgggattatagatgcccgcccccacgcccagctgatttttgtatttgtagtagagatggggttttaccttgttggccagtctggtctcaaactcctgacctcgggtgatccatctgtctcggcctctggaattacaggtgtgagccgccacgcctggctaaattgatcagtattatttaactttgagggatatgatttgttatggaatgcgaagttttatacttgaggtactcagagtccttttgagacaaatatttaacttctccttttgaggttaccgcctacgattgggaattaatgtaaaaaataagccaaaagaaagtgagggaaaagtgaaccaagctgtaatttttttactcttttttattgttgttgttattgttgctgttttttactatcttgattgcaacagtttggcttatatatatagcatttggaattgacagtaagaaagccacatctcatagaagctaactattcccaaattgtttttttcttcttttcctcttactactgctgttttcctcctttcttgctgctaagctcttgtcctgacatgctggtaatatgaaacagtgttttattcagataattgattattctgtaatatgtatgttaatcttttttattacactttaagtaatagggtacatatgcacaacttacagattcgttacatatgtatacatgtgccgtgttggtttgctgcacccattaactcgtcatttacattaggtatttctcctaatgttatccctctcccaaccccccaccccaggacaggccccggtgtgtgatgttccccgccctgtgtccaagtgttctcgttgttcagttgccacctgtg

SEQ ID NO: 61908 - DNA, 1043 bp, Homo sapiens
gccccgccctgcttcagctcaccctccgtgggctgcacccactttccaaccagtcccagtgagaagaaccaggtacctcagttggaaatgcagaaatcacctgtcttccgcgtggatcatgctgggagctgcagacaggagctgttcctatttgaccatcttggaatgccacctttttttttttttttttttttttaaggcagtttcttgctctgtcacccaggctggggtgcagaggcatgatcacggctcactgcaacctctgccttctgggctcaagtgatcctcccacctcagcctcccaagttgctgggaccacagccacgcatcaccaggcctggctaatttttgtgttttttgtagagatagggtttcgctgtgtttcccaggctggtctcaaactcctgcgctcaagcgatccgcctgcctcagcctcccaaagtgctgggattacaggcatgagccactgcacccggccaatatgtatgttaatctcatccctcaagctgatactgaagtttttcaatttatgttatttggtgtaaatctaggcagtctttaacaaaattggtgcttcatgtgtttaagaggcataacttaagaattgtttgtttcttataaatcaggagaatggaggtttaatagaggtgaactgtctttctcactgcagaacctttaatatgccactatgcattgtaaatctcccaagagtgagattctagtatgatgcttttcttttccttttctgttctttccctttccctctacctcctttttcttttctttgttggtggcatgagtcctatattataaggaaatgcttttagagtacagtcttctgatatatagtgatttttgaaaaagatttatttattgtcttgttcactgtgagctttttcccccatgtataagcagctgtgtaatagattcaagagcaccccctcgcccctttttttttgagacagagtctcgctcggtcactcaggctggagtacggtggtgctgtgatcatggttcacctcgacttctgggctccagcgatc

SEQ ID NO: 61909 - DNA, 1087 bp, Homo sapiens
aaaagggaatttaagagttcctgcctttttccttgtctttagcattatatagctgtttaatgtgtgggagtctaatttcttttttctttcttgagacaaagtctcactctgttgcccaggctggagtgcagtggcacagtcttggctcactgcaacctctgcctcccaggttcaagcaattctcctgccttagcctcctgagtagctgggactacaggcatgtgccaccatgcccggctaatttttgtatttttagtagatatgggacttcaccatgttggccaggctggtcttgaactcctgacctctagtgatctgcctgctttggcctcccaaagtgctgggattacaggcatgagccactgcacctggcctaatttttttattgttctttttggtgtgaacattctcccctcctccaagccttttgtttttactattttcatgttcctttatatgtgctgctgttttgtttcatctgtaattatctctcatccccttttttggctattataatatatatatgtacgttttgaatctgagctttgaaggtaaattcactgcagctgtgttggttgattttagataatttgtgtatttcctcctttgtcttttttaaactggagtcatttgtagttgtttatacagaattttagtttttaaaaccacaagtctttcattataggttgagttatgaattcatagcctgttatttaaatgaagcttttgaaatctgttttactgatctgtatcatatctaactacgccagtatttccttccttgtctgacgtgaactctaaaattatgtgaacactttctccctgtttcctggcatttccactcaaacttgttcctcattcttagttagaaatatatccagaattgtagtttctttctaatctaatgacagaagcaaattaatcaagcatggcaagaatttattggaaaactgcatgtagttgaaaatatgtttagtatatattttgacagctgtgaagtctctaatttttactgtaccttttctctgttccaattttatgctctattctaaggatgtacccatttctactacctgactagggagca

SEQ ID NO: 61910 - DNA, 1538 bp, Homo sapiens
ttttggtcttattttcatctgttttgccaggtactcatgcaactttccagtttgaaaactcacatccttcacttttgagtatttttcttgagttatgtcttcggtttcttctcagtgttctctgtttctggaactcctaaaatatatttaacatcctgaactcttagtttttgtttagtcttctgattttcatttgtctttttattctgtatattctgttaattcctcggcttcatggtcttctagcccttcttttgcctatcttatggggttgaggattaaacagtttatatacctgaggtgcttaggatatgtctgtcatatagtaagtgcttgtgttagctgtaattgttgtttactttcataactgtcttgagggaaaggtctttggtcttgattctttgacttcttggctgtacatgaccttggacgagttatgtaatctctttgagacctacctccctcttctgtatagtgttaataagctctagctctcagatgtttgtgagggtcgaatggagtatatatgtgaaaatgtttaatacctttgtacagaattaatagttagtacgtggatctttcaaatatcaaaagttttcagtttgatgggaaaatgatgtctgaattttcagggttatttttaagagtacttgattatgactgtcttgtaaatctctatgagctaggtatacttgcactaaatgctaatgctttttaaagaagttatgtcttaatattcagtctcattatgttaggttgaagatagaagattatgaaaatattctctgaaaagctctggttttacttcagattgtataaatctgtgtaatgtaataattatttaagaatgacatgattactactctaaacccatagaaggggtatttgttggattatttattttcacttaaatggtatttgagattaggaaaaagaaaatctgtcttttggtttttcttgatagtattaatgtaatttcaaatgttagctcatttttgttaatggtggctttttgtttgtttgttttgttttaaggtttttggattcaaagcataaaaaccattacaagatatacaatctgtaagtatgttttcttatttgtatgcttgcaaatatcttctaaaacaactattaagtgaaagttatctgcttgttagagtgaggtagagttaaagatacattttaacagaattgtattcctaaaccgattaagtcaagaagtccaagagcattgttagatcatttagaaagtgtagtgatgaggtaaaacattgttggcacagattcatgttacttgatctgctttaaatgacttggcatctagcccatatttgagcccataaccgtgtggtaatttgaagtgtaattcacagtagagcttctgttaaagcactaatagcatcttccatggaggtatacttcagagtgaatataattttgtttatcctgtgtctctagagctattgactgaaaaagctgttagggcattctctaactgtacatcacctaagttatttaaaattgctgaattaggtggc

SEQ ID NO: 61911 - DNA, 1258 bp, Homo sapiens
aaacgtcagaagtactgagagtggagtggacattgatattgttactctcagtaagttttcactgatttttctcagagtcatgaaggaacaaacgtttgttaagtccttatcacttattagataacacaaaacatgttgggggggtgtgtacagaggtgagtaagatgtagctcccattctcaagtcgcttacattctaatgtaaaaggtagacaaagcattacagaagaagtaactctgctatagaaggttgcaatgaagagaacattggaaacactaattttaccttataaagaaggtttcataaaggaaggcaagtttgagctggggtgaaaaggaccagtaagggttgactttcaagccaaggagaggaggggaagtgatgttacaggccaaaggaatggcattgtaagaagcttgttggcataaaagtgtttagaatatggcagcgaattcattatcatcagattgtggtgtctgtatgttgggggtgggagagaattgtggtggcaataggcaacaagataaaagaaagtaaaaggtgttatggaaacttaatgggtccagcttacaaatgatctatgcatttaggggtctttctcttttcctgataaacctctcctacaaagagccttgttgcggataccatagtgtttctttggaggaaaataaaaactacaaagctttgtattttttgcacaactggattcagaatataagtaataaaaaaggacaagaactttcaaaagctagaagccattaaactgagtcacttcagggttagactatcagaactggggatttagaaagtctcagaatggaaatcgaaggacaccaaagacaaattcggcctttttcaaaattttattctagtttaacatattcaaagaaagggaaggaaattcttttcattcctgtgtgtagtgacttcctgctttaagaacttaggacttcagctgtactatcagtattgtaggccacttaacattattatggttaaagttggcattggagagagcctaggaacctaactgcctgtttgtttttatatttccaaccattggattcccaagttaatgaagtctgtttattagttgagggtagctcttaatgcatatattttaatgccccttccccacatggaatcataagctttcagaactggagagtacctgaaagagatcatttagtccaaccttctcattttacagatggggaatctgaggcctagagaagttaagtgagttgaacaaggtcac

SEQ ID NO: 61912 - DNA, 3334 bp, Homo sapiens
gttactgcttttgtatttaaaactttttttttattataagtagaattatggaacagtagtagaaaaagtttgacttttgtaatcagagatactgagcttgagttctggctctttcatttgtatactgttatttggggcaagttttttaatgctcttaagtcttagctttctcatatataaaatggagataataacagttatcacgtgattgtgaggatgaaacaaaaaaaagtggaaactctttgtaaggtgtgttcatctggttgacacttagtagtcattacttccactttccgtccatatagtcctcttaacagtaatatttgagaggcatttttattaaagcagtcttaaggagtgttcgtcaaaccacatgttctgggatcctgagaaagtaggggaagtttagagaactgaagctgcacaaaactaatgtttattttctgttgtgttgtcctgagaccagcttcttagattgtgtttcctagtcctacatctctgattccttataaaatattccattatgaattcttcactattgacaatttctccccttttatcttaaaagtaccaaagaaagtgtaaaatgtgactgtcttgtcagtcctctttttcctgtttttcatgtcagtgggtatgaaattactagcaaggatgcatatatgtgcatatgtcattactaaatgcattttctttctagaaaaactcaatatactaaattgtactaaaaaggaaaagcttgttttgttttgagtggtagtatgaaagttgttttattttaggtctgaccagttagaaaccaatggattgtagtttatttataattagttaaaccttcatgtgaatttggttttgaattacctttaaggtagagaagaaactatatagatgtttttcagggtttctaaatgtacaatacaggttcacaatcacttatttgaaactcttggggccaagtatgtttccattttcagaaattttagttttcaaaaggtagcacagataaatatacttttacataaacaccccagtggggtgtgggtcagtacctgaaatgaaatgttttactcttcgctctaagtgtattaaatattatgtacaatcttattacttcagatcaggatttgctgtagttgagtttgccataaaacttaagagaaaattttagatgttttgaacttttgggatattgaaattgcaggttaaggagctatggacctttatttgttttaaaatgctaagagtttattttaagtaatttttaaaaaatttgttttgcatagtagttggagttaccagggtactgctaaccacactgatatgtaagatctctttctgagccttttattgtttgtaaacatggcctgttaatcattagaaagccagtacatactaacatatcactgctattaagacaaatattagcatactctagtaatgacaagtcagcattttactattctgtattgattttacttattctttcattactctcatactgtaattaaaacttgcaatctgagagactgttgaaaaaggtgatcgttggcttttcaacagggagtaaggtctggtttaaaaaaaaattagtaagcatttggccaagtagattaacaacattcagtttttctttactgtccttatgcttttactatttttaacatatatctttttgaagaatagtttgagaattatgtatgcttaactatgagatacagatactattgaaactagtcagttgtttataggtacttgtaaaattaaaaatatattccaatagcatgcagatttttcatagaggaaatttgaaagcatggaagcacctgaatttacagtactctgtattagtggcatcacaagtttttaagcaaatgtattagctctaattgcatacacttaatcttttaagctttggttttattattataatatgggggtgataacagtatctacttaatagaattcttgttattacatgaaataattaatgttaaacacagcataatatgtgtcacattataaagattcaggcaatgtttgttagtattagtacttttttttcttcctaagtgcaaaagataactttatatcacttttaaacttttcttttagttgtgctgaaagacattatgacaccgccaaatttaattgcagaggtaggtatgaatgtactgtactatgttgtataacttaaacccgatagactgtatcttactgtcataacaataatgagtcatccagattatcgagtgagatacatatttaagaattatctttaaaaatttcaaaaattttaattttactgttgtgttttaggaaaaagtattgcataaagctattaatattgtcaggaagactaaagtgcagcatagactaagaattaggaaaattcctagactaaaaatagtataaggagagggtttacctactatttgaggcagttggtctaatagtaagcaatcacagggagaaagcagaactacttaactcttctgtgttgaggaatgacataaaaggtaggaaaggatataacaaatgttgataagaggagtctgatggatgagaggagggaactgctttaaatgagtttctacttcagacataagttaattctcagagcccacaaaaactttcacttttatttgtgaaatacaactcagttctcatggcttaacactttaaaccatgagaaaactgaagagttgagaagcttggcagatgctgctgtgatagtcaaaaagaaagtgggtgccatgagctactattgatgtatttgccattgatccctcctgaaaatctagaatggactttcagacaaatggtttgaaaattctaaatcactaatgattgagatttagtataggtttactaagaacgggttttttttgtttttgtttttggtggatttaggctgttgcttactaagcaaagcaggctttagttgaggtttatcttgctttaaacagatatttaacagattttcctggaggtttttgtgtaccactgggaaaatgaagttaggcagatgactaagtgaaagctgtcctgctgactccttataatgatagtcattgtctaccagaagatctctcctgtcacaccaaaggataattgattatatcctgtaccatattatgagtcacctgattggagatataagacatacttctcacatatttagatgacacaggttagtacattgaatatcagccagggtttttaaggatcttaatagagtggaactaaggtagaaactattaagagcaattaatagtgatatatctatagtcctgtttctaaacaagtttttttaaaaacctcaactctgactata

SEQ ID NO: 61913 - DNA, 5225 bp, Homo sapiens
tattagtaatctattctgtctttggaatatgttttgtgatgatgaaataaatactataaatagtattattccttttgcattgagagtcctgacgaaatgtccatgtgacagttcattttgggtttagctctacctctaatatgtgacctatgctaccagtccgtatagcgtaaattcccagaatatatcctcctgaataaaatgggggaaaataatacctggcttccttaatgattatatttaagacttatcaagagactattttctatttaacaattagaaagttaagcaatacattatttttctctggaatccagtgtttcttttaaatacctgttaagtttgtatgcaacatttctaaagttacctacttgttaattaaaaattcaagagtttttttttcttattctgaggttatctttttaccacagttgcacaatatccttttgaagaccataacccaccacagctagaacttatcaaacccttttgtgaagatcttgaccaatggctaagtgaagatgacaatcatgttgcagcaattcactgtaaagctggaaagggacgaactggtgtaatgatatgtgcatatttattacatcggggcaaatttttaaaggcacaagaggccctagatttctatggggaagtaaggaccagagacaaaaaggtaagttattttttgatgtttttcctttcctcttcctggatctgagaatttattggaaaacagattttgggtttctttttttccttcagttttattgaggtgtaattgacaagtaaaaattatatataaatacaatgtataatatgatgttttgatgtatgtgtatatacattgtgaaatgattactacagtcaaactacttaacatattcatcacctcacataattattattctccccccagggtgaaagcatttaagatctacaagctacaattttcaattatacaatgttattattaactatagtcactatgctgtccagtagagcttcagatcttgttcatcttgtgttcctccctccccaccctcagtccctggaaaacaggttttaaagatagttgctaatccttatttcttctaaatttttaaatcagttgctgcctcaatttctatatgagaaatgactgattgatttcatttttctgttcacgctaccattttcatatcatactagcacatgttacccattaactgtattgcagatttggtctcacaaaattcttctaaaataacatttttaaaaagcatattaatcaaaaataagctttatatttctgaagcttgtttgagcatagaatgcctttggataaaataccattacctagtaaagtgtgaacttttataatccataaaaattattcttttataagaatattcataaatgtagttagattaatagaagattctcgattctttgatcagaaaactaaggactatattgaaaaatcagtgacaaatttaattcttatagtacatctgaaagaaaaaagaaaactcttgggagaacttttacagtgatttaattttgctgttgatatatttctttgggtggtaagtatggcaaaacatgttaaaatttaatgcaaagagattttgtacatttttccatctctaagaaggacaaagcctaagcccctccagatagatagaaaaactcatttagagagttctccttcatgttaatctaatttcttcttaattcagctgtaaaacagaaatagaatgatcgtattaatcatttaaagctgtgtaattgcatagattccttgttcctttaccccctcttatatcttgtttcctatcctttgtgactttttttgcattatatataaggatgccgaaatactgtttattgttgatagtttacaaaattgaatcttacattagtgcataattttggtgaatgttgaagattatggtagattgccttacatttctgcatattgtttgcaccttggaatgatagcactggcatgaattatagagctgaggatctaaagatttttactttgatttatcccattatcatctgcagggaaacaattgcttttactgattaaaaatgcaggctgggcacagcggctcacgcctgtaatcccagtactttgggaggccgaggcgggcggatcacaaggtcaagagatcgagaccatcctggccaaccaacatggtgaaacctcatctctactaaaaatacaaaaattagctgggtgtggtggcgcgtgcctgtaatcccagctactcaggatgctgaggcaggagaatcgcttgaacccgggaggtggaggttgcagtgagccgagactgtgccactgcactccagcctggtgatagagggagactccatctcaaaaaaaaaaaaaaatgcagtagcaaaagcgatggtagaaatttaaaacagagttgatgagcagcatatattttggtagtggaaaaaaaggtaaaaaattttttgtaataaaatagaaaaattttgtaatgtggaggcgcagaacactagatttaagccagggggtcttaaattgtgttacattccttttaaagtctgatggaaggtataaatgttctcccctcaaaaaatgtgcatagtgtacataaaattttgcagtttttattacattgaaatatattcttttagacagaatgtaaaagaaccttcatgaaaactatgtcacttttttatgcaaaaaccagtggctactacatgagagcaatgaataaatctaagtggtacaaattaaccaaaattaagctttagttctgttcaatactaaattttaatgaaaagactgctatttaacttttaaaataacaagttgaaactatgctctttgactttgactttgcaacttttatatgatctttgatatccaatcagtgttgactttggtaaaaagtgctgaaaatgctattttacaaaagaaagaagagtaaatggaatctgtagattctattgcctgatgaaagtagacgtgtcaagaaataagaattctccaaggctcttcagataaattcatgtttcatcattttctttgccttcaagttactgagatcatttttggcaagatctgtatcattaatgctgtgttaggaaagaaaagattatgactccacattttactttcaaggttgaagagttaaactgtttaaaaagagtgtatgttatcctgtaaacagcagtatcaggctgtagaatttgtcttctgaaagcagggaacttatatatagcaaagaacttcatagtgctcccatttcttgacaaaacctctcgagaagctcttgattgaaagtcttggctttcatgaatctggcagctttcacaatagtggatttttcatgacaaatcatcttacacagggaattattcaagggttggcacttgaaacagtagaatactttcacaacaagagataagatttctttcaggattgatgacagtcttgcaccctagcgcatactgatgaagagagcagtgggtgaccatgacatggagagcttctgtctttaccagtgccccaatatcagatgtgttgtctggcagtaaggtgtactgtctgcctacagaatactgaggtttcttcaggagaagttttttggtaaagaaactttaccattttgaaagtgttaatgttttctgaagcttccaaaaagattccaaaatgggaatgtttccttgattgtgtcaccatgcttgcatttgatgaaaacttgtagccggctatactgagaaatcatatctgaagaaaggtggtacttccaatctttttgtgacctactttattattgtttttttaatgtcagggttttttttggaatggagaaaagtatttgatagaggtattgcaacagtcttattcttcttcatgctacaagtatatttgactctttctaagatacttgccttcactgttcaactgtgtgactttttgtttgtttagcattacaatcaatatcctagtaggatgatttaatcaatgatttttaattggaacaaatagtttttgtaatggtctaggcttttccaacttaactgtgctctcacatgtggtctctttttctccctctttcctccttcttatacactctcacccacacacatatgcatacataccctgtctgatgtatctgcttcttcagaatagttggctgtgctctgctgatgatgagaacttgccatttaagaaggacttgggatagtccatgtcatcatgttcagggataaaagtaaaacccaagggcatttaaactttattgtattttattttctgtttccagtccaaattaaatccaagagaaggctccataatcaaaaagtaaggacatattttaaatttgccaatgggaagatattctagtcattacagtctggtaatactatcaattctgtttctcttcagaggtgaggggagactatttgatgaaatcgtaagtcctgtagggtgttgtgaaatagggccagaatgaaagatagcaagaatagtgttatgaaaataaaatgcaaagtttataatatcatgtggtaaaatgtaatagtatttacttcatcagtagaactgctctagtagctgtatattctccatccttgcataggttggaatatcccccaagtgaaaagagattgatgggctaatagttaatagaaaatggagatctgtacatacagtgttaagaatgtagatattaaaattgttatatttagctgttacataatattaagactcagagttaagtaatttcactgaaattgattgctttttgtgtcttggagtcaaaataaataactgaaatctactatacttggctcatgcttaattaatatacttagaccatatttcggatgaattattcacagaatctaaaggagtatcctcgtgttcttaccttctttatccctgtgtttatttaaaaaggcaaaaaaaatggagcagatgctgttggttgaccatattttactgaacagtagcatttgtgtttaggttgaaacagcattagaaaactagatacggattaaagtcagtggtaggtttttttttttttttcttccaggaatgtttcttatagatgatcaaacaggcacaggaaggggaagtgttgtgatcaatattatccagttaatattagcattcagaggaaaatttgagtcctctgatacactgttaaatttctttctatactatcaagtccacaaatcctggaactgcaaaagaattttga

SEQ ID NO: 61914 - DNA, 1530 bp, Homo sapiens
taattaatctctgtataggctcaggctttcctgcaaggttatgaaatgctgataaaattggtcttattttgaaaggctcctcagcttatacctttccttacaaatgcttccttacaaatgctaaagcatttaatgactcctgacttaaagggaatttggacagattgaggttgttggtcttggaaatataatactgcaggcttctgtaaaatacttgaaatgtaattgttttaaaactttcaaagataccacttgtttgcctgttggttagaatactggtgaaataatttttaatcttttatgaataactaatttcatcataagaaaacttagctaagcatggtaaagctgttgttatacaactgtggaattcttcctgaggagtaactatcttataataaatgtagttgattatctaaagtagttttattcttggaatatctcataataggtttattctcttcttgtcagtatttccttgtagattgagcctgtggatttgcatttttgtaattgtgaatcaccattataggagatacatgcattttatctacttttcagtttgtatggggttaactttattagaattatctttaatgttattttgcttatatccttaattttaattatagacaaacattaagaagctggagaaaattatgttctagtgacatttatatagaagaagaatcttttttccccctttcttttttgaagggagatgaggcagtcatattttggtaaagaatttgtagactttgcagaggtctcttcaaaataatctggctcagagtcttgacatatcctcagcagacatggtgcaaattagatggcagagtggtgggtacaagttgaccataaaataacgcattaggttagtaatgcccaaataatactttgggttttcagtgttgcagagaagtcagacaactgatagttattataaagaaaaatgttctgagagtgaggtaaccgcttaagggaaggaagcctccttctgtcttattcactaatttacaagaagataattgtgttacacttccttaggagtcattcatttgtatatttgacacttttgctttatgaacatgtgaagattattcaaaagtaagctgttggtgatttttttcttccaagaaagcatgccacagggcaacttctagggttggttctcatctagtcctgtgctccacactatctgcatctgcacttaagtttcaatattagataactcacatgtttaaactatgaagaaagagttaaaacatcctgagaatgctagtaagtatgtatttttgaaaggacttccaaaatttgagtttaaagaggtaaactccttttacatgacaaagttacttagaaacactactgctgtttccctctcccttgccttctccctgtcccatgcatacccccagctgtgttccagaatgatggcacataaagtaaacattcatatttatttccctttttttgttttttttttttttttttttttttgcttgtttgttttgtttttttgtttgagac

SEQ ID NO: 61915 - DNA, 1020 bp, Homo sapiens
acacattatttaaggctgttatataatacagtaaaattgtagaactttcataccttgaaggatcttagcaattatttaattcaaacccattctaacatagatgataaaacagatttgcagggttgggcacggtggctcatacctatattcccagcactttgggagactcaagcgggaagattgcttgagcccaggagttcaagaccagcttgggcaacatagtgagaggctgtctctacaaaaaaatatttaaaaaatagccgggcatggtgtcacgtgcctgtagttccagctgcttgggaggctgaggtgggaggattgccagagcctgggaggttgaggctgcagtgagccatgatcacaccacagcactctagcctagagcctccctgtgtggcaggctctacacttcagataggcaacagatcgagaccttgtttcacaaaacgaacagatctgcaaagatcaacctgtcctaagtcatataatctctttgtgtaataataaaaaccccatcttctaaccttaaacctggtatttttttctacgaaactatgttctgcagtccaaattatttttctttattattttgaatcctaaagtagaaatagaaacttagaaaaataaaaagcaactcctttatgacatatgaggactttttcagttttaaataagaaaaacccaactcaaagtagcttaaataaaaggagacattttttgacttacataacctaaaagctctggcctggatctaggtgctcaacagatctcaagagtatctctcttattctctctccctcccttaccctcctcctcttttctctcttctgtatatatgttattttcaaacaggctctcacaagtagtggcaagatatagttcctaatagcttcaggtttgcattctacctactttagcaactatgatgagaagagagctacaatttgagcaaaaatttgtagggtgagttctgatttccctggattgaggcacatgcctattattcctgaaccaaatatt

SEQ ID NO: 61916 - DNA, 1331 bp, Homo sapiens
atcacgtagtttatatacatgctattagtaaaacccaggacagctgagtacaagttttacccttatattcacattgaggtccagatcctggttttgaatgagataattacgtgcagtcggactgttttctgatcctaaaaatagagacaataatatctatcttgtaaagttatggtagtgttaaagatatataaaatgttggcaagtaccttaatatacaataactactgctatatgttgtcattgtaataataatcatatttcttcctttgttgaattgctttcctgtagtaatcttattgtgatcatcctgaaacatagatttccgagcttcaagcaaacactattatgttgaaaaatctacattatttctaagtttagcagtgccagtggaaagtttattgaaatagaaaattacttttttaactgaggagtgtagattgtgaattcgtgattcatcttcttaggagatgatcggaatattgataaatattgatgcatagaatatgaacaaaacattacatatcttgtgctgtgatattaaagtagtattctgttctggtagtagtatggcagtattttaggtctgaaagatgtacataatctgtactttgaagtctgttttttaagagattaatcacaagagatttacataaaacaactaaggttaaaaataaatggtggattagagatacatcaggcaaatttcaatttcaaaagcagatgacagaatctcagtatcagggtagcatttaaagcaaaaagcattaaactggatcaaaaatgtcattttacatcaacacagggtacactccaggtaaagacttaacagttatgaacgaatgtgctaaacatcaaaatgtattaagtaaaagctgaaagaaatgaagaataattggtagaaaagcaatgataggaatccttaatgtacttcaaaaggcacgaagtaagaaggtacagtcatgtaccacataatgatgtttgagtcaacacctgacctggtatacgacaatggtcctataaaattataatggagctaaaaagcttctatcacctagtgatgttgaagccgttgcaatgcaatgtatcactcacatgtttgtggtaatgctggtgtaagcaaacttactgtactgtcagttgtataaaagcatagcacagttatgttcagcacataatactttataatgataaacgaatatgttactagtttacgtgtttacagtactattattttagcatgtgcttctgcttattaaaaaatgttaactataaaataatctttaggcagatcctacaggaggtattccagataaaggcattattgtcat

SEQ ID NO: 61917 - DNA, 1045 bp, Homo sapiens
caggctcaagtgattgtcctgcctcagcctcccaagtagctgggactgcaggtacacatcaccacgcccagctaattttttgtatttttggtagagacggggtttcaccatgttggccaggctggtctccaactcctgacctcaagtgatcagcccacctcggcctcccagagtgctgggattacaggttgtgagccactgcacctggcctgtttttaaattcacataaatatgttttatatttttcattagggagaagaaggttgtgtctacaatttttaagacattggggagatttagatgccagtagtaacttaaaagagaaataattgcaaattctttttcctcttgagtatactttcatttaaggtacagtgttctgtaagttacttttaccgttaaacttcttaatgttgcttattgtttgtcttacatttttaggttggatttttcttaagtcacatgtctaataaaaaaaacccttaaatacctcatttattcgtcttcgttagtgaatgcattgttgtacatattagatttttctctttagataactcagcttcccctattaagtgccacatgtattacaaaattttatttatgttttattgtttaataaactcttgagaactagatacattttaatcatttgtaatacttacattttctaaaacacttcatttttccctggtttcttcaacaaagagatgcatgtagtacaaggatagctttacctgtgttagaagattgtttcacacatttacatcaactgcatagtcctgtttttgttgggccctaatgccagcatcactttttgctactgctgtttctgccttaaaggcaatatgcctctgtctagtttgctgattctgatactctttcccctggaaagtaggtaatcaagtttgtgaggagctgtgtgtttaaggagtccataaatccttgtggggagccctaggtgtatagagcatagctgtagggcagaggcctttgacacttattctggatatgcagtggcctttgcctatggggttcatgggtcaga

SEQ ID NO: 61918 - DNA, 1503 bp, Homo sapiens
gaaaacattcactttagtaatctttcctcattttctagtttcctcttatgtactatgatttaatactgtagtaaagttttaataaaatatgagctatatgtaattaagtgggaggttgtggggctaggcacgaggctcacacgtgtaaccccagcactttgggaggctgaggcaggcggatcgcttgatctcaggagttcgagaccagcctggacaacaaggtgaaaccccatctctactaaaaacacaaaaattagctgggcatagtggcacacacctgtagtcccagcttcttgggaggctgaggcaggagaatcgcttgaatccaggaggcagaggttgcagttagccgagatcatgccactgcactgcagcctggacatcggagcaagactttgtcttagaaataaataaataaatataaaataaaataaatgggaagttgtgtatataaattataaatgctacattcagaaaagcttttgaaggttgtcagacagtttcttaaaggaagttcaccagttctttattgaacattgaagaaaacatacagtttagactggcattaaaactgaaagaagtggccagacgcagtggtagacgcagtggttcacgcctgtaatcccagcactttgggaggtcaaggtggatggatcacctgaggtcaggagtttgagatcaggctggccgacatggtgaaaccctgtctctactaaaaatacaaaaattagccaggcatggtgatgcgtgcctgtagtcccagctacttgggaggctgaggcaggagaattgcttgaagccgaaggtggaggttgcagtgagccgagattgcgtcattgcactccagccagggcggtaagagtgaggctccgtcttaaaaaaaaaataagtaaataaattaaaaactactgaaagaagtattacaggcaatgggaaatagcttgagtggaagtgcagcagaaggaaaaagctggacaagaatgtagtgtcagagaataggtatggaacgtgtgagtgactgttagaggatcttgaatggggataacagacttgatttcataaatactgagatgtcatgataatacttgaggactaaaccatgttttaaggacagttgtatgcaaagttgtaatcgcaagaggaaaaaatagtggaaaagaaaccagtaataaaacttgccttaatgcaggtatgctaagacaatcaaatgggatttcattaattttttatttgccatttatagccaaagattttgtaaaagttttgagcccagtcaggtgaaatagtctcagaaagaaagaaaagtgaatctgagacttggagacattaatgttgatattttggttttaaacgtgttttaaatccggtaaaagtgagcttctcacatgacaatattcagtgggtacttgggagtatgggttcgaatctaggtaggagatatatcgatattttgggcatcatcaggaaagggagagtagttaagcctttcatataaataatggt

SEQ ID NO: 61919 - DNA, 1050 bp, Homo sapiens
atgtaccagataattatttcatcgtttttaatgcttaaagtttttatttgtattaggatttttagtatgattttaatgttaaagttttgaagttactctgccactagaagtctaattttgggacttactattcatgaaataggaattgacttttatataagtaataggaccttattttgaaggttcaaactggagaaaatcttacattgtttatatttttatttcatttatttcagttgatttgcttgagatcaagattgcagatacagaatccatatttcgtgtatattgctgatattaatcattaaaatcgtttttgacagtttgacagttaaaggcatttcctgtgaaataatactggtatgtatttaaccatgcagatcctcagtttgtggtctgccagctaaaggtgaagatatattcctccaattcaggacccacacgacgggaagacaagttcatgtactttgagttccctcagccgttacctgtgtgtggtgatatcaaagtagagttcttccacaaacagaacaagatgctaaaaaaggtttgtactttactttcattgggagaaatatccaaaataaggacagattaaaagctatattttattttatgacatgtaaggaactataatttgttttctattagatctgcaggtgttttgcttactctggcattggtgagacattataagggtaaataatcctgtttgaaggaaaaggccttatggcattgtaacatgagaggaatttttcttaacaaggatggttaactgagaagaaattagcatgggaccaatattttaaaaattttggtctataggtagaaatgagatctgttctgtggtcttatgtagtgacacaaaccactttttctccattttggcttatgtttctttttctttccttttttttttttttcctttttgttagagacagggtcttgttctattgcccaggctgagtagctaagactacaagcatgtgccaccacacccagctaattttttttatttttatttttgtagggacagggtctcactatgtt

SEQ ID NO: 61920 - DNA, 1169 bp, Homo sapiens
ttgcactcaccgtccaagaacttttgttaaagtaaatcttggaataggtagctcatttgaaatgtagaaaaaattaaatccatatctgaattttgtttatatgtatgtacacgtaaactaaaaacgtatttaaagctagtattagatgagaaaagaggtttttttacttaaaattttaaggcaaaagtagtttatcttagatcttgtgagattgtatttttggtttaaaatttgagaatttgagtgaagaaaaatcatgtgaatgaaaatgcaacagataactcagattgccttataatagtctttgtgtttacctttattcagaatatcaaatgatagtttattttgttgactttttgcaaatgtttaacataggtgacagattttcttttttaaaaaaataaaacatcattaattaaatatgtcatttcatttctttttcttttctttttttttttttttaggacaaaatgtttcacttttgggtaaatacattcttcataccaggaccagaggaaacctcagaaaaagtagaaaatggaagtctatgtgatcaagaaatcgatagcatttgcagtatagagcgtgcagataatgacaaggaatatctagtacttactttaacaaaaaatgatcttgacaaagcaaataaagacaaagccaaccgatacttttctccaaattttaaggtcagttaaattaaacattttgtgggggttgttgacttgtatgtatgtgatgtgtgtttaattctaggagtacagctgatgaagaacttgcttgacaagtttttaacttatgtattatttcgaagcagtgtttacgtagcagtaacatgaaagtttctaataaaatacccaatgtacacagcgtcaaaaaagctgcatttttccttttcctaattcttcgttgtttgctgaaatctggggcaaaggtgcgggagggggctaaatgactgggatatgaagtaggaatgggagaggaaagaaatagatgggaactcagtcatttgggaatgattcatatggaatgtttttactgcttccactcctgtctgccttccaatttattctcaatccctcagagtgatcttaaaaatagacttgattgtgtcacttctgtttacactttataaggaccttgtgtttttttttttaccatgacctaca

SEQ ID NO: 61921 - DNA, 1061 bp, Homo sapiens
atatatgagtgagaacatacggtatttatctttctgtacctgacttattttacttaacatcatgtcctccgggctagacattctctttagaatccacaggtttcctttcttttctctaaatctgcattttgctcagccattaacttttaaaatgtctttttccctttagttttattgttttctattttaatattgcaagatgttttatatttgtgattacaaataaaaactccattattagtaaacaaatacaatgtcatatagtagtaagtgctataaaaaatagacaggatagaaagtaatcttggtttgtatgttttttgttttttagcaaagatgattagagaaggcccaaccaagcagataacatttaagcagaggcctaaatcatataagtgagttatacaaatatctgggaaaagagttaagagtacagatgcaaaagcccttagacaagagaatgagcttggtatatctgaagagtggataagtcattttgactgaaacagagtggacaagaaaaccagtccaagtgtaaagacactagtgtgtgttcagcataggaaggatgtaatctgaattttgtgtttaatattccctgtgttcatgctttcaaaatacagatgagtgaggaaagtagggagaaggggtaataaaggaagctgagagatcagttaagaggtacttgaatagtttagtaaagatgagagaagatgtttgcttcttgttgcccctcactgcttagaatagtggcagtgaagggtaacaagaagctgtcagattaacttaaagagtttactgatgcagtggatgttggttgtaagagaagaattgataatgactcttggataataggggagggaggggctgtcaatataatataatgaagaagggatttgaagtcatttctgatttaaatctcacatccactacctacttttaatagatatgtagcctttaacaagttccctaacctttctgggccttagctacctccccttggaaatggaaatacctaacatgtaaggttgttttgacagttattttcactaggcatgtaa

SEQ ID NO: 61922 - DNA, 3675 bp, Homo sapiens
gttttcattttaaattttctttctctaggtgaagctgtacttcacaaaaacagtagaggagccgtcaaatccagaggctagcagttcaacttctgtaacaccagatgttagtgacaatgaacctgatcattatagatattctgacaccactgactctgatccagagaatgaaccttttgatgaagatcagcatacacaaattacaaaagtctgaatttttttttatcaagagggataaaacaccatgaaaataaacttgaataaactgaaaatggacctttttttttttaatggcaataggacattgtgtcagattaccagttataggaacaattctcttttcctgaccaatcttgttttaccctatacatccacagggttttgacacttgttgtccagttgaaaaaaggttgtgtagctgtgtcatgtatatacctttttgtgtcaaaaggacatttaaaattcaattaggattaataaagatggcactttcccgttttattccagttttataaaaagtggagacagactgatgtgtatacgtaggaattttttccttttgtgttctgtcaccaactgaagtggctaaagagctttgtgatatactggttcacatcctacccctttgcacttgtggcaacagataagtttgcagttggctaagagaggtttccgaagggttttgctacattctaatgcatgtattcgggttaggggaatggagggaatgctcagaaaggaaataattttatgctggactctggaccatataccatctccagctatttacacacacctttctttagcatgctacagttattaatctggacattcgaggaattggccgctgtcactgcttgttgtttgcgcatttttttttaaagcatattggtgctagaaaaggcagctaaaggaagtgaatctgtattggggtacaggaatgaaccttctgcaacatcttaagatccacaaatgaagggatataaaaataatgtcataggtaagaaacacagcaacaatgacttaaccatataaatgtggaggctatcaacaaagaatgggcttgaaacattataaaaattgacaatgatttattaaatatgttttctcaattgtaacgacttctccatctcctgtgtaatcaaggccagtgctaaaattcagatgctgttagtacctacatcagtcaacaacttacacttattttactagttttcaatcataatacctgctgtggatgcttcatgtgctgcctgcaagcttcttttttctcattaaatataaaatattttgtaatgctgcacagaaattttcaatttgagattctacagtaagcgttttttttctttgaagatttatgatgcacttattcaatagctgtcagccgttccacccttttgaccttacacattctattacaatgaattttgcagttttgcacattttttaaatgtcattaactgttagggaattttacttgaatactgaatacatataatgtttatattaaaaaggacatttgtgttaaaaaggaaattagagttgcagtaaactttcaatgctgcacacaaaaaaaagacatttgatttttcagtagaaattgtcctacatgtgctttattgatttgctattgaaagaatagggtttttttttttttttttttttttttttttaaatgtgcagtgttgaatcatttcttcatagtgctcccccgagttgggactagggcttcaatttcacttcttaaaaaaaatcatcatatatttgatatgcccagactgcatacgattttaagcggagtacaactactattgtaaagctaatgtgaagatattattaaaaaggtttttttttccagaaatttggtgtcttcaaattataccttcaccttgacatttgaatatccagccattttgtttcttaatggtataaaattccattttcaataacttattggtgctgaaattgttcactagctgtggtctgacctagttaatttacaaatacagattgaataggacctactagagcagcatttatagagtttgatggcaaatagattaggcagaacttcatctaaaatattcttagtaaataatgttgacacgttttccataccttgtcagtttcattcaacaatttttaaatttttaacaaagctcttaggatttacacatttatatttaaacattgatatatagagtattgattgattgctcataagttaaattggtaaagttagagacaactattctaacacctcaccattgaaatttatatgccaccttgtctttcataaaagctgaaaattgttacctaaaatgaaaatcaacttcatgttttgaagatagttataaatattgttctttgttacaatttcgggcaccgcatattaaaacgtaactttattgttccaatatgtaacatggagggccaggtcataaataatgacattataatgggcttttgcactgttattatttttcctttggaatgtgaaggtctgaatgagggttttgattttgaatgtttcaatgtttttgagaagccttgcttacattttatggtgtagtcattggaaatggaaaaatggcattatatatattatatatataaatatatattatacatactctccttactttatttcagttaccatccccatagaatttgacaagaattgctatgactgaaaggttttcgagtcctaattaaaactttatttatggcagtattcataattagcctgaaatgcattctgtaggtaatctctgagtttctggaatattttcttagactttttggatgtgcagcagcttacatgtctgaagttacttgaaggcatcacttttaagaaagcttacagttgggccctgtaccatcccaagtcctttgtagctcctcttgaacatgtttgccatacttttaaaagggtagttgaataaatagcatcaccattctttgctgtggcacaggttataaacttaagtggagtttaccggcagcatcaaatgtttcagctttaaaaaataaaagtagggtacaagtttaatgtttagttctagaaattttgtgcaatatgttcataacgatggctgtggttgccacaaagtgcctcgtttacctttaaatactgttaatgtgtcatgcatgcagatggaaggggtggaactgtgcactaaagtgggggctttaactgtagtatttggcagagttgccttctacctgccagttcaaaagttcaacctgttttcatatagaatatatatactaaaaaatttcagtctgttaaacagccttactctgattcagcctcttcagatactcttgtgctgtgcagcagtggctctgtgtgtaaatgctatgcactgaggatacacaaaaataccaatatgatgtgtacaggataatgcctcatcccaatcagatgtccatttgttattgtgtttgttaacaaccctttatctcttagtgttataaactccacttaaaactgattaaagtctcattcttgtcattgtgtgggtgttttattaaatgagagtttataattcaaattgcttaagtccattgaagttttaattaatgggcagccaaatgtgaatacaaagttttcagtttttttttttcctgctgtccttcaaagcctactgtttaaaaaaaaaaaaaaaaaaa

SEQ ID NO: 61923 - DNA, 1851 bp, Homo sapiens
gaagataattccccagaatggatttgatactttagatttcaattttgtggcttttgtctattattctgtactctgccatcagcatatggaaagcttcatttactcatcatgacttgtgccatataaaaattgatatttcggaatagtctaaaggactttttgtacttgaatttaatcatgttgtttctaatattcttaaaagcttgaagactaaagcatatcctttcaacaaagcatagtaaggtaataagaaagtgtagtttgtacaagtgttaaaaaaataaagtagacaatgttacagtgggacttattatttcaagtttacattttctccatgtaattttttaaaaagtaaatgaaaaaatgtgcaataatgtaaaatatgaagtgtatgtgtacacacattttatttttcggtatcttgggtatacgtatggttgaaaactatactggagtctaaaagtattctaatttataagaagacattttggtgatgtttgaaaaatagaaatgtgctagttttgtttttatatcatgtcctttgtacgttgtaatatgagctggcttggttcagtaaatgccatcaccatttccattgagaatttaaaactcaccagtgtttaatatgcaggcttccaaaggcttatgaaaaaaatcaagacccttaaatctagttaatttgctgctaacatgaaactctttggttcttttatttttgccagataattagacacacatctaaagcttagtcttaaatggcttaagtgtagctattgattagtgctgttgctagttcagaaagaaatgtttgtgaatggaaacaagaatattcagtccaaactgttgtaaggacagtacctgaaaaccaggaaacaggataatggaaaaagtcttttaaagatgaaatgttggagccaactttcttatagaattaattgtatgtggctatagaaagcctaatgattgttgcttatttttgagagcatattattcttttatgaccataatcttgctgtttttccatcttccaaaagatcttccttctaatatgtatatcagaatgtgggtagccagtcagacaaattcatattggttggtagctttaaaaagtttgtaatgtgaagacaggaaaggacaaaatagtttgctttggtggtagtactctggttgttaagctaggtattttgagactacttccccatcacaacaacaataaaataatcactcataatcctatcacctggagacatagccatcgttaatatgttagtgactatacaatcatgttttcttctgtatatccatgtatattctttaaaaatgaaatttatactgtacctgatctcaaagctttttagcttagtatatctgtcatgaatttgtaggatgttccattgcatcagaaaacggacagtgatttgattactttctaatgccacagatgcagattacatgtagttattgagaatcctttcgaattcagtggcttaatcatgaatgtctaaatattgttgacattaggatgatacatgtaaattaaagttacatttgtttagcatagacaagcttaacattgtagatgtttctcttcaaaaatcatcttaaacatttgcatttggaattgtgttaaatagaatgtgtgaaacactgtattagtaaacttcatcacctttctacttccttatagtttgaacttttcagtttttgtagttcccaaacagttgctcaatttagagcaaattaatttaacacctgccaaaaaaaggctgctgttggcttatcagttgtctttaaattcaaatgctcatgtgacttttatcacatcaaaaaatatttcattaatgattcacc

SEQ ID NO: 61924 - DNA, 1047 bp, Homo sapiens
attttatttgtgtggaatgaagtgaggcttgtagtcatggttctagtgtttcagtttgccaagtctgtttactgcagtgaaattcatcaaatgtttcagtgtggttttctgtagcctatcatttactggctatttttttatgtacacctttaggattttctgcctactctatccagttgtccaaatgatatcctacattttacaaatgccctttcagtttctattttctttttccattaaattgccctcatgtcctaatgtgcagtttgtaagtgtgtgtgtgtgtgtctgtgtgtgtgtgaatttgattttcaagagtgctagacttccaatttgagagattaaataatttaattcaggcaaacatttttcattggaatttcacagttcattgtaatgaaaatgttaatcctggatgacctttgacatacagtaatgaatcttggatattaatgaatttgttagtagcatcttgatgtgtgttttaatgagttattttcaaagttgtgcattaaaccaaagttggcatactggaagtgtttatatcaagttccatttggctactgatggacaaaaaatagaaatgccttcctatggagagtatttttcctttaaaaaattaaaaaggttaattattttgactattcggttttaaactttttattcaacaaataccaagtccctgctgtatatatgggtttggaatacattagtgatcaaaacacaccctctatccctgcccttgaagagtttacactccagtagaggaaacagaatttacattaacaattataaattgtgatacatgctgtggaaagtgaggtgcatgtgataatggttatcaaacattatgctccccaaaatttccatcaccttgcagttgaatgaggcctatgtaactagtttattctaatgtaatacagaaagtagtgtgacactccactttctgtaaaggcaatgaaaaaaatttaccatccagtttctctcttcccctactgctgtgattaaggattttgcatgttctagatggtgcagctttgtcagcct

SEQ ID NO: 61925 - DNA, 1141 bp, Homo sapiens
acacctgtaatcacagcactttgggaggctgagacaggaggattgcttgagcccaggagttcaagactagcctgaggaacatagcaagaccttgtctctacaaaaaagttaaaaaattatccaggcatggtggtgcatgcatatagtcccagatacttgggagaccgagctgggaggattgtttgagcctgggaggttgaggctacagtgagccatgatctgtgccttgcactccagcctgggcgacggggtgagacctcatctcttgaaaacaagtctaaaacaactcacaggtaatggagtcatgacaaattttttttttgtttactgacacaagaaaagcaagctaacacaaggcataaatcctgcaaaatgaacagcaaagaagataaatatttaacaattgttcaagctacaaatgagaaaattatgtatcttgcaacattcttgacaggtaagatgataagatgttggtatatatttttatatcaaaacccagaattacagttctttgatttgctagtttggtataaaatccattaaataaacttgtgccttatttttgcttgaactagaatgcccagactgtttaaagtgattggttctcagttaaataggccaaccggccacctaacaagtatttgttgcatgcctgctgtgtcaagttggaatacaatagtggagaagtgagaaaaggccatagattttacattttagagtgggaaaacagattttatacagagagttgagcaagtgtgatggcttgatgtaggaacaaacttggtcacttaggaaagcgtaagaagagaaaggctagagcagagtaagtgatgggagattgatgtaagataaattttggagaagtaggcaggagaacttctggtttcagccaaggtggaataaaaccactaaattctgtcccctactgatgacaaccatcaataaactttttctacactgttttattcaaactcattagtttatcttattctttgaatagatcttttaccccggcctgattttgtgacatcatcgatgagtcatttggaaaatacaggttcactgagttttgtagattttccagtgttgacacatttcattatgcaatgcagaaaaacaaatcacatttaaaaaaatatca

SEQ ID NO: 61926 - DNA, 1036 bp, Homo sapiens
gagagacgcaagtaagagaacatttccctaacatgcccaaacacattccttttcagagtgctgaaggaatttgaaaatgaggtctcagaattaccagcagtaattcctgataaattaagaaaaatgggagagagttcagagacaaagacatgagaaaagattgccataactctccagaaggatggattctgggtaatgaaggccagtatgtttaacactgattcccagaaaaagactttaatatattcagtagcagttagtttaagaacattagaagataattcggtgattaccagatgtcaatgagggctaggtaggtcatttcaaagccttctcaaatttcattttttctttatgatcacctgtcacagtgctttacgtgatgtacatacaaaaatatttgcataactgtataaaacagttgaataataactgtatagcatattgcttatataaactgcacaaatctcatttgaataaaaaccatttataaagtacttgcagtatgcaaaatgtgttgggcaaagggcaggtctgagaggcacacacgaggaaaactaaaacagaacagaagtctaatggtattttcaagtgttataaaatatgtgaagtctgccttgtgagagaaggtagcattggcttgtggaaagagcatagcacaggaaattagaacatctggttgctcatcctggctttaccatcaacttaatgaatgacctggagtaagttacttcacttcgagacctatgctctatatctgcaatattgaaaatgctggataagataatctctaaagccccagaaaaagatggagttgtactctttcactcccaggaacatatactggaacttatgagtagaactttggagagaccaagtttgcctcacaatgagtaatattctagttctgcactgtcgtatagtgacttcagtcactaagctacatgtctctatggagcacttgaaatgtgactggttcaaagtgagatttgctgtaagtataaattacacatcagattttgaaaacttagtataa

SEQ ID NO: 61927 - DNA, 1110 bp, Homo sapiens
atgcagatgtaattctttggaacaattgtttcctttgttgatggattttttttccacagtgcccactcacaattaaataaaacagtaattaaaaccctaaatccactcaaaattattgtttcatcagtcacctccagagatccttctaatgtctttgtggaaagaatgtcttaacagagatgcaatgtgctaagacacaaagccttagatttttcaaacttggagtaataaattctaaatacgcaagaactttttaagtgactagaaaattattacaatgaaataaaaacccaaggctatacgccataggatagcttaatccccttgggaaaaaaaaaagactgtttttttttttttgagatttttatacaaattacaaaaacattgaaaaatttagtgatatatatgttacagacatagaccaatacacttctcttcatgcagacatgaaactcagcctaatttagccatgacatagtgcatctttctgggtatctccctaatggagacagggtgtatttaaatctgatgttcactcatcaattgagtctttgaagcttcttaaactgattcaagaatgagttctcctcccctatttcttcctcctcctcacttccttctccttctctggcattctccactttcctaaaagtaccattatcctgccaacaacacaagcaggcaacttccaagggtaacacagactgcttcttttcaaggcctacttgagccatttctctgtaatttaatttctttttcatctgctctcttcctgttctccttttattaaaactacattattattgttattattattattgattgaaatggggtttcccttgtcacccaggctggagtgcagtggtgagaacatagctcactgcagcctcaacttcctggactgaagccattctcccgcctcagcctcccatgtagctgggacttcaggcacatgccatcactctcagctaattaaaaaaaattatttgtagagatgggggtctcacagcattgaccaggctcgcctcagactcctggactcaagggaacctctcaccttagccttctaaagtgttgggattacaggcatgagccaccacacccagccta

SEQ ID NO: 61928 - DNA, 1031 bp, Homo sapiens
cagctacccaggaaatgcaggttatgaaagcttagaattatgaaatgacacaggttgtgtggttaaacatgagcttatcttttgaaagtttctatttcacagcttctgaggggatgcactgtgcatgacttttggtacctgagttttcaggagactggaactgaaaggaagaattcaccaactacctgttttagccccaggcagcatcatcagagtcatgcttggaggtggaagggaacacccttgtggctgggcccacagaacatgttgaaaacgagttctcagtattgtggcaggaagtattgggtcacgagtcgcaactcacacctttctatagctggctgtctcagctctttgtgaaatctgggtctgaaatcacctccttctcccttcttccctgtgtctgcacagtccaactgccctttgtggattatctttgcatctcgtgaagcacatacctagcatgttcttatgatagcagtgtggtccagatagtgaataacaaccactacagcctattgaactcttattctgtgcattttatctagcccttcttctggaatgtgcctctgcaaaacttctgttttaacatctgtgacaattaagtgatttttttcatattataaaaaacaatacaacaaatattaataacagtgctcattgtatgccaggcactgttttaagtattttatgtatcttgatgcacttaaacttcagaaccaccctgtgatgtagttattctgatccccattttacagatgagggaattggagctcagcgagcagacatgtggctccaaaatcatatagctaatgagtgatgggtcagtgtactgataccgaagccagagctgttaactcataaatgatgaaatagattgaaatgtagttcactagaaggggaagacatctttaggaatttgctattgattcaggttgctccctgattttttagcacaagcgtggcaaggcattcttccaataacctcagctgaaatgcctgcttggaggactcaggtgctccatcttcat

SEQ ID NO: 61929 - DNA, 1082 bp, Homo sapiens
aacaactccaaggttaagacaagttgaataacttccttgggtttctaaacccagtgaatggcccagccaggatttgaattgaggtttatctgctcctaaagcctgtgctttttgatttatgttggtctgccttccagagaaggagaaaaaacctgaatctcagagactcactgaaaaagccccagcattagtaccggtcatggctcctgggccaggacttcaaaggagcctggaactggctgtaactggaaggaggtgggggaatgaacaccttttccatttttccctggcctctctctctcctgggcaagttggggcaggctgagtgggcacaggtcctggatctgcataccagggctggcgaggtgcctttcgctggaagtcctgactccttctcaatgcacaaggacgcccttctgctgccaaagctggctggtggttctttctggaatggcagctttccccatcccccttcaggcttgggtcgatcttctggcaggcaaacgtactaaagagttacaggtggtgcagatacggtttggaaggaatcccagctgggcctcctcccagaagccttctgatcactcaccagataactctagctgcttgcagagtcctgggaatcttagcttctccaggaaaccagcttcaagggcaacaagaggttctgaggagctagaataatctcggaagctgaaactgctttgtccttttgcttccttaggttggaaatatttttgcaataccactgaatcctccagtttttaccccttacgatgggaagtgaatacagtatgaaaagggagtgggacatatgagaggaacgacaggctcaaaatatgaagacttaatccagacacctctgtgtctctgaacttgcgttgtttcttctttggaggtgaagtacacatcgttttactccgggcagaggacttgtgctccttttgagaactttcagctctgtagtgtcgagtcttctggtttccagatccacatcctgccctgggggaattgacatccatcaggtatactgttcttggtctgtttaatcaaactttcatgatgtcggttggaatttcaca

SEQ ID NO: 61930 - DNA, 1057 bp, Homo sapiens
caaagaaattctacaccagagcaaaaagtaatgtcaatctacgtaatatttagtcataagaatacttcacagatcgctggaaacccataaaaactatcactgggatagtggaatgagcttttaaaagggaatttctggcagaagatggtgccctgacttagtatgtgccattatataaaaattactgaatgaataaaggtggcaaaaatccagaattggtggaaatatgcagctatgattgagtggtgctgagatctacagagtggtttgagtggggagtgcctgcattgctaacatctaaccaggaaaaaagcactttgccttcataacttgaatgtccttgctctttctataaagcttttatctagactaagtggaatcgtaatgtacctaatctaacgggggtttttcaaatgctcaaattcaatttggagtcaagataaatgaaaatacatacaacttatctaaaagatgagtttaaaaaacattcccttatagttgcctttttttttttttcagtacttcaacaagcccttctgcttttatgtttctctttgttgcctagcaatacctacaaacttgtaggaatattgataaagcaaggctgacctctggtgtacttctgtatccttccatgtaatcctgaaaactaaaatcagatgttgtactctgtaatgattggttcctctacttataaatattgggaccagtggctttagggacattcactgagaacatttactcagtttaacttctattaaataatacttaattcaaactttttttccttcccatctagcgtcttttattttgtaaagtgaattattttttatttattaagaagtgaaattatgtgcatttctgaaaacattatgttatctcatcaggcttctttgatgatcctgccttggtgctccctctttgtttcctgtggatttacctattcatttgttcattcgtttggcatgtatttattaggcgaaagcttttgctgagcatggcattatatttagccagaatcaaagccatattttgtgagaaaaatgttatattttca

SEQ ID NO: 61931 - DNA, 1046 bp, Homo sapiens
tgtgattacagttggagatgctgcttatcttatttcttgtaaaactcggagggaaggcttccaagtgctttactgctctaggggccctttgtaatcaaatatgcttcttcagcagtaattttagcatctattatcggtgcttcagccctggcagttcggcagccttgcagctttgacatcacttgtggtttgcagaagatcatgcagtgctgtctagtgctcctgataatagtttctaaatgcttagctgatttatactgactggaattgtcccatctcttcctagcaatcgaatctggcaaattaatcatttaaccttttctgtgacatggacaagcctcactgtgaggtcaccagtgtcacaccaagtatggctgcccattgacagaaaaagtttgtgctggaattgtgaatgtgctcccccatctagaagatgtacacgttgtctttttagataaaacaaagacaaacaagggtatattttttcaagtgcacttaatgagagtacaacagaaccaaaaagggaaatctgtgcttctcattcccagtcacgtgctgactccctggacttcattcttttttcaccaaaactcctgtgcacgcagcatggagtaatcatgcttgaatctagcctcacagtcaggccctcagagctgattctgagatgtgaggttcaacgatttagagaggggcctggattattctgatatgatagcttttcattcactataacttgaagtttttatatcacagggatctatcttaaaacaagagatataattaaacagaaactcagtggaaaggggctcttacagtcatataactggtcctccaaggaaaatgcaaaggcgtcttttatctctctccttctcccccagaaatacctcatcatgtccttggcctgtgctgtggagggttccatttaatatcctcatctttcccagctccctagttcctcatgccctatgctcaccagacagacacatcaccttcctaggctccctccactataaagaaccctcaaataaacttcaaaggcaggaagt

SEQ ID NO: 61932 - DNA, 1057 bp, Homo sapiens
taattgtctcagggaaaaaaatcttcaaatgctaaaattagtgggcaatggtatatttgcatagtttccctacaagatacttttcaattataaagagaaaaatagtatcgtggagaaacctgaccgatataacttaaacaaatatcacgattaacatcattaataattgaacaaatcaataacatatgtctcctgatacatcatggaggatacaccatcacttataaggtatttttttgccaaaaaaatgcataactctcattgttttctgtatttcatctttctcacagtcaccacaatctttattagataattgtgtagataattgtttattatttttacacctctctgccccattcctggtccttagcagaatgtaaggtccataaaagcacaaagtaggggctttataagtaacattgaataaatgaatgaataaataaatttatttggagctatcagtttttacaggaaagatccatttagccttggattgtattgaatgaaaaataacagttgggtatcctggtggaaatggatggaggacatttgaaggtacaatgctaaagctcaaattaagctgaagccatgaaaaaaaaaggtgtcttatagaataaagatatatcaagaaaaaaagatgaaatattaatatttgagatgcagggtgagggaggagaaaggaaacacctccacttcagagaggccaaggcaggagttgattttaaatagggaaagttcagctgatcagggccaggtgcttagtgggggtttgtaactgtttaatgcagtgagtctcaagttttaatgtgcataaaaacatcctgggctggagatccctggggcacccttcccagaaattttgactcagtggggcctagaaatctgtggggtttgtgtatgtgtctgtgtgtgtgcgtgtgcgtgtgtgtgtgtgtgtgtgtgtgtggccagcacacccctcctccaccaagtcattgtaatgcaggcaagttatccaggaaccactcccagagggaacatggcatccaaatcagggggatgtcagctctagggtagg

SEQ ID NO: 61933 - DNA, 1099 bp, Homo sapiens
aatgtcttaagtcttgaagtgacattaaatataattagtaaaacagaaacaaaaccatcaaccttcacaaccctaagaaatgccttttggtaacaccacaaaattatttaactagtgtctccccctccaaataaatctgtctttgttttgttcagtttttccattatagatatatcaagacatcatttattaactaaacttccacagaccagcctggaatgcaagttcctatttctgttatgttttctattgtgaaactgggtttcaagctacaaacaactgattctcaaagttttggcaaagaatccatttttactgttgggactttgtttttgaattggaaagggtggtgtgtccaggtacagggagggatgatgtaagtggtccctgtacctggacacacccccctgctgggggactctttagtcttaaacatttcatttcctgttcagttattttttttttttctgtgagatgcatgtcattctttctgctattgttttttagacacataatgaatttactattacccatgtaattgtgccaaagcagtctgcgggaccagactattgtgacatggagaatgtagaggaattattcaatgttcaggatcaacatgatctcctcactctaggatggatccatgtacgtttgaccttttgggtttcagtttttttgtgtgtgtggcatgctattttcctccttgaagaaaagtttagcttcatttaaatagcttcttctttttaattttttcaaatgtaataaaggttgtcatttaagtagtggttctcaagcaaagagaaaagaataacagatattaaaaaaataaaggtcatcatattatagcatatttttcagtgttagactgtgcctaaacctgtcaaatctggatttggagaacgtgtatcttatgcttttttgtatcatctgaagttaaaagacatagaaagaaagcgagtaacatttggaaatcagtgatttgttttagatgattttacatagcctagtgaaggcttagccaaattgttaactgatttggctagacaactgttagtgtgggtctaaattagattattttaagaaaatatctgaaagtgtt

SEQ ID NO: 61934 - DNA, 1045 bp, Homo sapiens
tttctgcttgatatggccaaattagttttttcatagcaattgatggaaactatgatcatacttcttgattacctttgcatagtccaaaagaaacatttgactacgcctttttttttcctaattttcttggaggttctgtggctataacatcagagaacattatattgacgttagaatttacttaaaatgaaaattatttggcaacccctgtaaatatttttgttgttgttgaaaatgaataaatgtgattgtatttgttctgattggaaatattttaaaaatcaggaacaaattaaaattaggaaatctatacttcctccctaaagaaaatcatatggtaaacattatggtgaaatcaaacatatggtaaaaccaattttttctttcctagatatgcaaacatgtgttggtaaaagacataaaaataattgtgttggatctgaggtgatatgttctgaatgtaagcaccgtcaacatcagacacctactcatggacatgtggttgccggattttcttaagatgtttccagaaatgactgatattttatatttatacattttagatgacaaagcttgatatttattgctgttgcacattttaaagttttctttttgggttgctctgtgtcaagagaggttacatggtgttaaatcggtacctgataatgtacccaaatactatggccagataataaattgtgctgcaaacaacatgtcttgtatttatagaggtctctgcatacatttttagagctttagatgatttgctatattttttattcatgtaaaatgtaattccaaataagaaattctgagtgtatatagtctccaaagcagaccatctgtttctgaaaccttcccctgaggtaggtgaacagcttccatgtgtagatgaaatatggctgccattgataaagcttgttctgtgttttcagtgtcatgaaatcccaggctcagagagatatctctgcagtgaatcattgtgtaagatacaagaacaacacttctattcagggatcaggtgtcagagggcctgggatagcag

SEQ ID NO: 61935 - DNA, 1150 bp, Homo sapiens
cctcagcctcccaaagtcctgggattacaggcgtgagccaccgtgcccagcccaatttctctgaatcttagattcaatttgctaggcttttctcaccaggtaatatgtagccaacaaacctcagtttaatgttatatatacttcttaataagataaattatgattttttattaattcatttcatttttaagtctcactaagtttgtttaaactataaaaaagtatttaaactttgcaagaacattaccgctattgagagctggttttagaatacattgaacaaaggttgtgattaagaatgtccagggaacatatttctatacagaagtcaaagtatctgagctaaattttgttagaaaaaatatgcaaaaataaccactcgactaattaaaacatctgaaagttattaatcgtaagtaaacaataaaatctggaaatacctcatttaggcacaaaatatcagtaaagtacaaattattaaagaaaacagcaactttaaaatagatgttgcagtgacccagctgaagaatcaggcaagcttagggactcgcagagaaattcacagtgagccaggagagtatgacctgataacagggtcttaaagttaagttttacttcttagctcaaagcttttcttttgcctcccaatttttccaacttttaaaataattttttaaataagaatgataaaattaaattctttcaagtacttatggtagagagggtatgtgcacttatttacattaaatcccctggataattgaattatccatatcccactgagctcctgattaacaattgtcccatgaatccttccttatagaaaagtgaatgtgaccataattccctattttgttcaacttttcttccatcccaccttgacattctatgtaattattttagtccattgataaaaacaagttaatattttttatactttattggccagcaggggatctctcaaaacaaagaaagtgttttatacattgacagttctagctgggatatttagaaaagaaagaaatgagcatttatttgtgcccggtaggcaggatggaaacaaagaggcccaagatgtggtaaagttaggcaaatttggtataaaacatgctagaatgatgaaactgaagtttaaccagacaccggtagg

SEQ ID NO: 61936 - DNA, 1004 bp, Homo sapiens
acccctttgtgatcctttcttactgccccttctctccaggaaaccactgatctgctttctgtgaatatagattagactgcattttgtggagttttatatgaatgggatcagacagtacttttttttttccttattttgatctggcttcttttggcataattattttgagattaatctatatttttttgtgttccttcccttttatagctgagtagtaggtatataccataatttatccaatcatccatttaaagcatttgggtttttccagtttttgtctattacacccaaagctgttataaacatttatgtacaagtctttgtatgggcatacatgcctgcatctttttaagtgattctatttattttttaaaaatgtagaagttctgggatctagtcctaggtttttctctgaccacttgcgtgatcttaggagaggcatttaactttgccttcagcatcctcaaggtctttgctgtgattttgagtcatcactgccagaaaccaagatggtctttgttgatttgatggttagagaatttcagaaggagagagacgggtcaaatttttcctttctgtttcttttgaaagctctattttctttcatttcacttttttcccatgaatgacaaatttaaatgctgacgtataatttggggcaagaacagaagtggttagataagtaggaggaagagctaatagtggttagataagtaggaggaagagctaatagtggctgaacttaaacatgtctaaatcataggtggaaggcaagaggtgggaaataagcaagctcagaaattttgtgtctctttctttttctcaaactatcctcttctaagtcttgccttttgttatttctccatgaccaatttgtttttaactttggggttaggaggtgaatgggtatgctggactccaaaggtcatatatcaactggaggtggtgggtgggaggtttcttagttaaaagtaattcctttgggccgggcgcggtggctcacg

SEQ ID NO: 61937 - DNA, 1109 bp, Homo sapiens
aggttcagagatcatcgttttgtattgttttcgtagggttattttggagccgttggggcactgttggaactgttcaaaatgactgatgacaagtagagacgagcagtggaggaaacagcctcccaaaaggacagagaactaaaaaattgctgctggagaaggtgaaagtcgctttgggacggaagccaagccattatggcagatgaacctgctggatttgtaaataatttaaaatccttccagatgatcttttactcttaggttttgagctaatgattcaaaacgggggaatataaaaggttttttttctgtatactgtatttttttaaaaaaatggtgcagcgtggccaaacctaccaattgtatgcattaactttgaaaagttgtttgatgtttaagaaggacctgatatgtaagcgctggtcatttttcttctggggtttactgatcagtgtggtgattttaacttcatttagtaattactctaggagattttaccttgacttatatttttcatgacgtttcatgatttgctgttggtttcaaatgaaactacaaatctggcatgttttactgtgaacacttttgttatttgttttgtacccttttttgtcttgtttttctgttttagttgtcttctgaaaaaagagtcgttccctctgtttctgtcctcagatgatgtccctccccctacctgtaacctttctttgacataattgttcatatcaatgaaggtgctgaccagctcaatacaaagttaagcacaagatctaaagctcttgaaaatgcccgtgaagagaagactgaatgtgttaatgaatttaatgagtctggcaaaagttgcaaattatatgcaagtttgtcctatcgcttataaatgtagtgtttcattggatttattttatgctaggttatattaagttgaaatagtctgtgattaaatgtcctcatccatgcacagaatatgaatggcagcaaatctttgtgcaagaaatttgaaacttattgggaaaagcctcccagtagattaattgttcatatcaggagatttagggtaagtcatgggttgaggtgtcagatagtaatatctatttgttttgtacatgtat

SEQ ID NO: 61938 - DNA, 1170 bp, Homo sapiens
tggtcagtttttcctctaggattgaagcagatccgtttctttggtaaagattctgacaaaaatagttagcaattgggatccaggatgtatgcaaaaatatatatatctatctttaaatattagtataacactcagcttggtgagatacttgagccctaggaagcacacaggaattgagactgccttagggaactgcagaatcctatttctcatctcactcaattctgagtggagtgcagtggtgtgtgagcagagccttgggcactcttttgattgtaaaattttctctgtctgtgccaccttttaggcacatatagttgaattcaaataaattgaatgttaaatgcacatgtagatatgataccactgcttttgcttatttaatattcaaaaactgaacacttctttgcacgcatagcattcagcagcactctttctttctgtcctttagcattcccatggtttggcatggacatcggtggaacgctggttaaattggtgtatttcgagccgaaggatattacagccgaagaggagcaagaggaagtggagaacctgaagagcatccggaagtatttgacttctaatactgcttatgggaaaactgggatccgagacgtccacctggaactgaaaaacctgaccatgtgtggacgcaaagggaacctgcacttcatccgctttcccagctgtgctatgcacaggttcattcagatgggcagcgagaagaacttctctagccttcacaccaccctctgtgccacaggaggcggggctttcaaattcgaagaggacttcagaatggtaggtcgggtttgtctttgttaaaacatcaaaacctctcacatgtccataatcatggccactcataccgaagaaccatactactagccttgggactctggacaagcttatgtcaccgctctgtgcctcagttttctcacctatacaagaataaaaacagcttctacctcatagggttgttacatgtaggattaaatgagataatatgtacctggcacttagtaagtgctcaatatagttatcatcatcatttcaattacaattattgctgggtaatacgctaaagacaagatgctaaaatcccttctgaagtatttcagttagaattgaccacagacttttactatataatcgtgatgccaactt

SEQ ID NO: 61939 - DNA, 1870 bp, Homo sapiens
cattaaatgatgtcctacaaagtgattttaatggttaaattaaatcactttgtgttaatgaataattatttgattatttgtttaattagccctctgttgttgtacaataaattagttttcttattataaatacaacttcaatgttttaagttttttttttttttggaatggagtctcgctctgtcacccaggctagattgcagtggcacgacctcagctcactgcaagctccgcctcccaggttcacaccattctcctgcctcagcctcctgagtagctgggattacaggcaccagccaccatgcccggcaaatgttttttgtatttttagtagagacggggtttcaccatgttggccaggctggtctcaatctcctgacctcgtgatccgcccacctcggcctcctaaagtgctgggattacaggcatgagcaaccacgtctggcctattttaagtatttttttaaagctaaatttttggatgcacacataatttcttttagggtaaaatagaaccaacatatcaaagggtataggaatctggagctttttaatatgtatttccaaataaacccatagaaagattataccagtttacattcccagtggtagcatatgagcttgtacccttgccaacactgggtaattaccttataactaaaattcaaactaaggaaatctggtacacattaatttgaaagaacccatgactcaaatttcttttcatagagtaatgttcaacagattgctctgtgtgtgataattatgggtttctttacagtattagggaaacacttttattaaattttatattcactactttcttcaaggtccttaaatagtcattaagttttcaactgtgtttcatgctattaaaagtatggttttggaggtctttgcatatgattatttaggatgatagaatgtgagaactagacagaactttagtgataggttaatctacctccatttaaagactagtaaatgggccagatgcagcggctcatgcctgtaatcccagcactttgggaggccaaggcaggtggatcacttgaggtcaggagttcaagaccagtctggccaacatggcaaaatcccgtctctactaaaactacaaaaattagcaaggcgtggtgacacacccctgtaatcccagctactcaggaggctgagacaggagaattgcttgaatacaggaggttgaggttgcagtgagccgagattgtgccactgcactctagcctgagcagcagagtgaggctccatccccctaaaagtaaaaataaagacaagtaaatagctcaagtaagaaacttgcccacacaaattctgactgttgggacattctcggttgtaagcaacagacacctcacctcagaccagcctaccaaaatggggatttattggttcatgaaactgaaaatgggctcagatacctattgtgactaaccttggacaattccttgatctttctaagtcttggttttcttatttgtaaacaggatgttagactcaacctaacgttccttccacctcttaacattaaatgtttctgtgaatatattatcaaataattttgttatactatcaaccaaatttgtacattgtgaaaggaaggttagttctcagagacaggaaatttttaaagagataattcattacacaattggatttaacaaggattttttttttttttatgagacagagtttgtgctcttattgcccaggctggagtgcaatggcacgatctcggctcactgcaacctccacctcccgggttcaagcaattctcctgcctcagcctcctgtgtagctaggattacaggcatgtgccacaacaccaggctaattttgtatttttagtagagac

SEQ ID NO: 61940 - DNA, 1023 bp, Homo sapiens
tggcacacctgcatggtcaaaactgtggactcttcttttttgtccagggactacttctgatgaagaaagtggcataattaaagctgaggacctcacgcctgtaatcccgccactttgggaggctgaggcgggtggatcacgaggtcaggagatcgagaccatcctggctaacacggtgaaaccccgtctttactaaaaatacaaaatattagccaggcatggtagtgggtgcctgtagtcccagctacttgggaggctgaagcaagagaatggcattaacctgggaggcggagcttgcagtgagccgagatcacgcagctgcactccagcctgggcgacagagcaagactccgtctcaaaaaaaaaaaaaaaaaaatgctgaggaccacacagaaagttgatacttatactcatcttctattgcctctagattgggcagaactgacagcttcttggtgagaaataggagtgatgaccatagctgtctgtaagtgtattttcctcccacctcctctgcacagcgtgagaacttaactgtggaatgggaaacaaatttcatctgcctaccatttcctctccttaacccctgaagcagaaatacacagcttgactgtaggcatgaaggggagaaggtgagctcactggtccctagagtgacgctcatctttctctctgattttcttgtaagggtgacatggagaggtttcaggaccttgggaaagaaaccactctcactgagctactcagggacttaacgaaaagactgaaggaaaaaaaattttattaacctcatggatttgacatttttgggtctcctcatctctagcttcatcttattcctgcttcctcctggcccagatccaagctaagaatacacttcatggtgctaccagaatgacatggcttcctttgcccctgcaagagctttttttttttctttttttttatcttaacctacaaaataaaataaaagcaacagagctttcatgttggtgtttctatttgttgttctaatttcacatg

SEQ ID NO: 61941 - DNA, 1018 bp, Homo sapiens
tgctaaatgatcaaccatgtagacatttaatattaatatcattgctgttatttaattacagaggcttccaagactctgaaataccaggatttccacaaactcatcttgccctgactgggaatctttcggagattggatttcagagtattccccaacctgatcggatatcacctcctcaatggaagcttccctaataccctctgatgtttctagaagcaggacacatggcttgtgtcataagtcttgacctgattatcatagattgcctcaccaagtttagcataccctgtctgagagtgatgctggcaaattagtgaataagaggactgtggaatttatttgattgctaatcttgtgtcaggacatggttattttttaaaaaagaagtgtcctcttttgatcttaactgtttgatatctcagcccttgagtgaggcagttatatgcaaaggagatgagaaggatgagaaaagtgagtacttttccttcataaaagccacatgaattgaacaagacttcagaattcagaagaactacatcaagttcttgggtcatttttttaacccattctccaagaattgaaaaaatgaccttgcaaatatgtgcaagactctggaatcttcctttggcagatgatgaatgagatgaatatttccaggtgcttgccttcagcaccagcacatgtacattctagtactcttggccttgatcctacactgaatctgagggtgcaaggactttagatagaggctcaggacagactggacctgtatgaacttctgaattgtagctagcctgggcagccagttacttggatccctctggggcttctggacaaacaactcttttatagcccaaggtagatggtcaggggcgaccagagagagcaatagattcgttgacttcaagcttaacatgagttagcagtatggtgaggcttccagcaaaatgtaagcactcaataaatgttagctattattactgtggtggtgttagatgttcttccttatactaactca

SEQ ID NO: 61942 - DNA, 1042 bp, Homo sapiens
caaggtaaaactgaagtgtttttgttttttgttttaaagataaagagacttggcttaggctaaattgctatataattgtatataatgaactatacattttatgcttatgcaacttagattttaaggataagactcaaatctcaggtctggaaatatataattggatgtaaagagatcactgtagtgttattaaagttattattactatatttttattaaagttattattaatatatttttaagaaatattcttttcaaaacttaggtgaatacttgattccctggtacagatttctatcttgaaaactttctggtagtaaaactatcaaatgtatttgtgggagtggggatgtggcacctattttaagaatgaatcttttaaatttttaaacagtagtgttgggatggaacacactattaatattaacttgaattttctaaaaagagtttttaaaaaatgtttgcttaggtttttggcccagcaactacacagaaggaattctttcagggttgcattatgcaaccagtaaaagacctcttgaaaggacagagtcgtctgatttttacttacgggctaaccaattcaggaaaaacatatacatttcaaggtaaatattgttttattttggttggaaaggataaggaagcaataataatcactcagtgtttttataatacatacatgtagttatgttgctattacctagtatgcgtttgctctatttttaatagtactagcatattattacgtattgctgtttttttttttttttggcgggggagggacagagtctcactctgttgcccaggctggagtgcagtggtgtgatctcagctcactacaacctctgcctcctgggttcagatgactctcctgcctgagctgctcagcttcccaagtagctgggactacaggcgtgcgccaccatgccaagctagtttttatatttttgtagaaatgggggttcaccattttggccaggctagtctcgaactcctgacctcaggtgatatgcccaccttggccttccaaagtgcttgg

SEQ ID NO: 61943 - DNA, 1003 bp, Homo sapiens
gatttagatgatgattaaaatccagaaaaagtattgatgtgatacagagaattaagcataaatgaccagaagaaattttatatttcattttacttttatagtttgtgattatgggtggttacaaatcttaatatggttgcattatctgaatgtaaagtttcatgtttacatcagaataatagtcaataaaatgttggtaatactgtgaataacaaagtgatggaaaactgagtaatccttagctatcatttccgtttcagttgttgactcttgcctattggtagtataaaaggagctttaataaacaagtaaagtttcctctttcctagtagactgagagagtataacacaaaaattccttttgcagggacagaagaaaatattggcattctgcctcgaactttgaatgtattatttgatagtcttcaagaaagactgtatacaaagatgaaccttaaaccacatagatccagagaatacttaaggttatcatcagaacaagagaaagaagaaattgctagcaaaagtgcattgcttcggcaaattaaagaggtatggaaatattttagtatgtaaaatatgtataattcctgacttcttataaaccctttagattgtttcaccatatattggaatctggtttgtggtggtagtgttttttgttattatttatgttttcgagaaaaataaagcttaaagtgtgaagacatcttttgtatttatattataccaacagcaagaatgtttaaacaatacaaatgtaaatggttctgaaatcttttttgattgttgtagagccagcattgtgctttttatgtaatgattttttaaaattctgttttttaattgtgaaagtaatatgtacccaaaatttaaaatagggaatgtgagaagtaaaaagtaaaagtttcctttaatttcattcctaaagaaaaaattattaatagattgggaagtattgtttttggaccttttctctctctatataaaatccatatacaga

SEQ ID NO: 61944 - DNA, 2014 bp, Homo sapiens
gtgaataaattaaatgtttaataataagggaataattaagtcatttcacatgttttatatagccatcaaatgttgtaaacaatttttaattatggggagaaaaagcttacaacataagtgtggggaaaagaatagaagggaaatattttaaaatattaatagtaaccaaccagagtggcaggattatacatgataatattctttttcatagttctctgtatttttccatgaaactatattatttaactaggaaaaattaaagaattcattgaattgagtagatgaaaggttgtgatttggtagtgacttatttggataggtaattaatatcttgattatttaaccttaatgaaaatgtttttttaattttttaaaacaatcttttttttaggttactgtgcataatgatagtgatgatactctttatggtaaggtttcgttgctcacttatctttgatgtatcgattatatgaagtacacttgaaaagcttttaatttttaaatcacttctaatgttttatttttattattaaaaaatttttaggctgggcgcggtggctcatgcctgtaatcccagcactttgggaggctgaggtgggtggatcatgaggtcaagagattgagaccatcctggccaacatgatgaaaccccgtctctactaaaaataaaaaaattacctgggcgtggtggcgcgggcctgtagtcctagctacctgggaggctgaagcaggagaatccttgaactcaggaggtggaggttgcagtgagccgagatcgcgccactgcactccagcctgacaacagagtgaaactgtctcaaaaaaaaaaattttcaccttgtatttatttattttttttctatagacctcttctttggttactaaggatttaatttctataatgacatagtcggtgatacctggaaaatgatacatatttatatgaaatgtcagtcattgtgatgtttcgtttgtattaaatattacagatatcccttttactggttacaattttaatattgaatttgaaagacacttgtttttctttgtcctttacatttaatttctattggttcattaacatattttcaaaaagaaaggaattataagaagttgtctaactttggttaatccacatattatttacatcttcctttgttccaaaaagtttttaacatagatggtcaaaagattaagcatacttggtttttcaagtgtgagaatcgatttgtacttttgtcacgtttttagtcagttgcttactttcgtgattgttttttctttttcttttttttgtaggaagtttaactaactctttgaatatctcagagtttgaagaatccataaaagattatgaacaagccaacttgaatatggctaatagtataaaattttctgtgtgggtttctttctttgaaatttacaatgaatatatttatgacttatttgttcctgtatcatctaaattccaaaagagaaagatgctgcgcctttcccaagacgtaaagggctattcttttataaaaggtatactaatgaatatttttatcttattgctctgaagttctcttcctgggctttgtgatagctgtaagactaaaacaaatagaaaattgaaaattgtaatgctaattattaacattaagagaagaagataattttgtgctttggaagtatgttttggtatatttattaaacttgaatataaaagggtctattttggtattgtatttgcttgagtatcattaattggatttgtggtgatgggaaaagctgtgtatggttatgttcacgttattctcctgctttgtaacagtgtccaaattttggagctatgaaatgttactattcttccggagtggtttttctaaccttttaaaacaattattcacagtaggaaacacatattaataacatcatgattcagtacctacatgcatgtatatatattcatatgtaatatttacaactcaaaagtttcgttaattatacttttactacaaggaatgcactg

SEQ ID NO: 61945 - DNA, 2378 bp, Homo sapiens
ttagcctggcatgatcgtatgcatctgtagtcccagctactcaggaggctgaggcaggaggatcacttgagcctaggaggtcaaggctgtagagagccatgatcacgcctttgcactccaggctgggcaacagagtgaaaccttgtctccaaaataaataaataaataaataaataaataaaaattaaaatactggtcatgattcaataaatctgattttatgattcactaataaattacaatcttcagtgtttaatagctaggtaattttacaggtttaatctgtactgtactttgccactctttttttccctgagtgtctaattctaaggaattgttactgtattcaattttccgtttggcagactctgttgacaaacatttattttgtgtgtttgtgtaatttacattctagaacattgttacaatcttctctggtgtaacctgaaatagctgagttgactccagctaggatgtgttgttagaagaaagatttcattatatgtcactaggaaaagactttcaaagagattacattgtagaacacattctttgtctcaataaattaatatatatcctctttattttttaaagatctacaatggattcaagtatctgattccaaagaagcctatagacttttaaaactaggaataaagcaccagagtgttgccttcacaaaattgaataatgcttccagtagaaggtaaagaataaactctgtaagagtaaactcgaatcaccgatagtattctgtgttaatttaaacacagctaattttacattaaagtgggcagtaggttctctcgtgttaaattcataaggcataaaaaacatttggtatacagaataacactaaacacgtttatcaatactgtttcctgtcctgacagtagatttattaatttataggaaatctctgaggtatttttactctttctttatgtcagtatctaagctcagtatttttggagttggtaataatggtggccttttctctgggtctttctcacttatcccctgaatactatataaatatactcagtgagggtataatctcaaggggttaaggaaggaagttttgatgggattgggggatgagaggcaaaggaaataagtttaagcagtgagataattaaagcaggctttttcttagagaaggagccctgttcccgtagtcagttgggcatgggacaatacaagatccggatctataggtcaaatgtatgctttgctttaggtatgtattcagagtattggctagctgtacataatatcattttaactaatattatcttttcaaacaaaatgtcgctttattataaatgatactattaatagaagttgaactgtcaggatataatttgagggatttagagctaggcaaaaggtgattttaggcatttgggtatgtaagtgacagtagaacactggcttgaaatatttaacagctaattggaaaatgcaatggtggactgtagttatactagggtataaataagattgatttgaatacttgtctctcctatttagaatgcagaaattaaaaatgataagataacatttgatctttgtatttcagtcacagcatattcactgttaaaatattacagattgaagattctgaaatgtctcgtgtaattcgagtcagtgagtaagttgaatattctttaaatttaattatttgtaattgttttgaagaacttttaaagtactttttttttcttaattcagattatctttatgtgatcttgctggttcagaacgaactatgaagacacagaatgaaggtgaaaggttaagagagactgggaatatcaacacttctttattgactctgggaaagtgtattaacgtcttgaagaatagtgaaaagtcaaagtaagtgtttctgaaagtgttattagcatattaaatattacaatatttaaactttcaacttttttgtttttagaaagttcttttttgatttttaaactgcttcttatgtaatgactgtgtatagattgtgattcaagtacttaagagatcttggattaaagacaatgatagaaatgtcagttgatgccagtaactcatcaggtaaagtcagtattttccatggcaaatctataccaatagacactgtaaatgagaagcttctaatgctggtttaggatctaaaaccactttattcttattaatgcattgtgtgtggttctagatgcaatagatttttacattaattagcattttaggctgagtaaatataaatcagccttcaccatttctatttagggtgtttcatgacatctcttatatacttgctctatactagggaacataacccagttaaatgtggttttctttataatttacatagtgggttattgttagta

SEQ ID NO: 61946 - DNA, 1147 bp, Homo sapiens
tataaattaatgagtatttttggaatgaattgtctgctctgccattcatcttgttcatttggtacttctgggtgattggaaaaccctctgctaagattaatactgaacacttagcccaggaagatagatttttcctctagtttacatgtgtaagtagcttttttcctatcagaatgttcttttagggatggtgattcctgtttgtatgtttgtttgaatagtttttccttaacacttgagtgttcatttgacttaaatttataaaataatcattttctagtggacagttcttgtcttttctgttttaaaagtcacattgaatattttaacaggtttgtgtcccagacactttaaattcctctcaagagaaattatttggacctgtcaaatcttctcaagatgtatcactagacagtaattcaaacagtaaaatattaaatgtaaaaagagccaccatttcatgggaaaatagtctagaagatttgatggaagacgaggatttggttgaggagctagaaaacgctgaagaaactcaaaatgtggaaactaaacttcttgatgaagatctagataaaacattagaggaaaataaggctttcattagccacgaggagaaaagagtatgtattaagaactcatacttctatgcttgtcttcttattctgaagttaaggttaaatcttaaggctctctctcttcagtttttttcaacagtacactgaagtttttgtgttcaactttatattttgaaaaatttcaaacctatagaaagactagtacaatgaatactcatttatccttcacctggattctccacttaccattttatgagtatgtgaatacacatcttttggtctgtacaatttgaaaataagatccagacataatgacaccttacatctaaatatttgaacatatttttctaagaacatgggcattttcatcatgatcacaagaccatgaaattttcatacccaaaaaatttaatattgatacactaatataacctcgtatactgtttgtattgagagttccccagtgttccaaatatgttctttatagccactttgtttttgtctacagccagagttaacacattgcttttgattattgtgtttctttaatcatttctaatctagcactgaca

SEQ ID NO: 61947 - DNA, 1011 bp, Homo sapiens
tgacagattagtaagtgggtgttcttagcaacttctctggtgtatgcaatccttgggctttagacttttacaggccacttttaaactcaacctttagcatttaccagagatctgatccttatgcttcccacctgtgaaatatggatgataccaagctcacagaaagttgtggattaaatgaagcaaatatggaactccccagagtagttcttgatagataataaatgcactaattaactttacttattttcttagtatagctaaacagtgagacgagttaccaaaggtctatttctaaaatgtggaaaggccaacctgatttttcagttaacaaatctttgcaaacatataattttcagtgagaacattatcactattaaaaaggacacagaattacaattgactaaatgtaaagttttattttttgaacagttggacggtatttctcttgggatatatttattcttttataagaattttatcatttacatgtaatagaaactgttggacttaatagaagacttgaaaaaaaaactgataaatgaaaaaaaggaaaaattaaccttggaatttaaaattcgagaagaagttacacaggagtttactcagtattgggctcaacgggaagctgactttaagtaagttatttatttcatgtccaggtaaaaattgagaattttatttagttttttagtttttttttttacttagtttactttttatattaggtggcttctgaattctgatctctttatacaagcttgaaaatagctgttactggtctggtgcggtggctcacgcctgtaatcccagcattttgggaggcctaggcaggcggatcactgaaggtcaggaggtcgagatcagcctggccaacatggtgaaacctcgtctgtactaaaaatagaaaaattagctgggcgtactggcatgttcctgaagtcccagctgctttcaggaggctgaggcacgagaatctcttgaacctgggaggtgtaggttgcagtgagc

SEQ ID NO: 61948 - DNA, 1173 bp, Homo sapiens
tatagctgtaactaatcccatgcatggttatttaaattttctctcttttttaaatttaaattttaattttttgagatggagtcttgtgctgtcacccaggctggtattgagtggtgcgatcttggctcacggcaacctgcacctcctgggttcaagcaattcttctgccttagcctctcctgccttagcctcctgagtagctgggattacaggcacacaccaccacgcccagctaatttttgtgtttttagtagagacggtgttgctgtgttggccaggctggtttcaaactcctggcctgaagtgatccacccgcctccgcctcccaaattgctgggattacaggcgtgaaccactgtacctggactaaattttcttttaatctagaatatacttaaacttagatgtttaaaacaaaaacacaaagtagttcgttttctgtttcttaatgggattaatttgtattttgaagggagactctgcttcaagaacgagagatattagaagaaaatgctgaacgtcgtttggctatcttcaaggatttggttggtaaatgtgacactcgagaagaagcagcgaaagacatttgtgccacaaaagttgaaactgaagtatgttaattgaagtatttaaaaatatccagtgaggttttggtaccagggtttagtgtaccacatcaatgatgagaaacaccaagatagtttagaattaaaacaatgctttgtgtgtagctttattataattaggcatgtttttttagaagtgtaaggcaccaagaatttaaatataatgattggttttgaaaaatttatacctctgttatatatatatatatcttattttggtattgcttgaatcattgtgttgtaggcagatagattcttttttgagatttgtcttacttaacatttttaaataaaaagaattttaaaggtgtaagagacctaagacgtcatttacttgctgttctgattaaaacaaaaatgtttatgtataaaaagggttgcccttgccgggcaactaccgtttcttactcttttaaaattttatttgtttatttatttattatagttttagagttagggtcttgccgtgttacccaggctgatcttgaattcctggcttcaagcagtcctcctgcccagcctcccaggtggctgagattacaggtgc

SEQ ID NO: 61949 - DNA, 1777 bp, Homo sapiens
ttactactaaaaatattttttgacttccatttattttagaccaatattattagaaaatgagcttctcaacaaaaaaagtcaaaacaagtgttaactttatgagtaaagctgtaaattttgttatatatatatattttttatgacagcgtctcgctctgtcaccaaggctggagtcagtagtggcatcacagctcactgcagccttctactcctgggctcaattactcctcttgcctcagcttcctgaatacttgggaccacaagtgtgcactaccacagcggctgcattttttttttttcttttttgtagagatgggatcttgctatgctgcccagattggtcttgaactcctaggctcaagtgatactgcctgcctcggcctcccaaagtgctgggattacaggcatgagccgtgctgtgcctggccttgttctatattctttataaattcttgcagtatagaagattcactgttgggatagagtgactactgtggagtggtttaaagtaatttgttagtttgatgcttcattctaactaggagggcattttctttttctgtcttcccccccccttttttttttaaagacagggtctcactctgtcacccaggctggagcgcagaggcatgatcatggctcactgcagttttccacctcctgggctcaagtgatccttccaccttagtctcctgagtagcttggactacagacatgtgccaccatgctgagggcattttatatacataaatagaattgtttgtaatatctgcattttaagaattagttgcaataactgctctgcccttttttgtgtgaaacaaatgggtagaaaataacacgtaagtggtgcctttgcattatgaaatgtacttaaaaagcactagctccttttcttctctgatgctatgccagttctttactatttagcatatgccacctatttttatcctgagttttagaagtggctttttctgaaacattaccctgttgtggttgaattagcagatttttttttaatgagtagggtgtgcttctagtgctatcaaaatcctttttattgaatgtaacagtaaagtgtcactagagcagcatatgtttcatagttattcagtgatacatatttttagatgcttagatatttattttcaatgttctttattttttcagaatcagattcattgattcaagagcttgagacatctaataaggtaatgctttaagttttattttgtcttgataaggtatttaattaacaaaggggtatgaatgatgactagatttgtttattttaaaaaataattaaacagtaatatagtctcttggtatgcatgggggattggttttattctgttattttttctgttcttctttggcttgagtcttcttatttcaacttgtatttatcctttcaaaaagctgaatattttaaaatatgatcagatataaataattcaagatcttggtatctaatatccagtatttaaagaacaaaaatgtacttagaagacattacacctactgtttatacaattcctatcttttcttgtattttttctacttatgaaaatagtagacactagttgtaccaattaccttaagctatataaatagaaaataaaaaatttcccataatgttcttcctaaatttaaaacaaaaccaaaccaacttgtttggaagctctttagactgttactttatgtatgtatttatagaacacttaccatttaccagatactccttcaagtgctttttattaactcatttaaatgttag

SEQ ID NO: 61950 - DNA, 1015 bp, Homo sapiens
acattgctttttcttctttccaaagaaaataattacacagaatcaaagaattaaagaattgataaatataattgatcaaaaagaagatactatcaacgaatttcagaacctaaagtctcatatggaaaacacatttaaatgcaatgtaagaatttaaccttgtgttatattaataaattagataagcatatgttttggttgaaaggaaataatttaaaatagcttatgcaactaagactaatttattgagaatgttgaattgcttatgcaacattgaactcaatttactgttttccaaatctgaatttttgagaacttagacgagggtgtttgacttctttgaacatacttttccacaagatacgctggcagtgctttgcatgtaaaaaggaggagaatatgtagcctttggacgtttaagcctcagctagttggaaggggagctttgaggagaaaggaatttaggtgtacttagaaaaccagattataatgtttcagggaactataacatgaaattcagtaaaattaggtttttccttagaagcttgtttttattatatgtattgttgctattgtttatatgcttaatagcaaggatattttttctaaaaagttatacactgtgacatgtaaagacttaaagggttgtctttcatacaaatttagataatttcatattcagttcagcttagaatgatcagcttgtcttttaatccatgtcttttaaaatggcttttggttttctttttttggggtaagctccttcaaattattcttttatttagaaatggtaaaatatatggtaataatgtagtaagctgagtaaacttagagccaaacatcttgctttgttgaaaggtgcttttttatgtcttttctatgaccaaaagaagcaggcgtggtatcttataaaaagtgactgttgagtttcctttgtatcttgatagtcaaactctaatacccaccaacattccctgattcatctgaactttagatgggcatttgataccacagg

SEQ ID NO: 61951 - DNA, 1093 bp, Homo sapiens
cttttcaagggaggcagtctgccttaaaaaaaaaaaaagtctaaatgacgtatctagaagctcagtttcaaagctgtctgtaggctgtatatctttgaatatatatcgacttaaagctaagggcaaaactatttttctaggagttgttaatgtttaagacaatactaatctttaagaggctttggctacaaaacaaaataaatagttgagttcatatttttcttttcaaagcacatttctgatgtgacttcagagatttatcttcttaagattctccagttatccccaaatgttacttatttgctagagccatcagttattttaggacgaaacttaagaaataacttagaaaatgtctcaacaaatttgaaaataaaatttttatggtacaccattgaaagtaatttatgtgatttgtacattttttgtagctttctatatgtgaattatttttaacttattttgctttaggacaaggctgatacatcttctttaataataaacaataaattgatttgtaatgaaacagttgaagtacctaaggacagcaaatctaaaatctgttcagaaagaaaaagagtaaatgaaaatgaacttcagcaagatgaaccaccagcaaagaaaggtactacttcagctgccagcagcaggcgtttaagaaagctaatttctaaaccagtaaatagaacaaggcaaacagaggggcattcacttgtctaaggaaaaatcttgagaaaatctaaacgtcttgaatttttattctggaaagttatacattttctagggatgggcatagttaaagcttttatcttaataaatatgcttttagaaattgtgcttttattatttctttcgcagtctatgtaataatttctgtgcttataatagttaaaactcattactttgattttataaatatagtattttctgcctaaatcccagcacattattttgttttctttgtttgcattctttattcatttggagaaaaggatattttacagtaagactttgagctaaatattattaataataaatgtattcaagctgtatttgtgataccaggagacagtctgatgaaagataatacatg

SEQ ID NO: 61952 - DNA, 3042 bp, Homo sapiens
aacttttatgcattttcaattagttgaatccttctgtacagattttcaggttctattaatagttaaatctatccaatgcacagtgtcgtcaacccatttgtcatcttgatcttcacaactttgagataggtggtattattcctatatcacatttgaggaaacagtcgtagtatgaagcagtttattaatggttacagctagtaaggctatattatatgaattcccaaagttttaacatgtcccttctaattttagctatgaaaatttaagatactccatttgcctattgctaatatagtaaaagccacaatataattgtagcttaaaactgttcgttaggatatggaatgtctgcctagggtttctcgtcatctcctcctctctgtcccatattgaaatgacaataaagatttgtggtacaaaatttaaataatactgaaagttagaaatagctggtaatgctactcagaggtaggtagctgccatcattttggtgtacttcctttgctaactttgtattaccttgtgaaataataatttttacataaatgggctcataccacatgttttaaaacctgttttttctttttttctcaacagcttatttcattttttttttttaattagaagtttacttttacatgttttgtatgtttgaatattggcttatatggtgactttttggttttattaaggtttgccagattaataacaattttcttatttttaaagggtctatccatgttagttcagctatcactgaagaccaaaagaaaagtgaagaagtgcgaccgaacattgcagaaattgaagacatcagagttttacaagaaaataatgaaggactgagagcatttttactcactattgagaatgaacttaaaaatgaaaaggaagaaaaagcagaattaaataaacagattgttcattttcagcaggaactttctctttctgaaaaaaagaatttaactttaagtaaagaggtccaacaaattcagtcaaattatgatattgcaattgctgaattacatgtgcagaaaagtaaaaatcaagaacaggaggaaaagatcatgaaattgtcaaatgagatagaaactgctacaagaagcattacaaataatgtttcacaaataaaattaatgcacacgaaaatagacgaactacgtactcttgattcagtttctcagatttcaaacatagatttgctcaatctcagggatctgtcaaatggttctgaggaggataatttgccaaatacacagttagaccttttaggtaatgattatttggtaagtaagcaagttaaagaatatcgaattcaagaacccaatagggaaaattctttccactctagtattgaagctatttgggaagaatgtaaagagattgtgaaggcctcttccaaaaaaagtcatcagattgaggaactggaacaacaaattgaaaaattgcaggcagaagtaaaaggctataaggatgaaaacaatagactaaaggagaaggagcataaaaaccaagatgacctactaaaagaaaaagaaactcttatacagcagctgaaagaagaattgcaagaaaaaaatgttactcttgatgttcaaatacagcatgtagttgaaggaaagagagcgctttcagaacttacacaaggtgttacttgctataaggcaaaaataaaggaacttgaaacaattttagagactcagaaagttgaatgtagtcattcagccaagttagaacaagacattttggaaaaggaatctatcatcttaaagctagaaagaaatttgaaggaatttcaagaacatcttcaggattctgtcaaaaacaccaaagatttaaatgtaaaggaactcaagctgaaagaagaaatcacacagttaacaaataatttgcaagatatgaaacatttacttcaattaaaagaagaagaagaagaaaccaacaggcaagaaacagaaaagtaagctaaatgttattcaaaatattttaaaatacacaaagcattcattttgctatgcagctttaaaaaagttagatagtcatacttaatctggtaaagcgtagcatgtatgatgagtgaagaacttgaactttgtccatataaacctttggaccataggttatgtgaaaagatcagcttataaaaatcatatgaaatattttctgaagaactcattcatagtttggatattccaaatttgtgaaaagatataattttgtaaagattgttaccatttcacatgtatggtcctaagcagttaatgatgcattaccatagaaaagtggtttatgttttttagattgaaagaggaactctctgcaagctctgctcgtacccagaatctgaaagcagatcttcagaggaaggaagaagattatgctgacctgaaagagaaactgactgatgccaaaaagcagattaagcaagtacagaaagaggtaggttatttgaaaagttatgtggccagtttatgataaagattgttttccttatatatcaaacttagacattaatcttaggattgaatagaacatttatccactttataatttttcttaaaattacaagaacagttacttcacgagagaaaatttagctgatttaaacaagctgaagaatgtccaacattaagagaaatatgtaccttatgaaagattagtctttttcttctttaagaattgctaaatgtaagtccttacaaaaaagtggaaagcaacttgtttacagatagtacttaggagaatgtgcagtatgattttttagtttttattataacttaatttttaaaagggaatgcaatcacattattccaaatttgaaatataatagatgtatacaatgagaaggaaatacttcccactccttcgagctgtcaagtttaccttcacagcatcaaatgttaccaatttctttctttttctgcacttctccctccttcccattttcttgtatgaccacttcattttctgtcgtacttagaccttctctaaagattggagcacttttttttttttttttaaactttgaggtagttacca

SEQ ID NO: 61953 - DNA, 1037 bp, Homo sapiens
tttaaagtttttcttgtattcctggattatattactcaataaactttggaaatttgaatcagtatttttctctcagaatatctttattgatttttccttggtaattatttccctattatgtatagatgttatgataattcttttttgagagaacttaaaaagtttgagattcttaaataatggaacaagaaattgagtttttcatatgcattcttcattagagtattaaaacattttctaataatttgaagctatagtgtgtttgatttgtagtatattaaaatctgtcatttttcttttaggctgtaaaggatgtgaatctttgaacatagttgccatgaatcttaaataacaaaaagcagttagtatttttaaaatattccatttgttttataaacattattttgtaggtatctgtaatgcgtgatgaggataaattactgaggattaaaattaatgaactggagaaaaagaaaaaccagtgttctcaggaattagatatgaaacagcgaaccattcagcaactcaaggtaaacagttttgtttttaaagatgatttaaatgcattctcttggtatattttagtgtacaaaaaggtacaaatttgtttttaataacatcctgttttgactttttctagaatctagaaataaattatttaaaattaaataggcaaaaaagaaaaaaaaaagataaaattaagtaggccagtagtgactctcttctaatgaatagactatggaaaagaaaaaataataacttcatagtgaagaaacctagcagataccactttaaccaagtgtttaagaataacattaccattagtcatattgatgctgtgtgcttcctggtttgatgtgaccagaaaggcacataccctctttggtattctttccctaaatttataacctcagactcttcacgaaaaaacattagacaaacccaaatggaggatgttatacttactgcttcaccagtatgaagtataaagtgtcagggtcattaaagacaagtaaagactggtgaatgatggtgaa

SEQ ID NO: 61954 - DNA, 2825 bp, Homo sapiens
aattaatagtagtataccaatgttaatttcttgatttttgataaatgtaccatggtagtgtaatatgataacattaagggaagctaaattctttggaactcttgcaaagctaaaattattttgaaataaaatgcaaaaaaacaaaaagagttgaggtcttacagcaaattccttttaaaaatgatatttaaaaggcaaaatccctttattgtatatggttattttttgcttgatatcaaccaaatggatgaggcaacaataaaaaaaatacatttgttatattattttcatgtttgcttttaaatgaagcaaactaatgaatagtcaggtataaatacatgattttaattcttaaggtaatcataataaagcattctataacaataggattcgagatctccatattccataatgattcactcttaagacttacaaagtgatgagatagtggtgacattagatgagattgggggtgaagtttggattacatgataagttacaattagaactgtaggatatctggtccccataatttaatcttgcctcttaaggcttatttttttccaatcttgcagctactttctaggtaaaaggggtggagagctcttttttccttcattttgagtttaagtttaccagtgaggaagcttttaatggtttttcttgttccttctatgttaaatacacagtagaacttcattttcccttgtttctgctttttgtggtttgtaagaaaacatttatctaaaatgttgagtaagtaaaataaccgggtcataacgtagattaaaagtataggctgggcacagtcgctcacgcatgtaatcccagcactttgggaagccgaggcagacggatcacaaggtcaggagatcgagactagcctgaccaacacggtgaaaccccgtctctactaaaaatacaaaaattagccaggcgtggtggcacacgcctataatcccagttactcaggaggctgaggcaggagaatcgcttgaacccaggaggtggaggttgcagtgagccaagattgcgccactgcgctccatcctgggtggcagagggagactccatctcaaaaacaaacaaataaataaataaataaataaagacatataaagtgtttttttttaatttttttaaattttaattttaatttttattttttgagatggagtctcgctttgtcgccaggctggagtacagtggtgcgatcttggctcactgcaatcttggctcactgcaatctctacttcttctttcccctgctctcaccctacccttttctccaagatgaaagacagttggaagcttgagactggtaccagctggtataccagctatataggagactgatttcaaacttaatattgagccctgttttcaagatccactgttaaatattgtgtttttaagttaatttgcaattaatttatattctttcaatttgtaggagcagttaaataatcagaaagtggaagaagctatacaacagtatgagagagcatgcaaaggtcaggaacaagtttgtacttctggaaccagaaaagttctcttattcccctcgcagggcatgcgatgggggtatgacttgcttcattggtgccctgcagctcaaacccctagggggagcatgcagacgggcaggtcttgagtgtgggctctgaccctgtggcagcatctggggttgagtgtttacagctcctgaaggccccagtgggcgtgttctacagggtgttttttcagcctagccgtccacaggcggcttgtgttaatcagctcaattagaccctctgccttattgcaaggacagagggctttctgtatcccgggattcttgctctagtgtactggaaaaatcggatcacacatgggcgtgtagaaggttttattgagtggagttagctctctgcagatgtatggggagccagaaggggatggagcgggaaggtggtcttgccctgggcggccggactctcctctgactgcccgcaaccaaattccgtgtcatctcacagtagatggcctgccagcatctgctggtatctgctggtgtgttcttccagtgtgttcctctagatgttcagctgcttgtgtgtgtgcctgccagggtctcagggtttttgtaggcacaggatgggggcgtggcaggccagggtggtcttgaaaaatgcaacatttgggtgtgaaaacaggagtgcctgtcctcactctgtgggcacaggcccgagggtggagccttcaccagggaccctgcctttctgtacccagcacttccctgcctgcctcccatatcacttccagtactaaaattacaaaacaggtagttgcaataacaactggttaacatttcctttgaaaattctgaagggaagtgagggcaacataagatgcagcttatcaaaagtgaaaagtagtgattctaatgaataatttgttaacttaaagcttattcttagaaaaataaaataagtagtcaaagcaacattgatttcttgtaatggccagtattttgtgaaaaataaagccagtcaaacttttatgtaggtcacaatgaatggcatagatttctggacgaaattgtgtaaagaataaacttcaaataaaatatctttaaaattaaaatgtgtattctgaacggacacttctcaaaagaagacatttatgcagccaaaaaacacatgaaaaaatgctcatcatcactggccatcagagaaatgcaaagcaaaaccacaatgagatatcatctcacaccagttagaatggcaatcattaaaaagtcaggaaacaacaggtgctggagaggatgtggagaaatgggaaca

SEQ ID NO: 61955 - DNA, 1050 bp, Homo sapiens
tttttctagaaaaagtaactacttgatgttaaaaaaaatagttcaaattgggattgagcttttttagttttaggaggtaaaggttttagtttgattggagaatattaacactgaaaataagtattttgccaaataatggtttttccccctaaatcctaagatttatgttcatagtaatagttagttgtatcggaatagtttaattgtattagaaattgttaattttacctgaaaaaacttttttccattcatccactcttgcaatcatccaagcatccatctttacaccaaatatatatttagtatgtcatatataccagtactgttgtagacattgaggatattgcgatgaataagacaaagtttctgtctatatggaactaatattctattacagttaataaaaatgtattttaattttagaagaacttaagaaaaattggatatctagaggctattaatttctaaaatgttctcccccgatttttagatctaaatgttaaagagaaaataattgaagacatgcgaatgacactagaagaacaggaacaaactcaggtagaacaggatcaagtgcttgaggctaaattagaggaagttgaaaggctggccacaggtaaaacaagattgcttacatttctctaaatatactttttcatttaaaaaaaaatttcctagatttcttcccttgttaaagtagtacgtattttcagtgattgataatggaaaagtatttggtgttttttgaatgtcctattacttgtcattttccactgtgatgaaaattgtttcactaaaattatatgcagtaaaggagtaaggacactgcatgataacttacgaattatatattgcaagttatggatgataacttgcagtgttccctagatgttaagagtaagttttcaactgagtttcacctttgtcaggcttttagcattatcttgtatgttgatctcaataaatactttgatttcattgctttcagaataccatcagagtttttctagagtatatggaaaaatataacatttactaataaaaatgtta

SEQ ID NO: 61956 - DNA, 2821 bp, Homo sapiens
ctatactgtgaatactattcattggattcctgagaagtccctgtagttcctcttcactaagaatttagtaagaactcctaaaagttaaactatagaatagcctcagttccatcttggtctgtgttctttatctgggctctactgatttgtgtctgtagcccatgtcaagtgtatctctacatggtataacttttgcatatgctttaaaacataattttatgtcttcaaatcagaattggaaaaatggaaggaaaaatgcaatgatttggaaaccaaaaacaatcaaaggtcaaataaagaacatgagaacaacacagatgtgcttggaaagctcactaatcttcaagatgagttacaggtatgactttatgtatgtttttatgtatgaatgtatctgtcttcattatatttctaataagaggagaattcagtattttatatttagtaattcacttagatatgggtgaaataatacctggcaaatgttaatatgtaaatataacttttcagtgcacattgaaatgacatggggaagaaattccaagatatagcctattaagtgccagtgaaatatagtgattgggtccttagttttatgtttcacatatttaattcataaaccactgcttctaatgtccttgtgcccatttttctactccttaaacttcttactcatcaaatactgctgtggagaaaatgaccatcaggagaattattttgattactttaaatctcttcaaagtttaattattggaatagaattgtatatctgaacacatataaaactatactatatagaaggtattctattttgtgtgtgtgtgtttttttcttgttcagctttaacatacaacatatgggggaaactttttttttcgtaggatttaccaaatactatttcattttgtacattttattagaagtggcattcataacagaagctgtaggattgaaggaaacataatagttttgggagattgtctgcctctaaattttttaaaattctggctgtgtattaaacatatgctgaaaacaaatacaaaaactactttttttgttacatattatatattctagaatttacccttttcattgtgaaattccaaaagcagttagaacaaaataaatattatgaaaaaagtgtatcaaccgtattgagaatgtttgcattaaaaagtatttgtgtattttgcattgttctaagatgatgtaatcacattagtgtagattataaactttgtaatcctggaatggactgccatactttgtaatatagtgattttagaagttttcttttcgtttttttgagacggaatcttgctctgttgccaggctggagtgcagtgacgtgatctcggctcactgcagcctccaccccctgggttcaagcgattctcctgcctcagcctcccgagtagctgggactacaggtacacgccagctcgcccagctaatttttttgtattagtagagatggggtttcaccatgttggccagggtggtcttgatctcctgacctcgtgatccgcccaccttggcctcccaaactgctggaattacgggcgtgagccaccgcacccagcctagaagttttttaagtggtattattatttttatttcaaatgaagttctacttgggttttttatatatattattaaatgcctctgaacccaaagaatctgtggtaccagtttgaaaattactgatcagcagtattctctgtccagctcttctggatgttcttttaataaatatcctgttgcacaagttattttttatttggcatctcgtaggcccaggaatattttatttttagaaccatccagttagaaatgaccaccacaaacaaagtcttttttattctcttggcatttaggaagatttgagtcagtttaactgtttcagaaatttgaattatttattttttcttaaggtcactgataaaagtatttaaatggacttcatagcaaaattaacttataaatgaaatgcgtttaggaaagcaaaccagttattttattattttttaaataatctgaagctttgatcttgtcattgtttaaagtgaaacattaaagtttttatagaggtgaaaagtaatggattgtatgaaaatgttatagaaacatgtattgactactttgtaggcatgcgataataacttataccatttatatatacaggagtctgaacagaaatataatgctgatagaaagaaatggttagaagaaaaaatgatgcttatcactcaagcgaaagaagcagagaatatacgaaataaagagatgaaaaaatatgctgaggacagggagcgtttttttaagcaacagaatgaaatggttagtaacaattgtatctttgatgtatttcacctactttccttggtgtgttaaatgtattgctggaattaacagtttctacatggttttctgtttttggttttttaaaggcaggttgtcatctttataagataacttctgagccaatttatcttgacattcactaatgttcttgttttaacttgtttcagttgatttagcatgttgggagaataccttattgcttcttactgtctagatactgaagtaaaaaatctcttccttttgaccgttacagagtattccctattatattttaaaactttctgcattttgaactgtagattctaatactgtgtacattttatcacataaagtcacctaaatagtttgtaaaagactatatatatagtagaaatgaccttcagttttacatttactagctgtaggtcttgtaatgattgtcttagcctgttctttttttctaattggcacttagtct

SEQ ID NO: 61957 - DNA, 1055 bp, Homo sapiens
aaatcacaatttatgctatattttataccctttaaggatatcactgtgggccaggcgtggtgactcatgcctgtaatcccagcactttgggaggctggggctggcggatcacttgaggtcacgaattcaagaccaacctggtcaacatggtaaaacccgtctctactaaaaatacaaaaattagccaggagtggtggtgcacacctctaatctcagctactcaggaggctgaggcaggagaacaacttgaacccaggaagtggaggttgcaatgagatgagatggcaccactgcactccagcctgggtgatagagcgagactgtctcagaaaaataaagaatattactgtggtttaatggtcttcagataaaaagctatgtatattaaaagatatagcgtccttgcttcagttaaactataatacatcaaatgatggtggattttactggagagccatttcagtataccagtcctgttcatacttagtcactttccctgtattggaagagaaaagagggttatgtagaaatcagagaaactgaaatagctaacttgcttgtgtataatctttgtcatttaactaaaatcttgtctgtatggtcctagcaagttttaaaagagaaattcttttttcatcagccagtgttaaaatttgggcctctatgtagtggtaggctaaaagctattaacctcttcttactgcagtttcttgattgaagggttgccaaacctaccatgtcctagatgtggagatttggcaagtcagatgaggtttctgatcctgttttctcctttttggaacaatggattaatgtgttgaaaatgcttcgcttttgctctgcaagtggcagttacatttattaatataactattattactatttattaatagttactattaatatttattaatagtattatttatttatatatttttatttatttatttatttattattatactttaagttttagggtacatgtgcacaatgtgcagtttagttacatatgtatatatgtgccatgctggtgtgctgcacccatcaacttgtca

SEQ ID NO: 61958 - DNA, 1051 bp, Homo sapiens
ggtatcagtaatacttatttttaaagtaacttgttttaagcttaaaactaattacaaactctctagcaaaataatttttcttcaactttcttttacttctttgaagagtagtatattttcaagctgatgtaagagcagaaatagtattaactatactcctgaggctctctgtcaggtaataattttgctgagtgaatattattcagcatagtttttctgctacacatgtaacacctttagagattgttttatggagtcttactagttaacttttgttttatatttatttaattttttaaaataacattaaaacactgagtttcatcatctagttggctttttcttgatccattttttttcaacgaagaaggaaacaccgagtgtagttctcaagaaggttaaaatataaatattttattaattttactattggcatatatccctcatgtatatttcagaaaagatttacagattgttgtagatacatcatgtagaaactttaaattttctaactgattttactcaatcttcactgctataataaactaagtacatgggcccccatgaaaatcatttatgcaatcctattttctttttttcttccacatactcttttttttttttttaattactaagttctgtggtatgtgtgcagaatgtgcagttttgttacataggtatacacatgctatggtggtttgctgcacccatcagtctgtcacctacattaggtatttctcctaatgctatccctcccctagccccccaccccccgacaggctatattctaatccagtgaagactccaaagagctccttactgaccactatgtgtggaggtagcctcatggtctcttttcactggcatcctatgattaccatctgtcttttccctgtcatggtgtctgcttcttatgacccttataacttctgctttgtaatttggattctgaggttcagtcatgatcttttctctgcttctcttcttgccccctttttcctgaacttttatctttggtacaactaggatttgcagcagttcaagtcagtga

SEQ ID NO: 61959 - DNA, 1058 bp, Homo sapiens
cattcctgacctctacccactcgtggccaataatatccccttctccctggcaaagacaaccaaaaatatcttcaaacattgccattgtcctctgagttcaaaattgccctcggttaagagtcactgttttaagtgataatgtagctttttacaaattttcttttttgagtctagagaaataaaatattgtcaagaaattaactggtgctaaaattcattatttttaggacttggtgaaatgtgaaaataagaagaatgctacacccagaactaatttgaaatttcctatttcagatgatagaaattcttctgtcaaaaaggaacaaaaggtgtgtcttttaatttgtccaaaattgtagcaattatccagaaatccagttgtgttcaattataactcatttatcttctctttcctatacatctgattcagttgaaatgtaacctttagcatttggccagtagcatctactttatgtgtttacttctgactttaacactctgcctgtcaaactctttttgccattgtctgacccttttatccctgtccttacatacttaaagtttcctacctgagaattcataacctgtctctggcctctttaattcagctgtggccataactatttccttctaacacttctcatcaacaataacaaaaaatgttttgtttattaggttgccatacgtccatcatctaagaaaacatattctttacggagtcaggcatccataattggtgtaaacctggccactaagaaaaaagaaggaacactacagaaatttggagacttcttacaacattctccctcaattcttcaatcaaaaggtttgcagaaaattaattaaatgacctttttttgttagatgttgggtatattttaatacctaattgatatataaactcaacagctgttcagggaatattatacttcaaataggcattgtcctatactaggtactgtgggaagaaacatgtaaaaggatgatagatctaggtgttcgctatgtagtagaagagaaaggcttgtatttaagtaactgatccagagcaggctact

SEQ ID NO: 61960 - DNA, 1011 bp, Homo sapiens
tatgatagtattggagggaaaagagctactctgattagggggctttgggaaggtttttatgggagagatgggatttatcctgtgtattgaaatgtgggcaggagtacactctctagggtgtccaagggtgagaatacagtcatgggttcttagtttctgtttttggttggggcaggaaatccccttcctcatccctgttttctgcttatcactagagacagaaactaaaaaccatggcttcaggccgctaaaagcctaaaacaaaacaaaacaaaacaaaacagaacaaaaacaacaacaaaataaggtgggttggacaagtttgccagtattagtattatggtatatatcctcctagtgtttttttttctgtgcatatgtaaacattatctgtttatgtacaatatgtcaaaaacacattattttcataaatacctattgagtttagctgcagaaacagtatgcttagtgctttttttcttgataatataatgtggacatattgatacctgtgtatatgttaagatatatacacatgtgtgcacatatgcggaaggaatggttttaacacaggtggagtatcagaaaaatgtaggaaatgttcatgcaattacaggcagcaatacacatctggcatgtagaatgtggaaggactatcttaggggtgagatggagtagtgggtttttgtgaggttacctgaatgacagcaataggatgaattagagaccagagtgaggggtatagggaaggaaaggaactagaagcagggggcagttaaattgaatcaaatatgttgtgtgaaaatactttttgtcgaaggcttaccacagacgtttccaaactttgttggttcacagtgcccttaatgtctcagtaattaatttccattttgcctctgcacccaaagaaccactagtagtctcatgcattagaacttaagaccaaacaaccactgaaaattcagcttctgaaaatccagattgcaaagataatgtcataatgaaaagaaa

SEQ ID NO: 61961 - DNA, 1056 bp, Homo sapiens
gggtaaattagggcatggtgttgtaagtaccattctgtcagtcatttttgagcatctgtttgattagtacctgatttcttcccttggctgaaaattgttttcttagttactatataatgtgctttctactttctaagttatacatttgttgccacgaaagatcatttcttaaaaattatttgaggcacttgtctccaaatattttagtaattattttaagttatatctgccttgaattcaatatggagtctaggttattttacttctagaatttgatagtgttgaatcttttacaaagtctgttttttaaataaatttttatagaagatggcatatctgtagtctaagtaaaaaaaattctccaatgtatcatttcagttactaagcacatgaacatgtcttactcattataaacaagcttttatttttattttcacttacaagctttgaaaaactatgaaatttttaatttcagattttaatggaccagaaaatgaaggagagtgatcaccagattatcaaacgacgacttcgaacaaaaacagccaaataaatcacttatggaaatgtttaatataaattttatagtcatagtcattggaacttgcatcctgtattgtaaatataaatgtatatattatgcattaaatcactctgcatatagattgctgttttatacatagtataattttaattcaataaatgagtcaaaatttgtatatttttataaggcttttttataatagcttctttcaaactgtatttccctattatctcagacattggatcagtgaagatcctaggaaagaggctgttattctcatttattttgctatacaggatgtaataggtcaggtatttggtttacttatatttaacaatgtcttatgaattttttttactttatctgttatacaactgattttacatatctgtttggattatagctaggatttggagaataagtgtgtacagatcacaaaacatgtatatacattatttagaaaagatctcaagtctttaattagaatgtctcacttattttgtaaacatttt

SEQ ID NO: 61962 - DNA, 1041 bp, Homo sapiens
tttctgagtagatagttgataattgttaacttggtatccttattgggggtcgattggtggggctttctatttcgccgtcttgctccaccccctcttgtcttttattttttaataatacagttggctttctgatttttttttcaggacacagaagattagacatagaaaattaggaagaagagagagcatctagaagccaaaacagtgacagttagaaaagaaatagaatttagacctagggggacattagaaatacagtttcttcattttacagacgagaaaacccagagccgtaaactttacttaattctgcaaggtcatacaaacaagatgtattgagctgttggtttaaaaaaacaccaataagagacaaaaaacacaaggtaaataaagcagaaaccttaagaattgttgccaactggggcttttaaatttaagaacatacatttatacatctaaaaggttttattgaattttagcattgttgacttgattattaaaatgatgaccctgagtcagtaaggcaagttatcttcgattcttgtttaggagctctacacattatatttagggaaattttccattaaagtcattatatcaacacagccttttaaaagcattaaaatgttttcattatgctatctagaaaaacatagttggtcttcattattcatagattctatatttgtaaatttgctgacctgctaaaatctatttgtaacccctaaattaatgcagtgcttttgtagttgtggatatgtgcacagtggcaaaaatttgaggttcccaatatgcacattcccagctgagattgaataagataaacactctaccttcttgtttcagctattatactgtaaataagtgtccctttctagaatatgcgttaaaatcaagccttgatccacaagggagtcagaatttgcagagtgagtcctgccaaattaaaaggacttgtgaaacaccttgagctttttacagatctacactaacaaagcataaaactaagcctacttaagttgaaagcaaccagctagtagt

SEQ ID NO: 61963 - DNA, 1040 bp, Homo sapiens
atgtaggcaccactacctgtcagtgccaggtacccaaagagagtttaaaatcccatttcctggtctccagttggttttctcctgcagtgccagaacttctgctgcaggcgaaaggaccctccattgaaagagcagcgggagctgtcactaagaggctttcaatctagacaagtaagaagaaaaggagtggagcagcttcatgcatcaaacaatacctcccctcaggtggcatgatcttgggggaagcctctttggacagggagggagagaacaaatccacttcatgctccctggggccttattgttgagttccagcgattgttaacatcaattatgctgtaactacttaatagcacctttgaaaacagggattgctggctttggaaaaaccctggagctttctttatctcctgttggtggaaaagatcaacactaaaattaagattataagtccaggagcagtttcatggttatataactgcttccaggcatgagaggtagatgctgtacacattttaggtaaattgaaaagctgtgggatgttgcagctgaagagatcctcaagattgtgacccccagtctgcatcatggaggcaggtgttgtgaaatgaccaagctaatttcctcatgtacaactgttaggtcctttttgggaaatgtctgtcgtctctaaggattagaggctggtgaaggttatgggccttctgctcacaactttctactaggttatgatggaagtaagtttcaggccaaattttgccatatatagtgacatttagtagcaagcaggcccccagatgatcagctctgatctttgaggttctctgactatatttggtatgcaaggtccatgagaggaaaatgtggcaatgtgtagctaatgttatttttttaaaaattttttaatttgtaacttgcatagttattttttgaaaaataaaaattatatgtatttattatgtgtaatatgatgttttcaaacatgtatatattgtggaatggctaaatcagactaattaacatatgcattacatccacag

SEQ ID NO: 61964 - DNA, 1005 bp, Homo sapiens
ttctagcttccagaactaagagaaaataaatttttgttatttaagtcaccctgtctgtggtatttgtttcagaagcctgagctgactaaaacaacataaaactcacattcatgaaaattgtggactccattcctagctgttgatttttcacctacatagatcagtagtgggtcatcattaccctgggcggctgcatcttcaaatccaaaacatttgaaaagagaggcagcatgagttttcattatgaaaatagatagtattcaggcagcagcaacgcggaggaaacgggaatgaaccgagagcgtagtgaccatcatgagcctccttaacaagtccaagagtgagatgaccccagaggagctgcagaagcgagaggaggaggaatttaacacgggtccactttctgtgctcacacagtcagtcaagaacaacacgcaagtgctcatcaactgtcgccacaacacgaaactcctgggccacgtgaaggccttccacaggcactgcaacatggtgctggagaacgtgaaggagacgtggactgaggtacccaagagcggcaagggcaagaagtccaagccagtcaacaaagactgctatatctccaggatgttcctgcacggggacttggtcatcgtggtcctgcggaacccactcatcgccagcaagtaggggccacctatctgtcgacagaactcactccgctggcctatgaagaccgctgccattggtgttgagaataatagagctctgtgttttttttctagtggaaaaaaaaaaaaggaaagaaaatagatagtattttgagtagaaatgtggctttcgagacaggctatttctttacaacaattttaattctagttctgactccactatatacaaacgatgtgaccttagtaagttacttaatctgtttaattctcagataattattctgtgaaatgggaataattgagtatctaatacatagagtagtggtgagcattaagtaaattaattcacataaat

SEQ ID NO: 61965 - DNA, 1044 bp, Homo sapiens
gcatctggaagtgtctaatatgagatgtcccagataatgtcatttaaagtagaaattgaacttgttcccatttctaggtcctaggccaactgcttggcagtactttacctcttgggtattgctgctgtaggcttataatccctgtgttcttcctctgagcatcttaagatgagaagctgctgttccttctgtgtcatcagatcttcaggtgttactatccagaaattccatattttactgggaggaactcaaggacatttggtgatccttggaaactgatgagcaggcgaggagatatgtgagggagtaatggaaccaaggatcagcagaaggtataatggcaaaagttgcaaggagtagggaagggaagagaacagcattagacagtcactcatcaaacatgcagcgctagctgctgcgtctaattgtctaatggcatgggggtcaggggagcgttgaatcctctcattgcagccaggggaggaccaagtgccatggaaatcaaagaaggaaatcctttgactattccggtttacataatgtttaaaagcaggggctcttgggagtctggttaaaaccatttatttttgttttgattctattaactggctgtgtgatcttggacatatcactaaacctcagttccattcatgaaaagaggataattagatatacctcatttgggagaattaaatgagatgatgtgggtaactcactgagcacagtggcaggtacagttattgagccaaaaccaaactactagaagcagatagggaaaaggaaaccctaatactccctctccaggttttcagagtacttccctgccataatttatgctaccacgacttaagctttctgcactaagaatagagttcattaaagcaaattctcttgtgaggagtggatagagaagagtgttgggaaccagccagttgacagtgttatgagaaagcaggaagtgtgggcttgcttcagccaagcaactggctgaggatttgttttgtacgtctgattattcattttctgtgatacggaaattgccta

SEQ ID NO: 61966 - DNA, 1972 bp, Homo sapiens
ctatatatttttttaattgtggtaaaatatacacaacataaaatttatcattttaactattttaagggcacaattcgatggcattaaatacattcacaaaattctgaaactatcacccatgtcaatttcccgaaagatttcatcatttcagagactctatccattaaacaataactctccactcccctctccccttagcccctgttatcctatagtctactttctgtctctacaaatttgcctattctagataccttatataagtggaatcacacaatatttgtccttttgtgtctggcttatttcacttagcataacattttcaaggttcatccacaatgtagcatgcatcagaatttcattccatttcatgactgaataatatgccattttatgtatatgctacattttgcttgtccatttatctcttgatagatatttgggtcatttacgtttggctattgtccataatgttgctatgcacattagtgtgcaagtgtctgtcaaagtccgtgctgtttattctttcagatatatacctaggaagggaattagttggtcatatggtaattctatgttaagctttttgagttaccaccaaactgtttttcacaaagcttgcaccattttacactcccattacaagggttccaatttctccatgtcctcactaattcttgttattttctgcttttttttaataatagccatcgtaatggtatgaagtggtatctcattgtagtagtgccataattttgatagagtaagagaagcaaggcatagaaaataatacgtatgcttagaaatatcatgattgactatatcccagaagatataatgtctgcttcccagtcctgaggtccaaatagagcaagttacttcaactcaactgactgttctcctctagtatgtgtgattgtgaagctcctattaaagaaatcacccaggagacactgtctacatatgcataagtcattcagaacacatggtgaaccatgggccatgttccttgcagactgatttgccttcagcaaattacaggtttggcacaattcagtaaggcccagcatgtaatagactccatttttggaaaagataagcattacaacccttaactaagcctttttatttaaaatacattctatttaaaatataggccaatttattatttattttttatcaattataagttcaagtttctcaagctaatattttatataaggagtaggtagagtttgcccattgctattatacatgacatatatttattttgtgcagaaatgagatgtattgagatatatttattttgtgcagaaatctatcgggaataatatataatattgttatttttattgatcttccattagcttttggtttgtgcacaaaaagttggttaaataaattcaaaatacctttgtctccttcttgcccaacactcagctactgatgtttgtatagcatctgaaacataatattccatgagtcacagagagtaggtgccccttaatcaaataggcaagcttttccagtgagataaagcatgactatgtcctaactttccttcattttaattagtttcttatcatctgataacacattgagatgtattatgtttttaacattattatctaggagagatcttactaggcaacttgacatgttatctaattattacagaagagaaagactacggattgagtataccaaaatgaaaaataactttgtagaaagcaactaatttgtacttaattcttattcagtaatttcacaccttgatcagtggtcttggcacatgtttttcatgaaggtaatgggaaataatgtacctcaaaattagtcattctctgaatgatattttaaatggtggagaagtcatgtggattcacttggctgtgaaatattccatgttaaagcaattttggccaggctacttagatctttctggaatattgattgccttttattttgttgg

SEQ ID NO: 61967 - DNA, 1035 bp, Homo sapiens
aatgatgctatctctgctcactgcaacctccgcctcctgggttcaagtgattctcctgcctcagccttccaagtagctggaattacaggtgcccgccaccacacccaggtaattttttgtatttttagtagagacggggtttcgccattttggccaggctggtctcaaactcctgacctcaggtgatccacctgccttggcctcccaaaatgctaggattacaggtgtgagccactgcacctggcccgggcttcttaatagcactactcggtgcctaaagataatggaacaatagttaccagtaactcagtaacttggtaatttaaatggtaagttacaacatagacattctaaactttgtaatctctgtaagccaatcttgaaaaactgacttgatgacaaaatacaaacataaagagatgaatgatgatgtcatgatgtgtggagtactggtggaatgtttgataacagagaccaaacaaaaatggggaattatgtctgtaggacagatcataatgctgtaagacttggcaaaatgaaataatcatataactaataaaaagtgtgaattgagggaggaatggtggaaggaagtataagtgttaatttccatgtctttcaaaggattgcattaataaatattaactaaacataaaataggttaattgaaaaggaatcctaagcacagtttacagaacaaccctatgtgttttgttttgaaaactgtattagtctatttttacactgctataaagatactacctgagactgggtaatttataagcaaaagaggttgaattgattcatagttccacatggctcaggaggcctcagaaaacttataatcatggcagaaggcaaagggaagcaaccaccttcctcacaagaaggcaggagaaatagagagagcacaggggaaactgccacgtttaaaaccatcagatctcataagaactctctcactatcacaagaatagcatgggcgaaactgcccccatgatcaaatcacctcccagcaggtctctccctctatac

SEQ ID NO: 61968 - DNA, 1035 bp, Homo sapiens
agactgacactagagttcacattcataaccactcctcaaatgtcctcctactcttgacatctagactcaggatggacctgtgttacaggaaggagaggttgttatatttaacaaaagtgttcaatttttctttttcagttggctattcagttgttgctatcaatcatatcgttgactttaaggaaaagaaacaggtaaaataatatttctaaagttaataagttcataaataagtatttgtaattctgtttgtattggtaatttggaagctacagattagaatatttcttaaatgcacccctttgtgcactactacttttctattttatatagaaacagtcgagctgatgcatatttatacaatgatgatttttgtgaggtaatatgacatagtgttcaggattcttaaaggtgatttgaaattaagttacttttcactgttcaaaaagtgcattgttattggctggactgtaatcaaaatatttagtcctttttattctattgtcatgggcttattaactactttctctcttaaacattactaataagtatgtatatttctctttaggccaacaactgtatcctgtagattatttcagtctaaaaattagttttcattcttcctattcactgatgtttacagttgcttctctatttagctttctttttaaaaataatttttaaaagtttttttgaataccagaaatcaccttgctttctttttaaaaaaaatgcatattttttctgagaacacctcgtaatttttccattatgccttgtgctattaatggatacaatctgcagtaactatttatcgtttgttgtaggaaattgaaaaaccagtagctgtttctgaactcttcacaactttgccaattgtacaggtaggtgttttgttgtttacgaagcataatatctatttattcagttaaaaggtacctaattattgtgctattctctagcttgagctgcaccttactctgagtaccagtcttaacgttttcctcaaggctcagctcttcaggaaacattctt

SEQ ID NO: 61969 - DNA, 1063 bp, Homo sapiens
ctttgggaggccgaggcaggcagatcacgagaggccatcctggctaacacggtgaaaccccgactccactaaaaattcaaaaaattagccaggcatggtggcgggcacctgtagtcccagctactcaggaggctgaggcaggagaatggtgtgaacccgggagacggagcttgcagtgagccaagattgcaccacagcactgcaacctggatgacagagcaagactccgtctcaaagaaaaaagtaaatggaggctggatccagtgccttgtgcctgtaattccaggactttgggaggccgaggcaggatgaccacttgaggccaggagttcaagaccagcctgggcaacatagtgagaccctgtctctatttttaaaaaataaaagtaaatggaaataaaagttttattttcttcctgctcctgaaattcatgcctttcctttgcagaggactgttgtagtgtcttgaggaagggagtgtcctggtgttacttgcagtatggtctggctccactggctttagaattacctgggatatttattaaaatgcagatcattaggccatacttaatgaatcaatggaggtagggcctggttgtctccatttttgatacattctttaggggagttttgtacacattaaagttgagtgccactgttgatgggcatctctctttttccttggtaagcctgattgtctcttcacaatttatcaaactgatacctttgaaagggattcagggaggaatatgaacccctacagtcctattccttttgtgccatagaggcaaagatgtgtatatatgtgtgcatttttatgggaatacgttttctttaaattgtcataggagtctctggccaaaaaaaaaaaaaaaaattggtatggacaactgatgtgaattattatgtaacctactagttttcagagaaaaccattataagattcttaaccccaaggctctattgggcataatttaatcttctaaaatgatatagaaagcgtttcattgtagtgtgaacattaacttttattttgtggttatctaaaagtattgattgaaca

SEQ ID NO: 61970 - DNA, 1059 bp, Homo sapiens
tgaagtaaaattgagggatgtttaattgtgtctagtctttcatgattggtattgcaatgactgtcattgtactaatgtcccctgagcctttgtagggtatatagctacgtaatatatttttagagtctctgcacttatagagacttctctataggagactccacttatacctactacatacctataagtagaattgttggtgtgtgcatttaaaattttggtagccattgctaaaatgcttttcaagaccttatactgatttaaagaccttttgagtgcctgttcattcattctcatgtcagcaaggtagtaccaaacttttttatctttgccagtatgatcgataaaaaatggtgaacagagctgaatttgtttcagctatcattcagagcttttcttcatccactcttattaaattttcagtgactcttttatgagttggacagctgtggcagttgggatggggcagattctttatgagccaagtatttctgccaaaacaacattgcttcccaggcttactaagttactatgactgtcttaaagctagccagcctctgatctctacttcctaaagccctggggttggagtaggagtgactgaagtggggattctgaagaaaaagggcaagatacggtattcctgtcattgccgaaggttggcaccaatcctataggtcattttctccactcttccttactctgccctttcccctggtacatgccactgatgttgtttgtcagcgtagccatcctggaagtttgaatttgtctgtcaagcctgtacacactagcattgtcagtaagctttgtttttaatgtaatacataacagccaaatatttttatcactataaatcaaataatggcaaaatcagagccaggtatgtttcttccagcagtgtcttctggcttgccctctacactagtaaccttttcccagctttatttttcttccctgattttccatttatcctgattttcttatctgtttattttatcttgtatgtggttttcataaacagtttcaaatctctttgagaagaaaatgcagagtatt

SEQ ID NO: 61971 - DNA, 1044 bp, Homo sapiens
tataaaggatatttcttaagaggatagctaataatcatgggtacttataacctgaacatcaattattaagggaacagagcagtcaaaaaagaagaggaagggaaaaaataaaaagcagaggatccttgaggcaccaggaagctaaagagagtcaagagggaacagggcatggcatcacatagacgtggtctatgcaaaattaaaatctgtgttgaagcatgcttattcacaaagagcccagagttacttttatatgaacctaataggatggccatgtgttcagaaaacttttttgtttctccctctgctatagaatttttctcattccccttctacatagttttctcttgttttcccatacccttcatcttctatctgtccattccttcttctgtcttaatttcctcccatttccatcataaggtaatattatttcacaccagtaactattttagtagcaaaaggtcagcacagctgttaactatttgctttgccagtcagatcctaggaggagttcagatgctattttagagtagtggcttccaaaaccctagtctcctgttctcaaaaactggtatccaaggagaaaaaaaagagtttagcaaatacagtcaaaattacatatccaatcctgtcagaatcagaagattaattttttttaagtttttcaaaggataattcccttgctcttttgcctctgtagaatcataactttctcaattttaattctctttggtgctaaggaattggcttgagaattagagggagacagtaagaggagaaaatggaaaattagtatgtgaaaattcagtgtggcaaaaattattagtagtagtagtagtagtagtagagacagggtgtcactctattgcccaagctagagtgcagtggcatgatcatagctcactgcagcctcaacttcctgggatcaagtgatcctcctacctcagcctcctgagcaattgggactacaggtgcatgccaccacacctggctaatttttttatgttttgtaaagttgaggtctcaccatgtttcccaggc

SEQ ID NO: 61972 - DNA, 1036 bp, Homo sapiens
aatcctgggcttgcagctacgtaactccagtctctgcctttgtcttcagtgtgttctccctgtttgtctctatgtcttcacatggccatcgtctcataagacaccagtcatattggattaggggcctaccctattccaatctgacttcatcttaactaattacatctacagtgaccctatttccaaatataagattacattctgaggtactgaggtttagggcttcattgtatcttttgtggatgaggacgcaattcaacccattatgcctagcaatcccactttagtgttattctacagatacactgaaaccacccaaaggctctcagtagaggtttggttaaatacatgctatacctctacaatatgatactctacaactgtaaaacagaggaagttatgagctgacttggaagagctttcatgtcaggacaacaatgcagcagactaccttttggataggaaagaaaaatagtatctcttcgtatttgcttatagttgtatgaagaaactctggaagaagacacaagaaattaataaaagtgattattggaggaagggatagggcagataggattggagatgcaagtagtactttttattgttttcttatgttgctttgtgagtcatgtggacaaattacctgtcttaaacactgaaagggtttcattcatttgaattgaataaagaactaatttttatgaaattaacagggaatcagtatattgtcccagtaatcagctccttactttcttctcgtctttctctaaggctttgcttaatacttggaattttagtaccaatgtatcttgattcaactgtcacacacctgtccttagtagcatctttatgaccattatttttcattagtaaagaaatgtgatcatccacccatgccagaacctttggtcagacatgagaacaaaagctaatcaggcaggcactgttaggaagaggctgttaggaacaatcatttgatgagctttaggcaatttgcatcaaaatggtcttacagcaagatcccaggtaatgagtc

SEQ ID NO: 61973 - DNA, 1029 bp, Homo sapiens
ctagcagccatagcagttcattatggcttatcatttgctattgctgtaagccaaagtaatatgttaaaccacctcattttaaattatgtcttaacttcaagcacagtggtttccctgtttgttttacagaaactagaaaaactgcttttggaattatctctacagtgaagaaacctcggccatcagaaggagatgaagattgtcttccagcttccaagaaagccaagtgtgagggctgaaaagaatgccccagtctctgtcagcactcccttcttcccttttatagttcatcagccacaacaaaaataaaacctttgtgtgatttactgttttcatttggagctagaaatcaatagtctataaaaacagttttacttgcaatccattaaaacaacaaacgaaacctagtgaagcatctttttaaaaggctgccagcttaatgaatttagatgtactttaagagagaaagactggttatttctcctttgtgtaagtgataaacaacagcaaatatacttgaataaaatgtttcaggtatttttgtttcattttgtttttgagatagggtctttgttgctcaggctggagtacagtggcataatcacagctcactgcaacctcaatcctgggctcaagtgatcctcccgcttcagcctctcaagcagcgggaactacaggtgtgcactaccacacctggctattttttttttttttttttttttcccttgtagagacatggtctcactatgttgctgaggctggtctcaaactcctaggatcaagccatcctcccgctttggcctcctaaagtgctgggattacatgagccaccacatgcagccagatgtttgaatattttaagagcttctttcgaaagtttcttgttcatactcaaatagtagttattttgaagatattcaaacttatattgaagaagtgactttagttcctcttgttttaagcttctttcatgtattcaaatcagcatttttttctaagaaattgctatagaatttgtggaaggagaga

SEQ ID NO: 61974 - DNA, 1054 bp, Homo sapiens
gcatccatagagatccccattcccagggtggtgtacctatattgccagtgcttcagatgttgggtactaatgacttatcttcacccttttccagaggattgtcctgggctgatgagagtcactttacctgaagatacctgggaagttttgtctcctctgaggttggcccatggccagtgactgatgcaggacattacagcctggcccactggcctcggtggtacaatttatgctcctgagcaccccatgggattacgctgtgtgtggatttctcctgaaaccacatatttgcctcttctgccctgttctgttttttctcattcccttatagaggactctcagtaagtcacttacacaagaatcctaatttgaaatgctgcttccaggagacctgacttagaaaattggacaaataaagttgatttttttaaatgtccagtaacatgaagatgctgaactttcctagtcatttagggggaaatcaccacaaatatatctggctgatcaggttgaaagttaaaagaaaaaaagatttataaagtgggtattttcaagatggtgtggagggagatacaatttgatgcaagtcttatacttttgatgtcaatttattcttcagaaataactggttaattataaagggtggatggataaggatattcactgcaacaatgtcttaaatgtgaaaatggaaacaacctaaatacccaataataacaggattaaataattcattgtacattaaaagaatactgtctataaagatgtctagaataagttgttcagttgaagttgtaaagctaaatacacaatacccataatgtgcacagaaataatcagaatgtcatgaaaccaggattattggtgatgtgttgcttcctttgttactcatttctgtattggcataatgagtattgggtgttcaagaggagggggaaggaagtatgacagatgttatggggaaaaagcaaagtacaacaggaagacaccttgggggaactaatagaatctaaggactcaaggatggcttcctggaggaaatacagctagaaca

SEQ ID NO: 61975 - DNA, 1134 bp, Homo sapiens
ttcttttaaaacattattagatttattaagagcctcctaataagacacacatatgcacacacacacacacacacatgtaatttagctaacacatttggtaagaaccttcgactccagttagaattgtcaatctagatggggacaactcattattttcacggatgccctagcaaccaggttctaattccccagaccacattctccttcacattgtcgggtcttccctcccggtatagcttgaatccacagccatccactgggcaagccgtggaggaaacctggatgttttaaaattgttgctgaataaaggagcaaaaattagcgcccgagataaggtattccttcttctccttctcccttcattcaccccctccccctccctgtcccccatccttctccacttctcccactcttccccctccccctcctccttctcccccacccgcccttccctcctcccccacccctccatctcctaacctcgcctctccattaaagtcatctggaggcccatgctgtgtgcaggcaccctagtgaccacttctccccctcgcacatgtcttggggtctgggacagcctctgtcctcattcctagcgaatcagcagcgttttccaattttccagttgctcagcacagcgctgcatgtggcggtgaggactggccactatgagtgcgcggagcatcttatcgcctgtgaggcagacctcaacgccaaagacagagtgagtagctggacacgctcgggtttcccaaagcttcattgcttttgtatttggaatcactcccccaagcctgggtgcccttgcaggacccacttcctggcctcagacccaccttgaacctgttgactctgcttctctaggaaggagataccccgttgcatgatgcggtgagactgaaccgctataagatgatccgactcctgattatgtatggcgcggatctcaacatcaagaactgtgtaagtactggaaacaagaaacaccgcttgcaagctttccaatttccaggagcatttcttaaataggtgaaacgactcccacaatggcagtatttgaggggtcttcgatggtctaaatgcccctgcccatttccccaaggacagtgtttatcttggctaggacccagttca

SEQ ID NO: 61976 - DNA, 1059 bp, Homo sapiens
ctggattgttcttgtctgacaagaatttttctactactggcagtttattctccagagcagccttcagaaacgtaggcacatccacaggttccgtctaaagccaaaataaataaatatatatatatatatatatatatagcatgagagttaccgtgagcttgccagcattcaatcaaaccctccacagatatttgctcccctgtagcacaacactggacatgtattactggaaaccaaaaaaaaagcccttacaatgatttcaggttctggttcctttacaactggaactttagttttcctgtattttttccttttcttcagttgaatgattatttcaaggtcttctaaattttcaagctttgatctttgttctagttttttctttttgagctaaaaaagaaattcgtatttcaaaaatatggtgagttctactgacaagcattctggttgtgtctaaactaaatctgcaaggtctgagataaacatgtgaacagtttgagcaaaaacattttttaaaaattatataaatctttgacttcattttagggatttcttattcagatatttatctgggagtctaattttcagctaattgccatcatctttacttctgttgcttgtagaatcagcccttgaccaattgaggacacgatctggtctctaagtgatgactttgtaattaatgccataagcaagtcttagatttttaaaggatttttaaaattatgctcaaaacttggtttaatttttgagcatgataaaaagaatctaacaataaatgttaagctctgaaatatcaatgtcattctctttcactaagcagagccttctaaaacagactgtccagggaccacagctaactaaagcaaattttatctgtgttagtaattaaggaaaattcacccagaaacacagattgtgtcaacacagatagcagacagttaaacaatgatctatggaccacagaccatgttattgagaaaaagagatctccgttgcttgggattaactacatggtgtgtaacatcaggaattcactggacatgtgtatctttcaat

SEQ ID NO: 61977 - DNA, 1050 bp, Homo sapiens
taatatgagcaaagtgcattgcctgtgcccgaaacatagttagcctcagcatatgctattattattctaattcccctgataagtattaatggtattactcccttagacttttcagttactgtggaaatgaatagctgaggtgctgacgaggtgctgatgaggcctagatacatactccactggacccaaaacaattgaaggatcttttaatacttctcagtccttactcttataattgtttgcaaagcattgtttagaaacaattccaatatacaatttctctgtattactttgtataaacaaagtcataatactaaattcctccttattattaaactgttcacatattgtgctttgtggaatcacaggatccatgccttatttatcagtgagccctttcacagcacttagcagggtacctggtatgaagtggatattcagtaaatatttgattgactatgttctttatagaaaaggtttgcactctactttgttttcttgctttcttgttgcaaatctgtaatacttacctattcttgattgccatggactaagaactgtggacaaagcaaagcaacacctgcccccatcaacaggaatgtacgctatttatatcaatacaaagtgcacacatatagggatatattcagttaataaaagtgattaatggcaacaattcctggacaatgccctagaataaagaatatagctttatcaaaatgataagaatgaattcaggatcctcagacctgttgcatctctctgtgcctttgtgagaaactaagcagcccacaaagggcactttgggagttgacctaagatgtatgcatgactaattgttcaacatctgcctgcctccagacagatcttcccatactgttcttatagtggagtcaggaagaaggaaacctaaagaaatcccagaccctttgtaccagctgcatggctgtggctagacatgagtgacagtacatgctgaatgatacgtaggggatgaaagacagggaggaccatagatggagccaggtgtctgactgaaccatgggatgg

SEQ ID NO: 61978 - DNA, 1050 bp, Homo sapiens
ccgctttgtttacctactcaagcctcagcaatggtgggcgcccgtcccccagcctcactgctgccttgcagttcaatctcagactgctgtgctagcaatgagcgaggctccataggcgtaggaccctccaagccaggtgcaggatataatctcctggtgcgccatttgctaagaccgtcggaaaagtgcagtattagggtgggagtgacccaattttccaggtgccgtctgtcacccctttccttggctagggaagggaattccctgaccccttgtgcttcctgggtgaggcgatgcctctccctgcttcagctcacacttggtgcacggtgcactgcacccactgacctgcacccactgtccaacaatccccagtgagatgaacccggtacctcagttggaaatgcagaaatcatccatattctgcgtcgctcacactgggagctgtagactggagctgttcctattcagtcatcttggaactgtccctggaagtattttaataacgattggtatagctgtaccaaaagacacagacaaaatgttgaccctggccataactgactgcaatgtaggctgggaaaaaacattggcataactgtacagtattatgagatggaaaaaaataagttagtgtacaataggacagccataattatatcaataatgtctaaaattaataaatcaagacggcagtttaaacatttaagaatatgcaattaaatgtcagaagaaattgctaaaattttaagtagtttgcctttgggagtgactggagaggtgaggcagggtattgctgtttctctttcttttcttttcttttcttttttttttttgagatagggtcttgctctgttgcccaggctggagtgcagtggtgtgattatagctcacagcagccttgacttcccaggctcaagcaatacccccatcacagcctccaaagtagctggaaccacaagtgcaattcaccacacccggctaatttttaaaatttttgtagagacagggtttcaccatgttgtccaggctggtctcaaacccctgggc

SEQ ID NO: 61979 - DNA, 1058 bp, Homo sapiens
agacgttccaaggaaatagaaacaagattttctttgtctggattcattttgccatttaggaaagagttctcctggttctcaagatgtttcattcattcaataaatattgattatctactaagtgccagacattggggaagtgaatccacatcagtgaacaaaacagacaaaaaatacgtgccctcacagagcttacattctaatgggtagagataaatatataacatttttacttttcaggcaatgagaaatactgtggagaaaagtaaacccagagaaggggaagagaagtgtcagatcacgtcattttatgtaattatgtttccttggatttccgtctctctaaattgaacccacagtccttacagtggcccagaagagcctgcgagacccatcctgtctccctgacctcagtcccatctgctcattctcaaccacactggcccccttgctgggggaaccttggacatcagcatcgttcctgcttaggacactttcctttctctctgtgtagtcactcatccttttgataactataagaccaacttccttacctgttttgtggtctttacccagatgccatcttctcactaatgcctttgctgacaccttgttttaaatttcagtcaccctccttacctacccctagtacccctactctcctggaggtcaccccaaaccactatttcagcatgaccattggcaaagcagcatcactggctttctctctagaaggcagacctgcctacgggctgcagagttcaagcttgtctctgtccttcgatcttcttgggagttttctgtaaaggccctgattagtggcagcaccatgggaatctccctggcctattcagtagcattgaatcaatcctgagtttaattagcagcaattgccaggatgacgttttggccttgtcataccacggggcagtacctcttaaggattggatgtagttttgtgcaatgaagagcccttcttcagatgggttatttctaccccatggtctttggctgagtgtgtttcgtattagtcttcttccttttcttgccaggccatt

SEQ ID NO: 61980 - DNA, 1026 bp, Homo sapiens
tctagaatagcaccctttggtagagataaaatgtgagccatgtgtataatttaaaattttctagtagccacactaaaaaagaaacaagtaaaattaattttaataatacatttaacccaatatctctaaaatattttcatttcaaaatgtaattaatataaaattattgagattacctgttcaggttatgtctgaagtctagtgtgtattttatacttacattacatctgaacttaaactagccacatttcaaatgcttagtagccacatgtggctagtgacttctctattggcagtccagatctagaatatagattagtattccccatcactgttcttgggtactggtgctgctttgactttaagcaattagcataactttactctttaatgtatgcacctttggatgcttgagccctacaactctttcatgagcagcctagcttagtatagcttctgggaagatagggtcctacccttagccttttggctgatccaggtgaggacttgttctgggcatgtcacatacctctctatttggtcaagcctggtagacaaccaaggattgccaacccgttgagtacaataaaccttttgaactacaaagatcagagctccatgtcaggatcaggcttttaaaatccctccactctcatttctttctttctttctttcttttttttttttttttttttttttttttttgcctctttcccaaatttcagagacttatctatcatccctgggaaaagagcaaataccagcaatgttctgaaggaattcagcttctctgtcttctacttcaacttggcataataaggcagtcctctcttcccaaagattattttgacttgagaagacatttagaaacccttttggggacaagaaatttgggaagaaggcaaagtattcaattgtacataatagctctaggccaagcttttatatctaagctttttctttttttaaggttttctgatactgtcttttacccacattttgtgagaattgtcatgaaggcagtgt

SEQ ID NO: 61981 - DNA, 1033 bp, Homo sapiens
tgaatagtaatttgaaattttgagaacttaattttatcatttgaaaagtatttggttttaatttgaatatatacttatttataaacgagtataatttatatatacacctataaataatttggaagtatttttatatattctgtccactttctaacatagtctaattactaattgtaatcatttttttggctaaatacagctagtcctgaatctttcatttggatgtcccaatgagcctagaaatcttaagctatgttaataagtttccaattttttttttttttttttacaaaatatttccattgctgagttggttggaacattttaaagatactaagttcttcttcaaaaactgttaggaaattttttaaagttgatttttgttttgattatcaatgtatgattgcttaactttaaaatcaactttgatttatagctaacttagttttgtttaaattatacagatgatacttcaaaagctgacaaaccgaaagtagatgaagaaggtgatgaaaatgaagatgataaagattatcacagaagtgacccacaaattgctatctgtctagattgtttacgaaataatgggcaatcaggggacaatgtagtaaaggtgagtgaacaagtactatggtatttttatgatcagtttatagtaaacccttgataatttgttgacaaattttctaatgcttcaaaatgtttgctttcaaagttttaattaacataattaaataaaatgccattctttgacaatcctatgcttagaaatggttactattcccacaactgaactgtcttgggccaatgccaccatctagtggctaatgcccagaatcacacctctgtttctccttttatacctttgctggaaattcatatgcatggtttctgttttttagagtggtgaccaacttagacttagagaatttcatgtcactggtagttctagcccttttattcattctcttctaattttatcctttatttctctatttttatttgcaactcaacaagatttccatgtcagagc

SEQ ID NO: 61982 - DNA, 1071 bp, Homo sapiens
tagatgagattattaaagtcgtgtgtcacataacaatgttctagtcaatgacagatcacataatctgaaggcagtctaatgccttttctgtttagatatgtttagatgcatacttagtgttacagttgtctacagtattcagcatggtaacatgctctataggtgtgtgtatcatgtgagcaataggctatatcatataacctaggtgtgtagtaagctgtactatctagatttgtataagtacactctgtgatgtttgcacagctacaaagttgcctaatgaagcatttctcagaaaatatcctcattgttaagtgacacatgattgtgtttataaagcaacatctgtagctgaaaagctgtttgtaagccagccagccctttctcctctactcctgtcctgtggatttggtactttccttaacagccttctatatcaagcctcaggccctgtatgtattgcctttgcctttataaacctccaccgtccccctcacctccgagttattatccttcccaccaccccaccactccccagaattaagggatgtcatgcactctctgaactctttggggctggtatatgtctcagttcatattaatttcttttgaaagggaaaagaaagagccttcaaaaggtgtacagatactattgccagagtagcaacttcttttggcatagtgtttggaaattaactatttttagttaaagttgaagaagagtagagaaagatcaacagaagatgaatgaggaagtaggtggagatgagaaagctctgagaagctttgatttccctattttttctcctttttttatagttttgtagttaactctgagtgaagaatcccttcttgagtggtaaaatgttatactggtgagctatatgaataactacttactcttaagttgatatttgtaacttggaggatatctgtgtgacattctagtgagccatcaaaaaacattttttgaaataatgaaatgaatgtgccctttttttttgctttagagactgcatttattcatttacttttttctttttttttattacactttaagttttagggtac

SEQ ID NO: 61983 - DNA, 1037 bp, Homo sapiens
gaaatttaagattcagtctgttcctcaatagaggttgaaagtaggaactcatgtattcaaataaaatttaaaataaggttgaaaatatttaactatatgttaatagcagaacaggtactctaagtgtttgtctgtttaaatatcttgagattattttatattataatcttacatataatctatgtgattatatcatcaaaaagaccattgaagcccacattaggtacttgtgaaataagatttttggttagttattgtaattactacgtttttctgctgtttgcaacgtttattgaattcgagtttaataaatgtatggtcagcctctgcctagagagtcaggtctattatttattaggttgaaataaatacatatctattatttaaaggttgaaatattttgagtatttctttccctcaaagaattcttagtgtttttccctgtgttctctatttgtacttatcttcaatctggaacagctggttgagtatcccactactattcctcaacacccccagcccactgtttgtaggctggccacattccaggccatcatctttagtgttctcctgtaggactcatagataacgtatacaaaactcagtaatagctgtggtccaaatttcagaaggtttgtaaagtaatgttctttaacgtttaatttagtctggagtttggtgtcgtattaaatacccagtaacttcttgatttgattctctaatattaatcattttgccattgcacaaaatgatgcccgttttttttctcatgaaagtcttaggttgtaagatttctcttgtatgagctgatgtggggcaaccagtgttttgaggattgacttttattattctatcaatgtgtgaaaatgtctgattaatttcatgtcatctcaagtataacgtgtcaagagcacaattattttacaaacaagagacttattagaccaaggaatttttttctatgttgtttaagcttttatgattacaaaaaaaaaaaaaaagaaaatcaggctgggtgcagtggctcacatttgtaa

SEQ ID NO: 61984 - DNA, 1079 bp, Homo sapiens
cacccttacacatagttatattctgatctttacatttttgaatatactgccaacccctaccacagcccttattcttcttacattggcttctagtgttttacttaatgtttctaagcaaccagctaaaattggcaacagtatattaaaagaaagggaaaacgattactgcttatcagttcagcacagtgttcataagttcgctgaatgaaccctaaatgatagattttcactgataaatatattttggcttttttcactgtattatgatattctgtattgcagaaaaagttgcatatgatagaacaaagatttgcctctatttataatgtcagtttgaggtctaattaatccctcatcaccatggttattgattttctctttttgaattatattttaagaatcatctgtgagaacaggcagaaagcctgtctctggaaacaatgccttgatattcagggacttgagaacagctgcagtctgttatttttcttttcttaatagctgaatgtcgcatcctgtagtttggttttcattcactaatctgagcaaaggattctgcctttctttctaattcaagttccattaacatagtgtgttaacattctgcatgactcttcagtttaagttaccttttcaactaaaaataaatcccatctgggcttctggtttctaaacttaccctataatcctcttggccttggcattactatttctcttatgtaagaatctctccactctcaggctctgccaaaatccagttcttttactaattcaaatttcactcttccacctcaacatggtattaataaaatgagtggatataaaactgtgtatatatgctctgtgtgtgaataagttaatttatatttgaatgaatctgtttgtatttaattgtaggtgtttatagccaggttgggaaaaagtgtgtgggaagggataagaaagggtaagtaagcctggtaaagaggaagaaaaactctataggagccacaaaaaataatagtaataagactggtgttgaagagaggagatgactatcatttatttattttctgctgctgagatgcccttttctttcc

SEQ ID NO: 61985 - DNA, 1068 bp, Homo sapiens
ttttcatttattcttgggatgtttgatagtaaataagatttttagtatttggattattaaactagaatggtaatattatgttaataaacatgttacgcttggattcttgttcattactctgtcctgtcgggtcaaggaaagtgaaattgttttccagttatataaaaattctgttggtcatcaaccaccaccatatatgtttgtgcatgttgtatgctacacataccagggatactcttactgtaatcttatgtcattgatgctctctagagttcttaaatgtaaaatcagtactactataagtgtcagtcctgagtcatcaagtctgattttaactattgaaacagatctgtaaatataattaacatataaacgtcacctaatttggtaatcctaattaccttactgttttcttttgcctacagcctcaagacgttcagaagacagtattaaagggaatcattaacagcctgttacgagaatggaaagggtaaactaatattttcaatatttagctaatcagtatagatgtctaacttacacatcatatatctttaacacatgtgtatgtattttactctcagaaaagattttagttgagttataataacatagatgagaaaagaattataagccatttacaacaaagctgtataacttgagatttgtgacctctcagtaggatctatagatgggcataaaaagatctgtgaattcttttaaattgtatgtaaagttttttctatgcagatatatatgcttaacaaaaatggaatgggtacttacatcagtaacctaactgaaataatgagcattaaatttagccttgggcttcctggtagccagagtgaaatttttcttatttctattatagggacgcctaaggccagctactaaaatatttttttctctcagaactaaatattagattcttatataaggaatcatgggcaatttaattggtaatgttttgaaccatgaatatgcataatataaaaatgtacttttaaaaatacatatttaaatttatattaaaagtatattatttaaataataacttccattaaa

SEQ ID NO: 61986 - DNA, 1804 bp, Homo sapiens
ttttaatcaaggaacacccaggttttttgcttttaattggatgatagtgattggtaccatttatgaaggcactttttatgaaggtgctttatatacattttctttttcgatactcaaaacaacccttaagatagagaatatcattcccattttacagataaggacattgagaatcaaagtgtaaggaacatgcctaagggcatatagctagtaagtggtagaattagccctcagacccagatctgtcttaactccaaagcccatgctcttttcactgtatagccgcagtgtaaatgaaagtctctgttaattaaataacaaataggttattgttattttataatctcaaattttgtttcctgaatttaccacgtacttattaagcttagtgtctttccttttacgtgttaacagaattttaacacaattatctttaatatctttttcagaatcctcagtttaataacacatctacgtatgtcatctatgctcacttgctacgacagatagctaccttagtggaagctgaccatcatttcctagttcactggtttaaaaagtaaatcattctatgatattaagaacttttatagtctcacagttttaagtttggtattagtaattttacaataaaatatatttaaatattttcaggtctttagaaatgatgcttatattcacaatgcttcaaaagccagttacaaaaatctactttagtactacataaaggataattaaaaatctgtttttaatgtaagtaaccaatttgtttgcacaagctgttgagaatttctgtctactgccttcactttttatatagcacattcctattattggttttttacgtatctcaaagatggtgactggatttgctcagacactactattttaatgtgtgtctttttattttctatctgtaaattcataaatttcaccattatttaaatggcgctttctccttacctaaaaatgtcattgtaaaatataggctagccatcaatatcaatttgtaaaagcataatacttttttcacagaactatacccacatgaacaatgacttctccatgactgataaaagtagaaaggcaaaatatttccaaaagaaattttaaatgcagtaaattatcattattcatagtagttatattctataatgtcaccacaaacatggaattaataaatacagaaccattgcttcaaggggaaatacagggttaggttcctgtgagcctctgatcacatttttgtcagccaatcagtatataactttgctttatgagtgttttttttaaagacacacttcatttaatagaagtcattgattcattatcattgaactcacggctagcagcactgtaactcatgcctgaatgaagcttctctaacatacatattttctctgtagggcacatcacaaccttcttgttaggaacactagacagcattttagcactacacttggccattttgaaattgcaaaatcaccaacaaaaagcaccaaaatgtgaaaaacatgaagctaaatggattgcataaaggacacttgcaaagagagagtattgagctaaaacaaggcagaacatcactttgacctcagctggaaatgtgcatgtcaggagactaacatctttcacatgtccccaaatgaccatgaaaacacaagtattgatttggggattaacaattaaattttaccaagtaggcaaatttggaaatatagaatctgtgaataatgaagactgaatattgaaagtctttaaaatgtttgttactaactttatagtaattttggtgtttatttct

SEQ ID NO: 61987 - DNA, 1857 bp, Homo sapiens
ataatttatcctcaggtcatgagatgttcaggagattgcatttaattgtagaggaatctgagtaaagagatacagtgtggatataagtaacctcaaaaccccagattagtttgtaaattggttaaactttccagggaccctctttatcagaattggcctgaaacatagaatgggcttctggacacatctcatttcacatctgaacactcagaactgaataagaataagaatttaagttctgggcaccctagtcccagatggatattttcttggcaatgtttactttacaaagatactttttccttccattttaatataattgtaatgtgttgtagatacaaccacaaaacagcgccaagaattattatgcatatttcactgacaacaacatcttttaatatagagcttcctctaacaactgtgccacaacactggtgtaccaagaatgagttacattagggttttaatcctaggatcctgtcaacccttgggtagccagcctgaacctagaggggaacaggagccctatggcaagtgatctctggccatgagcagcttcatctgttcatttcagtgtatcattcacaaagtatcatttctcttgtgcataacaagggaaaggttgagaacccctgtcctaaagtacatagtaaaactaatatatatcttactgagttcattgcattttctttttatttccaattttttgttagcattaatgattcaaaataattatataccagtactgaagaactctcaacttttattaacaattttgtcccatggtaaaagccatctcactttcagtttacactaaggctatatccattttcctaataatgccttttttctcagtggtcacagttgtaccacctgactatgctcagagggattccagctgtaactgatagattcactgtagtcactttgaatggcaatctaactccagaagtgtcattgctgccatattcattctttctaaatgcatttatctctgtgtagtttgtggcttttgtgcatagcatagaatgttctagcccaggaggggttattttcataacctttttataatgtgtaattacaaatacataccatttcctattaccacaccattaaatataatactaaatgtaacatacatttctgatttatttttattggtcttaaatatattactttactttttacatactgtagttattgttagattttttcatttctggaactcacacatcagaagtcaccatataatgatggattcttatattaattttgagcacctgggttttctgtactacttaaccaacacttctccctcctggttctggtattggccatgttgttcacaggtgatgatatacaatgaaattatttgtatagacaatgtaagtggttagcacacattcagaacctttgatgtagcttctgcagagaataaaggcattgcacatctagtaatgatacattcttcacatggctgtgagaattaaaagaaattatacacatacaatcattttgtatatggtaaaacacaatccaaaagtaatgttttatattgctacaaggggtaccttagattcccttagtataattttgttaaaaatacaccattttgctttttctttttttcacttgttgagcaggttttccttctgtcagtacccattcgttatttctgtagctgcaaaaaaaatcattattcagagagactcagagcaacagatgataaacatcgcaagggtaagtcagctataaaaacatatttatgctgactataatcagtatagtaaataatttaataaataatttaaatgtcttgtgaattgttctagcataatcaggaatgttaaaagcaaa

SEQ ID NO: 61988 - DNA, 1063 bp, Homo sapiens
cctgttgtgatcttagataaacttttctagggaaatcattgaatactatcaactaaaccactcctttttacatgactttttgtaatcaaggaattatattatgtaaaataaaggggaaataaatgaaagaggggaaaggaaatatgtgatactaattagaaagtcagtgttaaatctgaaagaagtatgcaaaaaatagactgatgcataattcagaactcatttgttgtcatggattttatgttaatgcttaacatttagtatgcatagcttatgggactagctgtttataacagcatcaccttggatattcgtttccctccctgctgttacaagaaattattgagccctcccatcattcctagtgatcaaaatataccagtaggcatctgcaatgttaccgtggacgacttatgtcaaattatgcctgtaagtataaagttattaatatcttgtcctttaatgcgaaatcatcttttttctacctgcacagtctctcctcctaatgctattcttacttttaaatatggtttccttctacctttataactcatctccttttttcatctagctttttctttccttagagacacatgtcacccactttgcagtgctcctaagcttttacaagatagagaggcagtaattcgaatccaggctctgtcacttactagctctgtgaatttggacaagttatttaacccttcaatttagtttctttatgtgaacaatgggatagtttttattaataatttttaaatgatgacaattatatcaaatctgtgccagcctagatttgtatgaaaatttgtggttttaaaggaatagaacatttattatgtaaaatatagaaaatcattctaatcatgctattatttacctttttctaataatttaaaataaaactttaattttttcataaaaattaaattgaaaattttgaaatattggatcaatttttctatttttaaatctttatttatggataatttcaattataatataatgtaagaaaatctttcttttttttttttgagacagaatctcactctgtcacccaggc

SEQ ID NO: 61989 - DNA, 1039 bp, Homo sapiens
ggtctgaatattgggcctacatctttaccagctctctatccctgaacaggttacttgtatatttacatgtctatttttcctcaccagtaaaatgagaacaaccacttttaagttgctttgaggctgaaattaaaggaaacaatgcatgtaaatgcactcagcacagtgattatcatagaccaaacactgagtaaatgctgattctagtagttttaagtcttttaattcagggggctctcaaaatttagttttaaatcttacaaacttctttaaaaatgttttccttttctgtagtgtattcacatttttattcattgatttctctgacagctgttctgatgctgtgaagttcataaagactgaaggaaagagtcttaagatagctgtaagaatcctaaatgatgataacaacactatcagatagtaggtgggggagatgacaccaaaaggattcagaagataatttttacatgtgcatcaaggggcatctactgtccccaaaatgctcttttttaaattactttttaatactaaaaaccggaataatagtatcattcattatattatctactcctcggctgctagatgttttgtgtatatcactcttttaatctttttaaccatcagtcctcaacctttttggcaccagggatcggttttgtggaagacagtttttccacagaaccagggaggagtggggagagtgggaggtggtggtagttttggatgaaactgttccacctcgggtcatcaggcattagattctcataaggggcatgcaacctagattccttgcacgtgcagttcacaatagggtccttgttcctatgagaatctaatactgccgcttatgtgacaggaggcagagctcaggcagtaatgctcgcctgccactcacctcctgttgtgcagcccagttcctaacaggccaccaacaaccatacccatctctggccctggggttgggaactcctggttattaaacaacctgattaggttattaaacagcctaattggatggtttaccctatattgttga

SEQ ID NO: 61990 - DNA, 2122 bp, Homo sapiens
aactttaaaatattaagtttttaaaaaatcaaatatgaagtatgttcagcaaaggcataattttctaaaaacacacacagaaatcgcttgagtgaggaaaagtccacatggcagagacaggtatggtccagttcctcttttatatagcactttatcattctccacaagtagtttgtcacaggcattccactgggaaagcaaagtacagtgaagaatgaatttatggtatagttgaacccagtggcagattgtacactgctagcactgctagcacacagtagcaaagcaaacagctacattatctttaacataaggcatgtagccatattttcatatagtggtatacaacacagtatcattgcaaatgcagtttacagggatttttgatatactggcttgggacctataagattcttctcagcagttgctgaaaagcatgtaaataactacataatagcctgagaataatgggattttgatagtgccatttattgttaaagatttatttttacaaagtaaattcagggttttagatgtgtacacagcttttacaaatcaataaagatgattgtacaagagtattttcagactaattggattcaaggttatattcttttaagtgttgttagtctgcatgcacattggcagtaaactagttacttgtgtactctgtaatatttgtataatgatcatttcttcttaaggctcaagatattagaaaagaaatcagacctaaataatcattgatgaagtatgtcagttacaagcacaaaagaatataactgcttttataaatcttttgaatcatgtacaagacttatatctacattttttgatcaccagttgtaccaaaacactaatttttgaaaaagataggttaaagtatttgacaaaagtgaatacaataataacacttgtgtcaaaatgatatagcttagtataaaaataaaattcaacgttttggccaaaatgtttgtttttcactggattctgaatataataaattcaaagtaccctttttttagagtttctaataaagtagtatgtaaaaagaaactgcattttaagtcagacagtaaatgttttttttaatttacagcaaatgaagcagttttattagcatgttacaaatattgccaaaccaagacttctctaccatactttaacagctttccttcagaaaactctgaagttatatttgcaataataatgaaaccagcatttagtaccagcatatggttcatatgcaaataatactttccccaaaatctttctgggctaggctattttcttgctatgcttcctgcacccaaccagcagaattcttccagggtggaggaactaatcagcttgttctccaacagttctgaagccaacccacaaatctttgaggaaaaggggtcactttgtttactattctcttggagatggaagtgattctgctcttccatttgggtatattatttcaagggtatttcttcttaaaaatcttggaaagcctaagagagttaaaggcatcctggttttgtttcattttgctctgttttaaatccatatgcaaataaaactgcttctctcttacactgcttgaactagaaaatcagctttttaatgtaggttaccacttataagcacaaaagaaacatgtataagaaaccagatttaagtgttttaaataaaatgtaaacagtttttatttggtagagatgactcatggaaaaattgtgttggcttggtctgcatgtttaatgatgtgcttgtatatcgattagctgtgtcacttttaaataagaagtccacacaagcaagccaaatttttagatgacgaagtccataaataactagagaatttttgttatctgttgttaagttgaaatgtataatcatttatcactaaattgcacattgcctttatttatttgtgctctgtttttggtttacagtgtaataatacctcatttaaaaaataaaaaccactactgttacattttattaatttaaaaagctagaaaattcatgtagttactttttttacatatataatctgttaatgaattattgatttttgtatctgccacagtaaattaaagcattacacagtatttatcagtattttttaaac

SEQ ID NO: 61991 - DNA, 1067 bp, Homo sapiens
caaaggagggcattgggaaattcaaaccaaacacaaatcgtggccacccagggagactgcctgggttattgctctgttatctagaaccacaagggaccaagattggggtaccaaaccccacactggtgattctgagcagggagcttggcaggctgccagctgaggtggatgaggagcaagcaggttgcaaaggaagtccccccaggatgggcaaatctgggcccacccatcttctgcctgccacccctcagtggaagcctggcagagagtggatggctgtcagaagatgctgatggccctgtggcaagccccagcatgttcccgttaaagatcaaaggaaccatcacagaactggagagagaagaccatcttttgctcaggccctagctcatcctgtgaccttggacaagtaacctcacagagcctccatgattcatccattaagtagggtgagtatatgtagtctacctcctttctggcactttaaatccttgagtccatgggctcccagggtctgtgtacatcctcctggaagttaatagcttttcctgtcgtttttctttttgatttcaataacctaaaaagatttccacacaccaactttggttcccccagaggaccatgttatatggagaactgggttagttagttcccggtcacccagaatcacaagatgtgtcgtggtttcacggtttcagacgcagcatttgtaagcatgccaaacaaatgaatgaaggtgggcttgtttcctacggctgctataacaaattactacaaattcagaggcttaaaaccatacaaatttattatcccacagttctggagatgaaaagtgcaaaataggtcttactgggctaaaatcacggtgtcagaagggctgcgtcccttttggaggctctaggggagaaacagcttcctgccttttccagcttccagatgctgcccactggccttggctggtgacccctttcctcatcttcaaagccacagggtgtcatcaactctcctgcctccctctttcactcacaagggcctctgtgattacctggggcccattcagataatcc

SEQ ID NO: 61992 - DNA, 1045 bp, Homo sapiens
tgacagggactgttaaagtcaaaaatgtgagttttgagaagaaagttcagatccgtatcactttcgattcttggaaaaactacactgacgtagactgtgtctatatgaaaaatgtgtatggtggcacagatagtgataccttctcatttgccattgacttaccccctgtcattccaactgagcagaaaattgagttctgcatttcttaccatgctaatgggcaagtcttttgggacaacaatgatggtcagaattatagaattgttcatgttcaatggaagcctgatggggtgcagacacagatggcaccccaggactgtgcattccaccagacgtctcctaagacagagttagagtcaacaatctttggcagtccgaggctggctagtgggctcttcccagagtggcagagctgggggagaatggagaacttggcctcttatcgatgaattaagcaacaatgtaactggtcttgacttgtcatattcccccatgcaatcctaggtctgtattgctcaattttaggaagcctttgctactccatcagtaggtttagatttgagcttttgagacctggctatggaaaagaaagacacttgagaatttagtgttggggtctgtacagatgatgctacccaatttggctttgaaggatcaagtaacaggttgaaaactatttttataaaggtaatactttttcagttcccttcttccttccctctcaatccactagctttcatgttgggcaaggaaaagttgaggaaggatggctgatggtgatggaaagctgtgttaatggtatgaggaatgtgtgaaaagtatacacaaagggctctgaagctcaagtcagaggagtgggaggtctgatcattgttggtggaaaaacgtaaggttattttgtgtttttaagttggttttacaattctttcctggggaaattatttctggaggggaaaaagatccattctacgtatccttgtggagaaaagctaaataacctttaagaatgtgggtggtattggagaaagaagatgaattatagctc
